United States Patent Application Publication US 2019/0348154 A1 - sequence listing, part 120

SEQ ID NO: 451172 - DNA, 1305 bp, Serratia marcescens
atggctacatggcaacttaccgggctaactgatatggcccctaaaaacagtaacgctcccggatcatcggttcccactcccatgcagtatcagcagcagcccaatttagggctggtggcgcttcaggggttgagaggtgttgctgaaataggtcaggcaacgcaacagcagcaacaaaggcaggacttccagaagaaactaggaggctttgtatcacagaacgatcgagctggtgctcaaaagctaattgctgattatccgcagtttatggatgaagcacagaagcagatggggtttattgatgccgaacaaaacaagcaaacagcaaatgctgccatgaacttacggctagcttctcaaaccaatgacccacgcgccatgcagagcgcaatccagggagcatcgccggtattacagcgatttgggctgacgcctgatgaagtttaccaatcctggcagcaagacccgcaagggtttagccgaaccgctgacctaattcacctgcatgctgatcccagcagctattttaacgttaccaaccaacaacaggcgcaaggaacatcgcaacagaacgctaatactgctcaattctcagcgcagcaaggagctagacagggagatgagcgcttagacctggatcgctttaaagttcagacagataaccaattacgcacaagagagatgtcactgaaagcgcggattgaaaacgcatcaaatagcctagagagggaaaagctaaacgctgagttgtccaaggtaaaacaggcccagacagagaagcttaacgacaaaataaacactgcggcgagtagtattgaaaaccttaaccaggctctaggcgttggcaatgagctatcaggtattgtaggtgagcacccctcagcagttagccgcgctcagggcggtagtgttggctgggctccaaactgggcagatgacaccaggactcttagcgcaaaggctaatgagtacaatacgaagatggtgctgccgattcttaaagggacatttggcggcaaccctactgaaggcgaacgcgcagcgctcatgcaatcagtaaacagccttaaatcagcaacaaacaacaacgatttcatgcgcgagctgaacaagacccaggatacgatcgtgcgcatgcagaagcgacaaatatcagacctcggcattcctgttaaaaagtccagcgatgaggccactgacacaaaaatgctattgcaagatccgtctctggttaaagaatacattacagcacacggctacctccctgagagctactaccaggccaaactgaaagggggcatgtaa

SEQ ID NO: 451173 - DNA, 699 bp, Serratia marcescens
atgaaattatttgatgtttttgaaaacagccgctgcggcaactcgaaacacatgaaagagagtcgcatgcgcaaaggtgggggggatggtggcgctggtgcgcaggcagaagcacaacaaaaagcccttgatttgcagcgtgagcaatggaatacggtgatgaataatctgaagccgtatgcagatgtgggcctgccagcactccaaaaccttcaatcactgatgacactagacggccagaataaagctgcaaacgatttttttggctcaggattatacaaatcacaagcagaccaggcgcgataccaacaactggcatcagcagaagcaaccggcggccttggcagcaccgctaccagcaacggcttagcgacaatcgctcctcagctctataacaactggctttcagggcagatgaacaattacggcaacctgcttagcgtaggcatgaacgcagcgtcagggcaggtaacggctggacaaaactacgcaaacaacacaagtcagcttctgcaagggctaggctcaatccgtgccggacaggctcagcagccatctagcttggctagagggatcggtggcgcagctacaggcgcgattagtggagcggcattaggcacggttctaccaggaattggtaatgggttaggtgccgttctgggtggtggtcttggcttactcggggggattggattctaa

SEQ ID NO: 451174 - DNA, 675 bp, Serratia marcescens
atgaagaaaatgactattgtatgtgccgcaactcttgtgcttgcaggatgtacatcaccaaaatacaactacacaccagctacacagcaaattagcgagccacctattggtagcaccaatactgcttatgtgggggactctttgttaaaacaggggatttctgcacaattggatgggattaaagttaccgctcctgcccgagtttcttggggatatacagtaaccccaggtgagttcaagaagatcggagaggacgggcagaatgagttttatatgccgactcttggggcatcttcggggggagtggacaaggctgtgctggctgatatgtggcaggcggttatggccaagaaaggatctcaaacgctgtgtgttataacggttttctccgtttcaacatgcgaaaatggcatgccgttccaacgtataaagttgaacatgagtgccgaaagcgatttccagcaaacattgctttataacggtagggttggaaaaaaaatcaatattggctatcgcgagtctagtaacagtatggcacgcccagccttcaacaatgacgtcgagtatgatctctctgagtcaaacgtcattggttataaaggggcgaggctagaagtattagaggctaccaatcagtcgattcggtacaaggtactcagtaattttaacaagtaa

SEQ ID NO: 451175 - DNA, 666 bp, Serratia marcescens
atgactcgaaattgctggcgtatcattaaaaatgatgatgatcatgcggttgctatggcacggctcatcgagttggcatccgctgatttgcaatcaggcactgatgactttgacgagttcgaactgctaggactgcttattgagcattatgaaaattctacatatccgatggacaagccagatccgatcgaagcaataaagtttcggatggaccagcaagggctatctcaggctgatatgaagcaatttattggttcagcctcaaaagtatctgaggtgcttaaccgtaggagaccattaagtttatctatgattaggcgaattcatgatggactcggcataccagcagacattttgatccaagacatgagcgctattgagtggagcttggtagatacagtggaagatgaagtgcgatttactggcagcttattacaatattgtacctctattttcacgcctgaattttcaaatgtatcgattgaaagatatgtggctgttgcgaaaaatgatatatctataacgaaaaaatttgataaaaaacaaaaggatattggtgttggtgcttttaggcggcttactgatcttgctggaagcttctctgcctcagtttgcgaacaacaagatgaatcactaattgacgggaatttttctttagtatcatga

SEQ ID NO: 451176 - DNA, 2136 bp, Serratia marcescens
atgaaaagcgccccgaacgttaagcacctgcctaaggatatctttactgaggcggttatatttgcaggccatgatgcgtggattcacgccaagcactggcaggcgggaaaccctgctaaagataatacccctccggtagttctatccgacaaggaattatcagcgcttaattcaatacggatcgtagatgatggtagacgttttgcgcgagtgtatcgtgcaggtaaattgagcgaactccacataacggctattgcgacacagttagcgatttcaggagtttcccaggcgcgtttttattcagaaagctatgagttgattgaggattggacatcacagctcgcaaggctcaaagaagaggctgagagcggagaggctctagcagtacagctccatgtaattagtggagagaaagagaacaacaagattacaacaagcgacacagacccattaaaaccgcgagtagaaagccgcgatgatggcgtgttctggattacggccagcatcgataaaacaagcggcgagattgccagcaatgaaacttggctagcatctccaatggaagtgataggaaccggacgcgatgacaaagatcagtatctaattatccgctggaaagcctttggtgtcgatcatgcaacgacagcagccataccgcttgccgatataggagaaaaggagggatggagaaccctcaaggctggtggcataaacataaccactaaaagtagcctgcgggcaatattagctgattggatacaacgtagcggctcatgtgcgttctggcgcgtatcgcatgcgaccggctggcagtgcggggcatacatcatgccagatggtgagattatcggatcaccagaaatcccagttttgtttaatgggcgcagttcggcggcgtctggttacagcataaaagggactgcaaagggatggaaagaaactgttgccatgctggctagcggcaattactccatgatgaccggcacggccgccgccctggccgctccgctaattgggctatctggctcagatggattcggaatccatttttatgagcaatcaagcgccggtaagacaactacagccaatgtggcgagtagcctctatggaaatccagacctgcttcgccttacttggtatggcaccgcattagggctggcaaacgaagcagcggcccataatgacggactaatgcctctagatgaagttgggcaaggtgctgagcctcaaagcgtctcacaagccgcctacgcgctttttaatggggtaggtaaattacagggcgcaaaggaggggggtaacagagacctgaagcggtggcgcacggtagcgatcagcaccggagagatggacttagaaaccttcattgccacatctggacggaaaacaaaagccgggcaactggttaggctgttgaatatcccgcttagcaaggctgttaagttccattcgcatcagaacggaaagcaacatgctgacgctcttaaagatgcgtggattaatcatcatggggcggcaggcagggagtggattaaatggctagcaagccaccagcagcaagccattgattcagtacgcgcttgtgaggccagatggcgcagcatcatcccatcagactacggcgagcaagttcaccgcgtgggagcaagatttgccattctagaagccgctttactgctgagtgaaggaatcaccggatgggatgcgcaaacttgtcgtgatgcgatacagcacagttataacgcatggttgcgcgaattcggcactggcaataaggaacatcagcagatcatcgctcaaacggagtcatttcttaacgcctatgggctaagccgttatgcgccactaccttactgtcacgaagcattaccaataaaagagctggccggttttaggcagaggggagagcatgacgaaagtcccacggttttctacacgttcccggcggcgtttgagaaggaaatcgcgcagggatttaacgctaagcaggcggcagaagtcttaaagcaggctggcatgctaacacctccaacaagcggtagagggtatcagcgtaaatcgccgcgcttccaaggaaggcaaattaacgtctatgttctcaacttccagccagagagcgatagcaaggaagtataa

SEQ ID NO: 451177 - DNA, 528 bp, Serratia marcescens
atgaacaaaaagaaccagccgaataatttagtggatgaaaagaagctattagataaagagactggaaaattaggcacccattcggtgcctaaacctggctcagaatttgcccctagctcacttcccttagagcaatcagaagcatccagtagcgccttatctaaccaggcagaatcagtaatttcggctgagcttggagaaaaggtagctggcgttgctggcgcgatatgggttcacaacctgagcgaatcgggcaaagaatcaatgacaatcatcaccaaggaggggcgcaatattgatacccctctaaagccttctgatgtttgcgagcttatttgcggcttcatgtacccgatcatgcaaaaggtgcatggggatatgtggctgatgacgacatgcgccgagtttgagctgtggatgaataaagatcgcacgttatcagaatacggcataacaaagtgggggatgctggtggattacatggccagagccatcgattttgtggggtatggcgatgaaaggcattga

SEQ ID NO: 451178 - DNA, 648 bp, Serratia marcescens
atgttatcggcgacacatgacgcgcctagcgtctttttttgtgtcgtaggcttggctcaccctttttctagcgatgcggttataatccgtgccgcacacgaagttatggtgggctgggtgggggcatcgaaagatgcgccggtttccgataacgccggttacgccaaccctgctcagctcaccaccagtgaaattggcgtttccggtggtggggatttgacccagttatcggaggatgccatatgttggctactaccctcaccaaaaaaacgcaaatttgttggattatcgccgctgttcggcgcgattgcccgacaatcaatcctgttgtcttccatatccaagcagaaggcgagcgtgatgcgcgtcgctcacttgctcgcgaccatatcaccttcttcatgggccgtatccctttggggggggaacatgcttagaacctatgacctcccatccaatccagtagatcgcgtgtgcgaccttattagcctaaccgaactgatgcgcgatgttcatgccggagattcagactgcaaagatgagtatgtacctgcactgatttccatgatggaacttgcattgcgcgatctgcgtagcttgcttgaaggaaatgaaatccctgggggcaaccatgaaaaatcaaactaa

SEQ ID NO: 451179 - DNA, 852 bp, Serratia marcescens
atgactatgaaaaatacggccaacactggtctgggccaaactcaccctaaagaaagcctcggtattattaacagcaatgactttgcagccttggtgccggttatttccggtcagataggtgggcgtgaaagcaatattgttagcgctaaggcattgcataaatcgctgggagtggggcgtgtcttttccagctggtttaatgcgcgagtggaagaatacgacttcaaaaacgcggtcgattacgttgagtctgatacacccctttcggtgtttcaaagttcaaatatcgatcaagtaatgtcagcgcgagtgcaaacatctcgaggcggtgacagacgcagcaaagattacactatcactctgagcatggctaaagagttggcgatggttgagcgcaacgaccagggccgcgccattcgccgttacttcatccagtgtgaggaagagttataccgcagcgttccagagatagcctcacgcttacgccaccagctcaagacgcgcataggggctgccaatatgttcaaagcaatgtgtacagccttagaggctgctcgcgccgaacagggtaagcagacttcacagaatcactacaccaacgaaagcaacatgattgcccgtatcgtcctgggaggcattactgccaagcagtgggcgttggctaacggattagatggtgatccacgcgacagcatgaacactgaacagcttgagcacctctcctacatagaaagcaccaacattactctgattgatatggggatggactatgagtcgcgtaaaactgaactgatgcgcctttcgcagcgttggttaaccaagcacctggagagcgagaatgatgataaatga

SEQ ID NO: 451180 - DNA, 435 bp, Serratia marcescens
atggaaaagaaaaaccgccccgtacagcagactgctaactcagatactcgcattattgatggtacgcccctcactaagcgccttcaagcacccaagcgcactccgaaaaagcaccgtgcccgcgtctacatgctgcgtactggcgttgagggttggactgaaaacgacattctgcgctactgccgcctctcttctggccggaactatgcaactgaggtagagcgccaacttgatattcatctggaacgtatcgaggaaaagaaccccgacggcatcggcgcacatctgcgctaccgtttctcttgccgtactgacgttctgaaggttatccagtacgtcaaccatatggccgccattaatcagcaccagggcctttctaagcaggatatcgccgacattctgaacctttacccggacgccttcaccgcagcctaa

SEQ ID NO: 451181 - DNA, 960 bp, Serratia marcescens
atgacaaagaaagttcttccaaaagaaattaaaagttggttatctctaaaaaattacgaaattttccaatcattaactattgagcagattcttctcgagttagagtttaggttgatgtttctcattgattacacttccgatgatgaggaatctaatgaagattggattcatactaaaactcgcttacttgaagaaataattaagggaacaactttatcgtcagaactttctgaacttgcatttccaacgttctcagaaaataccgccgtcagagataaaaacaaccctgagcccattgagttcagagttaatggcattccagtaatctccaatcaacacggcttgaggccataccaagaaaagttaagcggtgatgagtctataactcccttcagcatgggtgatctagctagctactatcgtttttatcttcgccataaacacatagttcacggccatcgaatttcggaaatcaatgacggtagaatattttcatgtgtcagtgctgtagaggatggaagttcagaattcgaagatgaagtagtcatcaaggttaatcttgcatcttatactgatgatgagttgatagccgagtttaaggaactccttaaggaatggcggttcgagttggatattgatgaaccgcaagcaagtaaaactagggttggaatttcaactattaagaaaatcattaactataaagtttttcctttccttgatcttatgctttgggaggttatcgacggtagaaaaattagtaatgatttggcttcgagagtgttgttccctgatgacgaggatgaggttatcggagggcagcaggttaaggatacaattcgcccatttgtggaaaaaatactcaacgaagatacttatcagcttatgaaacactacgttaagaaaaacagctatctcaaaactatgagactttcagatgttatgaaactctctgaagattga

SEQ ID NO: 451182 - DNA, 759 bp, Serratia marcescens
ttgattgattttcactgtcacgttgatttgtatcccaaagctagagatgtttatgctgaagcgattgagcgtaatgttttcacttggttagttactacgagcccaaaggcttttcaggctacaagtcatgttttagaaaaacatgaatcggtaatgatcagtcctggacttcatcctgaaattgtcgctgatcgtttccaggaattggaaatgcttctcgagttgattcaaaacgtagctgctgtaggtgagattggattggatggttcaaaacgatattccaccagttacgcgatgcaacgtcgagtgttttccgaggtggtcaggaagtgccacgaggttgggggacgagcaatgagcattcactcaagacaggccgttccggatgtgctagctaccttaaaagcgttcccctctcacggaattcctattttacattggtttactggaagtgttacggaattgagggatgcttcagcacagggatgctggttcagtattggtccggctgctttcaactctgccgcagggaaagctcttgctactaagctccctaaagacaaggttgtgccagagagcgacgggccatttgctcaatttgacaatcgaactgtgatgccatgggatttcaatattacagttagattgctgggtaaggcgtggtcaatgcctgaaaatgatgtaaagctacaattgttaagcaatacgaaaacgttgcttggacagatcggaggcaatcgaattgctctcaacttctaa

SEQ ID NO: 451183 - DNA, 1266 bp, Serratia marcescens
atgattaaagttatgtgtgctaaagcagaactgattccagcacaggttcctgctgatgggcgagtattctcatattttaaaggcactaagcgtgcaggtgttggtacaattgcgaatcgatggcatggtgcattaaaacggggtgggtttcgaccttcaacagatatttgggattttgtacaattttgcctcgctgtatgtagcgcggatctatcaagccctagaagaacaagtgcagatggctggactcggaatattcaacttacggttggattgtgcgatccagataaatggctaccgctgaaatctgatcttgaaaatatgctaaaagttctgactggcgattattggttattaaatttcaataatgcaggcatggaacctcctcaaggagacggtgcttttctcagcaatgactgcgtgtctttattatcgggtggactagatagtctaataggtgggattgatttggtagctaaaggccaaaaacctctatttgtttctcagctcgcacataaagattcagagcgacagagggcatacgcggctatgctgatgggaaatggctcacattatcaatggagtcatggtatcagcttccaaggatcgcgcgaaccttctacacgtggtcgttcattagctttttatgcatttgcactgcttgcttcaacgaaaatcaacctaccgaaaccaacaatatttatccccgaaaatggagtgatctccattaatcctcctttggttccagggcgtgtatctagtttgagtactcgaacaacgcatcctatgtttatcgatatgttgcaaagagttctggatactttgggtattaatgtgcagtttcaattgccttaccgttttaaaactaaaggcgaaatgatgcgggaatgtcttgaccaagacctcttgcaaaaatgggctgctgattctacaagttgtggccgttttcgaacttataatcgtcagcactgtggacgctgtgttccatgcttgatccgtcgggctgcattccttgcatggaaacctgagggggatacaacgtcttaccgctttgggtctgttgttggcagtgacaaatcaagtgcacccgatgatcctatggctgttgcacttgccatccttgatgtaaggaagagagggcttgacagatttcttggtggctcgttggcttttgcaccgattaacgagcgccctatgtaccgtagagttttgcaagaaggtataaaagagctagaaactgtactcattcaggataaattgctttga

SEQ ID NO: 451184 - DNA, 810 bp, Serratia marcescens
atgggaacatcaacttctagtgggggaggccgcgcaggctcaccgtttgatcctgaatggttaaaacctgaaagtgactctacaacaggtggaggagattcgcctgattcaccatcggaggagaacgctggaaatgtagttcctgatggtgcaatagcaccagaacgacggtttggacctgctcgttcgctacttgggggatatctgcaaaatggcagccacgataatttacgtggtgcgacaaaaagcatggtctccaaaggaatggggggcgcgcgacgagcagccactactatgcgaggtgttgccagtggtgtcggtagtcttggtgaattcctgacgtctgttagggatggaaacgaccaacgagtgattgattggcttactcacgttcgtcaagagaacctttcggcaacagatcttactcttgaaattttgaaagaggttattcctgggacaggaagcgttgatgacgaatcgctccgtaatgctggcgcggaggctatggcgcaactctatgaactttatccggacgtggacatatttaatctaacggatgtgcaaatagctgaagtcatggggttgaccattgctaatgagatttgtaatcgaatagatctccagcttggacagacttacgaaaaattaaaatatgatcctttattaattcaggaacggcgttctgatattcgcgagtgggtcggtgctgaggttagagtggtattggaaaaacaaactacaaaaaatacagaaccgaaaagcttggctcagtctattctcttgtctgccttagaggtattttcagaatga

SEQ ID NO: 451185 - DNA, 1776 bp, Serratia marcescens
atgactggcatccacaatctaaccccagagcaagaaacatttgctgcccacattggcggagccttcgttaatgcttgtcctggagccggaaaaacacgcactatcattgctcggctagcgaggatcgccgctacgttgcctcctcgtcagggcatagcgatactttcattcacaaactccgctgtagacgagtttcgcgaacgatgcctggctgctgagctcgatacgcttttgcaatatcctagtttcatgggaacacttgatgctttcgtcaggcatttcgttgtactaccaagctgtgcggtatcaaaccagatacgaccaatcatccttgatagttgggatactcttggcatagaaattcgtttatcaggtcaatttgcctttcgaggtgaaccggtaagcctagatttgtttgatccagaaaccaatattattgttcctgataggatcggacatgtaggtttgcaaaatcatgtccgtcaacatcagcttcgataccaacaagcagcagcacatcggcgaagatctttgttacaagctggctatatgagtgcaggagatgcacgtgctcaaacattgcggttgattagagataatgtaattggtggggcacttgctcgcgcattagcggcacgttttcaagaagttatggttgatgaagggcaagattgcaatccactcgatctacaaatactgacatggctcagagcacatggggtaaatgttacgttcgtctgtgatcctgaccaagcaatctacgaatttcgtaatggtaatcctcaaggaatacaggtatttaaggatacatatcctattgcgtcacataaggaattgacgggtaattttcgtagtagtcccgcaatttgccagttagcagcctctttaaggcgagaaggtcaggttgatcggtcgcttggtgaaagtgcgaatgttgactatccaattttacttcttacctacggtggccggggtccaacggcaatgattggtcagatattccttgaacggattacggaactgggactggactcaaccaaggcgattattttggctcactcaggcaaagttgcgttacgcgcagctggtgtcacttccagcaattcaaccggaaactcgcgaattgagatgctggctcgtcaagtgtcaaagttctggtcacctgccgcaaccccaaaaacgaaggagaatgtagtccagtcagtcgaaatattattgctggatttaatgggtgtgcgtcaaccaaatgagcatctgattaaagccatagagcgtcttggtatggaccggcgtgcccatcggagatgcgccctaagtttcctcattaaccttccaaaaacgtgcagagattcggatgaagagcggcttgcctggatagcctgtgttcacgcggaaatggagaggctgcatctgccactcccggctggtgtaagcgtacgtcgtttcttccgacagccacctaatgcgcattggtcaaatcatcttcaagtgcccgcagctcccggttttgcatgtggcaatatacatgaagtgaaaggtcgtgagtacgatgccgtatgcgtcgtagtcccgccaaatcgagcccctgaaaacagagttgaagcactcttcgagtcatggcaagcgcgagtagatgctgaggcaaagcgtgtactctacgttggcttaacccgtgctcgtaattttgttgctcttgcgataccaaacgcctttgcagggcgctgtgtagatttgctggccacacgccaagtgccctatacaagagtggatttgtga

SEQ ID NO: 451186 - DNA, 834 bp, Serratia marcescens
atggaccatcactctataagaaccttacatctggcgttcgtcatcactctgtgtgggaccccatccgtccaaggagctgccagggtatcacctggctggcagacgaatccaccggcaacgcagacggccaacgtctccgcaaccccaaccgggggggcctaccaacagtacccccaatgtcgtaggtccatcacagtaggtggcccgaagaatgctgacggaaccgtgaccatccacttctacgaagaatcgagggggatcgatgtgccggtgatcgggggttataaatgcttcgggtttgggaatagcttccaaggcttatggagtatgctccaagagccagtaaccatcccgtatacgaaaagcactacctcgacttataatgcttatatggagaatacatgtcgtgttagtttcgcgttttcgtatagtggggccactgcatggctgataatcggtccgggtgggttctccaaggactgctctatggacatccagccgcaacctgtgtcgtgcaacgtaacggccagtgaatctatccaacatcggagtcagaatattgggactgtctacagtaggagtaccggacgtatcggtgtggagtgctcatccgcgaccactgtgactgcctccgtctcaacctctgggatgaccctttcgtccggcccctcgactctaggttcaaacctatacgtcggtgctgacggccaaattcagacacgggttatggcgtcacccaatgctattattcctctgattagtacagtggacgcgaccggattaacagctggtagttactctgggtcgaaggttgtcattatagactgggagtaa

SEQ ID NO: 451187 - DNA, 495 bp, Serratia marcescens
gtgcaacagcacattgatgatccggtactgatcggccttattgaacagtatttgtattacagcatcgaggatggtggcgagattttcaccccgcagcacggcatttgtcgcggctgtgcacttagcccgctgataggtgccagtctattgcatcacgtggacagctattttgcagcgcaggaggggaccttctatgcgcgctatatggatgactttgtattgctgacccgtacgcgctggcaactgcggcgctgcgttaagcgcttacatgaattttttaatctgagtggttttgaaacacacccggataaaacccatttgggaagaattgagcatggatttgattggctgggcgtgtggtttacccccacggggaccaccattgcgccccgcgcattagaaaatcaccgtgcacagcgcctgcggctttacgagcaggcccggcggcggggcctgcctgtagcagacgccgactcacgggtgcaggcgtattag

SEQ ID NO: 451188 - DNA, 486 bp, Serratia marcescens
atgaaacgctattcaggcatcaccttactgctggcctgcggcatgctgagcacgccggtgcaggcggcggagaacatgaagttctacggcactctggtagagccccccgcttgcactattaataacggcgggaatgttgacgtcgatttcggcaaccgggtcggggttaaaaaggtcgatggggtgaattatttgcaaccgatgaattaccagattacctgcgatcccaatgctaatgcctgggcgatgacgctggagatcgtcggtacccctgcagattacgatcgggcggcagtcgtgactggcgttaccgacctggctatccagattaagcaaaacggcgtggcctttgagttgaacaaaccgatacccattagcctgactaacccaccgcggcttgaggcggtgccggtaaaacggccgggagcgacgttaaaagaagggccgtttgaagctactgctacgttgaaggcggtttaccaatga

SEQ ID NO: 451189 - DNA, 429 bp, Serratia marcescens
atggcgaaaacggccaccactacggtgacggttaaaatcacgctgacggcgcctccgtgcgacatcaacgacaacaacctgattgaagtgaacttcggcaacgacgtgatgaccactcgtgtggacggcgaatataagaaaatgccgatcctctactcggtgcagtgcaaaggggatacatcgggggcggtccggatgcgtattgatggcgagggcgctgcgtttgacggcggggtattgaaaaccaataaaacagattttggtattgagctgcttaataacggtaagcggttacctatcaagagctggctgaacttcagctatcccacgttaccgaaactcgaggccgtgccggtcaaacgcgctgccgccaggctgagcggcggggcgttttccgccggtgcgacgatgaaggtggaatatcgatga

SEQ ID NO: 451190 - DNA, 744 bp, Serratia marcescens
atgcttagaaataataaccaactaacagtagggttatctaacccggcaacgcgtttgttaagtgagttaataaaaaataataaaatcgaattgccgcgcgaaacgctaatcaagcacgtctgggaggactatgggttttccccctccagcgctacgctaagtaatcatataagcgagttgagaaaagcctttgaggcgcttggagtgagcaaaaatattctgctcaccgtgccacgaataggcttcaagatggaagcggaaatccacccggagagcaagacaccgaaagaacccgctgcggcagaaaagatcgaaaatatccctcctctccgcgagccggtgccggaaggaagtgccgttcgtcttttaatagacgctaaatcagagaaaataccgcgcaggatgaaaatagcgacgctttttctcacccttgctctgatagccattgcaacagcgacaacattaggtaccctgaacaaggatgacaaaccaacgttggtcggagttcaggataaatgtaatatttataccctagatgataataaacagggtattgaacagtccgataaggctcgagagatgctagccagcgaggagattgattgcacacagacagctcattatatcttctatatggaagctcgccccgccaacgagctatttaaagttcattttatggcggtgtgtaccaaaaatgaaaatatgaattacaaaaactgtaacaactacaaatcagtcgagtaa

SEQ ID NO: 451191 - DNA, 486 bp, Serratia marcescens
atgaatagaataaatatcgggctttcaattttcttcgtcgttatcctgtgcggagttgtactttaccttaaccactcaagttggaagccttttcgctgtaatacccacgtgagctcgcacattgtttccatggatggcaggaaactgaagctaaacttagatatcagcgttgtcactgcccaagaaggcaggagtgaagtgctcgtggtgggctcccttaacgggttaaataaaaattatgctatttccaggaggatgttcgtttccatcaaagattccgacttcaaaggttttactaaaacaatgattactcgggaagaacgtcatcccatcgataatattccggacgagatttggcagcagttcgtcctgccggaagcccccggcgtcgccttctatatggaaacgaagctgttgagtaaaaatctgtttcttgttaaagggttaaccaatccctattttgtctgcgccgttatagagcattaa

SEQ ID NO: 451192 - DNA, 645 bp, Serratia marcescens
atgaagagcacggtatacccaatcataaataaaacattaaccatcgccatcatagacaatgataatttttacatagcaggattgatcatggcgttatccatctattttaaaagtaaaagtaggaaagttaaatttatttttgagcattcaatgacagaacctgcggatattacttttcaggccatccgctgtggaaccttcatcgcctcgcgcagccaacatcatgccaacagcggtaagtcgcattattttgccatcgtggataatagggattttcacctgcaacacctctatcacaatatggaaaaagcccatgttttttaccggcaccaaccggtgaacactctattacaactgattgaaaaaaaactttgttccccgcaaaaattgcccgaaacacagctgtctgaacaagaggtttttctccgtgaaccactcaccctacgtgaacatgaagtgttgtgtcatctcaagcagggtaaaacgcatgccggcgcggcaaattgcatgggcatcaaagtgaagaccataagctctcacaaacgcgcggcaatgaaaaaattaaatttcagacgcactaacgaactcttccattggatgctgcagggcggtttatcccgtcaccagccaataaaaggacattaa

SEQ ID NO: 451193 - DNA, 246 bp, Serratia marcescens
atgatgcagttaaccctgggccgacacagctttaccctgagcgacaacgacgcgctgcttgtggccgaagctatcctgctgcaacgccagcacccggatattgtcttaccggaacaccgcagcactaaacacggtgtcatccgtctgaccagccgccagggcgcaccacacctgttttgcaccgggccggtgtctctaaacgacatggccgcccacacccgctacgaccagcaaaccggtcattga

SEQ ID NO: 451194 - DNA, 264 bp, Serratia marcescens
atgttgaccgtttccacttcaactccatccactccgtcgccggttattcctggcggttacaccccgcgcgagcgctttattcgattgccggaagtgctctacaccaccggcttgtcccgctccaccgtgtacgagatgatgagccgtaagcagttcccggcccaggtctccctcggcggtaaaaacgtcgcctggctggcctccgaggtcgagcagtggatggatgaacgtatcgccaaccgtcaccagggggccgccgtatga

SEQ ID NO: 451195 - DNA, 669 bp, Serratia marcescens
atgattgaatccctgttcccccacctgcgtctggaccaactgtgggacgccacctgggaaacgctgtacatgaccggcatcgccggtttggccacgctggtgctgggcatcgtgctcggtgtgctgctgtttttaacctcgaagggccagctgttgcagaaccgggcggtctactcgctgatctccgtgttggtcaacgtcttccgctctatcccgttcatcattctgatcgtgctgctgatcccattcaccaagtcgctgatcggcaccattctcggcgcggacgcggccctgccggcgctgatcgtcggcgcggcgccgttctacgcccggctggtggagatcgcgctgcgcgaagtcgacaaaggagtgatcgaagcggcgcgctcgatgggcgccaaaaaccgcaccctgattttccgcgtattgctgccggaaagctcgccggcgctggtttccggcatcaccgtcaccctgatcgcgctggtgagctacaccgcgatggccggggtgatcggcgccggcggactgggcaacctggcctatctggaaggcttccaacgcaaccacagtgacgtgacgctggtggcgacgctgacgatcctgctgatcgttttcgtcattcagttcattggcgacaccctgacaagaacgctcgataaacgttaa

SEQ ID NO: 451196 - DNA, 2127 bp, Serratia marcescens
atgaatccgctgttattcaccccgcgtcgccgcattgcggccgcgctctggctttctttaggcgtcgccggcgccgcgctggcgcaaccgcagccgccgttggcggaacgcgcgccgaaagcgctgacggcgcatggcgagacgcgtaccgacgattattactggctgcgcgacgacagccgaaaagagcaaaaggtactgaattacctgaaggcggagaaccgctacaccgagcagatgatggcgccgtaccagaagctgcgcgccacgctgtatcaggagatgctgggccgcatgagtcctgacgatcgttcggtgccgtatcagctcaacggttatcgctatcaggaaagctacgccgccggtaaagagttcgcgcggtatcagcgccaggcgctcaccgccgacgcgccgtggcaaaccctgctggacgccaaccagcgcgccgccggccacgcttactatcgcctgggggcgatggacattagccgggacaaccgccgtctggcggtggccgaagatctgcagggccgccgccaataccgcatctccctgcgcgagttaggcagcgaacgctggtcgccggaaacgctggaaaacacctccggcaacatggtgtgggccaacgacaaccaaaccctgttctacgtgcgcaaccacccgcaaacgctgctgccataccaggtttatcgccatcagtacggcacgccgacagcggaagataagctggtgtaccaggaaaacgacccggcgttctacctcagcctcggccgctcgtcctcgcgcgattacctgattctgaccatcagcggcaacaccacctccgaggtgcgcctgatcgacgccaaccagccgcagcgcgagccgcagctgttcgccgcccggcagaacggccgcgagtattatctcgatcactaccgcggcgagttctacctgcgctctaaccatcaggacccgaacttcggcctgtaccacacggcggcggcgggtaaacactggcagacgctgatcgcgccgcaggcgcagcacgaggtggagagcttcagcctgttccgcgactggctggtggtgcaggagcgcgccaacgggctggtgcagctgcggcaaatcagctgggacggcaaaaccgagcgcgccatcccgttcgacgacgccagctacatggcctggctgggctataacccggagccggacagcgatcggttgcgctacggttattcggcgatgaccacgccgacccgcacctatgagtgggatctgaacaagggcgagcgcaccctgctcaagcaacaggaagtgaaaggcgtcgatcccagcctgtatcacagcgaacgcatttggatcgcggcgcgcgacggcgtgaaggtgccggtctcgctggtgtaccgcacatcgctgttcaaaaacgggcataacccgctgctggtgtatggctatggcgcttacggcatgagcatggatccggcgttcagcgccaaccgcatcagcctgttggatcgcggcttcgtctatgcgctgatccacgtgcgcggcggcggcgagctggggcagcgctggtacaaacagggcaaactgacgcacaaaccgaacagcttcaacgatttcatcgacgctacccaagcgctgatcaacgacggctacggccaaccggggcgcatctacgccatgggcggcagcgccggcggcttgctgatgggggcggtgatcaatcaggcgccgcagctgtacaacgcggtggtggcgcaggtgccgttcgtcgacgtggtgaccaccatgctggacgacagcattccgctcaccaccggggaatacgaggagtggggcaacccgcaccagccggccgcctatgcgctgatgaagtcctacagcccgtacgacaacgtgcgcaggcagcgttacccgaacctgctggttaccagcggcttgtacgactcgcaggtgcagtattgggaaccggccaaatgggtggcgaagctgcggcgcttcaagcagggcgattcgctgctgctgctttccaccgacatgaccgccggccacggcggcaaatcgggccgcctggcgcggctggaaaacggcgcgctggagtacgcctttattctggcggcggatcggcaggcgcagaaataa

SEQ ID NO: 451197 - DNA, 2463 bp, Serratia marcescens
atggcaaacaacaataaacaatcaatgatatttgaaatcacaggtgatgaaactggactacaaaaatcattaaaaaacgcagcaaatgatataggtgattttggggatcgtgctggcggtgtgttcggtaatttcaataccggactatcaaccacggctaaagctatgtcgggtttcgctggtgcggtaggggtggcaggtatcgccattgccgccacattagccaacgtacaagcacaatcagaaaaggcatttgaagtttttcaggcagcatcactatcacaaactggcatagtacagattcaacaagcggctaatatgtttgcgtccgtaggtctaactatggatcaagttgccgatcagatgaaagatgctaaggataagttaggcgatgctatcactaataacgctggttctatgcttactgatgtaattcaaccattgaagttgaatatgttcgaattacagaaagcagcagaaaacggtgaagatattattgctaagatttactatcaggctaaacaaatgggctttagtcaggctcagattgtacagatgatggaaaccgtagctaacgatgctactaaacgcatgactgtatatagagaattcagtactgaacaagagtaccaaaatagccttgctaatgaaactatacagttaacagcagagcaatcacgacaatttgaagaatatagaacggcaactaataatctatcaagggcgtgggatgcgtggcgaaattcaacacttgcccctgtagctaaaagccttgctgatattcttgatcttatgactaagatactcaacagtaagccagtggcagcagccgcagcagctacgagtaagcagggtatacaggcagtacaggaataccaaaaacagtaccaacagcagatacaaaaaaactcttctatctatggtgctcagatggtagaggaacagcagaagcaacaagaagccaataacaaaacatttgagaatcttttagctaatcttgatgccgcacataatctacttgataaacagaaagaagaatataataaaggatcagatagaagtgttattgatacagcgttgaaaccttatctttcagctaagcagaagacacaagcacagattgatactcttgatgctactcacaagcaactacgagcaacaattaaagattctttagtacgtgcttataagggtgatgaagcggcaatgaatgccgatttagctaaacttgatgaaggttataaagctaaccgtgagaagttagtaaaaagcctaacagccgatgaagataaagcacgtgaagataaagctaagaaagatgaagcagcagccaggaaagcacaagccgcacaagataaacttaatgaacaaactaaaagagcaaaagcactattagaacaaaccctatcacagatcggtactaacgaagctcagatacgtattactcgttttaactatgaacaagatgaaattgaaaaacgtatcagtacagcaggtaaattagctggtaagagtgaaactgaaattacagcaatgttagatcagcaatataaaagccgtgcgactaagtacaaaactatggttgatgaaatgcttgctgaaacagaccgtttaaaacaagcacaaaacattgccgcaattgccagtgatccgaatgccacaccagaggctaaagccaaagcagcagcagcgggtaagacgtggacaggtgacacagcaggtcagggattagggtatacaaacccattagacttctcaccagatccaacgaaagtacagcaagtaaacactgaacagcaagagaaccaggatggggctaaagctctatacgatgccaaagtaattgggttccaagagtaccaggatcagctaacagcgattcaggccaacgccgatatgaaacgtggtcgattaaccgcagacgcactaaccagtactttaggtatgtggcaagcgggggcaggtgatgtaggaactatcatggctggggttttcggtgagtcatcagcagcggctaaggcagcttttgccgtaagtaaaggtattgctattgctcaggcagtgatcaacatccaacagggcatatccgaagctatcaaacttgggtggcctatggggatcgcagcaggtctacaggtagcagctcaaggtgcgtccattgtccgtactatcaaaggtacagctatccaggggcaagcccatgatggttgggattcactaccaagtactggtacatacaatcttgaaaaaggtgaacgtgtagtaggtaaatcactaaaccaggatttaacaaaatacttgagtaatcaggatggtagtaaatcaggtgatattaagattgacgcaccgttaattattaatagtaatggtcaaatctcagattcagatttccaaaagatgtgtgataaacacgctgatactattgttcaggcaacacgtaaatctcagaagaataacgtataa

SEQ ID NO: 451198 - DNA, 645 bp, Serratia marcescens; identical to SEQ ID NO: 126730

SEQ ID NO: 451199 - DNA, 582 bp, Serratia marcescens
atgagtgaggattttacaaagaaaaaacttcttcagggagtaatatttaccttgttgataactattgcaaccggcttaggtaacgtattttctgcattctttatgctggacgtaaaaaagcaagaaaccgaggacaacctacatgccgatgccagacggcgggcgaccgagttgcactgtacgaagctcgaggaaagcgcttctctggcagctgagattgttttccgtgctgacaggggatatcccaacactgtgactctgcatgacctgatgttgatatatggtggaaaaatgcccgaaaagcgggttcctgatgaaaaaataaaagaagaccaaaaaaatctggagcacaaagtgtttggtttgctcccttatcttctgcctgatgaagcacagacaatggaaaaagtaacgctgcaacatattgtcgtgacgggtatgcgtaccagtaaggttcctgctgaacgccgggagtcctcgtcagaaggtggttttaatttcaataatgaaatgcatgaactccgaaatgccggagcgcggatgggccagatgttccgggaaagatgcatgaatattaagtaa

SEQ ID NO: 451200 - DNA, 159 bp, Serratia marcescens
atgacaatggacgccattttcatcatcgccggattgctggccgtcctgctggtgattgccgcagcggctgcgatcttcttcgtggtttctatcgcgctggatattcagcgttttcgccagcgcaagacacctcgttacgaaaccaaaaattacgattaa

SEQ ID NO: 451201 - DNA, 228 bp, Serratia marcescens
atgccaaccatcggacaagacattagcaaccgtgcggcggccgagtcgttcgaatacgcgctcaaccgtgctcgtcaagaggctgggcgcgacgctgccgttaagttttccagccggctagatcgtctggctacacacgcggcaacggaagaactctcggctgtcgagattatcgagttactgcggcaggacgctgaacacctgcataaccaagggctggcctcatga

SEQ ID NO: 451202 - DNA, 639 bp, Serratia marcescens
atgaaaaatgtactgattcttggcgccggcggccaaattgcccgtcacgttatcgaccggttggcggatgaacaagcggtagtgcaaacgctgtttgcccgtcagcctgagaaaatccagcagccgcatccggccaacgcgcggatctttatcggtgatgtgttgaacccatccgctttggaacaagcgatgcaggggcaggatctggtgtatgccaacctgacgggagaggacctggatgttcaggccagggtggtgattgccgccatgcaggtccgcggcattaaacggctgatcttcgttctttctctgggcatttacgatgaagttccgggcaaatttggcaaatggaatcatgcgattatcggtgaacccctcaagccatttcggcgggcggctgatgccattgaagcttctgggctcgactacaccattctgcgtccggcctggctgacggatgaagagcaggttgattatgaactcacggcacgccatgagccgttcagagggacgatcgtatcgcgtaagagcgtcgccgctttaattgccgatattattgatgagccagagaaacacattggcgaaaatatcggtgttaaccagccggggactgacggtgataaaccgtacttcatgtga

SEQ ID NO: 451203 - DNA, 486 bp, Serratia marcescens
atgacggacatggggatctataaatctatctattcaagcgataataattatgcagagcaaagtattctggaaaggatcttactgattgaagaagtgagaaatagtgacacctattcaatttttaccggagcaggttacggcgttaacggtaatgccgcggtcggtgatgatgctgcgctgccgttggacagtatctatatcttcttgctttccaactatggcggagtgggaattttcatcttcttacttgctgcgtcaattattttactgaaactgtataataaagtccgctatggacagttctacacgggtgtgttcctgtattggatgatttcgctatctatcaacttagtttataacaacccgattactaattatccagggtatgttttctcgattattatttctgctttgcttttgtcatttagacaagatgagttttctaaggtggctgatgcccaaaggctccaagcgcagacacgataa

SEQ ID NO: 451204 - DNA, 183 bp, Serratia marcescens
atgaaagcgcgccggctgtttctttggcaggctttcgacgcacagggcgccttacgccgcggcgaactgatgagcgaggaaaaacggcaggtgagccggttgctgatcgaacaggcctgcaaccgtgccgaatcgggcacggcaaacgcgttacgcccggccaatggcgtggagaaccgttaa

SEQ ID NO: 451205 - DNA, 1104 bp, Serratia marcescens
ttgaagtgttgtatcattggattcaataattgccacatgcaacaatttgagggtttattagtgaatagagttgtgtggatggatttgactcggtttgttgctattttattagtagtcacgctgcacgccactgaccatgtaaaaatacctaaaatggttgatatggacagcattcagttcatcatgtatcaaacaataaggattttagggagaatagccgtccccttgttcttcatgatatcaggtgcgctcgttttaaaagccgctggaaattcctcccctttggatttctataaaaagagaataccccaatttatagttttgcttgttttttatttttacgccaacaacttgattatgaattatatcaaccacaaatcaatcagcatggaggttcttactgagaacataattcatggcaatctccttgttggttatcatttatggtttatgtacaccataatcggcctctatcttgtcgctccatttataagcaaaatgcttatgaatctaactaccaatgaaatattaacatacctatctatatgctttgcattatgctttctggcaccttcttataccatgttcacaggtaagagcccaataactagcggcatgggtggtgacttcattggggtgtatatagtttattttattttcggatatctagttgttgatagaaatttatttttcaaaacaaaattaagcacattcactttggtttctatttttgcattcctctctgttttggtgatacaaatttatcttcgaggtcaaggaaagctaacatcaggggaagggttcacatggtataactcaccaggcacgctatttttctcggcatccgtatttatcaccttaagcaaggttaaaattaacaataaatcaagagtaagcaacacacttgaattcctaagcacatcaagcttttgtgttttccttattcacatggcagcgcttgagctggtatttaaaaggcctgtagttgagacgcactctgactacataaacatcatagtaatgatcctacttacttacatcatgtgtttgatatattatgtaataatgtctaaaaatagaatcacacggtatttagtaaagtag

SEQ ID NO: 451206 - DNA, 519 bp, Serratia marcescens
atgtttatgagcaaagccgaatacgccaggtatcgaggtgtaagccgccagactgtctacggctggatagccaagggcgaactggtcatgtccggtaagaaaatcgatgtagcggccacagagcgccgccaaagcccgaaacccaacagtgattccccttggccgaatcgcaccatgccgctcacatggcggcaggcggcggaatgggtatgggcccacgatggcgagaaccatccagcggcaaaccctgcagaagcccgcgaacgcctggaggccgcagtcggtgaacttgggttcgacattgagtttttatctggcgagttcaccggcgtgcggatttacgacagcaacgcaccagatgaagaagatcactattttggccgtgaaagctacgagaaaggggcacaattttttctcagggcttacctggcttacaccgcaatggaaaacccagacgaagaggcagactggagccctgagggattggcggcactctgtaagccattgctggccctgtag

SEQ ID NO: 451207 - DNA, 918 bp, Serratia marcescens
atgtctaagaacgaatttttaccctttggcacagcagctaacgccaacgtattaccaaacgcagattatcaggagcttcctgcgcgtacagcgggctttggttcgggtgtggcgaagtcagagcagatgaataaggtttggcggcagtcatctgtgatggccagcgcaatggcgcaatacattgccgatagcaccggtaatgacgtgctcgacaatggcgacatggcggccttgaatgatggcctatcaagtgcgctatctggtcgcctaatcggcgtgaaggttttcaccacatcgcagacgtataccccaacactagggacgaaaaaaattgttgtcgaagtggtcggcgcgggtgggggcggacaaggggctggaactcaatacattgtcggtggtggcggtggaagcggtgcatatgtcaaagctgttattaccagcccagatccttcatacgcaattaccattggcaccggtggtgccggaacaagcgctgccaatgccggtgaagtttctaatgctggtggagatacttcattcggatctttgatcacctgccgcggtggaaaaggcggaatttctgataagccccctacagctccaacgccaggatcatcttgcattgcttctggcggcatgggagggactgccactgtttctgctgggatatttttacttatttcacaaagcggagtgcgtggaagttatggaacgggaattcatccaaattacttaggtggtaatggctcaagctcccccttaggtgctggaggcgctggtggagccactacagggccgctggaggctttcaaagctactgggtacggctctggtgggggtggtaatgcgacaacctcgactgcgtcacctggagggaatggagccggcggcgcagtgattgcgtgggagtatgcatag

SEQ ID NO: 451208 - DNA, 150 bp, Serratia marcescens
atgagagcgcgtagggcaattgatggtgaacgcttgaatattcagaatatcaaccaggctaataatgagttttgggaacagaaaaaagctgaggaaaaggaaaagcaagctggcgtgaacaagcacctttttccctacggcaagagctaa

SEQ ID NO: 451209 - DNA, 555 bp, Serratia marcescens
atggcaaacctgaagcaattcagtaccactcccgttgaaaatggcgttgtaatcaatgcccgctatgacgacgacagctccatttctttccagactgataaacaatcatccgaatttatcatttccgtggtgagggaactggccgcagcttgcgaccgagttatcgccgctgaaaatcgtgcagcggctgcaaaccgaacggctgatcgtatgcgtatgcgcactggcgattcatatgacgaagcccaaccaacgaagattgacccgcagtttatgcgacttgtccgcgctgtatgtccgaagtacgacgaagctagccaggacgacgacccccggctggtggctctggatgttctgcgatatgcgccggtgactgcttttagtgccgtatgcaatgaatctctggctgacttacagcctagcaatgcgattacgattcttgagcaggtaggggattacatgaaggccaataacattgatccaaagccatacaccgcagcagatacgattaaagctatcggtgattcagctaaaaaattatgggggaaaaaataa

SEQ ID NO: 451210 - DNA, 2646 bp, Serratia marcescens
atgacagataattttgtcaacgatgcaagggctaaagctaatggtcaatgggaagtgatcttgcagcgtctggatattcccaccaaccgcgccgagggtaaatgtccggcctgtggcggaaagacccgttatcgctttgacgacaaagacgggcgcggcacttattactgttcgcattgtggcgcagggacaggactagatctcgtaatgaaggtgaaacagtgcggcgttcgtgaagcggcggcgctggtggccgatgtgatggcgttaccgatgccggaacccaagccagccagggagaagcctcaggcttcgattgctgacaaggtggccgcactgatggagaagtctacgcccggccagtctcactacctcactgctaaggggctggaacgccccaacatgccgattttgggtgatggctcgttgctggtggcactgacgaacggcgatggcgcggtgactggcgcacaggtgattaagcctgacggcagcaagaggctagtggccggaacggtaaagagaggctctttctatgtggttaattccggtgaatcgccggaaacagtgattattgccgaggggatagcgactgccctatcggttaaccagatgcgccctgacgctctgtcagtggctgcgattgacgcggggaacctgccacctgttgccgaagtgatgcgccgtacctatccagaggcgcagatcatcattgccgcagataacgacgttaagcctggtgagccaaatacgggcaaggtagccgctgaaaaggctgcaaatgttatctctggctggctgaccttgccgccaactgaggacaaagccgactgggacgactatcggcagcaaaacggcgtagaggccgctacacacgcgtttaactcagggctatatcaaccgcagggggagaaggtgaaaccgatactaacgattgtggaaaacgacaaggcactcacccaccgaaaagacgatatgaaaccctatattgatgaacgcaaaggcggtttgtattgggttgagccgaagcttgataaagaaacaggtgagattgtcgaaaaagaaagctggctcagcgcacctctggtggttagcggcattggtgaagatgaaaatgagcgctatctggttttgagttggtggccggagggcagtaactgcgagcgcaccgaagcgttaccgatgcgtgatattggcgagcgcgaaggttgggcgaggttacgcgccggcggcctttccattaccgccaaaagcagcttgcgggcaattttggcagatcacttgcaacgtagtggcaatcgtgagatgtgggctatcgccagcgctaccggctggcaatgcggcgcgtacatcatgcccgatggtgaagttattggagagccaaagacgcacgttctgtttaatggccgatcagccgcagcaaagggctacaccgtcaagggaactgccgaaagttggcgcaatagcgttgccatgctggcacagggaaacccgtcaatgatgctgggaattgcctgtgcgcttgccgcgccgttgattggtgttgctggtgctgatggtttcggcgttcatctgttcggcggctcgtcggcaggtaagaccactaccggcaacgctgccagtaccgtctacggtgagcccgatgcgttgaaattaacctggtattcaacggcgcttggcttggtgaacgaggcggcggctcacaatgacggatttatgccgttggatgaaatcggccagggcagcaaccgcagggcggtagcggaggcagcctatgcgctgtttaacggcgtgggtaagatccagggggcgaaagaaggaggcaaccgagatgttaagcgttggcgggcaatggcattcagtaccggtgaaatcgacatggaaagctatatccgagcagatggcggcaaggtgaacgccggtcaactggtgcgattgcttaatgtgccaatcagtaaggccaccgaatatcacggttatgctgatggtaaggcccatgcggatgcgatgcgtgaagcctgcaaggccaactatggcgcggttggacgggagtggatcaagcagttagccagccagaaagaagtttcagccgagtccgtcagaatcgcagagcgtcgttggttagggttattgccagacgaagccagcgaacaggtgcggcgtgtagcatctcgctttgcggttctggaggctgcgttgcttctttctcagcctttgacaggctgggaggttcaagagtgccgggattctctccagcacagctttaacgcctgggtgaatgagttcggcatggggaaccgtgaggcgaaagcctgggtagagcaagcggaagcctttttacaacgctacgggtacagccgttacttgccttatcagaataccgatccgcgtgacctgccaattaaagatctggccgggtatcgcgtgaaaagccgttcaggcgaagaaatggttttccatacctggcctagcgtcttcaaggacgagatagcaacaggcgccaactacatcgcatttgcgcaggttctggctgatgccggtatgctggacaagccgaagaagggaataaccaagaagacattggttcatgagggtaagcaatgccactttgtcgtaatgaccctacctgtggatgatgaagaataa

SEQ ID NO: 451211 - DNA, 222 bp, Serratia marcescens
atgagaaagattccatttgatgtgctggtgcacgcggagaatgccctttgtgaaagtgaatccgcttatgaggtactaagtatgtggatggacagcatcccaagcggtgaagaatatcaccgtgaagcatgtcgagttagtgccattatgacgctgctgcataaatcaatcggtgaactggttaaagcgcggaacgcgtataagcctgatatagaggtgtaa

SEQ ID NO: 451212 - DNA, 204 bp, Serratia marcescens
atgcgtgatccaataactttatgccaagcggaatacaaagcagggctagcgcaatcactctacgaaataattctggagaaggcctcatctgagtgctcagatacgcttttaaatcttatctctattgcatgtgattttaatcatgaaattcatcgggcattaatagccaaggtgcaggcattggatataggaagcgaaaaatga

SEQ ID NO: 451213 - DNA, 201 bp, Serratia marcescens
atgtcgcatgacatcactttatccaaggctagtcgccaggcagatcagttaaacgctttgctggtggcaatgaatttagcggctagtgagatagatgatacagatatgagcaccttgctcaccttagctcttgatctggctggcagcccggcatgttggttgcttgaagaacaatgtcaacgggaggctaacgatgcgtga

SEQ ID NO: 451214 - DNA, 882 bp, Serratia marcescens
atgcttaatctccaaacactgacagccaaggcgcgggaactgcgcggcaacgtagtcaaagcagttagcacaaagggcagtcgtacaatgacgcctgtttacgaccgcgacgaacagcggaaattgcgcgagcgcatccagcagacgcagcctgattggattcttctttggtgggatattgcaaccgtaaccggctggcgtactagcgatgtttgcaacctgcgttattcctgcattaactgggagacggggcaggcgacaattgtcgtttccaagcagacgaaagcagcagaggcgagagcgacccgtaaaggtatcgaaatcgtgcgccagcagcgcaaggacgccgccaggcttgccgctgaccatattgcttacatgaagtgggatagtattaactgcgacgaattggcggctgatatgaccggcgacgaacaggcgatagtgttcgggctggtggctaaggcagatgtgaagcacgacacgaagcaattaccgcctggaattatcaagcgactgcgagagcgtcaagatcgtaactatgtggacgacgacctgattttttcgcgctctcaaatcgaaagtaaccgttgtcaacaactggaaggtagcgttacacggcagaccatttggcgcaaacttcatgacgtaatggcatggtttacccgctttattaacgcaaagttgcgacttagtgcatattcaagtcggaaaatagctgcgtttaatctcatgtcagcaggaggggagcaagggctgcttgtggcctcagaaatgctggggcatagcaatccatcaataacccgcacttacctgcagttaggcagcaaagctactgcgatccagtcacgcctagcgatggaggtggacaatgtcgcatga

SEQ ID NO: 451215 - DNA, 246 bp, Serratia marcescens
atgatgacgacccccacccaatctcaagcaaaattcacctggcgctttctggcgctctcacgcagtgaccgcaaggccaagccttgccgggtttccgtggaggctgcaactgagcgggaagcccgccgcgttctggcccctcacttcatcttgtcgctgtctgcccgtctgcctctgcaaggtgtgatggacacgatcgccccttcaaccgtagagaaatcctcgatgggggtgcgttatgcttaa

SEQ ID NO: 451216 - DNA, 213 bp, Serratia marcescens
atgtctacttcgaatagtgatattttgcttaaggtcgaggttaaagccaggctgcgttatcgctcagattcggcattttatgagtttttgaaggacgcagggaacgaatttccgatgccttttaaagtcggtggtcgcaactgctggtatcgtgacgaggtggaggcatggattggaaagcggagcgagaaacgcggattgtgcaccgattga

SEQ ID NO: 451217 - DNA, 1230 bp, Serratia marcescens
atgagtagcaagccccttacccatacagaagtgaagaacgctaaagcacaagaaaaggattacagcctgtatgacggtttcggtttgcttctgtacgtttccgccgctggtggtaagtcctggcgattcaggtattcgcatccattgacgggaaaaaggcagacactaaccatcggaagataccctgagtttagccttgccgaagccagagaagaaagagaaaaagcccgccgtctggttgcccgtggcgttgacccgaacgaggtcagaaaggagcaaaaggcgttaaaacagaaggagcacggtgagaagttctctgtgctggccgcagcatggttggcgaaaaagaagagcgacggattaagggagcggtcacttatatattgcagtaaaggcatcgatcacttgaacagcattattggaggcattagcgtacataaaattaccgcatctcacacactcgcggagcttgagaagttctcgaaacatccagctctgaggcttaaattatgcagttatgcaaacggggtgatggattttgcagttaacgccggaataatcgcttacaacccactgctgagaattgctaaagcgctgccgactgtgaaggttactccactaccagcttttgcccctactttgttccctgaatttctcgatatctggaatgcaagcatatgtagtgaaccgaccaaacaggcgctaattttccagatacttaccatgaccagacccgcagaggcctactgggcgcggtgggaagaaatcgacctcgataaccagttatggaacatcccagaggaacgcatgaaagccaagaggccgcacacagttacgttatcacggcaagctatggctgttctgcaagacatgagagcatggcggcgaggtgactatgtgtttccctcgttgaggcgtcagaatgaggcaatcagccgctacaacgtgacaaagataatcagccgttcgaagtttaaagggcttattgtcccgcatggtttccgttctctggcctccacggtgctaaacgaagaaggatttaacccggacatcatagaggctgcattagcgcacaaaagcggtgacgccattcgcaatatctacaaccgttcaacttatatcgaaaaaaggcgcattcttttgcaatggtggggcgattacgtagaagctgccgggaaaggtgaaatactggaaacgaagggcgataagggtttaagactggttggatag

SEQ ID NO: 451218 - DNA, 186 bp, Serratia marcescens
gtggatttaacccgcgaagacgagcacaccatcgcccaatacatccgcgcagcacatggcggttatacggggccggtatttctttgcattgacggactgaaagcaatgcacatgcctttcagcaggctggtggttatgacggcgatgatgaaggcgaaacacgaatcgaagagggcactgccatga

SEQ ID NO: 451219 - DNA, 507 bp, Serratia marcescens
atgaagtttgagtctgcattaaatcaagcggaactaaaaaggctcctgaagtattgccccgagaccggcatctttacttgggcggtaaaacccagcagaggcgttaattgtggcgatgtagcaggcacaaaagacacgaacggctacatcaatatcctgataaagagaaaacggcacaaagcccacaggttggcatggatttatatgaaagggcaggtgccaggatgggttgatcacgctaatggagtcagggatgacaatcgttgggtaaatttgcgtgaatgcaccccccaacaaaacgcgataaatgccaagttacgtaaagacagcagcagtggcgtgaaaggtgtttattggcacagcaccgcaaagaaatggattgctcaggcgaattgcaaaggtaagcgagtggctcttggccgattctcatcaattgagggagcaattgccgccagagaagaatatgtaaaagaaaattttgatctgaggttttatcgtgaaaactaa

SEQ ID NO: 451220 - DNA, 315 bp, Serratia marcescens
atggacaataccacgccaaaagccaaagaatcaaccacgcttgtattggttgacataaaaaaacttaatcgagcacagcgcttaattaaagacaatcccacttcatggccttggaagctttgtatgcacatggttaagcaagcatacggtgtagaatgtgatgaaccaatgcctgagatcggtgacaggaatggcaattttatttgtactcgcgttgatttagatacaggggagtacgagtttttgtccgagcgtacttataaccatcgagttatgaacggctatgaattagttcgcgaggtgcctcatgactga

SEQ ID NO: 451221 - DNA, 303 bp, Serratia marcescens
atgactgatatttatcatgcactgatggtaagggatttcagcggtatctctgacgaggtgctcggggaacgccaggtagcctacttcgccgctgccgccgctattgacgcagcattgttggttatcggtaatcttgtgctggaagctgatgagagtgaaggttatacagacgcagaatccaagcgagacctcgtcttaattggaactgtcctaaggagctttcctcggatggctcaggttttaaagcaaaatggtagccttgccgagcacaccctaaataagcgtcaggggggggctaaataa

SEQ ID NO: 451222 - DNA, 183 bp, Serratia marcescens
atggcacccccgtccgagaagagaacgccggagcatctagccctggcgaatgacatggcaaagatacacatccttgccgaagcagccttggcgctgaccgctaatagcgatgagcgcaaacttcaggcggaaattatcggcgcaatcagcgacatcacagaggaatgggtgaggagagcatga

SEQ ID NO: 451223 - DNA, 510 bp, Serratia marcescens
atgaaatcgaaaaaacagatcagggctctgattgctcgggccaaagaggctgaaaccagaagcaacggggcgttggcgcttccaagttggatgaaagacgaaaaggaagccttacgcaaccggaaaatgactccggcagaactgcgggagtttaacagcatgatgtgcgaaatcctgcggtcatccgttgcgctcgtttacctggaggaatgtcaagcgcgctggggacagaagcacggagcgccggtgtttatcagcggagacatatccctgggcatcacttccaaggtggttgagcaggcacttataactcacgtcgaaccgattttagtcgagaacggtcgctatgcgggctcagaaaacattctttatttctatatgggtcatgaacttaacaacaggaaagacaggaaacatctcaccggcattatcgatgatgtgtttacaacgatgtgcgaagaaattcgcggcaataactaccagatgttgcctgcagcaacggtgcattaa

SEQ ID NO: 451224 - DNA, 759 bp, Serratia marcescens
atgaagaaccaacttatgacgtttaactctaccgatctgggtatttcgctgagcggcatgctgtaccagggcaagcctgtattctttgcggtggaagccgctgaggctcttggatacgcagatccacactatgccctggcagctcattgtaagtcattgattcgacttaattccgggaaaacacaggaattgggttttggatctcgtccaaggggcatcatccttgccactgaagcagacctatatcgccttatcatgcgcagcaagctcccctccgctgaacgcgtacaggactgggtatgcgaggaagtactgccttcaatccgtgaaacaggcggatacggccaccagcagcccaaaacacaggctgaaatcatcgccgagatggcattactcaacgtcgaacaagaacgccgcctaaaccatgtcgaagaccaggttgaggctgtcactgagactatcgagcaaatcaagcgtggctccgtgcctgctggctggttggggtattcggttttgaaaatcaaatccggcatgactccacccaaatgcaaaaccctggtcaaggcgtacagcgtacccacagacactatcaccattatgacgcccgagggtcaacctcgtccgatggctatcgtccaggaagccccgttcatgtccgcattccgccgaatgatggccgaagcggaacagcgtggcgctcgctggtatcacccgaaaatgggcttgttccaggttatcggctgggaggccaagcaatga

SEQ ID NO: 451225 - DNA, 153 bp, Serratia marcescens
atggaaggcttcttccgcagcctgaaaacagaatgggtgccagcgaatggctacgtgggcaaagacgaagcccggcggcaaatcaatcgctatatattgaattactacaatagcgtcagaccacatcattataacggtggactgacgccataa

SEQ ID NO: 451226 - DNA, 480 bp, Serratia marcescens
atggataaattcagcgaattgaaagcggccgcaatggccgctactccggggccgtggataacaattgattacttctggattggacgcgcaggagcaattaattccgaattcatcacatgcgacaacggtccagacgcggactatatcaagcgggttagcccggatgtcgtcctcgccctgctggcagagctggaagcgaaggataagcgcatcgccgagctggaagccaaaacagcaatgactatgggcgtcggcagtgggaatggaaaccttttcgtgcatggtgattacgattccataaaagctgcgcaggccatagttctcgaaaatgaatccctccgcgccaagctggctacgccggtgcggttgcctgacacacgattcatcaaagttggcgagacagctgtagctgttatgcatgcgaccagcgtcaaagagcagattcagcacgcggggttcaaagtcgagggggatgagtag

SEQ ID NO: 451227 - DNA, 366 bp, Serratia marcescens
atggataagctgagcgaactgagcaagccggtggcgtataaattcgaccacggcgttatggggtcgggtgattttaaatatggcacgccgcaaatgcactccacggcgaaagatgaaaatgccagccctctctactcgcaagagtacgtctccgacctgcaacacgaatccgcggttaactgggaggcggcggcatcgctgaacgttgaaaatcaggagctgaaaaagcgcatcgcagaactcgaacaagccatgcgccacatccacggcgcggcattggatatcaccgtaccaagagtggcgatagccaaagccgcagaattggcagttgagcacgcggacataaaggagcagagcaatggataa

SEQ ID NO: 451228 - DNA, 240 bp, Serratia marcescens
atgagcaagctgaccaagattgaaaaatgccagcgtaaaatcaacgacgctttcagcggcaaattgagcgaagactttcgcgagaagtttcagcgtgagattgaaacacgattctctattttcagcatggcgctggtttcaacaccaactgacggcgaagactttacaccagaacagcacgcatgggtggatgcgtattctgccgggtatttggccgcaatgaaccaggtatgggagtga

SEQ ID NO: 451229 - DNA, 195 bp, Serratia marcescens
atgtcacaagataatcgcagatgtaaagttcttggggcctatggtgaacctgaaggtacgtttgtaaagtatgcgccggtagaaacgtatgatgactctggtcagatgcacacaccagaaaaggctattgtcgaattggattctggagaggttctcactgtcaatccaaataaaatcaagtttatcaaaaattga

SEQ ID NO: 451230 - DNA, 174 bp, Serratia marcescens
atgactcgcaagacatcaagattaaccccttacccgctgcgcatgcctcctgaggtaagggaatggtatgaggatgaggctgctaagaactcccgctcgttaaatggggagttgcttaaattgcttaccgaaaggatgaatcgagtaaaagggaaacgagttaatgagtgctag

SEQ ID NO: 451231 - DNA, 2778 bp, Serratia marcescens
atgtcagaacaggacggcggaacccttgtttaccaagtagatatagaaactgcaaagctaattacaggaagccgacgagcttctgtagttttggagcagttaaataaaaatgctagaggtgcaagctcaggtttagatggtgttgatgcatcaggtaaaaaggcctcaggctcactaggtaatgttgcatcaaatgcagaaaaagcaggtggtggatttttaaatgcaagtcgtagtgctgatagtttaggcggtggtttaaacaaattaacatctttgattagggggtatatcaccattcaggcagctatgaagttaataaaaatagctgatgatatgacaatgttagaggctagagttcgtaggcttagctcaagtacagaagaagccactataactatggcctctctttctgctattgcagcaaacacagggagcagccttgcaagcacagaaaaactatgggaaacacttacatcaagccttaaagaggctggagcatcaaatctacaagtattgagattgactgatacgcttcagaaaataggtgtggtaggtggttcttccgcagaagaaatgtccaatgcgctacgccagtttggtcaatcaatagctggtggtatcgtgagggctgaggagtttaactctgtacttgaaaacatgcctgaactcgcaagacagattgctgctggactcggtctttctatgggtgagcttcgtaagcgcatgttagatggtaagctgacggctgaagatgctttgaatgctattcagaagcgctcacaatcggtaaatgaagaatttgataaaatgccagttacagttgagagagcaaaaaacagtctcgacgtggctttcaaaaatgtgattggcgatcttaatgagtcaatacagttaacacagaccctggctggtctaatgcagtcagtggcaaataaccttaatttctataatagaaatgtcggtgattctgccagaatgccaaaacttattgaattacagaaaaaatacaatgaggaattaaaaaacggtcagcaatggtatgaaactgacagtgtttatcaacaaagaagggggcaggctgctttcgagcttaaacgtgtggagcaggagatagcgcacattcgagcaaaatctgcgaaggattcagaaaatgcaagcaaaccaatcgagataaattctggctccaaccctaaacaagatgaattaatcaagaagtcagaacgcaggctcgctctttctaaacttgagggtgaagcaagggctaggctcgaagctcaatatgcagctgaggatgctggtttcaaaaaggatgacccccgtaccaagcgcatggaagatgaggccgcggcaacatacagtaatcttgaagcgcaaaaaaaactcaaatctgagaccaagtctggcgttgcagcagcagagagtgcagctcaaaaggtagagaatcttaggcaaaaatctgagcttgctgctagttccacgaaggagtttagccgagagcaggcgatcctgaccgcacagcaatcactcggtaaaggcgcgacgcaagcacaggtagccctggccggggaatatgccgcaaaagcatgggatgcggccgccgcagccaaaggcgtcactgaggcgattaaggctatgcctgagaaggcagagaataaatcatacgccgagtccatgcagaacctgaaagctgcgctggatgccggcaagattgaccttcaggagtacaacaccgccactgagaaaatggcgctggaacatcagaacaacttagcgaagattaacgctcaggctgtagttaaccctgttgcatctgcacgtgctgaagttgatccggttcagcagttggcgaatgagaatgctcagaagctggccctgatgcagcagtatcaacagcaggagcaagcgatactgcagcagagttaccaacagggaaaaatcagctatgaccaattcatcttggctaaacaggccacggatgatcagtacctggctttgcgcactgcccaggagaagcaataccaggagcagcagacggcggcgcaatggcagctgttgagccagcagagccttggctacgacatgctgacgagtgctgttgatgctttctctggcaatgcctcaaacgctattacagggctacttaccggcaccatgtcggcacaagaggcgatgaggtcgcttggcaacactatcctgaacagcgtgataaacagcatcgttcaggtaggcgtggaggcgttgaaaaactacatcctcggccagacgcttggcgccgcctccgtggcgtcatctgtgggtatggctgcaacaacggcttctgcctgggcgccggcggccgcaatggcatcactggcaactcttggcgctaacgcagctccagcggctgcagggataacctcaaccgtgggattggctggtgggctggctttggctggcgcgcgttataacggcggcccagtgagcgctggcgcgatgtaccaggtaggtgagcgaggcaagccagagatttaccaggcgagcactggtaagcagtacatgatccccggtgacaacggcaaggtgattagcaacaagcagatgactggcggcagtgcggcgccaaccatcatcatcgagaactactcatctggtgctggagtaatggatacccaagccagcaaaggggctgatggtgccgatgtggtgcgcattgtgcttgctgatctgcagcagggcgggcaaatcagccagggtatatcccagtatcaccaggcgcctcgcaaagccactgaatag

SEQ ID NO: 451232 - DNA, 2019 bp, Serratia marcescens
atgaccacaccaacgaataagccaatcccaagcgaggacgtaagggatttaaagttcaactctggaaaggttgatgaaattgtcaactcaaacaataaaacgtataccgataggtttggtgtaaagcgttatacctgggcaggcgcattagctaatatcgctcctcttggtcatccgtggacgatttcagaagctaatgcggcaatctcatctggcgaaatacccaatggggcatattacttcgtttggtcagatgataatcacagtatcgctgatgtttggcaaaacgtgaatggagtaggcacaaaaacagacaaaagctatccatccagtgagtttctttacgatattagtgaagaagtatcaaacgcattagttgaatttaaaaacagggtgagcatggtgccgaatgatctggctggtattgacagtaatattgctgctggtgtgctttttcaggatggttcatttgctccattgatgcttgatgatggtcatcatgtctttgctgataaagatgggaagatgcaacgtgttgctgctgattcagatctggtggtaaaaccgtatttcgaatcaaaacccttcatccttcctgatggcgctgtatgtactaaaattgtcgttgatacagaggactatattgttgaagcatggactgaagacggtggatattattttgccacgccggacggcctaaagcgcgtaggcgatttaaaaccagccgcccagcagataaaacaagcgaccgcagccagtgatacagttatgaactacggcgcgacgcgcatttctgtttccgatgatcagcttcctgtgatgtatatcctgccgacgttcggccagtcattggcgcaaggctggagcacttacgctgatgacgtcttgatcgcgacaactcagctctatccagacaatgcctggatgttcaaatcagaccgaggtgccggtaaggagaacccgaatcgcggccctgcattgattgatgaaattgtgccgctgaaagataccgtgaacggtggttggaaagagactgcttgctcatcttcggctgcgcatattatcagtgaagttgaaaagctgacgggtaagcgcattcatatcttgcgctatgttgcagctgaggggggcaaggcataccggaatctaacaaaagggacgttttcttggtctaccctggtgcaggggttaatcgatgctaagcgcatctgtgaacgcatgggatttaagccggtggtgttagggcttgatgtgaaagctggcgagacggatatcgatggcacacctggcatgtacgccgatttgtatacccgatttctaaggaacttagacaggaactataatgccgaagtgaagcgtatattcggcggggatcatcctgacgtccctgtctttgttgagcagtgcagctggtggccgtataccgagtgggatattaaaaacgttcgacaagggcagttgagtgcggacggctttggtaacattcgattcactggcccaggttatcaatacccgcaccccggcgatattattcacattaactcgaaggggcaaaatatgcgaggcgtatcactcgcgcgtgcagtggctttcgagtgctttggtacagggttcattcctgttaaaccgatggatgtctattggtctggtacaaacactatcgatattatctgttcttcatcggtagagattatcaaagatgtatctgatgggattgttagttctgttggtctcggtactggtggtggatttggtatccgtgcacgtgacggttctattattaacatcactgatgccaccccattcggtaagattgggatccgtttgaccgtggacaatccaacgaatacgcgtaatgtgcaaattagctatgcgcaacgtcgcacaggtagcaataaccagtctgggccaattgatggcgctcgcggattgttccgcacaaaggatggaattactaacctctataccggcgaaattgaatatcagtggctgccttctttcattcgggagttaaattaa

SEQ ID NO: 451233 - DNA, 828 bp, Serratia marcescens
atgtcttattctatggttgtattaaataccgatcacaagaagaacaatccaaacctgccaaagcttgatatttctaaacaagagatagaaatccttcagcttaatccatccacttggattgaagcaaaaagcggagttacgagcagcgctggcgatgtttcatcggttcaggacaaaaccggtaaggctatttgggcgccgatatcgcctatgaaaccgcgtattattactgctgggaaaagttttgctttgcggtttggtcgtgcggcatctaactctggcgcattaatcgcaaacaatgcttacgagacattcccgattgacggtgtctattcaacatttattctgtaccgcatcccattgccaaacactgaaggatatacaggaacaggtggcaatatctgcgggaactatactgctccgcctgactggttgcgtgtgcggttcgggaacgattcattccagactgacattgtgtggatcaaccacggagacaccgcagccagcgttccgagcaactatccgatcaacacaacaattccaggatttcgtgataaccagtggcatattgcagccattgaggttacgaacaaagtacaccgctgggagcatgacggatcgctactgcagcagcaaaacttcgaagcaaaagggtttgctaccgctgattcaagacgacttgttattggtggtgcaggtaacccattgagccacggtttccagggggatattgctgctcagattgttatccctgggccattggcagttagcgccaagcagacgctctatgatcgtttcaactcgttaaaggctgaactgcaatcgtaa

SEQ ID NO: 451234 - DNA, 333 bp, Serratia marcescens
atgatattcgatcgtatttttttcttgtttgtctttttgctttttattccgctggcgatatatatccccaaccccggcggtatcgggggagcgctgccatttaatttgctgatctacggcggcgcggccctattaatgggggcttgctggcgggcaacaccgttgcgccggatggtgataacgccgatctgtcgcgccatatttgtcgcatgttccgtgctggctctcccggttatatttacccggcccgaatggcaaagtgccgccgtttggcggctggccggcttgtttgccgggacggcgttctattacgcctgtcttctatgcgcatga

SEQ ID NO: 451235 - DNA, 780 bp, Serratia marcescens
gtgctaggtaacttgataaacatagagtctttcatcgcactttctgtaggtgccatttttagttataaagtgaataagattaattttaaatttaagaaaaacgttaggattaatagcccaaatattaatggggataataatgttataatatatcatgaagccatgcagaaagtgaagggtgaaatggcttttttagtaaaagtgtgtgcttttgtaatgcttgttttttttcatttcttcccgctgtttttttctcatgttttgtctgcgctatcaattgtcttgccgctactttgtctgtttggagtggtaaattctattcggtctcatgggatgagtaggtacggtgatagcttgtattttctcgcctcgtgtgtgatgggggtgctttgttattgtggtgctaaagctatagaggctaatgctgaggtttatcctcaactatctttgcttatagataatgtatctgcagcgttctctcgctatggatttatgggggttttgggtttaaatcaaacgattcgatatcttgtttttattttattttctagttttgcatgcccagccctgatcttgtctagtttttatttggcgtttgcttatgtgatggaaaggaatgcaaatgatgcctttagatattcctgttatgttttagctgtgggatatgtctcttatgtttttttgaccggggcgttattttcctcaggtggtgatttgtcttttttactcaaagtattgacctatccattatcgacaattgcctcgttattttctttttag

SEQ ID NO: 451236 - DNA, 945 bp, Serratia marcescens
atgaatattaatgcattgattgagcacactattgataaagataattttttatccgtgcagtcatttttagagtacacgattagatttcttgagtacattgactctaacttgcaggctaggattatatcccagaatgaaaatcactacgagtttcttcagtatcgtgaggatggttcatttaatattagccgccccattaattctcgcctaatgtataatgccgaggaattttccttcgtaatgaatacattccctactattctgcaaaaaatacaggatagggagttgccttcggatgctcatcgtacggaactgactagaactatttatacaattcaacagtcaattggcgctgcattggatgctttgcctgcgggaaaagcaaatcaagctagaaaaataaatggcgaaaggtttgaaagattcattaaagtcttgattaactctttggggattgattgtgtcggcggaacaatcaaggttcctgtaaaagacaatgcgggaaatacattatttacatcaagttatcagcatgatttgatgataagcaacaatgatgagttaagagtaataggctctgttaagacatctagtaaagacagaattgataaggtttttgttgataagtttctatacaatagactgactgaaacaaatacgccacatattgctatttttttaaacgatgtgcaaagaaagaataccaggctagaaaataaatatggtattagttcaacatttttacctgggcattttaaagcctacacatttaaactcaatccattggatggagtatattattgtgatattaggcctaatatgttgacagatgaattgctttctcaaagcataaaaacgatagatcattttttctttaatgatatttgggagttgcttaacagagaggggctggatttaagtgatgtatctatacaaaccgaataa

SEQ ID NO: 451237 - DNA, 987 bp, Serratia marcescens
atggaaatcaaaaacaagcgtgctgaaacagagcaactagcattcgatacttttcttaccgaatgcacaagcgagcacacaaggtcatcttctgttgaggctgatttttcaccggtgtcagaagggtttcaattacagttcaagcatccaaatggtgagctgtaccaaggtaattcaattagctggttgaaatcacttaaagatgagactgttgatctggttttcgcagaccctccctataacatcaaaaaggcagactgggataacttcgaaagtcaagaaaaatacatagaatggtcactggagtggatttctgaagcatccagagttttgaagcctactggctcaatgtatgtgtgtggcttttctgagattttggctgatctaaaacacccggcctcacgattttttaaacacactaaatggttgatttggcattataaaaataaagctaatttgggtggtgattgggggcgttcacacgaaagtattatccactttagaaagactaaagcatcaaaaataaatattgatgacgtacgagttccgtatggggcacatactcttaggtatccatcgcatccacaagcagattcaagtgcttatggcaaaggtgacactaaaaaaagagataactggattcctcatccgaaaggagcaaagccaaaagatgtcatcgatattcctactacatgtaatggtatgggggaaaagacacctcatccaacacagaagccagaggaattaataagaaaatttgtacttgcgtcttctaatgagggagacttagttatagatccattttctgggtcaggaactacagcggtagttgcggaacaattaaatagaaaatggatggcttgtgatttaagtgaacagtacaatcaatgggccatagagcgtctttctaaagtaaaaagaatgacgaaggaagagtggatcgcatatgaccgtaaagttgcagagcgaagggaatctattcgatga

SEQ ID NO: 451238 - DNA, 186 bp, Serratia marcescens
atggtcgaccatactcggaagcatcgaaagaagattctgcaagcggcggtgaaaacgcgacgcgccggcctgacgttcgcgccggcgtcgccggccacgtcgccctttatcggccagcaccgccagacgcaaaccgtgctgatacacctgatcggccatgatgacgcccaggaggaacatgaatga

SEQ ID NO: 451239 - DNA, 252 bp, Serratia marcescens
atgccgtatctcgccgcgtcggcgctggcggacgatcgcatcggcggcggccatgcggaggggctgtttgaagcctggtcgaatctctaccgccgcttcgcgctggcgatggacgccaccgatcggcgcgacgcagccttcctggccgacttctggtacccggacgtgcaggccggcgcgctgggcgtgaagtgggtggcgcgctgcgtgcaatccgccgaaaccgacgccggctgggtcgccttcgactga

SEQ ID NO: 451240 - DNA, 549 bp, Serratia marcescens
atggaaaaaattaatatcgtcattgatgacgaaaactgctatttcgccgccggattacgccacagtattatggaatatgcgcagaccaacaacaaaagcgtatgttttttaacgccgtacggtacggagcggccggatgtcgtgttcgcttccatgcggcggcgtgctcagcgctggcgccgtgcgggttatggcgcagagagcgtgcccattgtgacgatcaaggagcggcctattaggttcgttggtgaaatagagcgtgtgcttcgccgctcggatgaacaaggccgcctgtttgaattactgagcgagatattgaccggcgtgcgttatgtccccacaacctccaggcgggcgttgaccgggcgtgagcgccaggtcatggattacctgcggtgcggattggatcaatcacaagccgccaggatgatgggggtgagcgttaaaacggtacatagtcataaacgatccgccatgagaaaattaatgttatatcgcaaccatgaattgctgtattggctcttatcgcacgagggagaattatcttaa

SEQ ID NO: 451241 - DNA, 882 bp, Serratia marcescens
atgttttataaaaaaggtaggtgggggagtatagtgggggggttgtcgttattgctgtcaatgccatctcttggggcaatagatatcaaaatggagtgggtaaaagatcgatatcaggatatttacacattcacgtttacaccgacaggtagtgtcgaggttattcaggagcttgagaattttaaatgtaattctatagggataactgtcggtggtcagtgttatagcaattggagcttatgggtggatggtcagttgcatatgtgtgatgacccaaatactgtattcacaaatcctggtaccagtttacgtgaccataccacgcgagttaatcgtgctctgataaatcagacttgtatcgtttccaccacaagatacattaaattcaagggggacgaaaaaatatgcctgcttttgctcgctggtgagctgtgggatggccctccaggaatggggtttattggtggttatgtatacgtgcatggtggggagggttgccctgagcagggagggcaagtgctcccgccaatattgcccccggttaaaccggtatcttgttcgttaagcagcagtacggctattaaacatggcgcccttaactataactcagtccatggtaacgaagcccgtgctactgcgtatttatcctgcacacgcagtgcaacggttaacatcagcgttaacaacggtggcgtgctcgaccttgattcggcaggcgcgttacgttcgacgatatatgtttctgggcaacaaggaggaaaaaccttcaataatgtcacgggaacagatgtggaatttaaatcggtactttcactgaaaaataacggtgtgataagtggtgactttgaaaaaacaacggtagtaacggttaacatactttag

SEQ ID NO: 451242 - DNA, 525 bp, Serratia marcescens
atggcaggaaaaatgatgatgttgctatttgggttgagcggtttttcccaactggccggtgcagcggataatctgcatttttctggtgctctggttgccgaaccttgcgtgattcccccagggaaggagacggtggagctcaatttcggcagcgtggtggataaatacctctatgcgaaccagcgcacgccgggagaaagggtggagataacgttggcggactgcgatctcagcctgggtaaagcggtgcgggtgacgctaaacggcacggagagcgcggtcttgccggggttgctgaaattggcgccgggcagcggggcaagcggcgtcgccattggtctggaaacgcccgcaggggatgcattgccgattaaccttcccggcggcaagctgccgttgacggcaggagcgaacactcttcgcctgatggcctatgtgcgcggtgaaccggaggcgatcgccaaaaaaaccattgggcgcggtgcttttaacgcggtggtgacctttagtctggcgtatgagtag

SEQ ID NO: 451243 - DNA, 492 bp, Serratia marcescens
atgagggcgaaaacgagcattatgctgctgtgcggtgcgctgttcagccagggggcttcggcggcggaacaggcaagtatgcattttcgtggcgggttgcgtgcgccgccgccctgtacgattagcgacggcggggtggttgcggttgacttcggtttgcgggtgggcatcaaaaaagtggacggtaataattaccgccaggcggtgaattatcgtatcagttgcgaagcgccaggcgcgctcccgtgggaaatggtattgaccctgaaaggcaacgcgacgggttttgatcgggctgcggtgcaaacggataacagcaatctggggatacggatttatcaggatgacgcgccctttctgcttaacagcagcataaaaatagatccgtccaacccgcctggcctggaagcggtaccggtagccaaaccggggggatccctgacggaaggggcatttttagcgacggctacgctgcaggtagattatcagtga

SEQ ID NO: 451244 - DNA, 495 bp, Serratia marcescens
gtggacagtttgaagaaaatagcaccggctgcggtggcgctgctctttggcgcgatggctttacctgctgaatcagcaagcactgtgaccgtcagcgtcactgtgctggcacctctgccttgcgtgatcaacgagagcaaaccgattacggtcgactttggcgatgacgtgatgaccacgcgcattgatggcaacaactaccgtgtgcctgtggagtacggcttgacgtgctcttcaacgccggtgagaaacgaaatgcgattgcaaattgccggtaatgcggcagggtttgacggcagattgttaaaaaccagcgtgaatgggctgggaatagccttattgcgtgatggcgtgcgcataccgttgaatagttggcagaactttacctaccccgatctccccaggctcgaggccgtgccggtaaaacagagcggaagcggattgccgaccggtgagttcacctcttcagcgactctgcgggtggattatcaatga

SEQ ID NO: 451245 - DNA, 657 bp, Serratia marcescens
atggtaaggaaaaatatccatatgcgtgaatggcgatatctttgcgctgaactgcgctactacgctgcattgggcgggttggtactgatggcgccgctcagtttgacggcgttgctgtggctgctgccggcggctaacgccgtcgataactgggaagtggacggcgccaacggggtgctgcatatcagcggtgcgctgaccgagagcgcctgccggctggaaatggacagcgcgcgccaggatctttggttgggcgaaattgctaccggacgactggcgcagccaggcgatcgtggtacgcctatggcgtttgaactgcggctccgcgactgcctgcgcagcccgcctatcgttcgggacgagcggacgggcgccggttacctgacgcatgatcagttggcggtacgggtcgctttcagcgctccggctgatgcggataacccgcagttggtgaaggcgacgggcgtctccggcctgggcctgagactactggacgcgcatggccgggatgtgcggttgggcagccgcggtgaaccgctgtggctgacgccgggcagcgatacgctgagttataccgtggcggcagaacgcacggccgcgccgctgaatgccggcgcttatcgggcgatagtggactttagccttagctatgactga

SEQ ID NO: 451246 - DNA, 879 bp, Serratia marcescens
atgagagagttagtattcagaaagagagaggaagtgtgtaaatttttttttactctccttgtcagtgtttatttgacgggaatgcctgctgcaatcgccagtatctcgcttaacgcaaaatgggctcaggactggcgtgggttgtggtcgttaagtattagcccgcaaggcacctatgatttcaatcatgattttcaaacggcgaaatgtttgggaacggggtggtggccctgtgaagggcagtggcggatttatatcaagaataaagcttctttttattgtgagccccttgtcagcggatcggtcgggatgacgatggaggtatttcaggagcgcatgatgcgcgcctatagcggtaaaacctgcacgataagcgacttggttctggatgggaccgaaaaaatatgcgtaatgagttactttaccggtgaatggtctaatggctggactctatattctggcggacccatgtacgtgacatcgggttgtaatgaaagtacgcccgggggcggagagggggagacggttttaccgccggtcaaaccgttgagctgttcgctcaacaacaccatttcgcttgcccatggcaccgtcgattacagccggctcggcgaaagccaagcgacttatttggccaccgtgaactgcacgcgccaggctacggtgaaattaaccattcctaatagcggaaaggttaattttaaaaacgatgggtcgttctattcggtggtgtcggtaatggataaaccggggggcgctcagctttccgttaatggccctatgcaggtgaagttctcatcccgcctttatcatgtgggcaacgatgcgttaagtggtgattttaagagctcggccgttgtagtgctggatatattgtag

SEQ ID NO: 451247 - DNA, 546 bp, Serratia marcescens
atggatcgtcaaataaaaatgataggggcgctttgcctattgtgggtgtcgtttggttttgtttcgcaggctatttctgcttcgcaaggcgaagggcgcgtcaatatgcaaggcgctattatcgatgccgcctgtgccatcgccacggaaagtcgtgaacaaattattgacatgaaaaacacgacgccggcggatattgcgcgcggcgctaacggcaaaagcgtgccattcagcattgagctggtgaactgcgtgcttgagcgcgctgataaaaattttccggactggaaacagtttcaaattacctttgacggccacgctgatggcgacgcttttggggttaatggcgaggtatcaggcgtggcgctgaaaattaccgatgcagccggaaatatcgccttgccgggccggccattgccgccaatggatattgttgtttccggcgattatcggatgaatttcgccatggcgttagttgccaataatcagccactcaaggtggggagttatttttcttcggtacgtttcaaaatggattactactga

SEQ ID NO: 451248 - DNA, 747 bp, Serratia marcescens
atgatttttaatataaacgacaacgtcctctacaatgaggaggaaggcacgttggcgcagattgacaatgccaacggaaaaatagccctgctcaaacctacctgcaggttattatctctgtttatccgtcataataatgttctgttattacgggagaggttgcttaatgaggtttgggttgaacatggattaaaagcatctaacaataacctgaacaactatgtttcagggttgcgaaaatcgctggcgcagttcggtgaagaggagttaatcgttacctatccgcgccagggattcaaattcacggccagaataattcgcgaggtaaatgataatgagagtttagataaagaaaaggcaagggatcctcagcagcataaaatcgagcccgcgaaaagtagcgttatctggcggccgctacagcggctgataatgatagttgccgcctgtctggtgccgttcgccgcgatcgtgctttatcaaaacagcaatcgcattaacgtttatccattgggaagctatcagcagtgtcaaatttatagcatgcatctggatagcgggagcctggaaaaaattaaacgcataattcaacgcagcaggttaagctgcaaaaaacgcgcggacgtttactattatggcagcgtacgcaatgagaatttatccagcaatgaggaacagctgacgttctgcccgcgagagacaaacagtccgtgtattaataactatatcgataataaccaagagtaa

SEQ ID NO: 451249 - DNA, 468 bp, Serratia marcescens
ttgctgcggcgctggcgcttccctgcgttggcgggggcggcgctgatgggctgtgccgcgtcgggctactttatgtttgccaaaccccgcatgcctgagtgccgggcgatggtacgtatcgtcaaccaggaacagggaaaaacgctgacgagggtattgctgttgagcgtggtgcctgatgggccgcgccaaatgacgttgttgcttaacggtagcctctccgatggtgatacgcgctataccatcgacaggatagtcagaatggagtatcgctttcagggagggaattatctgctgcagataaaggagaacatcaaaaaaccgcaggactccttgaaacaagaggccctgaaccgccggttaccgatggttgggcaacatctgcatgtgcgcattgagcagctggatcggcgccattacctgtttgtcgataaccattcgccgctgtttgtttgcacttcatcctga

SEQ ID NO: 451250 - DNA, 789 bp, Serratia marcescens
atgagatacataattaataataatattaaatatcatgaggatagatcggagctgatctcgctgcatgatgatatcccgccgattgtgctgacggccacgctgaaccgcctgctttccgcgctggtgcgcaacaataacctggtgctttcccgcgaaacgctgctgacacaggtgtgggaggcgcacgggcaggtcgcttccggcaacaacctcaacaacaccatttcgattttgcgtaaagcgttctcttcgcttggtgaggaggagattatcgtcaccctgccgcggcaggggtttatgtttaccgccagcgagttgaagacggcggacagccaaagcgaatcgatgccgacgggcgagacggtggcggcagccgattttcccgatacgccaccgcggttgaagggggcgcgtatccggcgtttcgctttgacggccttgttggttctggcgaccgccagcggcgtttgggcatggcaggatgccggctatatgccgctcagtacgataacggtggggcatatcggcagctgcgaagtgcggtttgtgacctcttttcacaaaccggctcccggcgagatagacctgacccatttacggacgatgttggccagagacgggcgggcacgctgcaacgaaccggcgacgctgctgtactatgacagccgctcactggcgccgaatgccggcgaccgggtcagattttcttactactattattgcccgcaggtgcagatggcgacggggacggcgcagtgcgagaatatttatgaaagccaggatctgtaa

SEQ ID NO: 451251 - DNA, 1014 bp, Serratia marcescens
atgtttcagttaggtattgatgtcagcaagaaaaccctggatttgtgcctgctgcgggaaggtgtaaaaggcagggtgaaaacgcgcaagcttaaaaacgatcttggtgccaccagtgctgtcatcaactggctccataaacaacactgcgaaccgggtgatgtccatatcatcatggaagctaccggggtttatcacgaatcattagcatatggtcttcataaggccggagcaagggtatcgcttgccaatccacaccgcagccgagaatttgcgcgaggtatggggatgctgacgaaaaacgatcaggttgatgcttatatgctcgcctgctacggcacccttaaagagcctgcaccgtggactcctccgcctgagaatctccgttatcttagcgcacttttacgtcgccgcgatgcgcttgttgctgacagcacccgtgaaaaaaatagactggagaaatgtcgggccacggactgccctcctattattagcgaatccatcgaaagtatgctccagaggttgaatttagagcttgagcatctggatgaactcatcagggagcaccttgagcagtatcctgagttaaagaaggattttgacctgctgacgtcgataaaatccgtaggttttcagttaggtctgaatatgctggtaattctgcgaagccaccgtttcgacacggcagagcaggcagcagcctttctgggcgtcgttcctgttgaaaagtcctccggtacctcggtcagtgggaagtcgcggttatctaaaattggtccaccggaaatccgggcaaagctgtatctggcgtcgttgtgcggcctgagatttaacccgtcgatgaaagcgatgtatgagcggctttgccggcgtggcaaggcaaagatgtgtgccattggcgcactgatgcgaaaactcgttcactggtgctatggagtcctgcacacacaactgccgtttgatgctgaataccggtcttctgatgcgtatagcgcatgtaaggcggcatgctga

SEQ ID NO: 451252 - DNA, 192 bp, Serratia marcescens
atgcgtttattcattattgagtgtgtactgtcattcgggctgtattacattttggaaatgctgctgcgcaatacggtgccagccattgcgcgcgccgccgatacgtggcaatcatggggttttcctctattggtgggggcggtggtagtcgctttttgtgagctggtaatgatgcacaaggcaaggaggtag

SEQ ID NO: 451253 - DNA, 510 bp, Serratia marcescens
atggacaaggcgatgcgcgacatgtggcgaatgaaacacaaggcagtgcaaaagcagctgaatcgggaggcgtgggcgttggtgcgtgatgactggcatcacgcgcgttatatccagatcggtgtgctgaccagtcgtttcgtcaaaggctggctgttggccatgacgatgctgcttctggggttgggggggattttgctggtcctgtttttcctagagcccgaacgattctacaccgagtttaccgctctggatctgacggggttcatgcagctgcgtgcggctttgaaaactctgctggtcgatttttcttatcaatatgcgccggcttttggtgggctgtggatggtgatgagcgtttggcacagttacgtcgaccgcgcgcagttggtgcgcactgcggcgggacgcttggtgtcatcgtcgatatgggataacacccaggcaacggttgttttcgctgaggatagcaaccacaccggtgaaccgaaacgtgaggagaaaccatga

SEQ ID NO: 451254 - DNA, 414 bp, Serratia marcescens
gtgaataaatcagaaagtaacactatcactgttgagcagggtgcgtggtctcccgaacagcgtatcgccaaagcgcgtatggaatacaagcgcgagagcgcgcggcttacgatttttcttcatctgatggtgctgttctctgtggctgcggtggcgctctggatggtcagccactggtggtttgggcatgcatttgtcaaagagtacgctgcggacacacgtgagtttcatatgatgaacatgtggaacgtactgatgtacttcatgcccgccatgtttgccgcgctgtccgccgggtgcctcgcggtcgcactggtctttgagagtctggggctgtttagcctttataccaccctgctgtggcaaaagtgctgcatttaccgtcagtctcgcctgcaccgggaggatgcatga

SEQ ID NO: 451255 - DNA, 534 bp, Serratia marcescens
atgatggttacgcataaaatagttcaacaagaagctgaagagctgaaagatatccttaaggcgggagatattcaaattcccgatttttggagctgtttgtggccaggtttacttcttgtggcatggttggctttatgtccattgtttagtttttttatttcgagccagcctgttagtgaattgttaacagcaacaggtggtagtgcttttctcggggtgctgctatcgtttgggtttataaatgctaggagtctatatctgtcattacctcgagaatttagggtgggctcggaggtattatctctaataagaaaaaaaataagagcctatgcggcaacttttgctgtcctgattttaatgttttcattatctgcagcctacagtggtgtaggttcaatggcttatctctttccgttagttctttgcacagtaatgatgggtttcatttttaatatggacataggtcgttaccgcctttccgtatttacttcggttctggagcttatcaaatctcgcaagcagggaggtgagtaa

SEQ ID NO: 451256 - DNA, 420 bp, Serratia marcescens
atgaataagacgtcgtggctccctgcccgcgtgttgggcgttgccgccctggtgctcagcggctggttgccggcgttgcccctgttggcggcaccggcgatacaggtggggttttcgccggaagggtcggcgcagcagctggtattgagcgttatcggcgaggcgcaacgtgatattcgcctgatggggtacgcctttacctcgccggaggtggcgcgggcgctgattgcggcgcaccggcgcggggtggtggtcgatgcgaaggccaaccagaacggcgccggccgggcggcactgaacctgctggccaacgccggcgtgaacgtcaggacggtcaacagctataatcttgttcttgtttgcggtggtaacgcaagcgcttgtgctggcttcacggccaataagcaaaggctcgcctaa

SEQ ID NO: 451257 - DNA, 1086 bp, Serratia marcescens
atggccgccagaccgagaagtaggaaacacaaagacctgccgcccaacctgtacgaaagtaacggcaattatcagtggcgcgatccccgcgatggaaagcgctacggcctcggtaccgataaaactgatgctataaacgaggctgtagaagccaatctgctaatctacaacctgcagaacaaagtgcgcctggcggataggctgcaaggtgccgatattctgacgcttggcaaccatcttgataacttcttgggcatcctcaaaaagcgcgaattagctgatggcactcttcgtcaacgtgggctccaaattggttatatcaaagaccatatcggggacttgctgctttctcgggtcacgacaaaagacgtggcgggtatgatggatagttatgttcagcaggggaaaaaagccacggcagtcaagctgcgacagatattgaatgacgcgttcaacgaagctatcgccgctggccacatcaaagagaacccagtaacaccgacgaaggcaccggcaaacaaggtcttgagaagccgcctgacagtgaccgagtacaaccaaatactgagcgctaccagtgatcaagaacaatgggtaaaaaatatgttcgacctagcccttgtcactggccagcggcgcgaggatctggccgagatgaaatttaaagacgtacgtgatggttttttgtgggtagagcagatcaagaccggcgcaagggtttctttaccactgagcctttctattccgagcgaggggttggtgttggaggaggtaatttcaagatgccgcacatctggtgtcgtaagcaaatatttacttcacaccgttaggggtactaaaaaagggtctggattaaagcccggtactctatcaaagggattcagtacagcaagggataaaaccgatttaagatggccaggcaccgagccaagcctccatgaaatacgtagcttatcagcgcgtttgtataccgacctttacggaaaagaggtggctcaggctatcatggggcacaaaacagcagccatgacagacctctatcgtgatacaagaggggctgaatggatcaccgtaaaggtggtatag

SEQ ID NO: 451258 - DNA, 180 bp, Serratia marcescens
atgtgggcccgaacaggccgcatctatcctccggcggaaaagataggtcgtaattggtgggtttatccaaatgcgaaatatgtaaatccacataacccgaaggatgttgccaaaaaagccaaacccattaacaaatataaattagcggagcgtattcatggccgccagaccgagaagtag

SEQ ID NO: 451259 - DNA, 822 bp, Serratia marcescens
atgtctcaattagacggctctgctatcgaacaaattaaaagcctcactcttgcagcatcattactcaagaatgttgaactgaccgattgccctgtagctgtattgccgaatgatgttgaccttcacaacctggagggtttcaacgcaaaccgcttccgcttccgtggaaacatgatcactaccagcattgaagacttcgttaaatattcttcggactacgctggtgctggcgtccgctgcttcatcgatgccgatcgcatgcaggctgaaaccatcttcaatctgggcaccctggataacccaggccacgccgacaataaagccgctattaccctgaagaaaacagcgccattcaccggcctgctagatatcaacggccggaaacaaggccagaaagaactggctgaatggctggaagataaccgtgatttcctgttggcctttgatgctgacggcgcagtgctggatatcaaacaggccgttggcgccgttcgccgcataaccattgagtcaatctcaacttccgatcacgaagagaacgatttcagtggcaaacgctcgctgatggaaagcgttgaagccaagagcaaggacgttatgccggcggccttcgaattcaaatgtgtaccttatgaaggcctgggcgaacgcccattcaaattgcgctacagcattatcaccagcgacaagccgatcttggtgctgcgaattgttcagctggaatcagcggaggaagaaattgccgctgaattcagagacctgctgatcaataaatttgatggcgttgaagttgaatgtttcatcggtaaatttaaagcttaa

SEQ ID NO: 451260 - DNA, 252 bp, Serratia marcescens
atgtctaagaaagacgatattccagtattccctgttgcaggttggcaggccggtcctctgcctgggtataatgcgattgccctcaaatttcagtttctttcaaccccaatgcagaagcttgaagaggcacaagaaagccagttcttcgccatgccccctgacatggtcaggaatttgatttctgatctaacaaggcacatcgagaaactggaaaagtccggtattcaatctccagcaggtgaaaagcattaa

SEQ ID NO: 451261 - DNA, 669 bp, Serratia marcescens
atgaatcaacaatatctggagtatgtccgcggtgctgtgtcgctcgccctggctgatatccatggtcagagcaaaggccaactggcggcattcgagggatccgcgctggtgcgcacaacgcgctttaagcgccagagggttcgcacagtggtattggaaaagcgcagagtttgcccgataacggatccgatgcactgcccagaaacgcgaaccagaaagaaaccctttccgttgattgaagagctgacctattgcaccagttcctggcgccgggccatttcagtgctggatacccatcaggaagcatggctgcgctattgttatggtgattataattaccatgataaacagttgcaggtggttccttatatctgggaacaattttcaaaactgtgtgcatcgcggatcagtaacaaggtcaaacatcgcctacagggtttgacgttgttggcggttcaaaccgttgccagcatgattaaaggttttccgaaggattatacccatacacagctggctgaattgtctggtgttagtaaatcgacgtggtcagaaacttacagtggtcattggaacaagctgatttccttggtggaggaattggattcagaggctttgcatttggtggctgaaaaaagaatttcatcacgttcaaggcttttggcatcatga

SEQ ID NO: 451262 - DNA, 261 bp, Serratia marcescens
atgtcacgaatgctaatcagagcagccgatggagccgtgcacactggtagcgcagtgtcattcgtcctcggcatcattaattttttctcacagagcgaatggatcattatcggcgtcatcgtcggcatgctgtgttcagtaataggcctgatgatcgggacgtactttcgctgcaggcgtgaaaagttgttgcgtgattggatccgcaagcgcaatgcatcgatagacgtagatgaactccgtgtgttggagcgtgagtga

SEQ ID NO: 451263 - DNA, 1098 bp, Serratia marcescens
atgcaattatctaaagaggaaagcacatcactttatcttgttaaagcgatagggataacttctgttgtttttggtcattatgtgggatttataaaaattttaaacccttattatttccacatcccactattcttttttataggtggtattactttaaaggatacattcaatgttaggcacctattaaaatcggttggctcgttgctgtcttatctagtaacaagatacataataatcggctggctttctatattacttatctacattggctttacgtctctatccgatccgtttggaaatggtattattgacagcatcataaaggcttacgctggaaacatgcacaacaatcagttattccttgtggcatggtttttagtggcttacattttcgctttagttatctgcactattgttgtgtttttatccaaaaacctacaggcaacagacttttctaaaacatccttgttaatattcctatcgatgttatctggtgttttggcattagatttcttttctgttgaataccaagagtcacataaacaaatatataacctcataactcagtcaatgtatggctcaatgtttatgcttatcggatatctagggaggaaattcgtttttcacgcacattccttaagcgcattattattatcaatcaccctgacaactgtcataatggtagtgtataaaacaacacctatgactatgtcatggagcgagtataaagatgggtttttcatttcaactatcattgccctgctgataatctactgcatcttcatactgtctaacgcatttgcgaaattcataaacgaaaaatcaataattattcttattggcaaatgcaccaagtcaatcatgacatggcacttaagcgtgtttatattaatagatttgatattttcaattacagtcaaatctagaccactagcctcacttgggccttttgagcactttcataataaattttcaattgctacgtacacacttgccggcgtattgatacctacgctttttgtaaaattaaatgtcattaacatatttaaagtaatgtatcaaaaagtttcgcaaggggggggggctgaacgccgttaa

SEQ ID NO: 451264 - DNA, 537 bp, Serratia marcescens
atggatatgattttttgggaaaacgaacctcatagctgtgagcggtataaaaaaaatcagcaagttttgaaaatcacaaataagttgaagaagtatctgttgaggaaagtaagcgacattgatgttgtagaagacatagtacagatgacttttttgaaagctatagaaaacatacataagtatgaagagaaatcagcaatggaaacttggctattcggcatatccaaaaatttaataaaagaatattacagaaaaaaaaggcttcgtagtgaaagagaggatattattgtttttgaccctgttggtgatgggggggggattgaaatgataatcgaccagggaaggcgtgctgaaagcatgattaaagcaataaataaaatgcgccatgatgaaatatatatattaacatctatttgttacgatggtcaagactatgcagatctttcaaaggaattaaaaattcccatcggaacattaaaatcaagggtttttagaattagaaataaacttagacaaaattgtaacttcaacacataa

SEQ ID NO: 451265 - DNA, 537 bp, Serratia marcescens
atgaaaaaccagctctgtttagtgttattaaccctgactgccgcgggctttacggccacggcagcgtccgctgagcctcgttcagtcggcagcctgattaatgaacgtttatcgtatatgaaagacgttgccggcaataaggcacaacatcatcaggcggtcgaagatctggtacaggaaaaaaaggtgctggaaaaagccgtcgcggatgctgatgcactgggaataaaaggtgaaacggtaaagccttttattcaggcccagatggatgccgcgaaagcgatccagtaccggtatcgtgcagactggctgtcggtgtcggaatccggctggggcccccgcccgctcaatgaggtcagggagaaaaccggtcagttgaattattccattctgcagacagtggctgaaaggttaaagtcaggtggggcgctgaccgaacaggaaaaagagtgcttcatgaaggatatcagccagaaaaatttaaacaatcaggacaaacttttgatctggaatgcgctgagaatggtgtccctgtaa

SEQ ID NO: 451266 - DNA, 1122 bp, Serratia marcescens
gtgtcacccggacagcggggacgcctgggggctggcatcggctatacgcatgccttctgggctatcgccctgtttcgtctcagcgaagccactggtgacacgagctggcaggagtacgggataaacattttttcgccatacattgaggcatccggtgctgtccacgatatcaacggccgcccccttactacgttcactttcaacgagatgcttaccgggcgtgccctgctggatgccatgcagtacagtgcagagccccgctttgttcacgccgccagcctgttccggacctcactcggcaggctgccccgcacgaaaaacggcgtttttgcctatcaccctgataatatcatctcggacgggctgtatatgacccttccgttttatgcgcaatatacccgtcagtttaaccagcctgaggattacaccgatgtggtccgccagctgcagaccgcttttgctgtgctgtatgatccggcaacacagttgttgcatcatggctgggatgaacagaaaacggagcgctgggccgacaaaatcaccggacagtcacacggttactgggggcggggtgtcggctggtatgccatggcgctgattgatgtgctggataacattccgttcggatatgatcaggctcgcagcagcctgactgagcaggtgaacagtttggctgccggattactgcgtcatcaggctccccaaaccggcctctggtacaacgtgcccaatcagccccagaaaccgggtaactttgcggaaacctcctcatcggccatgtatgtgtattttctggcaaagggaataaacaagggattcctggacgggcgctatctgcagccggcgctgagtgcatttgacgggattataaaacaccgcattcgtacggacaaaaacgggacgccgcatttactgtacagcagcaatgtcgccagcttaggaaaagtcccgggccagccagaccccgtcgttaaccgggatggctcatgggaatactatatgagtgaggggatcagtgctgacaacccgcacgcgataccggcatttgtaatggcggccattgagatggacagattgctccagtttgagggggcatgcagggttcagcctgataaattttaa

SEQ ID NO: 451267 - DNA, 1128 bp, Serratia marcescens
atggccaaaagtttcaaagaagcaatgcgtgaaaaacgcaaaaaagcggcgtcaccgcaaacgcaggttgaaaccctgacggccgaacgtgagctggcgttaccgcgtaatgacctgaaccagaacgacctgaaggtcaaccgcgctgagcatgaggaccctgcaggtcagatcattcgtgttccaatcgatgatgtttacgctattgaccaagttcgccctgaagaagactttgacgatgaagttatcgacgggatgaaacaaacctacggcgatttcgggatattatcgccaccccgttgtttccctcgcgataagcgtggatatcgcatctggttgggtgaaacacggtggcgttccgcaaaggaaaaaggggatttgttcatcgacatttatgtcggcgtgccgcctgaaaatgagaagaagcgcatctatggtcaactgatcgaaaaccttcaccagtctgggttgaaaccgttagccacagcaatacagctgcaggcacttcgcgatgagcatggtgaaacgcaagagtcgatgtcccgtattttgggcaaacccaaaacgttcattagcaaacacatgcggctgattgatgcgcctgcaccggtcatcgcgttgttgaaagacaaggttacaaaagatgtcgacctagtctatacgctgtgccaaatcaatgacatcagtcctgatagcgttgataaactgaccaaactggttcgggatggaaagctgacacgccagggggcgattaaagagctgaacgtactgaaggggaaggcgttaaagaactcgccgccttcggcgccactaatcaaatctgtgacagaaactcaggaaaagaaccgtaacaaagatatcttgacggaacagccgggaactaaaaccggcatctctacctctggccagcagaatgccggctatgtgcagtcccataagactcagacgggacaggcagtgtctaacgtcaaaatatctcgagtcatggtgaagtttgaaggtggtgaaggctatttactgactgaccggatacctgaggaatatggtcaggtttggattgcgctgccgataggtgagttgtgcattgatgccacagaaatatctatccaggggatcaaagaggtatag

SEQ ID NO: 451268 - DNA, 2193 bp, Serratia marcescens
atgataagatatctgttaatactgatttctatagcaactctgttccctatatcccctgtcagcgctatctcgctgcaacaaggcgaagtgcaattcagcattgacccagccacattacaaatcagcgctgatgctgtcgtggtgaacaatcctcagcaggcacaaaaggtcgaagaactctggtccacctcctcacaggcaaactggcgatggccggagcgcagtgctcagattacggcaaaagctgatggcaacgacctccacctgactatcagtagtacacgcccccaaacccttaactggttcagtatgcctcctcattttactatgctgcagctaccaataggggaagggagtcgaataccgcttgataatgacccgtggttgtcttatctgactagcgaactttccgaggtggacaccaatttcgatctgaaactgcctttgtggggactggagcaaaaaggaaacacctacagctggctgttactatcccctttcagcaatcaactttcttttaccgaggctggtaagcgattaatgatgcagggtgcccatgtgttcaatcgatttaatcagcatcaacccgtcgacattttgttgcatgtaggaacgacgccgctttctggcgcgatccgctaccgtgaatatctacagcagaacgataagttcagttcgttacgcgaaaaaattgcaaaggcacctgaaggaaaaaaactgattggtgcaacgcacatctatttgtggggtaacacgctgttggctcaggaagatataaagaactggcccgatcttattgggtacctgcaatcagcagcgggagcgtctatctggcagaatattggtacggaagacaaaaaagtaatgctacaattacagggtcgtgaacctgaaggttggcagaaacaatccctgacagaaacgattaatcgtgcattggtggatatggtccccctgaactcttctcccgacaggccatcatttttagaggcacagcagcaacaggcagctaaagtgcatcagttggcccagcaattgctgggacattttcttgtgccatctgaacaatgggggccgggcctgtctgaaacggtcattaaatcattgcatcaggctggattagcacggctgtggctgggtaccgataactggaccgctgcttttctgcatccgcaggcagtaacgcgggctaaagaggctggctatctgattgccagctacgattcctatgacaccggcatccctcagggccttaatgacagttggctcaccgctcaattgcccgggaaactaacaaaaaaatgtgccatcgtaagggctgatggaacgaaaaaaccgggtttcgggggggaaggattctatcttaaccccggctgtgttttgcctttttctcaggtaaggatgcgtgagctgatccggttggctaagctaaatagtcttttccttgacgtagacggaacgggtatggtttccgacgattatagtcccgaacatccgacgggggcagctcacatggcagccgaccgtaacacacgtatggcttggtttaccaataccatgaaattaccgctgggctcagaagacggaaatgcggtgacagcccgccacatcatgtttgcgcacggtatggaaacatggggatttggctggcgtgacggcaatatgcggcataacaaaaagtccccctattatcttggggcttggtggcccagcgccgaacccgccacttttttcaaaccggcacaggtaaaacccctctatcatactgtcgtattcgagccgcgctatcgattaccgttgtatcaggccgtttttcatgatgcagtgataaccacacaccactggacttttgacaacctcaaattcagcgatgtcaaaacaacacgcgcactgcttagtcagttgtataatacccctccgctcttcaatctcagtcgaagcactctgaaagcaagattacctgaaatcataaaagccgatgccagtttccgcgttttgcatcaagcattgtgggataaagcactgacggggttccgctggctcgatcgggttggttgggtgcaacaaacgacatttagtgatggctcagtgctgactgcaaattttggtgatagaaccttcaaaggtattgctgcaaaaacactgagagccagtctggcagatggccgtactatgtattttaagcaagagtaa

SEQ ID NO: 451269 - DNA, 480 bp, Serratia marcescens
atgacctatttgcaggcattgtttcagacgccgggtacccgcagatttattccgttagcgataatgcgaatcgccctcggggtgttcttcttcgcctcgggattcaataaagtctttgttccttccgtccaaacaatgatgctggaaaccattaccgaggccggcatcccattccctgaacttatggctgtttttgttgcctgttgtgaaatgttttttggcctagtgttaactatcggtcttttgactcgtctgagtgcgtttgttcttatgattattagtttggtggcacttttcaccgttggattacaccacatcccggctgaactgcccttcctgacgtggtacagctggctactctacttacctgagtccagttatattctcatatgcatgctattagttgtacagggatgtggtccatggggcgttgaccgtatgattcataatttttgcaacgataaagcccccatcaactga

SEQ ID NO: 451270 - DNA, 960 bp, Serratia marcescens
atgaccataaacattcggctgactattgcagtaacactccttgctgtgacgctgccaatattcgctaaaacgccagaaaactttatctataccagctctggtgatctcgaagcagcatctgccattatggggcgtagcgacattggtggcgctcagatcgtttacaattggcgttcactcgaacctgagaagaacaaatacgacttctcgcagattgaaaaggatctggctcgtctcagggtagccaataaaaaactcttcatccaaattcaggaccgttttttcgaacaagatgctcggtacgttcctgattatctgatgaatgacgcccggtatggtggtggaatatcgccacaatttgataatcccggcgaagggaagccaattggggccggttgggtggcacagcaatgggatcctgctgtacgccaacgttatcaggctttgttggcagcgattgcaaagcgtttcgatggtcaagtctatggtgtgaacttacccgaaacagctattgatcttgacaagaaaaagctacctaaaggattctcctgcgataattatttcgcaggagaaatggaaaatctcacctttgcgcgaagggtgttcgtcaaatcacacgtagtacaatatgtcaatttttggccgtgcgaatggaacaacgaccacaattacatggggcggatgtttgagtttgccagtgccaacaatattggacttggtggcccggatatagtccccaaccgcaaggagcaaatgaagaactcatatccgttcttcaataaatacaaaagcaagctggccctcattgctatggctgtacaggagccgaccttgacttacaggaaccctaataccggtaagccatttagcaaggatgagtttgtacaattcgcagaagattatctcggtgcagatatcatcttctggagcacgacgtccccctggttgactaagaaatag

SEQ ID NO: 451271 - DNA, 615 bp, Serratia marcescens
atgttaattggttatatgcgagtgtcaaaagcagatggttctcaggcgaatgatttacagcgtgacgcgctgatcgctgccggcgttgacgctgcccatctttatgaggacctggcatcaggaaaacgcgaagatcgccccgggctaatcgcctttctgaaagcactacggctcggcgacacattgatcgtatggaaactggaccgactcggtcgcgacctgcgtcatctcattaatacagtgcacaacctgaccagtagagatattggtctgagggtgttgactggtcacggtgcgactatcgataccacaactgctgttggcaagcttgtctttggtatctttgcagcactggccgagtttgagcgcgaactgattgctgagcgaacgacggcaggtctggcatcagcaagagcccgtggacggaaaggcggacgcccatataagatgacacccgctaaattgcgcctggcgttggcctcaatggggaagtcagaaaccaaaatcagtgctctgtgccaggagctaggaatcacacgccagactctgtacaggcatgtttccccaaatggggagttgcgccctgatgggaaaaaactgcttggccgggtctga

SEQ ID NO: 451272 - DNA, 303 bp, Serratia marcescens
atgaaaggtttccttccccgtttacgccccgggctttcgccgcgacaatggctgttttgctaccctgaacgttacgccctgctgattcagggcaaatataatgccctcctggtccttaatgctgcggatcaggcgatccacaagagccaccatcaacgtatcaccggattgcaggaactccagcagctgcaattcgctccttacagtccggctgtttccgctgactttttctgcatgaatgatttcacaaccggcagcgcggagaatttgtgtccgcagggtaagatcctggtcgctggttga

SEQ ID NO: 451273 - DNA, 609 bp, Serratia marcescens
atgtcggctctaccacgcttgagagctgggtacgccagctcaggcaagagcgtcaggggagcacgccctctgcgccccccattactgcagagcagcaacgtatccgcgagccggaaaaacagggaagcgctgagacgcatcggtgagctgtacgccatcgaagccgagatacgcggcagcccgccggagaagcgactgtcggtcagaaaagcgaagacggtgccgcggatgcaatcgctgtacgactggatccagatacagatgaaaacgctgtcgcgccacgcggagatggcgaaggcgttcgcttatctgctgaaacagtggaatgcgttgtccctctactgcgagaacggctgggcggaaatcgacaacaatatcgcagagaacgccctgcgcggtgtcgcgctggggcgcaaaaactggttgttcgccgggtcagatgcaggcggagaacgtgctgcgatactgtactcgctgatcggcacgtgcaaactcaacggcgtggagccggagaggtggctgcgttacgtgctcagtcatatccaggactggccggcgaatcgggtgcgcgagctgctgccgtggaaaaccgacctcacctctgcataa

SEQ ID NO: 451274 - DNA, 177 bp, Serratia marcescens
atgaatggtattgataacaatagctcagcttcagcttcaagcttgaatagtctgaaggggcagtcggataagctcaccgaggatggaatgaaacagaatattgaggaacagaagcagaatctgctgatgaatgctgttaagcataatcagaagttgttagagaagctctttagttaa

SEQ ID NO: 451275 - DNA, 249 bp, Serratia marcescens
atggagttggatgatgtaaaggattcactgcgccttcctgccaggctacggagcgggtcagtgcgatacagaacagtattcaaacaaggcttcgttgataaattcggccccgttatcaacatcaaggccgagaagtgggaatggcagacttttttgaaccttatcaacagcccggatgatcaactcagcattacgcgccggtacggcacgctgattgttacacgaagcgataagcagcagatggagtaa

SEQ ID NO: 451276 - DNA, 822 bp, Serratia marcescens
atgccgggcaaggtgcacaccgacgacatcccggtgccggtgcaggcgccggggagtggcaagacccgcaccggccgtctgtgggtctatgtgcgtgatgatcgcaacgcgggctcggtgatgccgccggcggtgtggttcgcgtactcaccggaccgcaagggcatccatccgcagcagcacctggccgggtacagcggtatcctgcaagctgatgcgtatgggggctacaacgcgctgtatgagaacgggcgcatcacggaagccgcctgcatggcgcatgcgcggcgaaaaatccacgacgttcatgtccgcacgccgaccgacatcaccacggaagcgctgagacgcatcggtgagctgtacgccatcgaagccgagatacgcggcagcccggcggagaagcggctgtcggtcagaaaagcgaagacggtgccgcggatgcaatcgctgtacgactggatccagatacagatgaaaacgctgtcgcgccacgcggagatggcgaaggcgttcgcttatctgctgaaacagtggaatgcgttgaccctctactgcgagaacggctgggcggaaatcgacaacaatatcgcagagaacgccctgcgcggtgtcgcgctggggcgcaaaaactggttgttcgccgggtcagatgcaggtggagaacgtgctgcgatactgtactcgctgatcggcacgtgcaaactcaacggcgtggagccggagaggtggctgcgttacgtgctcagtcatatccaggactggccggcgaatcgggtgcgcgagctgctgccgtggaaaaccgaccttacctctgcataa

SEQ ID NO: 451277 - DNA, 717 bp, Serratia marcescens
atggttacctcctatcccgatgaaaacgcccggctccgggcgcaactgttggagcagcaaaacacgcttcgccaaatggcggagtacaatcgcctgctctcgcaacgggtggcggcgtatgccagcgaaatcaaccggctgaaagccctggttgccaaactgcaacgtatgcagttcggcaagagctccgaaaagctgcgggaaaaaacgcagcgccaggtacgcgaagcggaagaacgcatcaacgccctgcaggaagagctggcggagacgctgggcgaacagcatgatccggcgttgccgcagccgttgcggcagtcctctgctcgcaagcccttgccagccagcgtaccgcgcgagatacgcgagctccctccgcaagaaagtgcctgcccggcgtgtggcggtggcctcagcctgctcgggtgcgatatctcggaacaactggagctcatcagcagcgccttcaaggtcatcgaaacgcagcggccaaagctgagctgttgccggtgcgacaccatcgtgcaatcgccgatgccctcaaaacctctcgagcgcagctacgccggtcccggcctgctggcgcgcatcgtcacggcgaagttcgccgaacacacgccgcactaccgccagtcggaaatctaccgtcgacagggtgtggagctgagtcgggccacgctcgggcgcggtcagcgaactgctggagccgctgtatga

SEQ ID NO: 451278 - DNA, 696 bp, Serratia marcescens
  misc_feature (202)..(211): n is a, c, g, or t
ttgattatacatgatagagtatcagaaaatagcgaaaaatgcgactctaccaaagagttaaaattgattattgtcgacccttgtttttatagtcgagaaggactaatagaagctttacggataagaacagagttcgagaaaaaatggcagatttcacatgaaaactcattgtccaacttgctttccataatatccattcgannnnnnnnnnttcgacaaattaaaaagacaataaaaattaatacatttaattttttggtcataaatttgccgcccatccccactattgctctttccttgctgttacaactcagggagtttgaaatgagccgttttgatagagtgacgattctatctgattttaataacgataaaattctagatatatttatacgcataggtggcaatgtgaacgttagtatagaaagttcgaaattaccggcttcaaaaatatgtgacttgatattattggcgaataatcttgacaatataaaaaaagatattacgccacataataaatctctacagttatctaataaggaatgtatagcgttgcttttaatgttacagggtgaaccagttgcctcaagtgcttttaaattcagcattagtcgcaaaactatatactcgcgacgccattccggattaataaagttaggtgagaccaatatgaaatctctgctaaataaactttag

SEQ ID NO: 451279 - DNA, 381 bp, Serratia marcescens
atgaaggtttctgctatctttgcatctctaactctggccggtttttgctttgcagcaaatgcctctactcctggtaatgtcgccgtatatgccacggaacaatctcaggggtctatatccattggtgataaaacggcatacaccaaaacctttgaggtttccttagcaaagttatcagctggtactgccgatttatcaaagctttgcctgaaagcttactctccggacaagaaagaatacaaactcgatactgttgatgaggttttaacctctggttccctgaaagaaggtaaaccggtaaagggaattgctgtgtttgcttctgagaatgatgacgttctcaaagccgccctggtaaagatttccgacgattgtaaataa

SEQ ID NO: 451280 - DNA, 588 bp, Serratia marcescens
atgactgaaatacggatcgggtatgcccgatgctccactgataagcaggatttgaccgcacagcaggaagcgctggtcagactcggtgtttccccagatagaatttacatcgataaaggactgaccggttcaaaccggcaacggcccggcctggatcaggcgctggccgccgttcgccatggtgacacactggtggtgccgaaactcgaccgcctggcccggtcggtaccagatgcccgtcaaatcgccgatgccctgcaggccaggggagtgaaattggcactgggcaccagcctctatgatccggcagacccgatggggaaaatgtttttcaatgtgctggcgacgtttgccgaatttgaaggggatttgatacgcctgcgtacccgtgaaggcatggccattgcccgtgcgaaaggaaaactgcgagggaagcagccgaaactgtctgaaaagcaacaaaaagagctctgccgcatgcgggaaaccggccagtactcgataagcgatctggcagaactgttttctgtttcacgcccgacggtttaccgaacactttcgcggcatgcaccaatttcggaaatctaa

SEQ ID NO: 451281 - DNA, 3036 bp, Serratia marcescens
atgacatcccatcgtaaagacaaaaggctctctgttttaacggatgccgaaaaattcgcactgtatggtctgccggactttgatgaaagccaacagctggagtttttatcgttatccaccagtgaactggagctggccacaaaccgacctggcctgcaagcgcaggtctactgcattttgcaaatcggttatttcaaggccaaacgcgctttcttccgttttacactgtctgaagtagaaagcgattgtgagtttgtgttaagccgctacttccgtcatatcgcttcattcaaagacaccctgattgccaaccatgagtattacgcccagcgtaaactgatcgctgagctgcagggatattctttgtggtcagagaggttcagactacagcttgaacagcaagcagcccaaattgtacgacgtgatgtcactcccggttttgtcgcaactgaactcatcatttggcttaatgaacagcacattattcgtccgcgttactcgactttgcaggagttgatcagcagcgtattgtccgcagaacgccggcgtttgggagatatgttggcggcttccctggacgaatcggcctgtatggccttgtcctccttgctgaaaagtgatgataccttatctcaactggctgcgttgaaacaggatgcaaaagattttggttggcggcagatggtgggtgaacgtaaaaaatgttccaccttggcgcccatttaccagatcgccaggacgctattacctgatctcggtatttcgcgtcaaaatttgttgtattacgcgagtttggccaacttttacactgtccgtgacctgcgtgatcttaaagcggatcaaacgcgactttatctgctgtgttatgcctgggttcgttatcgtcagctcaccgataatctggtcgacgcgatgttcttccatatgaggcagttagaggcagagtgtcgtgctgaagtccaacgttccttgtctggcgatcaggaacgccacagcaaggaaatccgacaggttggccgcctgctgtctttgtatgtggatgagcgtgtggccgaccaggttccattcggggaagtgcgcaaacgtgcctggaaaatcatgtccagggatgtgctgcaaagcacggcacaacgtatgagcgtcaagcccgtaagcaagctggcgctacactggaaagccgttgatgggctggttgatcgcattcgtcgccatctacgtccgttgtatgtcacgctcaatttcgtcgggatcaatgctaacagtccctggctgatggccctcgactgggcgaaaggtcagttcatcagacaaccccggggttcacaatggccatttgaccaatgcctcgacgccacgttaccgaagcggttgcgtccttacctgctgatttatgatgagaaaggtgaacccacgggaatacaggctcacaggtatgaattctggctgtacaggcaaatcagaaaacgttttgaggctggagaaatctatctcaacgacagtctgcaacaccggcgcttttcagacgagctggtttcccgggaaaggaccgctgcgctggcagcgcaaaaggacattccttttctccgccagccagtcgaagaacagttagatactctgatggccgaactgaacaagcagtggcgggcatttaatcgggaacttaagaaaggcaggctaaaacacctggaatacgatgaaaatagtcagacgctgggttggcgtaaatcaaaggtagacaacctgaaagctcgggagcaggcgttttacgagcaattgccgttctgtgatgtgacggatgtgctgcgatttgttcaccgtcagtgccgatttctttccgccctgacgccactacagccccgctatgcaaagaaagaagcagatatcgacagcctgatggcggtcattatcgctcaggcgatgaatcatggtcactctgtgatggcccgtaccagcgatattccttaccacgtgctggaaaatacctatcagcaatatttgcgcctggcttcattgcaggccgctaatgattgcatcagtaatgccatcgctgcgctgcccattttccccggctactcttttgaacctggtgtcctgcatggcgcggtcgacggtcaaaaatttggggttcagcgtccaacggtgaaggcacgctcctcacgcaagtatttcggcctgggcaagggcgttgtcgcctatacgctgctgtgcaaccatgtgccgctcaatggctatctgattggagcgcatgagtatgaagctcaccatgtgttcgacatctggtatcgcaatacgtctgatatcatgcccaccactattaccggtgatatgcacagcgtcaacaagggcaacttcgttattttttactggtttggccctcgtttcgaaccccgctttacagacgtgaacaaacaggcccaggcaatatattgtgctgattctccggagatatacgagaaattccttatccagcccgtcggtcagattgaccggccgctcatcgtcagggaatacgccaatatggcgcaaatagcggccacattggctctgaaagagatgacgcaaggtacgctggtccgaaaactgtgtacctatacggcgcaaaacccgacccggcgagccgtgtttgaattcaaccggcttgtccacagtatttatactctgcgttatttacgggatccgcaaagagaacgtcattctcatcgttcacagaaccgtatcgaatcttatcaccagcttcgttccgcgatagccaaagtgggcggcagaaaggagctggcgggtcgtactgatattgaggttgagatcagcaaccagtgcggaagactggttgccaacgccctcatttattacaactcggcaattctgtcgcatctgttggaaaagtatgaagccagtagtaatacccgaattgtcgaactacttagcaaaatatcaccgatcgcctggcaacatattttgctgaatggacattaccggttccagggggacaaaagcacaattgatatagagcagttggttgcagagttagaattatga

SEQ ID NO: 451282 - DNA, 678 bp, Serratia marcescens
atgctttataaagtgttttttggtgcagctatggcgttatcaataggcaatgtgtgtgcggaaggtattcgcagcatgaatacgcttgatgataacttcttcaatgacaagtccattcaggctaacttaaaattcaagaacgccacggggaaaatattaaccccgaagtcatgcgaggatttctatgagaaatacaataattcattatcttttgaaaatgacactccatcgtccaactactcttccgtaaaaagcgcattggttgaatgtatagtaaataaagaaatcggcatcaaaaacattattacagatgataccggcatcaaaggcattaaaaaagatgagttacctaaatatcttccagctgactttatgcttgctataagtgatgatgaaaagcaaagtgtgaagaaagtgattcacgaagctaccactcttattgacatagacccatctcttgtttatttagaagagaccaaaggtgtctttgtatacaaagacaacaaaaatacattttactatattagtccgattggttcttggcataaagatggggataaaatttatctcttcaaattaacaaacacgttgtcagaaggaacatataacaatacaaagttttattatttaaagaaagaaggacctggatttaaaacaattaaacttattgatccataa

SEQ ID NO: 451283 - DNA, 702 bp, Serratia marcescens
atgagcgacattacagttacagccaacccaattccaactaatgatgctggcggtattaccggcgccccttttaaccaacacgaccctcagccgagtgctctgcaggaaaatgaggatcaatattataacggtgacacttacctgcctggtacagatgatttggatgaggctgtttttgacaacctcttcttccatgagggaagtattactcatatgtatatggacacgacagggcatgtcacgatcggtatcggtactatgctaccaaatgtacaagctgctcagactgtgccttttatttctgccggtaattcatccacgccacaacaaattgaagctgagtataatcgcgtggtcgctattggttcaggttatacagcacaacattatcaacagggggctacaatggggatttcccctaatactgtccgtagccttgctcaatctcacgtaaatgatgaccgtaattatttgcgtgggatgtatcctgaattcgatagcttcccgctctctgtaaaagttgcactgcatgatatcatttatactgtgggtccaactcgattaagaaatggcttccctagctttaacaatgctatcaacagcaagaactggacggaagcggctaaagaatcgaaccgaaaagacgttggcgcgggtcgaaaccgaaatacgcgtcgtcagttattgaccggtaaccagtaa

SEQ ID NO: 451284 - DNA, 660 bp, Serratia marcescens
atgggtgactggtttattgccaccgaaggcgtgaaaattgtcaaagacagcgccaacctggcgccacaaatcatcacggcagtagcgtctattggggcggcgctgggtggtgtggggctgacgcaccgctttacccgcaaacgggagcaggcggccgctgagcagaaactcgcgggggagcgctatttcatcgccacggagctggttttcaagcttgaagactatgcggcggcgtgtgcgtcggcgacgcatgacaacggttgtcctgacgagaaaggcttttactgtgccaccacgtcggtcccgtccctggagtttggtgatgtgacaggggattggcgtgctctaccggccccggtcatgtaccgtttgcgggaaatgagcgttctgcaggctgaggcccacaacgcgatagataccacacacgagtatgattacacgcctgattttctcctttattttcgcgaaaggcagtaccagtatgcgcgtctcgggctgcgggccctgttcctggccaagcgcctgcgcaagctcaccggtatgcccacttcccgcctcgacaactaccgctggtcaccgcagaaaagcttgtggcaacgttggcgcaaagagcgtaagtcgcggcacaaacaacgactggccgagaggaatgacacatga

SEQ ID NO: 451285 - DNA, 354 bp, Serratia marcescens
atgacggaaatcattggcagtgaatctttactgcaacgcattgcactactcgttcaattgagtagcgacaaagcactctataggaaaacgaaagatgcggaggggcaggactactttctgatcctgaatgcacatggcgatgaagtggccgaatgggacgagcaacaatgtgattggtgcctcgtcaagccaccccgacctaccggtgctacggaaaacgccattgatcttgggccagttcttgcccgtatagagcagcaaaccttaaaaatggagctgtgccgaggacagcttaacttactgagcccaggccctgtgacgaagaaaactgttaagcggattggaccaaaataa

SEQ ID NO: 451286 - DNA, 267 bp, Serratia marcescens
ttggactctattgccaagttcagtaaggcgttcaactacacaggcaaggccatcgatgccaacgatgcctacgatgtcttcgttgtcgagttgcctaaagcgatccagacgcagaacttcagaccccttttcgtgaagattgagacccacggggcgggcatggctgcaacggcgctgacggcgtttgcctacggcgtgatactggatacgcccttgggcatttttggttttgccatcataatgacgcttggtcagcgtgctggttaa

SEQ ID NO: 451287 - DNA, 648 bp, Serratia marcescens
atgcatctcacaaaaagaatgctctggatatcattagcattgttatgcttggtattctggggggggctttatcatgtttattattacattatgaagaagatcattatgagtaactgccaatatatgagattggcactcaattcgttgcttgttggtgacgtgatgataaaacccatcgattatagagtctttagcctagattggaatggcgacatttcattatttattcatgtagatagttctgacatccaaacgatatcagaactagccaaacataaaaagtcaatcctttttaaggaaaccaccttcataacccatcgcaatgcagtgtcatttttcagttttatttcatcaagacatgtaaaatttatagaccaaagcattagtgcagaggaaattaaaagcaaaattcacaatagtcataatttaaaacctcatggtggatattatgaaacattaacgactagtgagatggttatttttaaaaagttgcttgctggtatgcgtttgacgtcaattgcaattagtaacaagaaaagcattaaaactatcagctctcaaaaaataagtgctttgcaaaaattaaacttagcgaactcagctcactctatggttcagtttgccaaatatctcaatggggttgggtaa

SEQ ID NO: 451288 - DNA, 2790 bp, Serratia marcescens
atgaattatcaaagcagtaaatccttgtgcaaaaaaaagtacaaactgagtactctcgcagtgtcaatcagtttgataacctctgttgctattcctgcaaccgcagccaccatcactacaaacggagcagttattctctctaatccggtgactactcctatgtggaatgccggctcctatacctatgtaggctctggggggacagggggactcactgcctcgcaggaggcggtcattaccggaacgaatttttatgttggccagaacagcggggatacggggacgctggatttgttcgatagcggtaccaccctgacgtccggcggactcactaccattggtgaaaatggcaacggtacgctgaatatttttaataatgccgtcctgaccaataactggaataaatccaccccggggggctcgctcagctattcctttaatattggtaactgggctggctcccagggcattgtcaacgtttctgggacagggtctgcacttaatgttacgggcactggcaattacagtggcatgggtatcggtctttacggttctggcctgctgaatattaaccagggaggaaccgtgagcactcccagagttcgcttaggttttgcttctgccgctgatggtacggtaatggtcgacgggacggggtctaagctatcgataagcgatcccagccagtggatggttgttggggtgaacggtactggcaacctgactgtcagtaatcaggggcagttggataacgctggctatttccgcattgcagaaggcactaacggtggcacctccggtaccggcaatgtgcaagtgctgagtggtggtatggtgaatgtcaaccaatttaccgacatcgccttttttcagaataccaacggacagttacgcgtcagtgatgcaggatcgacctttacatcaagcggcaggatcatcgtcggtcgccaaggtaagggtactctgaccgcctccaattatggcaccatccgtagtggccagggaattattgttggctccaacattctgggaaccggtaatgtcaatataggtgaaggagaaatagcaggtgtgcttgatgtgccgacggtaacaggcgggccgggcagtgccaatattaacttcaaccacactgacgatattgattttgcgccccagatgttgggtacgcttaacctgaataaaaacgggtcgggtaccactacgctgatggccaacaacacctatagtggacggacaactgtcaaccagggcaatctgcaggccggtgctgaaaatgtcttcagcccaaactcctcccacatggtggagagcggtggacaattagacctgaacggtttcaaccagaagattgcttcactgacaaacagcggcatcgttaagatcgccggctcctctggtggcactaaccttaatgtcaccggagattatgtcggcaataatggtcgactgatctttaacacagtgctaggggatgatacttctgtcacagacaagttagttattgaccgtaatgccagtggtactacttatgtgactgtcaataatgcgggggggaccggagccaaaacgattgatggtatcgaactgattcatatcgggggaacctcgacagacagcgcatttagccaagccggtcgtattgtagcaggggcttacgactatacacttgttaaagggaatacatctggaacagatagacaaagctggtttttgacaaacaaacttacaccacagcctgagcctgagcctgagccacagcctgagccacagcctgagccacagcctgagccacagcccgtgcttgtttaccgccctgagtctgccagttatacttccaatctgatggctgccaatacgttgttttataccaggcttcatgaccgccttggcgaaactcaatatacagatgtcctgaccggagagcagaaagtcaccagtatgtggatgcgaaatgttgccgggagaaagctattcaatatggcagacggtcagaataaaacagcggctaaccgctacatcttgcagattggtggtgacttggctcagtggagcggtaacgaagaccagcgttttcaccttggcttgatgggcggatatgccactcaacatagcaatacccgcaacacattgtctggatattcatccaagggtagcaccagcggttacagtacaggtctttacggaacctactaccaaaatcagaaagacaaaagtgggttgtatgttgacagctgggttcagtacagttggttcgataacacagttaatggagaaggtcaagccgaggagaaatacaaatcacgcgggctgaccgcctcactggaaacgggatattctttcctcgccggaacttatgaaaccgcttatggcatggaaaatcggttttatatccaaccaaaggcacaggcaatctggatgggggttaaagccagggagcacaaagagaataacggaacgcttgtacaggccgtcggtgaggataatgttcagacccgcctgggtgttagattatttctgaatggcaagagtcacgttgataagggaactgcacgggaattcgaaccgtttgtcgaggcaaactggatatacaataccaggcagtttggtgcgcgattgaacggtgtggaaactgcatcgtacggcacgcgtaatgcaggcgagttgaaagcgggtgtggaaggcaagatatccaataacttgaatgtttggggcaacgtagctcaacagataggtggcaaaggttacagtgatagtcaggctatgttgggcgtgaaatatatgttctaa

SEQ ID NO: 451289 - DNA, 633 bp, Serratia marcescens
atgagtgaacgggcatggttgcttgaggtctttcgtcttcactatcaggaacggctgtctcagaaccgcatcgccaaacagctggggctgcccaggtcaacgatcaacagctgtttccagcgcgctatcaaggccggtgttcgttggcccgtcaacgaaatgacgctggagcgcaccctttatcccggtaaaaaacggtcacggtcctctgcatcaccaccgcgacaagcaccgataacggccgtgccatcgaaacccaaaagaaaggggcgcagacccaacttcccgctggcgttcaagctggcgctggttgagcaatcgatgcagccaggcgtcagtaccgccaggctggcgcgcgagcatggcatcaacgacaacctgttgttcaactggcgcaatctatacaaacagggacgcctcggcacgcccctccctgccgagccctgcctgctgccggttgaactggaagatgtgtcatcaccaccgcctataactgaagcagataaaacaccaccctccgatgccgcggaatgtgaactggtgctgcctggcggcacgttacggctccggggcgcgctcagtcctgccttgctgagcatgctgatccgtgagttgaaaggagctcgccgatga

SEQ ID NO: 451290 - DNA, 183 bp, Serratia marcescens
atgggccaatacggtattttcggcaaacatatctcccatactgccggtctggctctgctggtggaaattcagctgttgccacagcttggcaatatccagatgcaggctttcctgcagggagacaatattcagacgcacatcacgggtgaatatccggcggtcatcctggcgtgccatcattaa

SEQ ID NO: 451291 - DNA, 255 bp, Serratia marcescens
atggaagccgtggtcaaggtagccgtggatttccatataacgaatggcacacaggcggttaaaccaggtgtaggcacagtgctcaaccagtacgtcaaagccctgctcgtgggcgcgttttaccagacgatcgcggcgggtgagggtggatttggggtggtcgaactggccatagcgcacggtttcgccgacgatcccggcatctgcaatctgcagattgccttttttatcggcggaaatccccagcgtggttag

SEQ ID NO: 451292 - DNA, 744 bp, Serratia marcescens
atgaacagggatgaacagttatctgtactatggaaaaaacttaacgaccgccaaaaagataactttttaaaatggatgaaagcttttgacgtagagaaaatttataaaaaaacaaacggcgacatctttaaagaggatttttttgaaatatttggcgataaattaataacgcatcactttagtagcaagcaacctttaacaaaaactttgtttgaacatgcattcaatgactcgttaaacgaatcaggtgttacttcattcatggcagaaagtaggacaaatcccggtcatgatttaacaattgatggcgtgaaagttggtttaaaaacagaggcagccaggaacattagcaaatcgcatatccatgtaagcaaatggatggaattaggaaaaggagagtggattctaccttccttactagagagatttataaaccacttaggaaactatgaaagggtttttactcttaggtattttaaagaatctgattttaaatttcgttatgagctcgtggaaataccaaaaaaacttttattagaaagtgaaaacgcaaaattagaaataatgactgaaagcaaacaaaatccaaaacccggttatggccacgtcatagacgaaaatggaaacaagaagttttctctatactttgatggcggaagcgagagaaaacttcaggtaaaacacatagctttagagcattgcattactcatggggtttgggatttcatactacctcccccttga

SEQ ID NO: 451293 - DNA, 498 bp, Serratia marcescens
atgaacagtcttttaacgctggcgaaggacttagagcagaaatcgaaagcgcagcagcagactaccggcgagatgctgaaagccgcattcagcgagcacgagaagtctgtcagagcggaactgaacgaaagcgagaagagaatcagcgccgccatcctcgaccacgacaggaagctgtcctcagccatgagccagcgcacgaaaggcatggtgcgtatggtcagccagacgtggctgaccatcgtcctggtgtccgcgctgctgatagcctcgagcgcgggcattctgtggtggcaggggcagcagatgctcgacaattacacgagcatccgggagcagaaggatgcgctggagaagctgaatgcccggacgtggggcgtgaggtaccaggaagacaaccaggggcgctttctggtgctgccggaaggcgtgaaagcggacacgaactggacgttcgacaacggcaggaagaacggcatcagactggtgcaggagtag

SEQ ID NO: 451294 - DNA, 615 bp, Serratia marcescens
ttgacagataaagccacacccattaccttagtaagcaccacctcggaactcagccatctggcgttctgcgccctcgcggcgctggggctggcgcgccaggacggtattgccggcaccccctacgctgaaaatttgttcctgatccgctggctggccaccgctcagaagcaaaaacggttccccaagagcgtggcgctcgatatccagtggttactcgatcgcggccgtaagtacgggccgggcagccagctgcgccagcaccttgagtatctctggcgttcctgcagcggtaacctggccgctcaatctgacattatccggcttacgtatgcttccgaaaccctaaaagaccagggttgggacaattatgttctggacgcgacagagtggaagtccggcgtcgtaccgacaccttcacagcataacggattctacgtcgaaaaaacggcgctgaatgccgcgtttggccaggacggtcgtcatctgcaatccgtcactttccgggtggtcggtgacgcagataggtttatgtatgtaatggcggagtacggcctgtgtacgcgctggttgggcagtaaggtaacctgccacaccattgtactcgagctcccctag

SEQ ID NO: 451295 - DNA, 693 bp, Serratia marcescens
atgtctatatcttcaatagtaaaattcaaattagaaacagacagaagtgcagcagtagcacttgaccgagcagtgaacggagtcacgcaaagcagtgggagcactctagaagatgtacgttcaggggtagaaagagcttcatggtatagttcatgccttttcgataagtataaggatgtctgtaaagaactatcaactgaagaccaacgattcattaagtgcatatatgaagtatataagcgaaaagacatcatcgctgacataatgagaatgtacattgaagatgaactcaaatacgtaagcgacagccagataaaatcacttgacgttaagctaactaaatacctagctaactatcgaagcagccgattaacaaaaatggcaatcgctaataccctatctatcatcgttgttaattcattcgggtttaagaatgaagttatggttcagctaaatagatacagcttcgtaatagttaccgccgcttctctttacggaaaagttcaaacggcagcgttagcagcgagaaaactaagaacaatttcccctcaactatacaacacactatatatgaataatatggaaatgctttacttcctcgttagcgaaaaaatagacaaggcattaataaattctacaggtttacgtggagaagatcgtattgtctccataatgaaaactttgtcttattaa

SEQ ID NO: 451296 - DNA, 345 bp, Serratia marcescens
ttggcagacaaacgcagcaaaatgctcacgatgtgggtgactgaggacgagcaccggcgcttgctggagcgctgcgacggtaaacagctcgcggcctggatgcgccagacgtgcctggacgagaagcctgcccgttccggcaaactcccgtctatctcgccggcgctgcttcgtcagctcgccggcatgggtaacaacctcaaccagattgcccggcaggttaacgccggtggcggtaccgggcatgaacgcgtgcaggttgtcgccgcgctcatggccattgacgccggactcgagcggctgcggcatgccgtgctggaaaaaggggcagaggatgattgttaa

SEQ ID NO: 451297 - DNA, 498 bp, Serratia marcescens
atgaacagtcttttaacgctggcgaaggacttagagcagaaatcgaaagcgcagcagcagactaccggcgagatgctgaaagccgcattcagcgagcacgagaagtctgtcagagcggaactgagcgaaagcgagaggagaatcagcgccgccatcctcgaccacgaccggaagctttcctcggccatgagccagcgcacaaaagggatgctgcgcatggtcagccagacgtggctgaccatcgtgctggtctccgtcctgctgatcgcctcgagcgcgggcattctgtggtggcaggggcagcagatactcgacaattacacgagcatccgggagcagaaggatgcgctggagaagctgaacgcccggacgtggggcgtgaggtatcaggaagacaaccaggggcgttttctggtgctgccggagggcgtgaaagcggacacgaactggacgttcgacaacggcaggaagaacggcatcaggctggtgcaggagtag

SEQ ID NO: 451298 - DNA, 1923 bp, Serratia marcescens
atggccgttggcctgcagcattttcagcacccgcgatttttgcagcggcgtcagcttggtgaagaccgtacgctgttccacttcgcgcgccagttcttcgtcatccatctgttcaatccgcagcccggagagcggctcgcccggctccagcccgacgtcgcggcaaatcttgcaggtgatcaccgggttgtcgccggtcagcaccttcaccgtcacgccattttcctgcagcgcggcgatcgcctgctgagcgctctccttcggcggatcgaggaaggtcagcagcccttgcaccaccatgtcgcgttcgtcggccacgctcagcggttcggccgggcgctgcgcatccagctcgcgcgtcgcgagcaccagcacgcggaaaccgtcttcgttatattctcgggccagcgcctgcaacgccgcacggcgcgcgtcgtccagcaccagcgtctgatcgccttcgcgcacgtgggtggcgatctccagcatctcctccaccgcgcccttacagatcagctgctggcggccattctcatccgccaccacgatcgacaaacggcggcgcacgaaatcgaacggcagctcatccaccttgctgaaacgccccagggcttcaatccccggtttgccgcggccaaagcggatcaccgcctgatccatcaggttcttcatgccgctctgatggaagctgttcaaccaggccaggtgcaacacctcgttatctctggcgccgttgacgtcgatgtggtgctcgagaatgatgcggtcctgggtcagcgtgccggtcttgtcggtgcaaagcacgtccatggcgccaaagttctgaatggcgttcagacgcttcaccaccaccttgcgacgcgacatggcgatcgcccctttcgccaggttggagctgacgatcatcggcagcatttccggcgtcaggccgaccgccaccgccagcgcgaacagcgccgcttcgctccagtcgcctttggtgaagccgttgatcagcaacaccaccggcaccatcaccagcatgaagcgaatcaacagccagctgacgctgttcaccccgcgatcgaacgcagtctgcgcccgtgtcccgacgatcgatttggccaacgagccgaagtaggtgcgcccgccggtcgccaccaccaccgccgtagcggtaccgctggcgacgttggtgcccatcagacagatgttggagagctcaagcagcgcgttctcgctggacacttccccttcgctcgacttctgcgccacgttgcccatcgcatcgtatttctcgatagggatcgcctcgccggtcaaaatcgcctggctgatgaacagatcgcgcgaggcgataagacgcacgtcggccggcaccatgtcaccggcggagagctggatgatatcccccggcaccagttcgcggatcggcacttccagcgtcagcggatgcgcgctgtagctgctgcggcgcagcaccgtggcggtagtgcgcaccatcgacttcagcgcttccgccgctttgttggtgcggtattcctgccagaaacgcagcagcccgctcagcgtgaccatggtcaggatgataatgacgccggtgagttcagtttcttcaccgctctggagcggcagccaataatcggtaaagaaactgatcgcagccagcaccatcagcacgaagataaacgggttgttgaaggccttgatcagctggatcagggcatgcggtgccttgtcatgggcgacctggttggcgccgaactgctccagccgctcatcggcgtcgtcctgggtcaagccgttgcggttgcacttcaggttcgccagcgtttgagcgatgctgttggtggcctcttgcgcaatggcgtaggtcaccgcgtctttatcacggcgacgcgttctttcattaatctgagtcataacgctattctcttattttag

SEQ ID NO: 451299 - DNA, 699 bp, Serratia marcescens
atggctatgactcctttcgttttgaatttattgctggcgatgtgcctgggcgcggtcattggcgccgaacgccagtggcgccaacgcatggccggcctgcgcaccaatgcgctggtggcgaccggcgcggcggtctttattctcagctccatgtccaccgatccggccagcgccggccgcgtggcggcgcagatcgtatccggtatcggcttcctcggcgccggcgtgatcatgcgtgaagggcttaatattcgcggcctcaataccgccgccacgctgtggtgttcggcggggatcggcgtactgtgcggcctgggccagcattgggatgcggtggtcgctacgctggtgatcctgtgcgccaatatcctgctgcgcgaagccgcgcagcgcatcaatctgcagccgcatcagcaggcgaccgatctggaactgtgctatcgcattcaggtgacctgcggcgagcaggacgaaattctggtgcgcaccctgatcctgcaggcgctgaacggcgtcgccttgcggctgcaatccttgcgcagcgccgatatttcgagcccggggcaattggaagtgtgcgcggaaattaccgctacgccggccgcgcaaaaagaaatcgaaggcattgtctgccgcgtcagtctggaaaaaagcgtgagcgccgttcgctggcgcgtcgtgtccgaattaccggtctga

SEQ ID NO: 451300 - DNA, 1617 bp, Serratia marcescens
atggtagaagcaattcaccctaaccagaagagtgaaatcccagataccggtactgccgggacgataaagccgctcaccccagatgcagaggttccccatggtgctataaataaaaatagtggcgtagcaattgacacagaatcagcaataactaaggaatcgttcactaaccctaaatcaggaaaattaaatactcgtctttcagttgcttcagcagctcttacggctatagaaggtggattaaacgcaaaaagtaatatcgatatattaaaaaatcctacttcatcagccttaaacaaggttagtgcttccttaaatctcgctaatttttctgctgatgccgcaacgctgggttttaccctgttagaatctgttggtggtagtactacagccggtgcattaggcgcagcaggcgcatcagcagcggctacgataagtgctatgattgctattccggcaactgcggttgcgacggctgtagtgatcaaagacgagtcaaaaaaacaaaccgaagatgggttagtaagaaatatgaaatacgattactataactctagtttggcagcgaatcagtttgatataaagactaaggagttagattctaaaataaattcagagtatcgtgaaaacccaccaaagaatgttattgtaaataataatgttgctgatactttccagatgatggcgagcgaaaatggcgataagacagcttcaggacaatatttaaaggacgaccggcaacgaacttattcaaactttctggaaaagtatagtgacgtcgtgataagaagtaatatgtccaatgataacagtctaaaatacgatgctaatgtacggactgaatctccaaaacctcttttcgaactacctgggcaggaactaattcttgaaaacaagaatgggccattcggttctaaaattgatcttagcaaccgtttagctaataaaggatatgagagttcaggtaatgacaactatgaacgattctatcagatgaggaattttcaatatggcttaaacggtctttcaatgcgctacccatcggacgatccgcggactgcatcattgacgatgtcagccggttctgcatatttaaataaatccgttaacccggcaggaaattgggatttgattcaaattagtgatcaggatgtcgaacaaaaagctgcttttcctcaaatgaaaaggcctagtaaggaggacgatactttcggtaatcctggagttgctcgtggatatactagcgttagaaacgctaactatgaaaaaaatgcaaagacatgggaccgggatgcttttccaattttggcaacaggaactcctgtaataagaaacccaaatgccatagagcgtgatattaagacaacttcagcaagaaaaacagtcgtagaaatggacaatttgatacatccagttaagctgcatctgaatcacccagacgactctgtggtttttaatcgacttcctaagtctgacgtggaagttatcctaaaaaaaggacagccccttaatataaagcatgcatatttagccgatggtgaatctccgccgagtctgaaagattctgacccgtatcattttagtaatgggaggaagcttatagttcgctatgagtag

SEQ ID NO: 451301 - DNA, 816 bp, Serratia marcescens
atgataaaagatgttactgctggtacagggttgcgagttactccaagggcaataaaaaatggtgataactactcggttcaactaaaagtagatgttgaagatggcaaactaaataaggatgaatcaggcgaggcgtccggggtaaaaaatagctatgtaagtactcaggctttagtcgctgagaatggttctgttgttctcggagggatacatactcgaggaagtgaaaagaaacagagtggaataccatacttaagaaatattccattgcttggcaagctatttgagtcagattattcagaggagtcaaagcgtgaaaggatatttattattacgccacatctactcggtgatcagattgatccatctcgttatgtattcagtgataatcggggaggcgttcgtgattcaatgaaagaaattgcggacagacgaaagtcgatccaatttataccaaaggtttcccaggcgatgaaggacttagccgaatataaagttcctcgagggatgcaagtggggaagaatggcctgggaatcaatgtattgtgtacaataccaacacagctaaatgtggatataaacaagttccaaagttactctaataatgattttcgcatttctatttcagtcgtcaaaaatatatcaaattccacacaaagacttgatgaatcagtctgccgcagtgaaaaggttcttgctgtgtctgtatggccttcatctgttattcaaccaaatcagtcgagtgaagttattgttgcttacgatgatagcgaagttaccaaagcttcgagaaaatctttgctttcaaataattga

SEQ ID NO: 451302 - DNA, 267 bp, Serratia marcescens
atgaacaagaaaactaagcgtactttcacccccgagttcaggctggaatgtgcacagctgattgttgataagggctactcctatcgacaagccagtgaagcgatgaatgtcggttctaccacgcttgagagctgggtacgccagctcaggcgtgagcgccaggggattacgccctctgccacacctattactccagaccaagtagcaggtaaaccccagaaatggccagaggtctgctactaccgtcttcttttgggatttctgtga

SEQ ID NO: 451303 - DNA, 975 bp, Serratia marcescens
ttgcctggtgcagggttgaatggcggtggattaagggattttttcagcaagcaagcggtaacatttaatggtaaagaatatcgaaatcataatgctataaaaagccaacttggagaattagattcaattaagaaagtctatgacagaatttccactcaatctagttcagcacaaaaaaaggctgttcaggatttcaaagcaggtagcgctgaatacaacacccccaaatacaatacgtttgataaactcagcttagcaaaaaaaattgagcatttaaaaaacggcaacctcagtaatgaagaaaaaggtgctttattgaacaaggcttatgaacaattctgggaggaccagtcaagaaaacaaatcattcaggcacaggattggttcaaaagtgcccaaaaaaattataatgctaccgccggagaggtttctcctcaggccgtttacctcaaagctaaatcaggggaatgtcagccagcaacgattcttatggccaatgcgcaacggcaaggaaaaggggcggagcttgcccgaaacttggcaatagatgatctaacaggccaagagctaggcagtaaattgaggaaactgcgtgaaatgccagatattgaaggtgaaaaaattgaggccgtgaaactttcttcactagataagcatgagcgtacactttttaccgatagttcagatcaacccatttcggtccgccttgagcttaaagcgggcgaaaccggattgcgtaaccatgtggtattactttctaaaagaaaagatagtgctggcaatgctcagtataactacttcgaccccaattatggctatgccgaatttaaaaaatataaagactttgctggatttgtgaaagacagagttcagtctaaaagtatcgaaaaaggtggctatagaaatagtgatagtgatgttaagtttacaactgttgatgtccaaaaacttgatactgtaataagcagcatttaa

SEQ ID NO: 451304 - DNA, 519 bp, Serratia marcescens
atgaatatgctgtcatggtggaagaatctctctgcccccccatctcatgaagataccaacctgggaatttacgctccttatattcgtgagcacttatcaaaaagcaaaattatttcattgactgaggataatctccataacatattcttctatacgcatgcaacgatggaccatgtgataaaaatgagtactgaaacctttggcctgtctgccaaaaactccataaacagggaagaacgtgccattttattcaccaaatggatcatgggccggactaatcaaaaaggtatgactattgctgaattactaaactatgtcctctacggtggaaaaccttcattaatgtgggaaaggatataccaggcaggaaaggatgaagagtacaaatttcagcattacggtattaactctattgctgaagtggtcggttgggcaagaccagaagatacgccccccagaaatggcagaaccaataaggcattgcgagccctgggttatccggtcctagttaacatttaa

SEQ ID NO: 451305 - DNA, 135 bp, Serratia marcescens
atgatggtggagttcatcttgttacccaacgcctcggtcaccatgatgggcatcaggttggccggaatatacagcatgacagaggtcaccagcagcgccagcgtccactgcaggctgtggcggcgacgcacgtag

SEQ ID NO: 451306 - DNA, 927 bp, Serratia marcescens
atgactacacataatcagttccagcccgcaccccctgcagtgctagaccttggtgtcaggcaggaaggtgtgttcaacgatattgaaatgggtgttttagagaacggaattccatacctcactcagaacggattggcgagaatttgcggcgtaaatcgcacaaatattgctgatattgctgcggaataccaagagtgtttcgcaaatggggtattcacccgcggacgcatgcagtttatcagtacctacttgcaagaggctgggtatactgatccggttttatttatttcgattatgcgaaatgggtctgttcactacgcattccctgatattgtctgtatggcgctgctggagttttatgcgtttgaatctcaggcggcatcaaatacgactgctcagcaatactatcgtgaattagccagggtcggtcttcgtgactatatttatggcgctttacgttaccagcctgaagacccttggcgccactatcatgacagagtttccatcattcaaagcacgggcactgtccccgacgggtattttatcgttttcaacgaaatcgcgggtttgatggtcgatttgatcacagcagggcttgctgtaaacatgtatacggttcctgatatcagtgttggttcctgctggggtagacactggacatcaagaggcttgtcaggcaacttcggggagcgtgtacgatgtgcacaccattaccctgatgatttcaaccaggctgcatcaaatccgcaaatgattaacgcttaccctaatgaatcattgcctgaatttcgtagatggttccgtcatgagtatctgcctactaaatttcctacctacatacttggtaaagcgggcatgttgccgggagggagagctgatgcactgagaatcgcggataccttccgtacacctcagttagggcgctag

SEQ ID NO: 451307 - DNA, 1512 bp, Serratia marcescens
atgtcaacgatgagactaggtatggaaatccaagagtttgtaagccactacaaaaaccacccggtattatttattggaacagggtttagcttaagatacttggaaagttcatttagctgggatggccttctttcgagcatatcattggagctaactggtaaccccgagatttattacgatttaaaagctgattcaatggaagatggtgagtacagctatgaccttctcgccacaaaactagaagcggagttcaactcgaggctcgcaaaagatagagacgggaagttcaaaaagatcaatgatatattctaccaaaatatggaaaaggggttaaaattaagtaggttcaaaatttatataacagaagccttagcgaatataaaaacaaagccgtatatgaaggccgaaatagatgcattaattagagcgaggaaaaacataggttcgattatcacaactaattatgacactttatgcgaaagtttgttcgagtttagccctctaatcggcaatgatatccttctaagcaatccctacgggtctgtgtataagatacatggttgcactagcgccccaaacaacctaataatcacccgagaggattacgtaaacttcaataataagtacgaactaattcgtgcacaattactttcaatatttatacacaacccaataatttttatcggatatagcattagcgataccaatataaaacacttactaaagaccatattctcctacgtcaatttaaacactgagcttgcaaaacgaatcagggataatttcttactagtagagtatgcgccagagatcgattcaacagagatctctgagcatgacatagatattgaaggcatggctacaattagaataaataagataaaaacagataattacatggcaatctatgatgccctttcgaacttagtattgccagtgtcggcaatggatattcgaaaagtacagaaagtatggaatacgataaaaagcgggggagagataaaagtaaacataactgaaaacctggatgaacttaaaaatgaagacatggttatcgcagttggttctgaaaaaacagtaaaatatgaatatcaaactaaaaatgaaatgattcagaactatttcaaaattgtggatgaagctaacatccagctaatttcattactgaataaacagaaagtaactagtagtgaatacttcccaatttacgcatttagctcaatttgcaaccgactaaacaacgttaaagaatacaaaaacaggcagttagcaaagctgatatccttacttaaaagcaaagattacgaaaaaaatcacaagaacacttatttaaagatagacgacataatcgctaacctaaccgaatggaagcatgtaggcgccataatttatggtgtgctagatgataatattaaaatagaagatctaaaaaattacctaatgaaaacctcaggtcaaagcaataccgaataccgaaaattgctgtgcttatacgattatctttcttactag

SEQ ID NO: 451308 - DNA, 198 bp, Serratia marcescens
atgaaatttggaaagactaataccaacccctccgttgatagcgggcaatcccaaagcattacgatcggcgacatcactatttcccagttcagtgatggggttctgtggatggagtctgaatccgcaggtgatgctatgtcagtaagtgaagagaaactggctgcagcactcgagcatttttataacaacaatttctga

SEQ ID NO: 451309 - DNA, 369 bp, Serratia marcescens
atgctaagaaaactattgcttgtttgctgtatcgctattgcccctccctcaatagcgcaatattacgacgggaacgcgttaaacgggtggtccaacgccctccaaaaatggaagttaggaacgaacgtatcaaataaggatttgactgacgctagagtattccaagcatacgtaggaggcgttatagatgccgttgacggtaccaaattctgcatccctgacaatgtgaagctaggacaactctttgacatcacatctaactacctttccgcaaacccggagaaaagggctcttcctgcttctgagttagtgatcaccgcgattagcgataagttcccgtgcaacggccgtccatggcaaaagtactaa

SEQ ID NO: 451310 - DNA, 681 bp, Serratia marcescens
atgaaagagcgcccagtgattttcaacgtcgagatggttcgcgccattatcgacggacgcaagacccagacgcggcgcgcactgaattggaagcgtcagccgtacacagagatggccgagcgtgatgatggctcgttgtggccgtgggcggaagatggagagcgtggtggtgatatctggttctcctgcccatttggtgaagttggcgatcggctgtgggtgcgcgagacgttcatggacttaaccggcaccggcattgaagccactaccggaaagtttgagggattcgcatatcgcgccgacacccaatctggaagttatggcgatgaggttcgcaaagagtatgggctgaagtggacgccttcacttcacatgccacgtaaagcctgccgcatcctgctggaaatcaccgccgtgcgcgttgagcgcctgaacgatatcagcgaagaggatgccaaggctgagggtgttcgagcgatcggaaacaacttcggcaatggccctgcctattgcgattacttgctgcctaatttggatgacactgctgagtggtacaaccgcgcaagcgacagcttcaaaagcctgtggaagtccatctacggcgcaggaaactggagcgccaatccttgggtgtgggtaatcgagtttcgtcgcgtgggaggtagtgatgccagcaaatga

SEQ ID NO: 451311 - DNA, 522 bp, Serratia marcescens
atgagcaaggttatggggacggtcttacttgtgcttttgcttatcagcatagggctggctcagttagcgttttacttccacagcaacgcagtaagggctggtgagcaagttaagcagcttcaaagcgataacagcctgcaggcgaatacaatcgccacacaggcgcttcagttccagcgcgccaacgaaatcagcaacgcggcgaataagtacggcatcaacactgacgcggccacacaggggaaggaaattgaataccggacgatcctcaagaaacagcctacgtgtgatctggctgtgcctgccactgttgctggtgggttgctcgactacacgcaccgtctacgctcccgcgcaatgtcagccaataccggcgacgcttacgcagccggtgctggcgccactgcctccggcgccctgacatactgccaagcagtgctgtggattgatccgctgctggcggcgctcgacaaggctaacaaccaacttctggagatacggcggcttaatgatgaacggtag

SEQ ID NO: 451312 - DNA, 441 bp, Serratia marcescens; identical to SEQ ID NO: 290473

SEQ ID NO: 451313 - DNA, 474 bp, Serratia marcescens
atgcgactgccttacgtaatatttacattagctatgctggcttctgtatcaacagcacaggctattcccaatatgtggacgagtggttttgggatgggcgtgaccgaatatatcattaccagcccggagaaggtggtgtttaatctgaactgtactggcaatccggatgcgcagaatattctgcaacacggtgttgatctcactctgccagatggaacatcagtaagttctcatgacgacgggacggaaataacggtcgtcattgataacagtcagttctcattaccttcatccctcggctggaggaatggcgataatgcctgggtgtcatttattgacgcactggggcaggcagcaaatttcgatgtttatgtcagcgataaaaaagtaggcactttcagtccgggtctgaagaatacgcaaaaagagctgtctgacctcagtgagtgccggaccacacactacagcgattag

SEQ ID NO: 451314 - DNA, 261 bp, Serratia marcescens
atgggatggtttattgttgttcgctcgaaaccttccagagattgtccggggggaatatgggggtggattactcccagtaaagacgatgtggcaacagggtataccattacgccaggtaaagaattcaatctcaccatgaaggatatgtgcagtcccgatatgaaagtaacgttccgcccgaataaaaaggaccctcgttatgacgatcttgtcgggatttatgccgggaaagaagcgtttcgctacaaacaaataaaataa

SEQ ID NO: 451315 - DNA, 717 bp, Serratia marcescens
atgacgcttcaggagcggcgacatgaccggcttgccgtcaggttgtcgttgattatcagccgcctggtgtccggtgaaactctgtttattcgcaaactggcaactgaattcggggtgtcagagcgcacgttacgtcgtgactttcgggaacgtctgatgtatctcgacctagattattaccaggggcagtgcagtttgcgctcggatattcacagtacgaggcaggaaatagatattctgacctttgctcaccgcacggggctggccggggttttcccgggctttgaccggcgactggtcagcagcctgctggactgtgatgatcgaccctgtctggtatggcatcaggacagacttcatcccccggcaggaaagctctgcttctacaggcttgtcagagctatttcgggatgtcagcgcatcaccattctgactgaaggggagcgtcatgaggccatcgcaccttaccggctaatcgcccttgacggttactggtaccttgtcgctgaacataacaggcaattacgtgtcttccggctggatgagattcatctggtaaggccatcccgggaaacatttattcgcagtgagcttctctatcagttgtcggaggataagcattttatctctgccttacctcatttccgttttattcagcagtcgctgaattcattttctccatcagaaaatcgggggcaatccggacaaactgattag

SEQ ID NO: 451316 - DNA, 753 bp, Serratia marcescens
atgggcaaaagtggtgctggtaaatcctctctctgcaacgaacttttccggggcgaggtgtccccggtgagtgacgtgaattcctgtactcgcgacgtactgcgcttccggttgcgcagcggtcgtcacagtctggtgattgtcgatttaccgggggtaggtgaaaacgggtggcgggatcacgaataccgtgccctgtaccgtcgaatgctgccggagctggacctggtgctgtgggtcattaaggccgacgatcgggcactaaccgtggacgagcagttctggcacggtgtgatgcaaccttacaggcaaaaggtactgtttgtgattaaccaggccgacaaaatcgaaccctgtcatgaatgggataccctcaccagcaaaccttcaccgcaccaactgggaaatcttaaagcgaaacaggctgcgattatggcgatgtttaaaccgtatcatccggtctgtgtggtgtccgccagcactggatggggcattgaggatatggtggcagccatgatgcgctgtctgcctgaccgcgccaccagcccggtggtgacacaactgcaagggatactctgcacagagccggtaaagtcgcaggcccgtgacagtttcggtgaagctgtgggccgggttttcgataccgctgaatcatcttcgttcctgtctgcatcgctgaaaacggtgattcgtagcgtgcgtgatgcggtggtgtcggtcgcacgggccgtctgggactggatattcttctga

SEQ ID NO: 451317 - DNA, 918 bp, Serratia marcescens
atgttgcattacgatatgatccgctacgagataatgtatctaaaaatgcttggtgcgctttccagcactgattactccttacagtggagtacttatgattcgccggatcagtttcgacgtttaatctctcagatccttgaacggcatttcctaggcgatcaggacaggatcaaagttggccggaaaactcttaaagaatgggctgagctgctactaattgataaagattattttgattgtttcaaaggtacaccaagagcattgtggtttgctcaccattatatttttgaatatccagtattacctgcagggctgacgcttggtgggttggggaatgacgtcggttgttcaggaagatttaattctcttttaatggataataatatcttcacaaatcttgatttccctaatttgaatatcgacctggacgatatcgattgggacctgataaccaatccaaaggccacagcctcgaaaaaaccgaaacgtgttttctcccgattttatctgaacgcgggagcaagtaccgatctgtacaaccccaccccggtaactgagcgtgaactcatcaatggtgtgatgagatacattgatgaagctccatgctcacttggagataagatctcttatttcaaaaaactgcatgagcgctggcttgagcaatatgatttttttctgacagattttgactggatgtcacgtgatgatgaaattcagttagtctatctctgggactatctcaaaggaaaagaacgaatagcgggctatcttcgcccttataatacgtccatgcgttatgacatgattattgcggctatggatgtgtggaacgtccagcctgaagagaagctggattttattgagaagatgaaacatgcctggcaagcttcaaaatcttatcggcgatctgctaaatag

SEQ ID NO: 451318 - DNA, 579 bp, Serratia marcescens
atgcacataccttacccctttaatcccagatacacgatgaactggtttctactgtctctaatcaacgaccacctgaatcagctactgaaccgatactcccgattacaggcactcagactcgacctgttctatcaaaaaggtacagaacgctataaacattattcatggaacgaaacagagcgagaggtgcgtatgctggttgaacgcaccctgcagcacacaaatctggcagggtatttctgggtacttgagaactctgcagaccacggctgtcatgcccatatcgtgttctatctcgacaggcaccttaaccaggctacctacccaatagctgagagagtcggaacaatatggcgggaaataacgcaacgagaaggctattacaaccgctgcgagtacaaacccacttatgacgtcagtattgataagccggtgaactacggcgataccgaagccatcgataacctgcgctatatcatcagctaccttgccaaagaagagcaaaagcacggtcactatcactacggagccagtgaagtaccaccgcccagcggactggggcggcctcgcactgtgtaa

SEQ ID NO: 451319 - DNA, 225 bp, Serratia marcescens
atggaagacagcatcatgacagaacatatttctttactcgatgaccaactggtggatatgcggttcatcacgaaacttacagggctgacggacaagtggttttacaagctgataaaagacggactgttcccgaagccaattaagctgggccgcagctcccgctggaagcaaagtgaaatcgaagactggctacagcaacgcattgctgattcacgcagccattga

SEQ ID NO: 451320 - DNA, 609 bp, Serratia marcescens
atgaaagttacatggaccgtcgcgcctgtggggtatcagcgcattgcgaaacgatgcccttcttgcaagattaaacgcgacttcacgccgtcaggtgcatttcgggttaattctcaaaagaagctgctggatgtatggagtatctataaatgcacacactgcgattacacctggaatatctctctgttctcgcgtctgcacgtcagcaaaattgagcgccagctttatcatcggttaatgataaacgatgcggctacggtacagcactttgcaagtgatatcgcgatactgaagcggaacaatgcagagctatcgggtcggcctgattttcacgttcaggagcgctggccgttaagcatcaccgcccaccagcggatccacgttagtgtcaggatctctcgttcatttcaggtaagtctgctgtcgattttgaagcagcagctcatgctgagcgttggtgaaattcagagaaaggtggaagcaggtcagatttggggcgttacgatgaagatgcttaaatcgagaaagctaaaggcagcagaatatgaattccagctgtctgcggaaacgttatatgcccggcgaaggattgttctgacacgtcgttaa

SEQ ID NO: 451321 - DNA, 252 bp, Serratia marcescens
atggaacagaatgaaagattttgtcaggcttgcggaatgccaatatccgaacgggatgtcaatgtagccagcgagcaatattgcgcctggtgtagcgatgcggatggtaacttgaaaccatgggaagaggccgtaaatggcctggctgagtttcttgactcatggcaaaaggtcggctctgaagaagcacggaagcgggcaaaacgttatctgacggcgatgcccgcctgggctcataaagcggacgagtga

SEQ ID NO: 451322 - DNA, 180 bp, Serratia marcescens; identical to SEQ ID NO: 166707

SEQ ID NO: 451323 - DNA, 1344 bp, Serratia marcescens
atggtggatctgatggtgagtgagcagcagccgggtacggcggagaaaggcgtgcctgcggggtttaagttgactgaggtgggggttattccgcaggattgggagtgcaaatatctcggagaacttggcgatattgttcgtggaggctctcctcgccccgcaggtgatcctaaatattttgagggtgattttatcccttggctgacggttgcttcattaacgacaattccggatgctcaacaggtcgttatgacaacatcctcgatgttaaccgaattaggttctaagcatagccggaccttagaaaaaggcactcttattatttctaatagtggcgcaacacttggtgttgcaaaacttttaggaataaagtgctgcgcaaatgatggcgttgctgcgattattaatcagcgaatcggcaataaatcatttttgatccattatattaatacaataacaaaaagccttcatgacaaaatcgcgacgggtaacggacaacctaatctaaataccgatctaattcgacttattcctgtaccttttccaaatgagcaagagcaggaaaaaatagcagatactttgtctaattgtgacaacttcatccttaaactagagcaactaatcgccaaaaagcaggccatcaaaacagccacaatgcagcaactactgacggggaaaatccgtttgccacagtttgcgttacgggacgatggggctgttaaggggtataaaaagagtgagttgggggatattcctgaggattggaaaatatcaaaaattggagaactatctcacgttgatcctgaaaatctaccatcttcaactccaccaaactatgagtttgattatatctcgctggagcaaattgaccgcggcgttttacttggaacaactagattagttttttctgatgcgccttcaagagccagaagattattgagatgcaacgatgtcatggtttccaccgtgcgccctaatttaaagtctcattatcttgttgatcatgaggtatcagaccttatttgttccacgggttttagtgtcattagatgtgatataggacaactccacccccaatttttgtatcaacatctctttgccgcctcaattaatgagcaaatagatatgttgatttctggttcaaattaccctgcaatcaatagtgataatgtaaaaggcttagtggtacctatttgctccttacctgaacaaaccgccatcgccgccatcctctccgatatggacaaagaaattcagaccctgcaacagcgtctggacaaaacccgccagcttaaacaggggatgatgcaggaactgttaaccgggaaaacccgcttaaaatag

SEQ ID NO: 451324 - DNA, 279 bp, Serratia marcescens; identical to SEQ ID NO: 279627

SEQ ID NO: 451325 - DNA, 663 bp, Serratia marcescens; identical to SEQ ID NO: 279628

SEQ ID NO: 451326 - DNA, 951 bp, Serratia marcescens; identical to SEQ ID NO: 86446

SEQ ID NO: 451327 - DNA, 354 bp, Serratia marcescens; identical to SEQ ID NO: 279630

SEQ ID NO: 451328 - DNA, 582 bp, Serratia marcescens; identical to SEQ ID NO: 279631

SEQ ID NO: 451329 - DNA, 567 bp, Serratia marcescens; identical to SEQ ID NO: 279633

SEQ ID NO: 451330 - DNA, 231 bp, Serratia marcescens; identical to SEQ ID NO: 279634

SEQ ID NO: 451331 - DNA, 2115 bp, Serratia marcescens; identical to SEQ ID NO: 279635

SEQ ID NO: 451332 - DNA, 1005 bp, Serratia marcescens; identical to SEQ ID NO: 279636

SEQ ID NO: 451333 - DNA, 246 bp, Serratia marcescens; identical to SEQ ID NO: 80432

SEQ ID NO: 451334 - DNA, 579 bp, Serratia marcescens; identical to SEQ ID NO: 279639

SEQ ID NO: 451335 - DNA, 549 bp, Serratia marcescens
ttgattgatatgccgagtgtgtctgcatgtgcgccggagatagccgcagatacgttacagaaaattattatggttgaaagtggcggtaatccttttgccgttaatgtcaataaactgtccgccggaagccagcctaaaccgaaaaacgtggctgatgccgttgcagcgacacaatactggatagcaaaaggctattctgttgatgtgggtttaatgcaggtaaatagccgcaattttaaaatgttgggtattactgatactgatttaggctctgtttttgaaccctgcaataatgtgaagtacggagcaacaattttactttctgcatggaacatgacttcatccaaagaacaccagaacgaccggctgatgaaatcattgagtatttacaatacgggtaatgacgttaacggatttaaaaatggttacgtcagtaagtatgtgggaagaaacatttccggttcactggcaaaaacggttgtcactccttataacgcagattccagtgtagggtttaatgcagactctttttacggggatgatttatga

SEQ ID NO: 451336 - DNA, 945 bp, Serratia marcescens; identical to SEQ ID NO: 279641

SEQ ID NO: 451337 - DNA, 360 bp, Serratia marcescens; identical to SEQ ID NO: 279642

SEQ ID NO: 451338 - DNA, 2502 bp, Serratia marcescens; identical to SEQ ID NO: 279643

SEQ ID NO: 451339 - DNA, 729 bp, Serratia marcescens; identical to SEQ ID NO: 86444

SEQ ID NO: 451340 - DNA, 1608 bp, Serratia marcescens; identical to SEQ ID NO: 279646

SEQ ID NO: 451341 - DNA, 645 bp, Serratia marcescens; identical to SEQ ID NO: 279647

SEQ ID NO: 451342 - DNA, 915 bp, Serratia marcescens; identical to SEQ ID NO: 317656

SEQ ID NO: 451343 - DNA, 1215 bp, Serratia marcescens; identical to SEQ ID NO: 279650

SEQ ID NO: 451344 - DNA, 144 bp, Serratia marcescens
atggggatgctccagcaacagatcaaagtggacagggacaaactcaagaatccccaaaattcagcggtggcgatgctcctgcgccagctaaacagaccaatgaacccccacttgatttttctgatgatatcccgttctgaatga

SEQ ID NO: 451345 - DNA, 240 bp, Serratia marcescens; identical to SEQ ID NO: 86451

SEQ ID NO: 451346 - DNA, 258 bp, Serratia marcescens; identical to SEQ ID NO: 86450

SEQ ID NO: 451347 - DNA, 651 bp, Serratia marcescens
atgaatgagcaccgcgcccgtgcggtaaatgccatttgtgcgtgtattgctgaccgtctcaatatcgttaccggcaaagtgtttatgacactggcgcaaatttccgacagttgtggcctgaccacctacaataaggatggaacgccctgctacagtcgcgccagtcgcgccattaacgaacatcttgaagctatcggcgcaatccattgtgatcgcgtatgggacgaaacaaccggctcatggattcctaacctgatatgggtatcagaactgtttttcacgttgataggctacgagtacgggaaatatgaggcggcacaacagcaacaactggcatgggaaaacaagggactgaaagaaaaaggggaaccggctatttcattaaccgaagcccgcagacgggcaaaggttaagcacattcagaccgcatttgaagtccgagccaaaaaacgcgcgtttaaaacacagttacgacaggccagaaaactggccgctatggaaaaacagaaagcgcaggctaaaatccttaacgatctcgtcaaactctactcacaggacgaactggccgctatggggcatgttgaactgaaaagacaggttgaacatcgctatgcggccatgagaaaactggctaccgccccgccacattaa

SEQ ID NO: 451348 - DNA, 1200 bp, Serratia marcescens; identical to SEQ ID NO: 79256

SEQ ID NO: 451349 - DNA, 1005 bp, Serratia marcescens; identical to SEQ ID NO: 399378

SEQ ID NO: 451350 - DNA, 780 bp, Serratia marcescens; identical to SEQ ID NO: 316471

SEQ ID NO: 451351 - DNA, 1695 bp, Serratia marcescens
atgagaaagactatctttttatttctaattcttttgtcagagtttgctcatgctgaagtgacaaacgaaggattgatgaaatcattccttgaaaaattcaaggcaaacgcggctggctggggcgacacaattacaagtcatgccacatttttgttttgggccctagctactatcagcatggtttggacatttggcatgatggcgctacgtcgtgctgacataggtgaattctttgctgagttcatcaaatttataatgttcactggttttttttggtggctattagaaaaagcgcctgttttagttgcatctatttttgacggattagaacaactggcggggcaagcatcaggactaccaaaacttaaccctagcggcataatagatatggggtttattttatttggaaagataatagacaacactccattatggccgacaaatgcaattgcttacctgctaattgggggcattcttggaatcgccatattggtaatcctatccttaattgcaataaacatgctcatgcttctaatatccgcatggattctagcttatggtggaattctgtttcttggtttcggtgggagtcgttggacttccgacatggccattaattattacaagacagttttgagcataggcattcaactatttagcatgataatcctggttgggattggacagaatataatcttgtcctactcgaatgccatgagtgcaggtgaagttaaagaaatagccgttgtcgctgtctgcacccttattttgtatgttttaacaaacaaaatcccaccccttttaggggggcttgtcaatggttcaagtattggcgcatcacaaggattatccacggctggggctggggcactatttactgcagcaggtgcagcagctgctgtagcaagcatggcagcgtcggcagccgtagccggtgcaagcaatgttgcaggcggaatgcaggccattatgaatgcagtgtctaaagcgggaagtaatgtcgaggctggttctgatctcataagcaaagcaactaacgctgttgccagtgctggatctttcgctgatgccgcaggctttggctcaagctccactgcgagctcgtcaggctccagctccgacaccacgagctcatcaggctccagctccgacaccacgagctcatcaggctccagctccgacaccacgagctcatcaggctccagctccgacaccaagagctcatcaggctccagctctgacaccacgagctcatcaagctccagcgcatcaagttcttcaggtaagggttcaacgagcaaaaaagatggcatcggctcaaaactggcgaaagctggaaaaattgctgtcgaggcaggttcaatccttggtagcggtatagaccaaggattaacggataaaacacatgatttgcttgataaaggaaaagaccgagcatctaactccatgatgggtaaattagctcaggaaattaaaaaccctggggccaatgctcaagctaggctcgacaatcaagccatttctgaagcaaacgaaataaaaagcaaccaggctcgatctgcagcggccaatgaagcaagagaattcattaactcaataaacaatggtggcaactccgaatcttctactccaaacgaaaattctcttagtggagaaatggaatcagagattgcagcctttcgggatagaaaataa

SEQ ID NO: 451352 - DNA, 339 bp, Serratia marcescens; identical to SEQ ID NO: 30181

SEQ ID NO: 451353 - DNA, 963 bp, Serratia marcescens; identical to SEQ ID NO: 316490

SEQ ID NO: 451354 - DNA, 666 bp, Serratia marcescens
atgacactaacgactgagcagttgagagcgctcgctaagttctggcgagaaaaggtcgctgatgacatggcggggacagttattctcgaaaaggacatcctgatatttacagaagtgcttgaagaactcctggctaaccgggaggcgcagccggtggcatatgcagttttcgcggataacgggaatattcgcatctggtctaccgacaagggaatcactgaaaatgtcggtgtcccggtgccgctctacaccgccccgccagcgctggcagcatcccagccagcggcagcagtattccctgaaagcttgccatgccctgtgcatctgttgccggggttaaagtttggcaagggggttccaacgcgcagcatgcttgatgctcttgttcgtcgggcagagtatgaggccgaactcgaggctatgacgccagagcagaatgccgaagacgatgccaggattgaggcatttaaagcgctgctaccccagccgccagcgcaagtagtgccggatggatttaagcttgtgccgacagtaccaactccagaaatgatcgccgccgccatgaactgcgacgacgtgatcttccacgccgacgaaagtttctgcgttaacttcggcaccatttacaccgcgatgctggcaacagcgccaggtcaaagggaatga

SEQ ID NO: 451355 - DNA, 642 bp, Serratia marcescens
atgatccagcgttcgtactgctgggcctcagccttggtatcaaattttttacgtactcgcttcccattacgtccctgggggcggacatcaaccaggtactgcccagagtcaagtttgctgatactcattttctatcgaccactcttagcacatagttttttgattccttcagagccctccgtcatcgctttgtgttgttccttccaggaggtctttaaagctgctttgtcgccatctatagaaaactgttgcaatgcatttacaacaaacagcatccttaaagctacgtcatcagcaatattcatcgggttatcaaggccgggcctagcacgctctgaatattttgaacggattgcagcatattgtttgttgaagtttttgaccctagcctctgcaaactccttgcggtcaatcttcagttcagattggccgctagcaagccattttcctgtgagatcattaaaaagcttagctgtttcaatgagttcagcgtttgccattctgcattgtgttttgatatcggtgtattgttcggtctgtgcatgcgtgacgaccggagttaacaacatgccgacgagcaaaatccctttccaatcaccaaaagtatttttcatgagcaataccccctttcccccaacttaa

SEQ ID NO: 451356 - DNA, 864 bp, Serratia marcescens
ttgaataccgatttcgcacactattaccaacggatccgcagcaagcaaaagcgcgaagcgctgctgtggtcgctcgggctggtggcgctgtacctgggcgccggcaacctcgccgagttcaacctgcacaccgtttgggtgtctattccgcacttcttcgactacctggccgaaaccattccgacgctgcactggcctctgctgttcgccgacgggcgcaccgagggctcgctggcctactggggttaccgcctgaatatccagctgccgctgatctgggagaccctgcagctggcgctggcggcgaccattttctcggtgctggtggcgaccgtgctggcgttcctggcggccggcaacacctataccccggcctcggtgcggttggcgatccgcacgctggtggcgtttttgcgcaccatgccggagctggcgtgggcggtgatgttcgtgatggcgttcggcatcggcgccattcccggcttcctggcgctggcgctgcacaccatcggcagcctgaccaagctgttctacgaatcgatcgaaaccgcctccaacaaaccggtgcgcgggctggcggcctgcggcgccacgccgctgcagcgcatgcgcttcggcctgtggccgcaggtgaagccggtgtttctctcctacagcttcatgcggctggagatcaacttccgccagtcgaccattttggggctggtgggggcgggcggcatcggccaggagctgatgaccaacattaaactcgaccgctacgatcaggtcagcatgacgctgctgttgattatcgtagtggtttccgtgctcgactatgtgtcgggcgagctgcgcaagcgcgtggtggagggggcaaaatga

SEQ ID NO: 451357 - DNA, 726 bp, Serratia marcescens
gtggaaaatcatgatgtttatgtctacactggcgatatccatagagatggataccttgctctcactaatgcgataaaaaaacgaaaatcggcacctggtcttcgaaaagatgttgtcttttgtgtggcaacatatggtggcgatcctgatgcaggctatcgtatcggtcgcgctctacaacacaactatgatgatgtgaccttgcttgtagttgggccatgtaaaagcgctggtacgcttatagcgatcgctgcaaacaagttagtgataggtgatatgggagaactgggcccgttggacatccagttaaagaaaaatgatgaaattggtgagtctagttcaggtcttgctatcatgactgctctggatgcgttaaaagaacgttcaatttcagcgtttaattcccatttagttaagattcgttacgaaaaccagatcaatacaaaaatgtctgctgacatagcgacaaggcttaccgaagcattgattgcacctatggctgcacaaatcgacccgatcaagcttggcgaacatcagcgagccatgagcatagcgatcacgtatggtcaacgattgacatctaagtcgaaaagccttaaagaaggtgcattagtgaagctcattgcatcatatccatcgcatgggtttgtaattgatagaaaagaagcacgggaactttttaaatgtgtagaggctaccaagtggtatcacggagtctttatatga

SEQ ID NO: 451358 - DNA, 543 bp, Serratia marcescens
  misc_feature (437)..(446): n is a, c, g, or t
atgttatttatgttaagcaatgcattaatatttgaccctgacacacaaaaaatcagtcttgcaggccaacccgactcagccgtaacgctgtcagcgcctgctgttcgtttattattggaattcattagaaatagaggaaaagaactcagcagagaaacattaattacccgggtgtggcaggactttggctatacaccatcaggtaacaatctcaacaaagcggttagcgagattcgaaaagcattccagtcactgggagtacacgcatctcctattgttaccgtaccaggcaaaggattttattttgatgctgacgtcacaggacaaaaacgcttatgtaaagctgccactatcgagcccgttcctccaccgcaaaagacaaagccattcaaaagaaggctaagcatctcaacacagcggccctactgtcttgctgnnnnnnnnnngtcttgctgcgttagtagtatcaattttaataggaggggggtatttattttcagaatatgcgatgaagtcatcgaaagccataaagctgccaaatga

SEQ ID NO: 451359 - DNA, 921 bp, Serratia marcescens
atgaaaataaaagctaaatccataagaacaatagataaaatcatcaaaatttctgcgggactagaagaggtcatacttgggttaaaagtatcggataccagcacagctcacttggttgaactaggtttcccagagagtctacccgagggagtatcaatcatcccagcagctttaggcaaatatactacttttaacgctagaggaagagaggagaagcggccagatctccctttggagatttaccatgtaacctacacaagtacaacttatgactggcatagaaaccctcattacggatccaaaacacgcagcggaaaacgtatagcccgagtatatatagaagcaccttccgtatacttaagcatcgccataataaatgaagaaaaatatattatcactccgcaacttaaactttctgaggggaactcagaatataacattcatgtagtaaacttaatgctggaatgctttggcgagtttgaaatccttgacgaaaacaaaacgccactaaaaacaaaaaaattcaaaaaattgcaatgggacattttacctaagggagtttacccttgggagaaagtcgcatctatgattaagtcaggaacacatagacttacaaaggatgagtcagaaataatacaagaacggcttaagttaattaatacttacaagcctgacttcatcggtgtagggcaaggcggatttaatggatactttgtttttggttttgaaagcaagagtacatacatactagaaagtgcctacttggataacgcaacatatgttttcaaaaaggattgggaacatttatcaaagttgactaaaaatgaaataattaacaatgatattgaacaccaacgagtgatccatgataaaaagtggaaacaagccattggtattgttataacaaaagcaaaaaaataa

SEQ ID NO: 451360 - DNA, 573 bp, Serratia marcescens
atggaattcaatcaagacgcaaaagctgctatcgaaaggatggtaaaggcctacggagtcaagactaaactagctttgtgtgaagccttaggtatcacggctagtgctcttgcgaacaggcaaaaccggaatgctttcccagctgagtatgtattgaagtgtgcattagatactggtgtatctgtacgctggttaacttatggcgatggtgagatgtacgagcaaacagttgtttccgctcctaatacattggcagtaccatgtaaaaatcttttaaataggaagctacatgacgctggcgttattttattagacaaggcatttttaccggacaatatcaagaacccattaatagttatcgatggcacttttcagtatatttcgacaagagattatgaagaaatatatgatggtacatggataatcgatatcgatggaaacataagcatccgggaactggttaggattcctgggaacagagtgaatgtaactgatagaaaacactcttttgactgttcacttgatgagataaaagctgtggcgaaagtgctagcatcttacactgttttataa

SEQ ID NO: 451361 - DNA, 576 bp, Serratia marcescens
atgcgtcaggccgttgccgttctcatgccccttgccggcattgacgcctgccgagacgctgatgccgtacccgcccgaacctgcgccgatgccgacaccgacgttgccgcctttgctgctgttcttgccgacggtgctttcgcggttctgcgccgactgcagggtaatgtcccgcgccgcatcgagcgacagatctttgcccgctttcagctggctgccggtgacgacgatatcgccactttgcgcgttgtggttcttgccgctcgccgttatcgacaggttttgcccggcggtgagcgtgctgccctgcgactggtggctgtcggtgcgggtttcgctcttcgacgattggctgccgtaggaggcgctgatgcctaccgtgttggtggcacttttccccgcatctgtgttgagcttgtcgagttcagcagcctgtgcagcctgcacgccggacagcgccgccttggtgttttgcagcgcggtcaggcgcccatcgccttcttttcgcgcctgctgcgccgagctgacggcggtgttgagcgcgccgcccacggtgcccgacagcgccacgcttag

SEQ ID NO: 451362 - DNA, 465 bp, Serratia marcescens
atgctctttttcggcgtaatcaaccaggcgttccaacctttcatttatcgcaagcttaaagcgaacgattttagaggggtcgagctcattcaatatggttacacagctctggttatcgtttcgtgcattatttacttctttattttgccatttgctttcccgtatctgtttaatgctgagttcaatcgcgccatttattacttcaacattcttttgcctggaactgcatttttatcgatttattatatttttacgcactcactgttttactatcgtaaaaataaattaatctcaattattaccatgggctcgatgataacgcatttgattggtatatttgtcatcaccatgacagaaatcaaagttgagtatttctgcctggtttatgcaatttctagtttttatgcgtgtgcagtgactttttattgtggcaagcgacagatcagtattgagaggaaaagatga

SEQ ID NO: 451363 - DNA, 771 bp, Serratia marcescens
atggcattagcaccacaagcagatattagcgaagcgataagtgttttatctcactgcatagactctgggagtgaacttgatcagctcacctttcgccgttacctgaagaagttcgagaatattcctgatgagccgactaagctgatgttgttcggtttagcgtatggtgctgttaaagaatatcctacggctattgcctttttcaaagatgcagtttcttacaaggatgatgttgtagcccggaattacttaactttcttgggacgtattcttcacttcgaaatgtatagggaagagtctgaaaggttggcaaaggagtataacagtttcccgctttgcattcgggcgagaaacgcagcctatgctgatggtaacggtgagttatcgctttttttcacaagaaaagcaatttcccttacttcggatgataagactgtgaggaggttggaaatggaggctaagcatcacattggctctcttgataagttcgcctcgcttagtggtctgagtagcagagaactccaagagttaagtcgaagcgtgacagatgttgccaggaagcatggtgtattatcgatagcgactgagttttatgtaagctcggataatcatgaccttgccatcatcaatgatgtccttaccatgaacgaagatttgatatcagatatggacatagagatcgcgtgtgcattagcgatgaacgaaaaatactctgataaaaacgtgtctgcatggtatcgcgggcgtgaaaatgtagggcacacaatatga

SEQ ID NO: 451364 - DNA, 924 bp, Serratia marcescens
atggataatgacgatatgaagttcagaatagtttacgatggtccagctttagatacgcatgagatggacgtgcgcgatcttgcccctgcacttttatcgctatctgatgcattagaggaagctggcaaaactatctatggaaaagaaagacgcatatccgtcaaagtgaatgcctctttcaaggcgggatcctttggtgtcgatctaatcgcacaatcctcgtcattaaccagccaaatcataggtgccttctctggaaataacgcttctgcagcttgcaatataataagcttggtaggatttggatatttagcatcaaagcaatctatcaaaggtcttgttcagctgatcaaatggctgggcccaaagaagatcaaacgaatagaacctacatttgatggttgctctaaaatatatatcgatgatgaatttgaaatttttgaatcgcaagtgattgatttatacaaaaataaaaaattaaggagatcacttgaaaatgtcatcacaaaaccattagaaagggatgggattgatagcttcgccgttactacagataatggtaaaacgttcgttgaggtaagtaagacagaagcttcatatttcaaggtggatagcactgaggagttaatcatttctgagtctataagtgagagggctctccatcctttggatatctcgtttcgagaagggcataagtggcatttttcagatggttctagcccatttcatgctgaagttagtgacgagaaatttctaaaggccatagatgaccagtctgtgacttttgccaaaggtgaccttttgcttgttgacttaaaggtaactcagtatttgacagacaaaggtgtcaaaacatcttacgaaatagtgaatgttaagaagataataaaccctcagagacaaataggtcttcctttcgaataa

SEQ ID NO: 451365 - DNA, 255 bp, Serratia marcescens
atggcaaagctgaacaaaaaagagcgcgagtggctggacgagctgcaagaggtgctgaaccgctgcccatcagatcgcctgggattcttcaccatcggcgataaggatgtttttgtgtatgacaagcgcctggataagcagatagatgaaatacaggataggggctgtagggatttctgccaagtagttaaagatattgatgctggttttggagagataacatttccatctaacgttcactctacagcaggttga

SEQ ID NO: 451366 - DNA, 1194 bp, Serratia marcescens
atgaatactacacacgatcctatccgccatataaaatacttaagacaatccttatctcaagataacgaggctatcggttttttcctatccgcaggatgcccgctgtcagttgatatgcccgaaggccagtggccattaataccagatgtagtcaatcttacgaagtatattcatactgaattaagtgatcatgaacaatatgaaaaacttatatcagaattggagaaagcggagaaaaataaaaataatatagaagatatccttagctttttgcgagcacttgtatcagtgtctaaaggtggcgaagttagagggttaactgaagaacagctttcgattctggaaataacaatatgtgaaaaaatagcaaaaaaaatcaacgtgagtctaccaaattccgaaacaccatatcataacttggctaaatggatacgctcaatagatcgcaagattgctgtggaaattttcacaacaaattacgatcttttaatggaacaatcacttgaagaaatggaaataccatactttgatggtttcgttggtgctaacaacccattctttgaccttagagcgttggaagataacctcatccctaaacattggtcaaggctttggaagatacatggttcaatcaattggtgtcaaaaacatgtgggtaatcaaaaaagagtatatcggactcatcccaaccataaagagtcatcacacttaatatatccctcacatctgaaatatgaagaaagtaggaaaatgccatatctagccctactggatcaattaaatagatttatcagaaaaaaatcatcatttctcgtattatcaggctattcctttaacgatggtcatttaaatgatgttatcgttagtgcactaaagtcaaatccaacagccatggttttaggattaatgtatggcgattattatattgatggtaacgaaaaatacccagaagcttaccgattagctaaaaatcaacataatttgaatatatggactaacgatgctgctattattggaactaactatggaaaatggttttataatgaaaataatgatgatgacaaagaaatatttagatttataaaaaaaatcaaaacaggagatagcatttattgtaattccaatgttaacttcggtgacttcaaggacttttccggtttcttacaaaaaattattggctctatgaaggattaa

SEQ ID NO: 451367 - DNA, 3297 bp, Serratia marcescens
atgaataaagtctatgcattggtatggaacccggttcgggaatgctggaacgtggtcaacgaacactgcagccgatgcggcaaaggcggcagcaagcgccgtctggcggtggcgctgtccctgctgagcctcctgccactggagcaagccctcgccctgccgagtggacaaaacatcgtggcaggccagggtgacatcacctccaacggccagaacatgaccgtaactcagcacagcgacaaattaatcacccaatgggatagcttcaacgtaggtggcaacgagagcgtaacgttccgccagccaggcgagacatccgtggcgctcaaccgcgtcatcggtgtgaacggtagcgatattcagggcaaaatcaacgccaatggcaaggtgttcatcgtcaacccgaacggcgtgattttcggcaaaaatgcacaggtgaacgtcggcggattggtcgcctcgacgcacgacatcagcaacgccgatttcctggcgggtaaaaaccgctttaccggcagttcacaggcagaggtcgtcaacgaaggccgtcttcaggccgctgaagccggcagcatcgccctgttgggcgcccgggtgaataaccaaggggtgattcaggcgaatatgggcaccgtcgcattgggtgcgggtgacgatattacgttgaacttcgatggcaacaaattgcttaatctgcagatcgatgcatcagcgctcaatgcattagcacaaaacggcggcgtcctgcgtgccgatggcggccaagtgttgatgagcgccaaggccgcaggcgatgcgctaagaaccgtggtaaacaatcagggcgtcatccaggcagataccgtacgtgaacaagctggccgaatcgtactggacggcggcgacaagggtctcgttaacgttagtggcaccctgctcgcgacggccagcaccggcaacggcggctttattgaaaccaaaggcgcacaggtcgtcgtgcagccaacgaccaacatcagcactcgctctctcaacggtaaagccggcagttggaaattggcatcggccgacgtcagtgtgaaggacggcggcacgctcagtgcccagactctggaacaagctttagaaaacagtaatgtagaactggtcagtaccaaaggtgatgtcaacgtttctcaacaagtgcgctggcagaatgccaacaaactgtcgctgacggccgaacaggcaggcatcaagatcaacgcgccaattaaagcgaccggcacaggcggcgctttggcgcttaaccacaagacgggttatacgctgaacaatgacgcgtctgtgaccctctcgggtgccaacgctgcattcagcgtcaacggtgaaaattataaggtcgtgcaaaatctggctcaactgctggacatcaacaatgacctgaacgcgcgctacgttcttggcaacaccatcatcgacaacagcaaaatcaaagccatcggtggcgattactctttcaatggcactttcgaagggctgggcaataccattcagggcctgcacatcgtcgacagcggtccattcctcggcttgttcaacacgtccaccggggcgatcagcaacctaaaactggactcgctgaccttaacgggcaatggcaataccctgtataccggtgccctggcgggggtaaactttggcaccgtatccaatgttcaggccacccgtatcaatatcagcagcggcggtgacatcggaggcctagtcggtatcaacttcagcaaaatcaccggctcttcggcctcgggtaaaataaccggcaacacaggcagaagcgcgattggcggcctggtgggtgtcaaccggggtgaaatccacaatagccaggctaacgtcaacgtttcaaccgccggtggcgcgtcttacagcgatgtcggcggtttggttggccgcaatgacggtttgatcgtcagctcatcaagcctggggacgatcagcgccataggcgatcaaatgaatgccggcggcttggtcggcgtcaacaacggtacgattacggactctacctccgacgcaacggtcaacgcaaaaagaaacagccgcatcggcggtcttgcaggcatcaacacaggtaaaatcagcaatgcaacagccaatggcagagtgaatggagaaaacgccgacgctatcggcgggctgatcggccgtaacaccggtgcattgaacaatgtgagggcaaatggcgacgttgttgatgctttcgcgcgtagtgtcggcggcttgatcggccttaacgagaaaaacgcacacgtgcaaaatgcctatgcgaagaacactgtaatcggtgggcacaatgccaatatcggcggcctcatcgggctcaactacggtaggctgagcaatgcctcggtgaacggaaaagtgatcggcggtaataacagcatcgtcggcggcttggtaggcgataactctggcgatcttacggatatctccgcacagagcgaagtttatgccggtaaggcaagtctggctggcggcctggttggccgcaataatggcgccaccattgccgacgccaaagcccaaggttccgtcaccggcgtttacagccgagccttaggtgggcttatcggcgagaataacaccggaacgctcaacaacgtcagcgccaacacgcgcgtaagcggcggcaacgatgcctatgtgggggggctgatcggctataaccgcaacgcacgtatcactcaggcgacggctttcggggaagttaaggcggcagacaacagccgcatcggcggcctggtcggccacaatgaacagggtactatcaacgcgtcggtcgcgaatgttagcgtctttggcggtgcgagcagccagatcggtggcctggtggggtataacaaaggttcgttggaacaggtcaaagcacaaggcaacgttaccggcgctgccggcagcgatgtgggtggattggttggtcttcacgatgtgggcagcaagatcgaaaccgccagcgcaagcggctatgtaaccggaggggttggtagcgttgtcggtggactggtcggccgcaatggcggcaccatcgacaaatcttctgcttccggtcgagtggacagtgccggcgtctctcaacgaggcggtttgattgggctcaacgtgggttatttatacaattctaccttcacgggccttatcgcgcctaaatcgaaagaaggccaatgggtcggcagcctgattggatcgaatttcggcggtgagtcgaaaaacaatacggtcaccggcgcctccactgaccaaccgctgtatggccgaggcttaccaagtacctggtaa

SEQ ID NO: 451368 - DNA, 1182 bp, Serratia marcescens
gtgactttttttacgaaactgtggacgaaaaaatgtaatgaggatgttcctgtttcggcagtgaaagtgttctatttggtttccgctgcaggtatgcccaattttggcgatgatatgctgacgcgattttgggtaacggaattacagcggcgcttccccggctgcaccatttatctggatgccgttgacgccgtcgttgcctcaggattgtttcccggtgtgcgatgcgtggattatttatggcggctggtgcaagcgttgggcgatgatggctccctggaagaaaagcttgccgatccttacacgctaccgttgcgtgaacgtttgatgtccaaggcgtttgcctccaccaccagcattcatctactgggtgggggctatatcaatgagctctggggcgccaactcacggctaattgaagtggcggcatattttgccaaaaaataccagctcgcgtgttatgcaaccggactggggttgcaaccgctctctcctgaaaaggccgggcaacttgttccttacattcgccagtttgaccggtttgatgtcagagatagggcgagttacgaggttttagcgccatttgagctaccacaactcggttttacaggtgacgattattttgctttttcgtcctattctgtagggcaccttgtagagcgtgagccgtttactttacatctgtgcattcataccgagctgtcggaagatgatgttcttactgggaaattattgggcttactaggacaagcgacaatgatattcctggaaaaacatccgaatgcgaagattaaattttatgaatttcggccgggctcggatggaattttcttccggcaagttctcgagctttttcccctggccgagttggtgccgtttgagcaggtttggcaagatggattgactttcgcgccgcatgatttttgtatcagttcgcgtttccattttcaggttatcgcagccagtcttggtcttcctgggatcgcactttcgtggtctgattactacgacaacaagttcaccagcctgcaacgaatgtcaaattggccaatgattcgaccggatatcagtctggtggagttacgggcttttttactgtttgcgcatggagacaggcaaaaggaactggagcaggtccaacagtccaaacagctgttattgaggcagttgtacaatttttaa

SEQ ID NO: 451369 - DNA, 807 bp, Serratia marcescens
atgtcccataagaatgaaaatcagtttacctcaatgttgcgagaactttgtaaaagctatcattttgtctataaagccaatccaggaaatgcaggcgatggcgttatcgccgcagcaacatatgattatttggaggccaatggatttgattactctccattcagatcctcggaagagtatagtccagaaactcacgtcctgctttttggtggtggcggaaatttaattgagaactattacgctgaaggtcgtgacttcatacagaaaaatatctcaaactttgccaaagtcattatattcccttcaaccattttcggctacactcaatttttcaaggaaaatataaaaaaactctttgtctgttgtcgagagaaaacctcgtatgaacgtttattaaaattaggttatattccagacgagtcaatcatcctaacacaggacatggcattttatctcgataaagataaatatatcaattatgtaacaccaactaaggaagtagcatcttgttatcgcactgattcagagtccttgactaaactacatcatgaaaataaccatgacatatctctaacgtggaatggtgactattgggacaatgttaatctcgcacgaaactcaacccgttcacttatcagttttttacaagattataaagcggttaatacagacaggttacatgtcgcgattttaggatcgctattaggcatggaggttaatttttatcctaactcatattacaaaaatgaggctgtctatgatcactccttaatgaattactttccaaatacctattttatcaagtaa

SEQ ID NO: 451370 - DNA, 1278 bp, Serratia marcescens
  misc_feature (1265)..(1274): n is a, c, g, or t
atgaaaaaagttcttatagttactcctgatatcgaaggcccgatccgaaacggaggaattggaacggcttttacctctttggctgtaaacatggcaaagtcaggcttcgctgtcgaggttctttatacctgtggcgattactccgaatctggtgagcgaaaaatcgaacattggattgaggtatataaagatcatggtgttaatctgaaggtgcttcctgcactaacagatataaatatcgatgctccttatttccgaagaaaaagctacgcagtttatgaatggatgaaggaaagtgaaagggcgccttatgatattgtcattgcttgtgaatggcaggcggatctttattactcgcttcttgcaaaagggcaaggactattctttgcggataccaagttcattgtaaacacgcatagctctactctctgggctgatgaaggaaattatcaacttccgtacgaccaaaaccacatggagctttatttcatggagcagaaggtcgtcgagatggctgatgaggttattagcccttcacaatacttgctagattggatgcgtgataaaaattggattttgcctgcggcaagtcatgttattcttaactgcgaacccttctcaatcaatccagttgatgatgcaatacttccaaagcgctctaaaaaaatagctaacggtattgaacttgttttcttcggtcgcttagaaaccagaaaaggattagatatttttctacgggccttgcataacctgaaaaaagacgagctagtcaaaatttcggcagttacgtttatggggaaagcagtagttgcggaaggttttaactccattgaacatataagaacgaaaacggattcgctcgatgtcgaagttaatattattaccgactatgatcgtacacaagctgatgcttatatcaaaggagagaatacactcgttgttattccttctttagttgagaactcgccttatactgtctacgaaagtttgatcggtgatgttaactttatagcctcttcggttggtggcataaaagaactgattcccgtagagaaccatcctgagattatatttgaaccaacacctagttcattgtatcaaaaaattacgttgcggctcgacaatcttcatgttaaatcgcagttggttcaaaacgttgatgaaattaaaacacgttggattgaggcgcttagcgaatcttttgaacctactcgcttgcaggctgacgcaaatttagaaccgttggtgagcgtttgcttggttcnnnnnnnnnnatga

SEQ ID NO: 451371 - DNA, 642 bp, Serratia marcescens
atgggaagtgataaactttcatgcttcgaaagcatgggtgataattgcgagtttggtttctatttgcgtaaaaaaggcatcgaaagcggcagtttattccgttggtcgctcatcaaggatcaccaggatcttctcaatctcatttccagtgattttaacgaattctatcagtaccataatctgcagcctacctggagaaatatgctggttgatagatcaaatggtgttatattccacactgagctctttagtcagcaggttggtgaacactgggagtttgaagatgatgaggatacaagaaaggaaaaatacctgacagagaaggaaaaaatcgattatcttgttaacaaattcaataatgcactgaaagaaggcaacagagttttcgttatcaaaaagaacaacaatcaaattgatatgactgtcattgaaaaattagcaaacaaactcaatcaatctggcaaagccaagatattagtggtcttccaaaacgatgataaaaacaagcttggcttggttgaacattataatgaaaacatattaatttcttacatcgatcgctttgcagattatagccaagccgacaatatttcagttgaaggctgggataaaatcatcaacaatgtaacaaataaactctaa

SEQ ID NO: 451372 - DNA, 348 bp, Serratia marcescens
atgagtttttattttgatgaaaatggcgctgctattggataccaggtagaaggccgttggctcatcaaagaggactctttgcaagttgaatatgacccaaatatacccggtggcctatataaaatcacagacgataaaataaagttcccatatgacttcaaggagcatgagggcgtgattgacactgaaaatctaactttcattgtgagtggcgttaaatataagatgttgaagaaaaaaagaatccgtggaatttttaattgctgccgtgctctcaattctaccgcccatcgtgtgagtatatataaattttctttacttgaaatggaaaacctgaaaataggatga

SEQ ID NO: 451373 - DNA, 1365 bp, Serratia marcescens
atgcttaacttgtcagaaaacaaaaaaaatgacctcgtagtaaatataaaaattggggttttttttgatggaactggtttaaatgcgaataatattactttgaaaaaacctgaagatgaatacttatatagcaacatttatcgcttatacaagcattatggtaaaaactatgacgaaaaagaaaaagatgtatatcttaaagtctatgtcgaaggtgttggaacaaaaaacaatgaaaaaaacaatattgttgttatggcaacgggtattgataaccttgtaagccatgggtggggggccttttcaaagtataataatagcgtgaatgatgtttcacaaattatcggaaattatttaaaaaccaagtcaattaaaaattatcatttagacatcacatttgacgtctttggtttcagtcgcggagctgcgatagcacgtcattttaccaataaggttgctaaacaggatacattttttattgagaaaattagggctgctattgaaccttactcctgttctcttgtaagccgtccctctgtaaatttccttggcctttttgatacagtggcttctatttggtctcttcacggtgatcctcatgacactggttatactaatgagcttgatgttaatcttggacctaaagttgctggtcaggtattccagataacagcaatgcatgagtgtcgatataattatccactaagtagccttgaggggttctatcctcaattagaattagctggggcccacagtgatattggcggtggttatgctgcttacgagtctgacagatctgaaattactgatactttttattacattccattttcttcgtccgtagaagaaagaatgacaaatgatattaatttactacgcgaggataaaagatggaataagcttcttcatgattggaagccaaatatccatttggatggagtttttggctggggtgaggtcaaaaaaaatgtccgaggagatctacagtttgtctctctattgatcatggcggattgtgcagaaaagtacggatgtagttttgattctggaatcattgataagtatgaaatgaagattactgaaaatttaaatccgtattataaaagtgcattaattaatatggatagcgtgctttctgatatgcctcaaaaaatccctcagacactgattgataatattactgatgaatatattcatgtctcatctacctggcggctacttggtgatgatgatgaagtaatcaacaaaaacatagagttgagaagcactttaagtatacaagaaagcactatagatgagatattcactatgcgtcctgacgaaaattggaatagaaaaaagtatcttaacgatcaacctatttaa

SEQ ID NO: 451374 - DNA, 744 bp, Serratia marcescens
atgtacgcttacaataaagaatcgccagtcgtaaagaaagatcatgacgagcgtgatcatagtgatgaacgccgtgaatattctcccttttcagcgcctggtgaatacgaacggtttcagcctggatactgtgcatccgggccagcatataacgcgtcgctgatggctcccgaaaaaaaaatcgattttcccgatgaactaagcattgcgccgggggaattgacgcgagagtacttgccggcgggaactgtgctctataagagtatgagatacgacagttttgatgcggccaaggctctcgccggccaggaaaataaagaggaatgggaaggtcaatactttgccctggataaggcgatatctgaagggtatgaaatggattatctcgatgagaacaccggtaatggacgtgcctggcttcatacgtttgtggtaacgaaagacatccccattcttcgtaatacagcgccgcgtcacggcgatgatagttattcagggggccagaaagccgcagcagtcaaacatttcttaatcaacaaccccgatattctgggggataatacaacagcgtacattcatccaggaaaaccgctaatgcccacgctgagcgaaatgggtgtggcattcaacggacctcatgatagggagggcggcgtagaaataattatcggtggtgaacaactcaagaatctcgatgtgacgcactcggaacctcatcaatacaagatgtgggagagacggtga

SEQ ID NO: 451375 - DNA, 7140 bp, Serratia marcescens
atgccttactcccgtgagtcgaaggaaaaagacacgcacgcaaaaggatccaaacaagataacgctagccaggagtaccaactggccagccagggcggtgccgctgccccgccacctgaagaggggctgtcggtcggcagcggctatgagcgttcattcgcttttattcgtgaggctcacctggaagaagcacaggaattcaggttaaaagggtacaacagtcaggtgcccgaagttgacggggggttactgacgcagctgcgtgatgacctggccgtggccaaatctcgcctgcgcctccaggtaagcgttggggggccgctgggttctctgtggctgctggatcagataggcgaaatagagcgtcttacgagcacgctttcggacgacgtcataaagcgctggattgagcatgagctgccacgcaaaagcgacggggaagccacggaggcggcattggggagccggcgtacggctcagtcgctggccagacggctggaatcaaccctgcagacgttgatacgcgttgtccgtaccctgcgtgccatggatgactacagtaccccggaaaaaaggcatgacatgctggtcgcagagattaccggcgttttctcctcctatgataaaagtatggtgatacaggccttgggaagcatgacggcagaggcgtcaggcaatgccgcctgggcttcccttatgcaggcccggaaagcggcgtgggaggccggtaagtcgtcctccgtcaatgcgatgatcgcggcctcgcggcacgaagcagaaaaagccaataaaaaagcccgtcaacttcagggggatccacagacgttctttagccatgtcgccgcctatcttcagagcctctccagcgatttggcaaaagcgtcgattcacgcaggtctgagcactattcccccgaccctacagcatgatgaggtggttgcctctttgtcgcgctcaaactccctctctcagcgtatcaaaacgggttttgataagaaaaaattacaagcgcaaactgccgtggcgggcatgaaagtccacgcgcaccggcttgtccgaatcgcacagcatggtcaccccaccggcacgccaacaaaggcccctgaacatgtcgttgccgactccgtcatcagaagcattttatggcagtggcaacagccggccatcaaaattcaatacgccagcgctgcactgctgtcaaaagtggatgagctgaaaaaaattgaagggatactggctgcttattccacggtggatgaccggggaaacgaacatgtgctacgtcatacttcagccagcccgtcgggtgaggaggggttggttgcgcaggtcagggaatgggtgagcgtcagtgtggagcaggaaaacccagaaaatcaacgggcggcaaaagtggcggcgctggagcggttgctgggcggcgacatcgaccatgctcaatcccttttggcacgcctgggcagtaccaccgacagcattcagaatgtgcttgaaaagcactggatgtcagtcaacgacatgctggaatcacggctgcctgttgatattgccctttctctgcaggagaagattgagcatttggtggataaattcatgcctgacatggccagggagcttgctaccgctgcccaggcgctgaatgacgccgcgcttgccgccggaaaatcagcgcgcaatttctccgaggccaaggtaaaggcaggcaaagcacagttgctggcgacaaaggtgaaggagtgtctgtcggcagagtctgcacgactgacagaaaggccactggatgaccattcacggggtgcgcgccttgccaaacattgggcaaaccttgccaacgcgaagaacgaggggaattatccgccgccggatgcacagcaggtacttgcctccctgaaagaacaggggctattagcggggaccctttcaaccggcgatccggccgggtatctcttcgctacccggcttgccggtgagcttgaaaatgcccgtcatgatgaattgataatgccgatgagtccggagcaatatgctgccttagagaagggacttgttgagtatattgtgaaatgggggcaaaaacggatttcgcgaggggtcacccgtattgttattgaactgtcctttgaacaggctttgaatgcggtatcgttcaacgtatccagcctcttccggctcccctataaggtgctgaaggcctcgataaaaataccgtacaatgttaacaaggttaatcattataccatgcccggtcatgataagccctataaggcgatttatggcttactgggcaaaaaactcaagcaacttggctttaatctactcacggcgcccgtgcctggcgcgatcaaacttgcggccggtgccgagctaaccgcaggtgcggccttgcataatgtatctgtcgggcgcagcgagaacacatttagcgcagtttatcaacatgtggcggaagagaagcaaagtgaaaaaataaaaatggactcagtgggggggatgatttttgattcagtgcttgatactgccactacggccgcttttaaaggggcgcaaagaggctggcaagcaggccgaaatgcaaataacgctattcctggtaatgcattcgtaagcaaacatattgctgaaagcaatgaggaagcgcatccacaagcgcaatggcgcgacatggctgccggaattgataatcctccgcaggagaatgctgcggcagatgagagagaggccatgccggtgagtcactcatcgccgttacgaccgcaaatggatgttaagccgttgtctgatgagcatgatcctgcagatcaacttgaagacaatgagaaagaggcgtcccaacgtctgattagacgcaagagacatatatcaactggggggggtaatggtattgagcagagtaaagaagatgaaagttatttttcctcaataggaaaagacttccgtcaaagtgaaaataaggatgcgggaacttttgggaaacgaaagaaaaatgaactatccaaattcattttaaatatcgcatcaaataaaatcagctcttctggtgaagaaagtaatgatgattttttctctggtggggatgagaagttttctaacttggttatagaaaggtatcactatataaaaagaattaatccaaatattacagatacctacgcaaaaaaaattatttttaaaagtttggagggctttataaaaagaaatgttgataaattgagttataataacctatatgtatcgttgcaagcattacacagtgtgagtgatgaggataacgatttcgatatagccatcagtaaattgaactccaagcattacaagtttgagggtaaatttaacattagcgaggaaaattatgtaagattaaaagaggcaatgtatcaggatgagaggggcggtaaacaatccaccataaagttgcctgctgatgaaatcaactcgaatggagagctgacattgggaggtattaatggttcaataataaaactaacggacaaaataactgacctgacaaataaaaatattgaagaccttatgctggttaagtatgaagatgaagatgaagatgaagatgaagatgaaggtgaattaattaaactctccctgatcgatatgaaatcattaattaagtaccttaaggcaattagtgatcaagacactatagccaaaatgaagggttataaaccaaaaggaaactatgaagatgtgatttttgcagccgatttggcgcatgaaattatcagtagaatgcagacatcttcagaaggattttttgaagaagaattgtcagctgttatttataaagcaacgatagagaaaaaattctccagtcttaacttaacaaagatatataatagatttatcctcgacaaggaacgattaaatcctttttatgaatcattacaaaaagaaaaacctgctggatacttcactatttctgactttaagaaaagtggggatgctgaaagcaggagtgcatttaatcagcaattttatgattatcgagataagtataataaatacgatgctggaatattatctggtagtattatagctggtagtggaataacacttgatgaatttaatcaaaaacccaagtctatacagacttgggctttatttggcaaatctctgggcggatatactaacactattggtgaggctattagtcctgagctaaatccagcacaatatattcctgggagagttattctgatgcagttatcatccggaagatatcttctcgtatccaacttattgggcagcattcgttctgttattcttaccgagcaggcgggtgataatatcaatggattgttgtcatctcggaaattagttggttttgaaaaaggatggtttaatgacgaagcaggtgcaagatataggcaatacgatggactatattattttaatcaagtgaatgagatgattatcaagccgctgtatggtaaagattggaataacaacccaataagaaatatatcacaccaatattttacattagcaaaagatgacaaagcgaaacccattttaattgatgataaatcgacagtggccggcacgctggcacaaggactggagattgcacaggctgcctatgtggaaaacctacatcaagctatggatgaaactgattctacctggaaagtaataagaggttttattccgttttataatatcatttacaattcatctacagattcagaatataaaattgacagtggagagttactccttgacctcgcaagtgttgttcctgtagttaaagccgcaggtgctgcagggaaatcagcatctgaagtcatgaagttaggccgcactgccttgaaagctgggatgaaaaatggactacgtggatttgatttgtttaaatatgtagcaaagcaagtttcaccagatttgttatccgcagcatcaaaaaactctttattgatgacaaaagcattttatgatgcgattgaacctgtaccgatcagatcgactttcaaagggctgtataaaggggtaaaaagtgatttgaagttaacatctctggatgatttttcggggggcgtattaacccgtaaaaatataaagtttgatttagaattaacaaatgatggggtgttgaaagataattcaggccaaagcttcataagaggtgaaaaaggtgatttgtatcgcgtcgaaaaaaatcacagcaataatagatggatgttggttaatggtgataagaaaaatcccatcattaattcaggtggtagatggtggaaagtaagtaagacaaaaaaaacaagagggttattccgaaaggactgggaggttaacgatatcaattttgagggggctcactctaatcacggcatatataaaattcgtcctgataaccctcaatccatgcaggattataattattacattaaaaataataataaattctatcaggttaaatatgatgaaggaaatcatacgttacgtctaataaatcccacttcatctagccggtcagggtatttccctccgataaaattgaataaaaataacaaatgggtatttaacaccaatgtcggactgaaaggcggtgggaaagattcgttcttacgcaagttgttcggtaaaaacaaacatcagtctttacaaactcatgaaccctcaactgcaagctccgtaccaaatctccctgcctctaccccacagagacagataaattacaacctaaccagtgatattgatgccgcggcctatctggaggaattgaagcagaaacccagtatcaataataaaatcatgaatccggcaggtcagtgtgagtcattaatgaatcctgtaagtgatttcatgaaagataagggattcgataatattcgctatcgaggcatgtttatctggaataatgcaaccgagcaaatcccaatgaatcattttgcagttgttggaaataaaggagggaaagactatgtgtttgatatttcagctcatcaatttgaaagcaaaggtatgggggagctgaatggcccattaattctttcggcagaggaatgggcgggtaaatatagtggggcaaccaaaagaaaactgatttactatactgatttcagtaattcaagaacagcggctaatacctataatgcattgccacgggaattagagtcagagtcaaaatctatggtgatgaaagtttttgttacatcaccgacttggtataacacctttaaaaagcaaaaaaatattccttcagcggtaacagtagcgtcgccacggggacaggtatccacctctgtaccgccggcaccggcaatgtcaccacagggacaggcatccacctctgtaccgccggcaccggcaatgtcaccacagggacaggcatccacctctgtaccgccggcaccggcaatgtcaccacagggacaggcatccacctctgctccgccggcaccggcaatgtcactgcagggacaggcatccccctctgttttgccgtcgccacagaggccatctggcacgttaagaacggttgaatttaaacctggtgaaaataaggaagcattctcagtgttaaaaactaaagctgaaacgttgtatcattcgaaggcgaggtctccggtcgaatcggttgatacaacgaatgcatttgataatcgatactctgttatcaagactgaagcctctgctccttctaatgtttctcatcttaccgaaggtaagctgtataacttgaagattggagcaaagtcttctgaaatcccagcttatgatttatatatatctaaagatggtaaaaacatcatcacatcatcgtcttataaaaaagatgatgttactcaagaccctcgatatggaaatcctttgtcttactccgagatcatgtttaatgcactgaaaaagtcaggggtagatccgaaggaattaatacgttccactcaggctagcattgaaaatagcgttactcaaagtgtgataagtgctataggaacccgaatccaacgagggcgggttatcgttgtttcaccaacgaataatccagacgctttttttacacttctgggcacagacaattgtaaggctacgttatttatgttgactcaacatgcagaagagtttggtcataagacaataacgagtatcgagttcaaggggactggctatctggttatgaatataggttag

SEQ ID NO: 451376 - DNA, 882 bp, Serratia marcescens
atgtctaattatcagaccctgctcgacgtgaataacgcgatgaataagatgctgcgcgcttatgtgaataaagacgtggcaattcgctttgatttaccggatgtggatgcgacgcagtccgatgctgcgataagcgtgtttctttatgatatccacgaagacctgcagctgcgtactgccgagtcccgggggtttaatgccggcacaaaacggttatcacccggctgggtcaacgtgaagtgtaactacctcattacctattgggaatcaaccggtcccgccacggatgccggcaacccggacagtcagcccgacaaccaggccataaaagtcatgtctcaggttctggcagcgttgattaacaatcgccaacttgccgatattcctggggcgtatacgcaggttatgccgcccaaagaaaatctgaacagcttgggtaacttctggcaatcgctgggcaatcgcccgcgcctgtcgctcaactattgtgtcaccgtaccaattagcctgagcgataagggcgaggaagtcaccccggtgaaatccgtgtctaccagcgttgagccaaaagcgcccgtttctccacaggccatttccgacgtactgcgggagcaattaatcgtggcgctgggcggtggtgatgatgcccgtctggcgatgacgcacgttaatctggaagcctcgccggttgccgcgtcaaacggggggccgactgacatcagtgtgtctctgcgggtgtccggtatgacgcgaacagaatacctcgccccgatgaacaccgtttttgaaaaatgggcaaagaatgaggctgcggtggtcacgtccgatggctatcgtatttatatcaccgcagttgctaatacggatctgacagggatttaa

SEQ ID NO: 451377 - DNA, 2091 bp, Serratia marcescens
atgacgctttcttcagcacttcagcctgcgtttattccgcagggtgattgtcagctatcgctcttgtttagcgagctggaacgtatcgatctgctattacagcattattattactgccattcagcgcgtcacgaggggcttaatgcgtttctgctcagcgaggaggaggtggaggcgcgcaggcaacaccctgtcggcaggcctcattgggccgctgacccacaatcagtttacccgacggaaagcgggcagcccttgttggcagaaggcttaatggacctgcttcatcgtttcgaactcaccgactttgaacgggacacggtgctattgggattgctgccccattttgacagccgtttttacgatctgttttcctggatccagcagggaaggcaaagccaactgcccaccttttcattggccctcacgctattttgcccttcagaccgggaaaagcgggcgcagcaagccagttttctgcctcaggcgccgttaatgagctgtcagctgttaacgattgaggagaataaaaaaaatccggcatggagccacacccgctttatgaccgacagcagcgtgtaccattttttactcgggcatcactatttggtaccggcgttagcatcgtgggcggaatggtcttcccctcccgcgttgccgttttatcctgccggcttaaaagacgcgctggccggcgtgttactaactgacgatattgagccgcgccccgtggtgctgctgcgcggtatgccgggaagcgccagggcccatgcggtgtcgagcatttttgcctctgaaaaccggcagacgctgcaggtcgatatcgataagtgcgccgagagcgatgacgatgcgctgttactgcatttaacctgtctgatacgcgaagcccgtatgcgcggcgcgggcatggttatacgtaacctgcagacacggttggaaaagagcacgtcactgccggagaggctatctgagcagctgaaccagccgggattaagggtggtgtgcctggttgaaccctatgctccgcctttatggctgaaaaagacgcccaccttgcagacagcgatgccggtgttaacgcaggaggaaaaactgcacctgctcagggattgcctgccggaacaacgtgcggcggatatggaccttatcagtctcagccagcgctatacctttaccccggaaagcctgccgctgatggtacaagaggccgaactgtatcggcagcaacgcgacccggcggatgtgctgcaacagtgtgatattcgccaggcgctcaatttacgcaaccaacagaatttcggttccctagcgcaacgcattacgccgaagcggacattaaacgacctgttggtgtcagagagcctcttgcagcaactccaggagatgttgacggccattcgctatcgggaaaaagtgctggccggcggttttaaagataaggtgggctatggcgtcgggatcagcgcgctgttctacggcgactcgggaaccgggaaaaccatggcggcggaagtgctcgcccataccctgggggtagatttaatcaaggtagatctctctacggttatcaataaatacattggtgaaaccgagaaaaacctctcccgcatctttgatttggcagagcaggatgccggtatcttgttctttgatgaggccgatgccttattcggcaagcgcagtgaaaccaaggatgcccatgaccggcatgccaatattgaagtgtcttacctgttacagcggctggaaaatttccccggtctggttattttatccaccaataaccgcagccatctcgacagtgcattcaaccggcgctttacctttattacccgctttgcttatccggatgaaacgttgcggtataacatgtggaaaaaaatatggccgaagaatatcaaagtctccccggacgtggactttgaaaaattagcgcagcgggccaatattaccggcgccaatatcaggaatattgccctgctggccgccttcttttccgaagaaagtgaccatcacgaagtctgtcaacatcatatcgaaacagcattgacccgtgaactggccaaaacagggcggctggctatttaa

SEQ ID NO: 451378 - DNA, 1752 bp, Serratia marcescens
atgacatctctctttattcataaagtaaagcaccaggtaaaaataggcagtcgtttatctggcaataagttgatgcattccaatttatttggttctgataatttaaaatccgttcttctccagactatgcatagccatggggcgaagatgtcgctttatttggatagtttggaacttaacctcggttttatttcggtagcacaatttgatacacagtttaatcagcagctggcgcaggcatttgcacaatgcctcgttcgcgagcatgcgtccgtcggagaaccacaagaaatgaatctccaaactcctgatattctcgtgcttcagaactggcttcaagaagatcatcccgtcgagaaagaattatttcaacgggctcaaggctgtttgcaacccgtcacgcttaaatccttgatacaggacagtccagcataccagcttcagcagttgctgaagctgtttcttgagggggcatggcaatccccaaaaatgctgccggtatgttggtatagccgggtgacagcaggtcggttgtcgatagccgccgtcttgtacttactcaaaaaccaacgggggcataattggctgatgcatcagtacgcccccacagccagccaggtgactgactgggcaaaggctattgatcggggagaggttccccctgagcaggtcgcggagttactgaccggtaaccggccttccaacagcatattgcctggacaaccggcctatcccgccctgatcgtgatgcgttggttgttgccattgtggcgacaacccgccgtgcgcaaggtgatccatcgactgaaaggcggacggggcgtgcagcgccttgatgcttatctgagtcgctgtttacagcgccaagacgatgatctcatgcaggaagaaaaagagatgcactcccttcccaatcaagacgcatcaccgcaagataatacggtgttatctccggacggggtaatcgagtccgacgctcagcaggttgtgcgatcgggatataacgccacgttgtcgaagaacaggcggatgccatccgatccccagcaggtcgcagtaccgccagagagttctgcgttgccgcagggccggaggatgccatccgatgctctgcagattgtgctatcgcgaaataacgccatgttgccagagtgtgaaggaataccgttagccccccaacgcacgatgcagccagggaaaggcggcctctgttcgtcgagtgaatcacgcttatcaagtctggggatcagcaacgtcggtttgctactgctgtggccactcttgcctcagctgttttccctgctgggtctgtgggaggaagagcagtttgtcagcgatgcggcgcggtggcaggctgtgtacagtcttgacagattagtctgggggggaattagcccaacggagggccggttgacgctgaatcaggtgttatgtggggtgtccggttcaaccgctgcaccgccgtcgatgacgctgagtctgttgcagctgcaacagattgacgactggctggccgctatcggccaacaacttcccggttggcaaaagctgagcctgacagacatacggcaattgttcttgcaacgggcaggggaaatcagcacggaagggccagtccctcaaatcagcgtgtggccggaaccctatgatttcttactcagagactggccgtggcccatgacgctggcatctttcccgtggactgaacagccactgaccatcgtctggccgctagacggttttacaggataa

SEQ ID NO: 451379 - DNA, 888 bp, Serratia marcescens
atgacggataaaacctctaagaacaccgcagaaaccgcggtgaatacctcagcagccttagccaaaacaacagacacagcgcgtgagggcaagttaaaaagcagagccttgccccaggccgatgcgctgaaggcgcgctttaaggcaggtagtattccgttgcagacggattttgcggacctgattgatctggccaatatgggccgtcaggcggtggggtgcgcacaaggccaaaccgggccggctaatggttttaccctctcatcggaggggcgtctggaattaaaacccaacgcagctaaagggattagcgttgatcaggatggggtggccattaaggtagggagcggacttcagattgatagcgaaaagggagtttgtcttattccagagcaaacattccagaaagggatggtaatgatgtttgccggtacagaggctgaaatgccgaagggatgggcattatgcgacggtaaagaaggaaggccagatttacaggatagatttgtccttggctctaccagatttaccaatgtaaatagaaccaacaaccaaaaaacacaaggggatgataatcataaatattttaatgtggcttcagattcgaaggcgcctgatattaacatcacggttgatgggcatgctttgacaatagaagagatgccgagtcatgatcacgaaatattttcggcgggcaaggaggggcatgacggccaagctatatttgagagaaatgggattgctccaagctataaaaatgaattttgtaaaactagtggagatagtcgtccgcacaaacatgatgctgttgcaaaacaagattgccatagccacactgttaatgtagtacctccatattatattttggcctttattattaaaacctaa

SEQ ID NO: 451380 - DNA, 2898 bp, Serratia marcescens
atgtctaaagaaaatgccctgttcccggcggtgaaggacgcgattgcgtttgaggcactgtggcaacaggctcacgaaaaagtcactgcattcagtggcgatatctggacggataccggcgaccacgatccgggcgtcagcctgctgcagtccgcaacctggaactgttccgacctcagctaccgtgcgtcgctgccgctgaatgacctgctgactcatccagaccggaacaccttgttcccggaagagttcggtcctgaacaggtgctcacctgcaacacggtgacggcagaggattaccgccgcgccttactggacctgcacagtagcgatattgacgcgctggacaccccggagcaggattttttattcagcgatgtcagcctgacgcaagaacctgaagcgtaccgttttcactggtggtataacgcggaaaaacgcgaatacagcttcacggagccgacggtcacccagcctgaagacaagaagacgctgtctttgcgggggaatctgtggctgacgctggtcccgacccgctatacccagtccctgtcatccgagaaccgggcgacagtagatcaatacctggctgagtttcttgcagcgcaccgtaatctcggcgaagcggtatcgcgcattatctgtttgcaaccggcgacctttgtcccaaggatgacgattgagctggccgataacatcggcaacatcaatcaggtggcggcgcagatttatcaggttaccgacgcgttcttgcgcctggcggtcgcccgttataccaccgaacaacggcgggcgctcggtgatgcctatgacgccattttcgaggggccgaagctgaaacatggctggcagcaaacggcaccctcgcagatcacctccggggaggacgtcctcaacctcggcccgctggtgaacctgctgctggctatccccggcgtggccagcctgagcaccttgtcggttgataaaggcgatggccacattacggccgttaccggggacagctggcgctggcaggtggctgacggttattaccccctgctgtggggggagacgccgttggaactactggccacaaacggcggcccattagccctggtgtcgaaaggcggtattcgcaacacgctggacagtaaggcaatggcgcgctacctggcgcagccagacctgattgaaacgacgcccacggtgttacccgccggccgctttcgcgatcagacgagctatattcccgtcgggcagcgccagcccgaatgctatgcgctgcagcagcccgatgccgtgattgatgaccagacgcgcgcggtgcatcagtttttgctacctgtagaccaactgctggccgacggtacggcagagctggcgcagctgccgaccttactggcctttaaagaccggggcgacgccattcggggaacccgctggccctacaccaacgcgatggtgcaacaggctattcatcagccctacgcgaaagcgctgcaagcgattgcgcagcaggatgcggctatcttcacgcagggtaagcagtctgtggaggccaattttgcccgcgaactggattttattcagtatctgctggggtattttggcgcccagcgtgccgccctgccgctgacgctggatatggctgattttctggcgacgcagcgggcgtatctggcgcagcaacccgccttaggttacgaccgcatcaatatccgtattgaccaggtctccgccctacaaaagcgcattgcggcgcgcatcggccttgacagcatctgctttgcggataatccggacctgagtcaactgccgttttacctgattgagcatcgtcagctgctgccccaaatcccggacagcacctttgacagtgagcagaccccgaccggttttgcggtggccgagcctaaaattaccctgacgcaggcgggcagtgccggcaagatggttcaggggcaacttatcgacctgattgcgactgaaggagggagtcgactgcatgtcagccggctgctggttatcgagatcgatggggacagttttaccgtcagcacggaaaacagtcagcaactgcacaacaccctgtcacgccttcaggctgcctgggcgagtcacaacctgcgctggcaaaacagcaatatctggctgcaggatatggattaccgactgaattatgccgaggcaaaacggcaaccggctaatccacagcagcgcttactggcgagtaacgcgcaaagcccgtatcccgccatggtcagcgtcggggatggcattgtcattcgtcctgccggcctgcagtttgcccagtctggcccgaaggcttatcgcacttcaactgcggaagctgactggcagcttgcggcaaccgtgatcgcggtcgattcgatagcgggcacgttacttatcgaaaaagcggccggcagcacagaggcatttccctcagcggaggccagctatcgttatcagtggtcgtttagtgactcacactatgcgacgacagaccggttctcctttgtggtcagcgcggtactcaaccgccgtctggtagaaaaccagaatattgtgcctgagcagctggttgcctgggtacaggaaaccatcatggcggagttcccggcccatatgtctctgattaatcactggcttgatgacgccaccttcagaagttttggggcgacctattcgcgctggcaaaacagcggcatgccgctgggtgatgatgcttttgcactgatgcagatgctgaccctggggcatatccctgtgacccaactgaacatcggcctgatgcgcgtcgccaccgaggcgcagcgcaccgaggttgtcggtgacggcagccagtggcacgaagacgttatcctgcgagaagagctgttctacgtgacgaaagacgtgccaactaccctttaa

SEQ ID NO: 451381 - DNA, 1821 bp, Serratia marcescens
atgtctgacctggagcaactgaaacagagagtgggcagcggattaaccgaccagaccttcctgctggagccacggacagggaaggatctgctcaatctggtcgaaaaatataccgaagcggtgccctttgccggccatgcggacgctgactggaaaaacttctggctggccggccgcacaccgcaagcgctgagtgacatctatcagcaccccgaacgggcagagaaaacgctgccggtgcagcaggcgttcctgctggcgctgatgcacctgctcgagacgcccaaagctctgctgaacacagtgccggcgcggcaccgctcactttactaccgggacttattagggtttaccccccgagccccgcagccagacagcgtaacagtgagctttacactgcaaaaaaatgcgtctccgactgcgttacccgccggcagcctgctggatggcggccaggacagcgccgggaacagcatcacctatcagactgaccacagtctgctgatcaccggccagcaactggaacagctgtgctggacggcccaggttggggatacgtggaaacggtataccgccatcgacagcgcgaagagcattgcactaccggcagaggggctgcgtctttttagcgaaattggggacggcgcggacacccaagagaaaacctctgtgctttatctggggttcagtgggactgctgcacaggacaccctgtcggtttactggtctgtgcgcgcctcatcggcgctcgatgtcacctggtggtattacaacgataaaaaacagtgggcttcgctggatgccgagttgcgggacgagacggcgggcttgtccgtcagcaacctgtggcgggcccggctgccgacggacagtcagccgggctcgccaaagaatgatgggctgcaggagaccgggtattactggatcaaaggcacgctgaaagaaaagaaagcggcaaaggacgagagcgtacccgacgagccgatgccgaaactgcaggccgtgctggccaatgcgatgaccgcaaccctgaatatgacgcaggcgatagatgacagccattttgcccagcccttgccggccaataccatcagccagctggtaacgccggttgccgccatcagcgacgttcgccagcccctgccgtctgtcggcgggcagccacgggaaacagaggcggcgatgttgcagcgcgccgcgacccggatagcccaccggcagcgggcgatcacctggaacaatatgcgcagcctgctgatggagcactacccggagatttttgatgttcgttttcccgatgtggacaaactgagtcgtttgccggcgcttgaggtgcaatcgctgatggttattcctgacggccgttatggtgacaacgatgacgcgctgcgcccggcgctcagcgaaggcaggctgacccggatggcgcagtggctggcgcagtacacttcgctgtgggcggcgccgacgctcaagaacccgaaatatatcaatgtgacggcccgctatcgggtgacgttcgtagcgggtattaacccaaattatggctatcaacagctcgcggcgcagttacaacacgactatatgccctgggcaaccgatcggcgccaggcggtcacgccgggcaatcaggtggactactaccggctgttggccacgctgcaacagtcacccctggtgcagttcgtgaactcgctggatcttattcacgacgttattgatgaagagggaaaatgcacgcgtgtggaaacacaaagcaccgtcaccgccagggatgacgaagtcctgattttatgtccgcaaggagagactgatgtctaa

SEQ ID NO: 451382 - DNA, 420 bp, Serratia marcescens
atgaacaacctggtgattatcgacggtgacgcgctgaaatttgaaaccaattttggtgccaatatcgttatgccaaccgcaccttgcctgattcatggcagtggggaggctgatattacgaataaaaaaatttgtgtgctcggcgacgagagcaaggtgtctattacggccacgtataccaagtccacacaccccactccgggaacgggaatcatcaccattgctgcgttgaccgccgatcaacaggctgtgttcgtcacggcaggaacgcccgtcattgtggtcggcagccaattcaccgcgcgttttacccccagttccccggcgatggatccgcaaggaatgccggacccgaatatggggcctacgcaaggaaccggcacatttaccaacagccagtcgtttgtcaccgccgggtaa

SEQ ID NO: 451383 - DNA, 420 bp, Serratia marcescens
atgagtaacgacattttgacagcgaccctggggcaatgctgggcatttccaccgcggtttgagcccgacggcgtgtccctgacggcgggcgttgaggcggtgatgcagagtctgcgcgtgctgtttatgacggagccgggcgaacgcattatgcgtgagagctatggcgcgggcatgcatgatttcatctttgagaatatcaccgatgaactgctggccaacatccacaaccgcatcgaagagagcattctgctccatgaaccccgggcgctgctcaaggacgtcattattcagccgggggcacaggacgcgagccgtctgcgggtgcagatcactgtgtttctgtcgggcacggatctggtcgagacggtggacgggacgctgaacatccatgacggccagacgctgaggttactatga

SEQ ID NO: 451384 - DNA, 1665 bp, Serratia marcescens
atgagccacatcaccctggacattgcgggcaagccgagcacattggggatccgtcgtttgcgggtacagcaactgatcaatgagatcccgctggcacagctggagctgcgtattcccacggataaccatggcgcagcggataacgcggtacaacgcgaaatcaaccgttttagcctgggcgtccgggtggtgattgccctggataagaagccgctattcgacggttatctcgtgcaaaagaagatgcagctgaagggcaaaaactggtccgttcggctggaagcccgccatgcattgcagaaactgacgtttttaccccatagccggatattccgtcagcaggatgacagctctgtactgaaggggctactgcagtctgcgggggtgaaactgacacagaaagcggcggtgcaactgagcagcaaacacgatcagctgatccagtttcgtctcagtgactggcagtttattcgcagccggctgctgtccaccaattgctggctgctgcccgatgctaccagcgacactgtgataatctgcccgctgtccgacgcgacaacggcctcacggcggctgactcgcgacagtcgcgactatacgctgtatgaaatcaatttgagttttgataaccgctttacgccggacagcctgtcactgcagggatgggatattaccgcacaaaagctcgtgccggcgcaaaaaagtgcggccggcgcgtttcgtccctggaagcctgagggtcaggttggtcaggattccgccgggcggcaagattacgccctggcgttcagcatgctgcctgaaaccaccctgaaaactctgtcgagctcctggctgaactaccaacagatgaccggcgtacagggccacattgtgctggcagggacacgggacttcgcaccaggcgaaagcatcaccctgagcggctttggggcggggctggacggcacggcaattctgagcgggatcaatcagctgtttgatgtgcagcacggctggcgcaccgagctgttgatggggctgccatcgatcatgctcgagccagcaccaccggtgcggtcgctgcatattggcacggtagcgggttttaccgccgatcctcagcatctggatcggatcgccctgcatttgccggcgctgaatctgcccgactcgctgatttttgcccgcttgagtaagccctgggcgagtaaagcgagtggtttttgtttttacccggagcccggtgatgaagtggtggtggggtttatcgacagcgatccgcgttacccgatcatcctgggttcaatgcacaatccgaaaaatacggtgccgttctcaccggatgaaaagaacaaccgtaaggggctgatcgtgagtcaagctgaccagacacacgccttgatgattgacaccgaggagaaaactctgaggctgattgcgggggacaataccctcaccttaaccggcgagggcgacattgccctgcatacgccaaacgccctgcagttgcaggcagacggtaacctgtcaatcaacggtaaacagcaggttgacatcaccagcgagggagaggtagcgatgcgtacacagaaagctctgcaactgcaggctgacggtaacctgtctatcaacggtaaacagcaggtggagatcaccagcgcaaaaattaacctgaaaaaataa

SEQ ID NO: 451385 - DNA, 174 bp, Serratia marcescens
atgaccgtcgaaattcgtgagttgatcgtacaagttgagatcacagagtccgcaccagcactttctgctccgtctttgtcgtttgcgcagtaccgtgagtgggacgacgagcggtgggtggagaggattaaacaagaggtgctggaacagctgcttgaaagggggcgtcagtga

SEQ ID NO: 451386 - DNA, 1218 bp, Serratia marcescens
atggcaatggttcttcctggggtttcgtacgaagaaacgctgttaacgcaggcatcaagcggtgatccggtgacgatgcctctgtttattggttataccctggctgatgtggcgataccggtcacaacgatgcagcccgtcagcgtgggatcactgacgcaggtgatcgtccactttggccaacgtgggacgctggcgtactccctgcgccacttctttgaaaacggcgggcggcagtgttatgtgctgcccctcgggccagggcagggagaaccggccaagcgtctgcaagcactaattaccgcattacagtcgccacagatgctggaaacactgttagcagatgacaaaactggcctgcttctggtaccggagctgagtgaattaaatgatgtgcgcgtttcctctcttgacaccgacgcgctttggtatcagggctggcaagcgttactcacgctttgttatcaggccccgcaacgttttgcactgttggagttaccagaagagccgacgcacgctgcaatactgaccgaaagatatttttccgcagatctgtgccaacgcggagcggcctggtggccacgactggaaagcagttaccaggatgaggcatcggcacccgtggtgttgtcccctctgccggccgtcgcggcggccattcagcgtagcgcccacgataacggggtctggaaggcgccggccaacctcccgttggccaaaatccgtcgccccacccaaagtatcctgacgtctcaggcattgctggataatcagggggtgtcctgcaacctgatccgcagttttgtcggcaaaggcgtgcgtctgtggggatgccggaccttgctcaacgaggaggattctccctggcgttatatccaaacccgtttgctggtcagcagcgtggagcactacctgtgcaaactggcgcgcgcttacctgtttgagccgaacacggccccgacctggatgaagttaaaaggtcaggtctggacatggctgcgtcagcaatggctggccggggcctttttcggcacggtggaggagaaggccttttcgctcagtatcggtctggatgaaaccatgacggaagatgatattcgccagggaaaaatgatcctgcaggtccgtttggcgttgctggctcccgcggaattcatcgacatcagcctgacgctggatctgcgcgacggcacggccagcgcgcaaatcggaggataa

SEQ ID NO: 451387 - DNA, 1311 bp, Serratia marcescens
atggctacagataccactgtaccgggtgtttatattgaagaagatgcctcgccggcgatgtcggtgagcgcgggagcgaccgccgtgccgttatttgtcgcgcgttttaccccgtccgataaaaaactggcgggcgccattacacgcatcggcagctggctggactataccaccctgtttgacagcaacgtgccttcttccgcacgggtcaccgtgacgtcaacgcctgatggcgaaaataaatatacctaccagattaaagacactgaggtcgtggaccagtcagcctccgttgccctgcgcctttatttccagaacggcggcggcccttgctacctctatccactgcaaaaagcagacgatcaagccaaattggccgcgttgccgggtctcatcgatgaggtgggggcgatcacgctgctggcctgtccggagcccgatgaggcgtaccgcactgcggtgtatgccgcactggcagcctccctaaaccagcataaaggatacttcctgctggccgacagcagcgatagcgtggttccaagcggggtaagtagttcttcccaggttgccgtgtattacccaaatttggtgatgccttacacccggacgctggatgacaaccaggtggctattaccggctataccgccgggagtgacacgacgattgccacgctggccgaccttcgtaaagcgaacgctgactttgccggtgagattgataaagccctcgccgaaaaacgagatgtcccgctgtcgcttccgccttccgctttgatggcgggagtgtacaacaagacagacggtgaacgcggggtgtggaaagcgccggcgaatgtggtgctcaatggcgtcagcgatgtcagcgtccgggtcaccaatgagcaacaggcggagctgaacccgagaggcatcaatgtcattcgtcatttcagcgatcgcgggctggtcgtgtggggtagtcgcacgcagaaagatgatgatgactggcgctatatcccggtacgccgcctgttcgatgcggcagagcgcgacattaaaaaggctctgcaaccaatggtgtttgagcctaacagccagccgacctggaaacgggtgcaggcggcgattgataactaccttcaccgtctgtggcaacagggcgctctggccggcaataaggcggaagaggcgtattttgtgcgcgtcggtaaggatatcaccatgacacaagacgagattaatcaggggaaaatgatcattcaggtggggatggccgccgtgcgcccggctgaattcatcatccttaagtttactcaggacatgtctcagtaa

SEQ ID NO: 451388 - DNA, 426 bp, Serratia marcescens
atgaaaaccggcattaatggtttcaatctcatcaaagagtttgaggggttaaggcttcacacctataaatgcccggcggatagatggaccattggctatggccataccgccaatgccagcgcgaatgatgttatcaccgaagcgcaggctatttccttattgtatcaggatgtggcggagagtgaacgggcggtcaatcaatatgtgcatgttccgcttacgcaaaatcagtttgatgccctggtgtcctttgttttcaacctgggcgtcgggaatttccggacttcaacgctgctgaaaaaactcaatgccggtgattatgatgacgcggcccaggaatttgggcgttggatccatgtcggcggcaaagcactgcccggcctggtacgcagaagagaggccgaacgcgcactctttctgaaataa

SEQ ID NO: 451389 - DNA, 420 bp, Serratia marcescens
gtggtgcgtttaaccccgctgcagcaggacgtactgaaattttttgcgctggtgctgatggtgttcgaccacgccaaccgggcgctggggctgcatgagctgctgtttgcgctgctgtgggggtacaacctggcgtcgcggcctgtccggcaggcgctggcgatgcgcaagggcgcccccaacccggtattggccggcggtgtattgctggcgctgtggtgggcatatggcgccacagacggcagttacggtactgccggcgttttggtgctgttggccagttatgggctgtgcgtttccctgccagggtacgtgacggccgtctggccgctactggtgctgatgctcaatgccaacctggggggcttgatgatgctgacagggttgctgctaccggcactactcatcctggggacgtag

SEQ ID NO: 451390 - DNA, 246 bp, Serratia marcescens
atgaataacaacgacaaacatactatccggcatttcgatgactttccctttactggcagcgatttcgctcgagtggggaacatcatcgtctgtggccaaagcggcgcggggaaaacgggaccgctgcagttcatcgtggatgaatacagtccagatgctgtacggcagggtatttgtatttcgccggaatacagtgcggatgccgtgcggcagggcatttctattgcaccgacaccgccttcttag

SEQ ID NO: 451391 - DNA, 138 bp, Serratia marcescens
atggggacggctcttatcagcgcgctaccactcaaaaacgtcgtggccggggagaatgagcgcatcacaatcaaaatggatgtaacctatgcggtgatatttaacctggtgaatttaaaagcgcctcagtgcctttga

SEQ ID NO: 451392 - DNA, 603 bp, Serratia marcescens
gtgatcccaaaccatcttgctctggtgccgtggcacccgtaccggcgggccgtctggcaagtcatcgcacaggtcgaagcccgcagtgaagctggcaggcggttgtccgcctccccgtatgccacggcgtttttccgccagttaaccgggctgcccactctttcagccaaggacatccgcatgatagacgtgacctaccggcccggcgattgtcgccgcgccacgcgcaaggaaaactatattgacgcactcgaaacgctgattgccagcggtggcgagcactgttattccccgttgccgggcgatacccgtgacacgctgttcccggaagtgaaccgctgccgcaatcagcgattcgaacaccggctgacgatgaaacacacccgtcaggcgtgcatcgatgccacactccggcggcacaagcggcgacgttaccaggtgccgctggcgcaggcgtggacggcgcggtttccctgtctagccgaactggatagttacctctggatggcgcgtcttcaggtcagtctgatcagtgctgagttatctgctgaagcgcatatcgataacgcggtgcggcggccgactcacctggtaggccgctaa

SEQ ID NO: 451393 - DNA, 234 bp, Serratia marcescens
atggtctttgcaagcgctctggatgtgccccgctatttgctggcgctggaaattgcggggctgctcgactatctgcccgagctgtgtctgcgtatattgatcaaaaccctgtggaacatcagtgccgacatcaatgaagctctgacgctaacgctgggagatctgttcttcaactgctcgctgccgtttgtccggcggcggaccctgaagcaacgtacgccacggcggcagtga

SEQ ID NO: 451394 - DNA, 243 bp, Serratia marcescens
atggcacgagtaaccagtgtaatactgggtgaacattttacgggttttgtgggtgaaatggcccaatccggccgctataccaatacctctgaagtgcttcgtgatgcgttaaggctgatggaaacgcgtgaacaacgtattcaaagcgtccgggagatggttctggctggcgtgaatgcccctgtgagtcatcgcaccatggaggagatttttgcagcagcaacgaaggatgccaatgtataa

SEQ ID NO: 451395 - DNA, 540 bp, Serratia marcescens
atgttggtgaccatgagccagaaagaactgaatcgtattcccgtactacagcaagtctgcgacaaacttctgacccaggctgctgcggccaaactgctgaagctcagcgtacggcaactgcagagaatccttgtcaggtatcttgctgacggcgccgccggcataacctcgcgtaaacgcggcaatcccgcaaacaaccgcgttccggatgatctcaagctgcgtgtgctgacgttgctacgcgaaaaatacggtgacttcggtcctacattagccacagaaaagcttagcgaacgccaccaaatatcgatctctgtagaaactgttcgtcattggatgattgctgacggcctctgggttcctcatgctcgacgcaagcctcgggtctatcaaccacgctatcgccgcgactgtcttggcgaacttattcaaattgacgactctcaccatgactggtttgagggccgcgcatcaaaatgctgcctgttgatttacattgacgacgctaaccggtcggctgatgcacctgcggttctgtga

SEQ ID NO: 451396 - DNA, 231 bp, Serratia marcescens
atggtttatgactatcctgacggcacattggcctttaagtacggctacaggacgttgacctatcaggtcttcgacaagctggccatcgttgaccagggtgccatcgtggacaacaaacgcctcggcgcggtgctgaagctggcgcaagtccagcaggacgagtgtgaccgggatggtcaaagagagcgcagcaagaggatgcccaaacgacgagcgcaggccagaatctag

SEQ ID NO: 451397 - DNA, 252 bp, Serratia marcescens
atgataaaaacattatctccgggcaagcttcagaacacagagccgttcagcgatggaatatatttccttaaggtcatcaacgacctggtttttctccctgttcttcaagatcaggcccctgatgcccatgtctttttttatcagttcattcgtttttgtcaggatatcgcgcttaagctgcaactgattaatctgctttttaagccgcgtgatttcgtcaagcaaagcatcctgatttttattccgaggtga

SEQ ID NO: 451398 - DNA, 1212 bp, Serratia marcescens
atgccaacctactcggtttataccagaatcgcctcaaatgtacctattaaaaatttgcagtatgacttggcgatctaccgaatggattcagtgaagaaaaaacactttttacttcctccggtttttaaacaggtctttcaatctaattatgaaacacaatatcatcaaacttctgaaacgaatgatccgttaacgactatttacatggttgagattatgctttatcgaaagcatttcaataatatatatgcagcactagccaagccgttttttcgaatgtatactctgggcgatttaatttctgggaaagcatgttcagagcacaagcgagaaaatgcttgttatttcgaaactgctggggaaaccaagctcgctaatgagggcgaaaacactattcttctcactatcacagtacctccacgccctttttttgcgaaagaataccctataggcaatcctaatgatccgtttgtaaaaagtaagtttgattttgaaatgatgacgcgattaaaccaatttgattatcccgatcaagggggaacaagtttatgtgggcctgctgcgttattttactgtttgcttagagataggcctgatgtctatgaacaatctgccagagagctatggctgtatgggcgaacgaaaatcggacaacttgcgatatccccaagtgaaggttgtaagcatccatctggatttttctatgagaaaggtcggcaattagtttcagggttggattggattacgttagccagtttgagagactctgaaaacaccattatgagttacagtgatatcagtgaccaggttgcaggtattaccgattggtggagtttatctgcttggtttgagaaagtcggatataaaaatattttcagtaatgtaggattatcccattcaagttttcaagatatattaatgttaaataaatatataactcaaggttgtacagttgtttcattgatttccgcaggaatgtttgctgactatggtattcaggattcgtctgctaaaaaccactgggtagtttgggaaggaccaattcatgatgacaatgataaaagcataacacaaaacactagtcttgacgaaatagtaaatttcaaagccttctcgtggggtaatgttaaggatcaggtgaaagaaaagaaaacattagagtatgttctaaagcatacatttggagcacttgtatttgaaaaggtaatttaa

SEQ ID NO: 451399 - DNA, 759 bp, Serratia marcescens
atgtccactttaagagacaaagtacgtaatcttataaagattaagaatggtggacctttaactgaaaacaccatgaaattatttccaacatgggttaccaatattccagatacatttaaatattcacttattgatagagaaacagcgtatcaattaaacagttttttagacattagcatatgcccatattgcaacagtgaagaaattgaacaagtagaagatgacacaggcactggctacagaccagcatttgatcatttcataccaaagtacaaatatccattaatctcttttagtttattcaacttgatccctagctgcactaaatgcaatagcacgtataaaaaatcactcgacccgctcatgactccattttctaatccttttcttgatggtgtaaatgagatccaactttttaattttaattatgacattgattatatatatagagatggccgaattgataatgatcatattcaaatcatactaaaaaaacaaaaaaacaacatcgatgaaaatatgagcaagcttaacataaagaacagatataacttacttaacagaaagcaagtagcacggttaattgcaaagagagcatttgatctaaaagcttatgaggagaatttcgatatagaaccaactcttttcgctactttcggttacgagactgatgtcgagccactaaagcacatgcataaaaaactcattcaagacgcaatattagtattttgtaataaacaagtaccgttaattgaataa

SEQ ID NO: 451400 - DNA, 186 bp, Serratia marcescens
atgatgtcgttcaacgacttcatggtctgctgcgtcgacttcatggttttctggctttccgccagcgtcttggtcgcttcgctgatcatcggattgatcggcatcgaattaatcttatccaacgtctgcatcagcttctgctggatctgcgccagaccgccgctggtggtcggcatcagcggataa

SEQ ID NO: 451401 - DNA, 177 bp, Serratia marcescens
atgcagactgaacctgaagtattaactgactacaccgcggtgatttgctcgaccagcattgaacgtatcgtcaccgggcgcaacgccgcgctggcgcaaattgaagcgctgatccaccagcttgacgacatttcgacactgacccgtgatatcagcggaaaaaccgcccttgactag

SEQ ID NO: 451402 - DNA, 369 bp, Serratia marcescens
atgcgaacagtacccgcaccaccctcacgggcggcccaaacatgcccgtcccccatcactgtctggcaatccttgctcacctacctgctggcgcagcactacggcctgacgctcaacgataccgagttcagcgacgatgccgtgatacaggtacatatcgataacgggatgtccctcgcggatgcgctgaatgccatggtggaaaagtttgatctggtgcgcattgaccgcaggggcttcaccggtcaggcgcaatcgcccctcgtgaacgccatagatattctacgtgcccgccgggcctgcggcctgatgacgcgagccggttaccgggaggtcacacgtgccatccagggaggcaagcgctcatga

SEQ ID NO: 451403 - DNA, 1434 bp, Serratia marcescens
atgaatcactttccattagattcgtttccgccgcttttgcgtgaaactattgtagatgtgcatgagtgcactcaggcacccgttccattaattgcatcatcggtgatgagtgctttgtcattatcttgccagggcctaattgatatcaaagtgaatgacactgtggtatctccgacatcactttttttattggtgatagcgaactcgggggagagaaaaacaacggtggaccgaatggtgctcaaacctttataccaacatgatgcacgttcaatcagtcaatctgaagataagggaaaagactatgaaattgagcagcaagtctggaatgaaaaacaaaaggcgatttcaagtcttttcaggaagaaaaccattaaagggcaatgtactgacgagttgtcacagtgtttacggaagttactggccgagaaacccgtgccaccgaaaacccgtaaacgtatttataataatgttacgcctgaagcattacagactgcgatgcatagccattcagcacatatagggctgattgctgatgaaggttctaatgttctggacaggaaggtaatgaatgatttgagttttattaactcaatgtgggatggtgtcagctttcatgttgaccgtaaaacgacacaaagctttacgatagaaaatgggcgtatcacgctgtcagttatggtgcagaaaaaaccgtttgatctgtatttaaaacgacagggggaacgagcgcgtggaagtggtttttttgcgcgttgcttaccggtattgattgatgagcacctaaccacacagggcgagcgttttattaaagagtactccagcgaaagaaggtttttagagggtttttatcagcgtataaatgaaatattagcagaggatgtggaacatgatgcgttaactcagcggatgtgtctatcattcgaaccttcagctcagtatgcatgggaagacgtttacaatcaaatagagagtcgtatcggtcccgatgaagagtatgccaatatgaatgattttgcgtctaagttggcgaataacgttgcccgactggctgcactactaagttacttttcggagggagagggggaaataaaaaggcattatgtggatagtgcatggttgctgtgtgaatggtacatgcaacaggctgtaaatattttcggtaatgaagatggctattatgaaacgttgttattgtcgtggttggatcgtgagtattcacgaacaggacgaaattatgtcaggtataatgatatacgacgccttgggcctaacgttttacgaaaaggaaagttgttggacagagtgattgatagtcttgaaagggaagaggcaatagaaattgattattcacgtaatggtgcaagaatggtgtgtgcataccgccgtttcgataacaatccgtttacaaaaaagctggctttcgtgtactaa

SEQ ID NO: 451404 - DNA, 753 bp, Serratia marcescens
atggatgattttaatctcgatttttttgttgatgagctaaaagagtcattcaacatcaagaaagctcgtctggcgctcgctctacatgcggttggctgggaaaccgatattgcctggttgaatggggacgatcctgatattgatgaaatagtggaaggtgttgtgcaaagcgccgcgaagcgtcgggacttcgagcagaagcaggatctgatgctgtttgaagaggccgatactatacaaacgttagtaaatgatcggatctttctggcggcaataaactggtatgcagggctgcgtttattggcgtcggattggcgcgatgggttcaggttgttacttaaatcgactgagcttatcgatatgtgccgaggtatccttgaacacgttatcttgcaacagaatgaagcagagaaaaaagaacgggcgattcatggaggtaaagcaaaagctgccctgttttccccgctaaaggccgaagttattcgcttgttacaggacaaacagccggagggtggctggaaaagcaaaaatgcggctatagatgcaattgatgtcgatatacgtgtgtttatcgaacagcatggtttccctgcttcctcaggagagcagaatacgggaaataatcagtccgaactgtgttcccgaatccctcgtctggtcagtgattggtccagaaatgatgtggatgtaaaagccgcttttgcggcagtggtgaagcaaaaaaagaaaagcgccccgaaaggcgcagagtag

SEQ ID NO: 451405 - DNA, 444 bp, Serratia marcescens
ttgctcggcgacctgggtatcaatcagccgttctcctggggcgatcagccctggcgggtgtataccagcgtaagggggcagtggagcccgaacgcgctgacgccgcaggagcggatggccattgccgggcgttacacggtgcgtggctttgatggcgaacagatgctgtccggcgaaaagggcctgctatggcgcaatgaaatcgcctggaacgtgttttctcgcgggcatgaattgtatctggccgccgactacggccgggtggacggcccaaacactcgccacttggttggccatcaattggcgggcagcgcgctcggcgtgcgcggcgcgctgtgggggcgattcagctatgacctgtttgccggcgttccgctctacaagcctgcggggttccatacctccggcgcgaccgcgggttttagcgtaaatctggaaatctga

SEQ ID NO: 451406 - DNA, 564 bp, Serratia marcescens; identical to SEQ ID NO: 436692

SEQ ID NO: 451407 - DNA, 138 bp, Serratia marcescens
atgaaaatgtacccctacaccttgacgcccccgaaccagttggggaagcgcggggcacatttcaatgaattcaaaaagccccgccagcgacggcggggaaactacacacggcaattagtgagtattttgagcttttga

SEQ ID NO: 451408 - DNA, 159 bp, Serratia marcescens
atgaaatcggtattactcggcattacgctgctggcaaccgcgaccggcgcgctggcggcagataaactggtgaacatcaccaaactggaatacggcaaacagtgggcgttcaccaaggaagaagtgccgcagcggcggcgcgctgttcgtgctgaataa

SEQ ID NO: 451409 - DNA, 762 bp, Serratia marcescens; identical to SEQ ID NO: 437325

SEQ ID NO: 451410 - DNA, 3177 bp, Serratia marcescens
atggcaatctaccattgcagcgttaaagcggtatcccgcagcaccgggcgcagcgcgccgggtgcggccgcttatcgcgccggtgaattgctgacctacaatcgcaccggcgaggtgttcgactacaccaaaaagggcggcgtcctgtccgccgatatcgtgctgccggaaagtgcgccggagtgggccaaagaccgcaaccagctatggaacgccgccgaggctgccgagcgccgaaaggatgcttgcgtggcgcgtgaatatgaggtggccttgccgcatgagttgacgcacgaacaacggcgcgagcttgcgctgacgttcgccaaagagctgtcagatcgccacggcgtggcggttgatgtttgtctgcatgagccgagccgcgacggcaacgacaagaactatcacgcacacattctgacaacgacgcgcgtgatgggaaaagatgggttagagggcaaggcagaaattgaaaaagccgggcgcaagcggaccgacgatctcaaggaaacccgcgccttatggggcgcactttgcaatgatgcgctggagcgtgccgggcacgtcgagcgcgtggaccatcgcagttataaagagcaaggcgttgacctgacgccgaccaagcatatcggcgtttctgccgtggcgatggaccgcaagggcatggatgccgagcggctggaaattcacgccgagacacgcgccgagaacgccgagaagatcgaggctaatccgtcgctcatcctcgataaaatcaccaccacgcaggccgtttttgaccgcagggacatggcgcgcgagcttaaccggtacatagacgatccccagcagttccagaacatcatggcccgtctggagagcgcgccggagctggtacagcttgcgccagaaatgacagacggccgccgtacggttccggccaagttcacgacccgcgaaatggtcatgacggaacgggcgatgattgacagcgccgagcgtctggccggggcggaatcgcacggtgttgcggcgggcacgatagcccgcaccgttggccgctacgataccctttcggacgagcaacgcgccgctgttgagcacgttaccggagagggccgcttgtccgtcattatcggggatgcaggcaccggaaaatccttcgcaatgcgcgtggcgaaagaggcatgggaggccgaaggcttccgcgtccgtgggtgcgcgctggccggtaaggcggccgatgaattgcaggccgggagtggcatcgacagccgcacgattcacagccttgaagcatcgtggaatcggggcgtggacatgctgaccgcgcgtgacgttctggtaatagacgaggcgggcatggttggcagtcggcagcttggtcgggtgctcgaagcggccgagaaggcaggcgcaaaagtcgtcatgctgggcgatgacaagcagcttgccgctatcgaggccggggccggtttccgggccattaccgaacgtgtcggcgctgccgaaatcacgcagattcgccgccagacggaaagctgggcgcgggaggccagcacagagctggcgcgcggtgacgtccgcaccggtctggacgcctatcatgagcgcggccatgtgcggatcgaggacacccgagaggaagcccgcacagcccttgcggccgactggctggccgaccgagagaaaggcgggaccagcatcattctggcccacacgaacaaggacgtggcgagccttaacaataccgtgcgaacggcgcttaaagcgtccggcgagctgggcgctgaaaccgagttcctgaccgaacgcggggcgcgcagctttgccgagggcgaccgccttgtgttcctcaagaacgacagcgcgctaggcgtgaaaaacggaacccttggcaccgtcgaaaaggccgaagaaggccgcttgtcggttcgtctggacagtggccgggaggtggactttgacgcgggcacctacggccacgttgaccacggttatgccgtcaccatccacaaatcacagggcgttaccgtagaccgtgcctatgtgctggcgacgggcggcatggaccgcaatctggcctatgtcggcatgacgcggcaccgcgacagcgcgacgctgtacgccggggccgaagacttcaccgatcgccgttccgggcgactggtggcccacggcgccgccccttatgagaacgacccggcgaacagccagagctatttcgtgacgctggaatcggacagcggcaagcagcgcaccgtctggggcgtggatctggcgcgggccgttgccgaatctggcgcacagttgggcgaccggattggccttgagcacaccggcagcgaaaccgtgcagctcccggacggagggattgccgagcgcaatcactggcaggttaacggcagcgccgagctggcctatacgaaactggccgaacggctgggccgtcagcagccgaaggcgagcacgctggactttgccgaaagcgcctatggctttgccgagcagcgcgatttcgacggtgcgggcgttgtgcgccagtgggtcgagcgcggccgcgagaagctggccgggcttgccgaccgggccgaaaaagccctttcccgcgtactggaacgcgccggaatccgccgcgacgtgcccggcatggaacaggccaccccggaagacattgcggccctgcgcgagccgcaggcgcggccagagctgacgccagaggacgccgcgcgcgcagcggccatagccgaggtcgagcgggctttcggtggcggccagcccgtgcgccaggtcgatccgctggacgtgtaccgcaagggcgtggagcaggcgcggcaggcaggtgacgggctggacattcagattgcagaacgccgcttgcagcttgccgaagacgcacaggcggccggacataacccggcccacatggccgcgaaaatcaacgcgcaggcgcaggccgacgtgattgccggattgcagggccagcagccgcaggcgcggccagaaccaacgccggaggacgccgcccgtgcggcggcccgtgccgaggtcgaacgggctttgggcggcggcaaggtcgaacggccagcgccgcagcagcaggaatcgggcatgtcggagcgggataaagcccgcgccgaggttgagaaagcaatgggccacggacgcaaacgtgatcgtggaattgagctgtaa

SEQ ID NO: 451411 - DNA, 297 bp, Serratia marcescens; identical to SEQ ID NO: 343811

SEQ ID NO: 451412 - DNA, 294 bp, Serratia marcescens; identical to SEQ ID NO: 343810

SEQ ID NO: 451413 - DNA, 201 bp, Serratia marcescens
atgaaagaccgatcccgcgatcaggcaatggccgagcagttccgcgcggacccgacctatgccgccgagctgctggccgaggtacgccgcgacggcgacccggccgaactgcgcgtgctgctgcggcagcttgccgccgcattcgggccggagtggccgggattcagcgagggtgaacgcaacacgctttctagcgtttga

SEQ ID NO: 451414 - DNA, 651 bp, Serratia marcescens
gtgaaaaccttagtgttggcaagccagaagggcggcgcaggcaaaacgacgctggccgcgcatctggcaatcgccgccgaactggccggagttggcccggctgtactgattgacaccgacccccaaggcagcctgtcggcgtggtggaactcgcgcgatgcgaacaccccagcactggcggccgcgaagctggttgagctaccggcgaagctggaagcgttggccagcgccgggttcaagctggccgtcatcgacacccccccggcgattaccgatgcgatccgggatgtggtgaagctggccgacctcgtattgatcccgacccggcccagcccacacgacctgcgagctgtcggcagtacggtggacattgcacaggaggcaggaaagccattcgccttcacgctcactcaggcgaagcctaacgcgcgcctcacggtccaagccgtcgccgctttgtctgcacatggcccggtcgccccgtccatcgtgcatgaccgggtggattatgcgggcagcatggtggacggccgcacggtgcaggaaaccgacagcaagggccgcagcgccgaggaaatcacagcattgtttgctttcgtgcaagaacgcatgaacgaaaaaaagaaaacccgtaagaaggaaaccgtttaa

SEQ ID NO: 451415 - DNA, 255 bp, Serratia marcescens; identical to SEQ ID NO: 343806

SEQ ID NO: 451416 - DNA, 1095 bp, Serratia marcescens
atgaacgacagccgaaagaggggaccacagcgcataggcgatacaaccggcgacctgctttccacgattgaagcgatgcgggaaaaacatcgccagcgtgtcgaggcggccgctttgccgggagagactttcgagcaggccgaggcccgcgttctgcggcgcgatgaacgcaccaaagcgtcgaacgtttcaacggtcagcgaacagatggaacgcgccaaagagcgggaaaaagcgttgtcacttgtccgcaagccacccaagggcgacgaacaggccgactttctggtgcccaacctgtatgacgtagctggccgggacaatcgcggcgtcatggatgtggcggtatttcgtttgtcgaagaaagacaagcgagctggcgaaatgatgcgctacgagctgccagacggctatgttgaggtgtcagccggtgcacacggaatggcatctgtgtgggactacgacattgtgctgatgatggtttcacaccttaccgaagccatgaaccgctaccgcgatggtaaggacaccatgccggggcgtgtgttccgtcctcatgtttccgacattctcaaatttgctcgccgtggtgacggcagcaggcaggttgaagaaattgaggcggcgctagatcgtttgcggggaaccaccatcaagacagtgcgtgaaaacggcaaattccgcacgaccgaggcagaggggcttattgcgcgttatcgcgtgctttcacgcacggacacaaagaagatagcaagcgtcgagattgaggcaccggagtggatttaccgggaagtggtggagggcaaacggcccgacgtgctgaccgttcacccggactacttcctgattgagccgggaatcggtcgcttcctgtaccggcttgcgcgccgggcggccgggcaaacgcaagctaagtggtcattccagtccatctatgagcgcagcggctccactggcaccctcaagaagttcagcgagaaccttcgcaaggtcatcaccgccaatgatctgccggagtacgacctgcgagaggaggctgggcagagtgggccacagctcatcatgtcccaccgtaatgctctacccagcccctga

SEQ ID NO: 451417 - DNA, 2754 bp, Serratia marcescens
atgcagcagaaaggttcgaaatggtggaaatttgacttccatacgcatacacccgcgtcaatggactacggtaaagctgaccaccaaataaagcactctatgactcccagacagtggcttttagattatataggtcatggtattgagtgtattgctgtaacggatcacaatacaggatcatggatcgatattttaaaatctgaagctgaaatactaagaagcgaaggtcactccatttatatatttcctagtatagaaattacagctcatgggaatatacatatattaggaatattcgatccagacagaacatcaagttatatatcacaaataattggagctaccaattactcaggaacggaaggtgatagtgatgcagtaacccaaagcagcccacaggaagttattgacattattatcgagcgtggtggcgttgcaattcctgcacatatcgacaagcctagcggtctatgcaaagtgcattcatcaggtgcaaccttaaagcaaatattaacaaaagcatcagctgttgaagtaattaaaacgcatgctgaatatgaagcaacccgaccaaactcaagcccattgaatgggtatatctcccttaatacaggcctacctgaagtacttggttccgactctcatcacccaaacacagttgggagagcattcacgtggataaaaatgggaataccatctatagaaggtctaaaattagctttatttgatggtagcgactcattaaaaaggtctgatcaattcccagactcacctaatattttcgctgataatagaatcacatcaataaaagttaataaaaccaaatactgcggaagaaacaaagagtttaaaatagaatttcatccatggctaaactgtattattggtggtagaggaagtggcaaatcaaccatcttggagtttatcagaacagcattaggcagagaaaatgagcttgagcaactctcatctaatagagaaatgtataactcgtatgtcaatctcacaaaaaaggccaagaatagagaagatgatggagtttttctggatgatagcagcattcaaattgaatatctgaaaggagaaaataaatacttattagattggaactatcctatttcaaaagtactcataaatagaatagacggtaataacatcatctcagaagaaggggatgtgacatctagatttcctgttaagatatttagtcaaaagcaaatatacgaaatctcacgatctccaaattatcttttaaatcttattgatgaatctcacactgttaatataaatgattggaaatataattggagcattgaatgcaatacgctttcacaattaagaaaagatgttaaagatcttagagccaatatattaactaaaacaaacctaactggtcagttaaatgatgttaatcaaaaaatagcctccattgaaagatctagtcatgcttctgttttagcaacttatcaaagaacattaaaccaagtaaatgcgatcaaccatttcgcttcaaagaatatagaatctctcgaagatttattagaacacattcaattaacaaaacctgaatcgtttattgctgacgacgaactctttaacaccgaaaatgaaatagaagctaagaataaaatcaccactctccagcagaaaattgatagctctattacagagttcagcggaagtgtcgatgcaataattaaagaaatcagagaattaattcaatggtttggttcatcacctctgaaacaagacatatcaagtcaccaaactcaatatactaatttaatatctaccttacaagccaatggtgtaaataaccccaatgaatacgaagcgcttatcaacacaagaaagcaaatcaaggaaagattagataaaattgaagtcgatgaaaaaacaattgaaacaaaaaaatcctcaataactgaaagttacagaaaattagtagagctacgaaaagagctcacatctcgcaggagacaattcttagttgaaataaataacaacaatactaactttaaagtcagcgttgatttctgtggtgataaacaatttttagaaagtagtttcagaaacgccattgataaaaaagattccaccttcagcaacgaaatttataatgaagataacaatggattcttgaatatctttaacgcacagataaaagaaatctctgaggacatggatgcaataaaccaaaaaattcgaattctaaaaaatgaatttcttaacaaggattcaactacaatacttgatgttaaattgagtaagcggttttctgattttaaaaatgatctaactgacgaggtaataacctctcttatttgctggttcccaagtgatgctattactgtcaaatataatgatggtagaagattcaaagatttgtcacaaggttctgcaggacaaaaagcagctactgtcctagcatttttgctttcttatggcgatgatccaataatacttgatcaacctgaggatgacttagataatcaattagtctatgagctcatagttaagaaaatcaaggaaagtaaaaacaaaaggcaaataataatcatcactcacaatccaaatattgttgtaaatggtgactcggaattagttatttccctaagtcagcaatcaggaacaacagattttctatctttaggaggactccaggatcgtgaagtgagacaaaccatttgtgatattatggaaggaggcaaagacgcatttagtcagcgttacagaagaattgtcactgcctaa

SEQ ID NO: 451418 - DNA, 429 bp, Serratia marcescens
atgaatattgtttatgatttcattgaaaatgaatttggaaagttaatttttcccattgaaagacccaaacacacaagtaatttctcatctttttttatagattataatctttacggtgacgaatgccgtatcttttattttcatgcagttcaagataaacaattggaaatacactttctctatcagattgattatggtctatttgtcgtttcgcacgtaacatatggggatatatattttagagcgggttatataagcgacatctgcgaatatgtaggccactctcaaaaaatagccaaaaacaataagttcttgaggctattccctatagataatgatcagttaaactacctgtgtgaatataaaaaattctttttcgtcggattcgttgataggaacatcgaccgctacgatgaagagcaatactaa

SEQ ID NO: 451419 - DNA, 1188 bp, Serratia marcescens
atggaagacttttccttgcctcccgatttaaatttacaggtcgtatctggctttgtatccattggtgggaacatgctaaaaaatcaagtggattgtatgcttgttagcggagaagggagaagatacggaagaacagataattacatttatgatatagaccaagtcctatgcatatttgaagtcaagaaaactcttacgaaagcggcattatcagatgctgtagatcacctatctgtgattcgtaaagcttattccgaacactttgaagataaactagaaaatgataagtatgttcctgatattgagagtgcgagaactcatttcgctcagataactggaagggatggaccaaagcattattatgagataaatgatctcccagtcgaagatgcactcttattttatacccttgttcaagaatccttagctccaattagcattattcatggttataacggatataaaacagaagagggattgcgaactgcctttataaatattctcgaagataagttctcgaatggtgataaatcttatggtgtaccatcgatacccacactaatcacatccaatgagtattgtttagtcaaaacaagtgggtttccttttattgtttcgaatgatgattcagaatggattccattggtctcaaccagatttaattctgctgaaattattttagatacggtgtggtccaaaatatcacactattttcagcgtgcgatgccgtggaatgacggtgtttatataaataatattgcaccaatgttgatcgccaaggtggggaaaaattctgaagcggcaggttggatatacaaaaccattgagcctactgaaggggcgttattaagggaagataatatcacttggaaaccagaaaaaatttgtgcagttcacatttctattattaatttaatggctgcatatggaaaactttctctgtctgaggagaacatatcttactataaagataattattccgtagacttatatgaagaaatgttatatctatcaaaaacacgattattcatgatcagcggagacgctttaaaacctataaacaacatgacactagttctatctctcgaagatggttctggttatgtagcatcagaacgtgacagacttgacaaatggtgtgagatcaataacgtgtcgggaagcatcatgaacattattacgttttga

SEQ ID NO: 451420 - DNA, 957 bp, Serratia marcescens; identical to SEQ ID NO: 435464

SEQ ID NO: 451421 - DNA, 321 bp, Serratia marcescens
atggataacaatcaccaaaaattcgattcacagtcgattgccaatcgggtcagggagctgtttttacattacgggattggaaaacgtcagcatgcccgcgagctcagccgcatcttggatctgagtttttcacatgcgcaccgcaaactgaaagggcaaagcccctggacgctggaacagatcaacagcgtcgcggccgcgttgggagaaacgccggcggcgatcgccgatttgagcgccgaacacgagaccaccgagccaaacatggcgcgcgatgccggcgggggtggcgatgccttgcgtcgggcacattggcgatga

SEQ ID NO: 451422 - DNA, 225 bp, Serratia marcescens
atgagggcgctgaatgactattgggtcgacatccccttttctgacgtagagaaatacgatatcttattggcaaataaaatggacggaaatccactgagactgagaaactttggtccgtacttcgtcatttaccctttagatcaattttatgatcagctcaatagcccaacatatcaggcccgtcacatttggcaagtggccagcataacggtaatagataaatga

SEQ ID NO: 451423 - DNA, 2748 bp, Serratia marcescens
gtggcggccaaggatctggctcttaccggcgacagcgtgactatcaatcccggcgttgatgcgcgcacgcgtaaagagacctacgagcagaagcagagcggcctgagcgtggcattgtcgggcaccgtgggcggcgcgctcaacaccgccgtcagctcggcgcagcaggcgcgaaaagaaggcgatgggcgcctgaccgcgctgcaaaacaccaaggcggcgctgtccggcgtgcaggctgcacaggcctgggagcgggataatgcgctgaccgcctcggcggaggcgaaaaacgccgctgccggcttgcagccgggagacgaaggtgcaacgcagggcgccaccaatacggtgggtatcagcgcctcctacggcagccaatcgtcgaaaagcgaaacccgcaccgacagccgccagtcgcagggcagcacgctcaccgccgggcaaaacctgtcgataacggcgagcggcaagaaccacaacgcgcaaagtggcgatatcgtcgtcaccggcagccagctgaaagcgggcaaagatctgtcgctcgatgcggcgcgggacattaccctgcagtcggcgcagaaccgcgaaagcaccgtcggcaaaaacagcagcaaaggcggcaacgtcggtgtcggcatcggcgcaggttcgggcgggtacggcatcagcgtctcggcaggcgtcaatgccggcaaggggcatgagaacggcaacggcctgacgcatgccgaaaccaccctggatgccggcagtaatctcaaggtgaccagcggccgcgacacccggcttaccggcgcgcaggccagcggagaaaaagtcaccgtcgacgtgggccgtaacctggcgctggaaagccagcaggacagcgaccgctatgacgccaggcagacccagatgagcggcgggatcagcgtgccgatcggcgccggcagcggctcggcgaattttagcgccagtaaggacaaactgcacagcaacttcgactcggtaaaagagcagaccgggctgtttgccggccaaggcgggtatgacgtcaaggtcaaagaacatacccagctcgacggcgctgtgattgcaagccaagctgacaaggagaaaaaccgtctcgataccggcacgctgggctggacggacatccacaaccaggcggactacagcgcaacgcacagcggcggcagcttcagcactggcggcccggtgggcaaggatctgctgaccaacatggccggcggcatgctgtcgggcgccaaccacagcgggcacgccgagggcacgacaaaggccggggttagcgaaggtacgctgatagttcgcgacaccggcaaacagcagcaggatgtggcgcagctgaaccgggataccgagcatgccaacgccggcagcatcagcccgatattcaacaaggagaaggagcaaaaccggctcaaacaggcgcagcttatcggcgagattggcggccaggcgatggacgtcatccgcacgcagggcgatatcgccgggctgaaggcgcagaaagacccggcggcgctgtcacaggccagggagcagcttgagaagagcggcaaaccaacgaacgatgcggcggtgatgcagcgggcgtacgacaacgcgatgcggcaatacggcaccggcagcgacctgcagaaggcggcgcaggcggtgacgggggcgctgacggcactggcgggcaataacctggcgggcgcgctggcgagcggtgcctcgccgtatctggcgacggaaatcaagaaacgggtcggtgaagacaacatcgccgccaacgcgatggcacacgctgtgctgggcgcggtgacggcgcagctgaacaaccagtcagccgccgcagggggactgggcgcgggcggcggggaactggcggcgcgctacattgccggccagctgtacccgggtaaaacggcgcagcagctgagcgaaagcgagaaacagcaggtcagcgcgctgagtcagttggctgcagggcttgcaggcggtctggcgacgggggatactgcgggagccgtgaccggcgggcaggcgggtaagaatgcggtggagaataacgcgctgagtgatcttgttgacgctgtatctcagggtaagacacctcagcaggtagccgaagaacgtgtcgacgcagagaacgaacgttataagcagcaaaactgtgccggaatgagcgcggaagcgtgctcggtgaagatgtatactgagcgccgggaagaactgaaagatatcctgtcgacaggtgcagattttgtgccggtggttggggatatcaagagctttgcggaagcgcagagtgcgctggattacttggtagcggcgatagggattataccgggtgcgggtgatgccgcgggcaaagcgatcaaggcggcagagacagcgctgaagaaaggggatgttgctgaagcgtccaggctgattaacaaggccagtgatgaagtatctgccactctcccaatgggaagtaagcgcaatccgatgaatcagccaagtaacccatcttatcaacctgtaaggaatcagccgggtacgatcagaaatcgagaatattcagggcacgccttagacagaatgcaggatcgaggaataacgccttctgttgttgagaataccattaaaaatggaaaatcgactcctagccgaggcggaacaacagtacactttgatcctgagagtaaagtatccgtagttacgaacgaatctggtagagtggtcacggttaaatatggcgataaatga

SEQ ID NO: 451424 - DNA, 444 bp, Serratia marcescens; identical to SEQ ID NO: 451405

SEQ ID NO: 451425 - DNA, 333 bp, Serratia marcescens
atggctaaagagttccaagaagccatggcgcgcgacgatgctctaggtctcaatccggatgagatcgcgttctacgatgcattagcagaaaacgaaagtgctgtgcgtgaactaggtgacgaaacgctcaaaaaactggcaattgaagttaccttgaaactgcggcagtccactacagtagactggcaagtacgagaaagtgtgcgtgccagactgcgtattttagtaagacagacactgcgtaaatataaatatcctccggataaaaccgcaggtaccgttgagcttattttgaaacaagccgaggttgtttcgaatagttggacgatttaa

SEQ ID NO: 451426 - DNA, 1107 bp, Serratia marcescens
atgcctttatttacttgtgggttccctcccaaaaaatcagctgctgcaaacggcactgttgcattagcaattgccgttgaagccaagaatgccaaactggcagaaatgaaagcaacaatgttgctggaagaagcttttccaaactcaaccagcaactttttcaaacctaaaatctgtgctgaccgcgaggggttaccacgtccaccgattgatcaattcgacgctgaatggatgacaaaaaatcagtggaacgatgacaccaaagaatacgagccaatccccctgccagcacaagcagaggaggaagaagaggaagaagacgaatcagcctttacgtcatccaaaacgatctttgagctgcctattgatgtccgtgtcgcatacatcctgatgtacggcacagagcctgatacggtcgatttagagcatctctctaacgcatatgacctgatcaacgatgatgaagctgaaccgcgcctgcgcgcgatcgttgatgcgctgccccgcgtcccacaggtcaagtcgatgctgattacatccgtggaaaaactgatcgaggcgattcaggctaagtcgccggctatgaaatcatggccagaggtcaagaaatttgcggactcctgggttcacacagccaatgatgaacgtgcaccagcacccgagaaaaatactgctattactcgttcatatgatgcactcgacaacgaaattgcgttggccatcatgggcgttaatccgctgcacgcaaaggcatccgacgttactgcggcaaaagagctgatcaaaaagcgagatcaaacatggcgggcatggagcatgtcgttgcgagttatcgtcggtatcctcgatatcgaccgcgagatcatttttgaaatgatcaccgtcggtctttcataccctgaattttccacaaactcagacatcaggcgcaaattcattcataaatgcctctcggaacgttgcgggatggtctttgatgcagaagaaagccagcccaaaattcagcaagccaggctaccgacggccagcaaaaagtgccgaccactcaagacgagcagctcaaagtgcagagcttgggtgatggcaaatttagcattgacgggttga

SEQ ID NO: 451427 - DNA, 1443 bp, Serratia marcescens
atggataataaattaaaactgttcattagttattgtcatgaagacaaacatcacaaagaagaaatattaaagtatcttcagcctaatgaagacattgaagtttggtacgataaagaaatgctcgctggtgatgagtttgatgaggttatatctgccaaactcgaagaaagtgatgtatttgtatttctcataacacaagactttctgacttcgaaatactgtaatgaaattgagttaagtaaagcattagatagaaaagcttctgacgatgagcttcgtattatccctgtaatacttgactattgtacattcaaacgttctcgtttgtcgctctacaatgccacaccgagcgatgcaaaacctatttcttcctatccaaatcaaaaacaagcatatttagaggtttcggaagccattgaagatgtggttaaatatcttaaagaaagaaagacacaatcttcatatgcgataactgaagagacggtagttgaaaaaaatgcactgagaactaattttaagctgcatttacttgatcttggatttactattcagcatagaaggaaggagatcctttatcttgatgatctgtttatttatccagatttaaaaagaacaaaatatgaattcgatgattatgatgtctttgtgaattcaaaaaatgttttaagccatgaaaaagttagtggtaataaaacactaattattggtagtgagcagtcaggaaagtcaactttagccaaaacccttttccgtcaatatcattcgaatggttcaataccggttcttattaaaggcgattctttcaagaaagtatccgaaattgaaaatgtagttaataattttctaaatgaacaatacgataatgtagaaattataaattacaatgagttgattatcatagttgatgatataacagaatcacctatgaatgagaaattccaaagagtgttgctgaataaccttgtggaaacgtataaaagtattgttattattgctgactctaaaattagatttagtgatcaacttcttaaggatttcgattgttttacaacttatgagattgctgaatttagtcatatccaaaaaactgagcttgttgagaaatggaatcaaattggcttagatgaaacatctgatattgaggatattcaaagtttaaatgataatctaaagcgtaatatagattcaattcttatgaaaaacatcgtgccaagtaagccgatatttatattaatgattttgcaaattttagagtcaaatacacaaagcaatttttcactgacatcttatggtcattgttatcattctttaattatacaagctttcaataaagcgaatgttaaagcagatgagctgaatgactattttaattatttaagtgagttatcaattattctgaattggaagaatttaaagaatattattcaaataactattatttga

SEQ ID NO: 451428 - DNA, 762 bp, Serratia marcescens; identical to SEQ ID NO: 437325

SEQ ID NO: 451429 - DNA, 774 bp, Serratia marcescens; identical to SEQ ID NO: 436691

SEQ ID NO: 451430 - DNA, 546 bp, Serratia marcescens
  misc_feature (10)..(19): n is a, c, g, or t
atgctgttgnnnnnnnnnnctgttggatttgaagaaatcaaaaggcttatcgaactggatctcactgatttttctctggatatgatattgccattgggtgagacatacgttcataaaaatttattggcgctaggatcactcagaagatttaaaggtgtttattttaataacttcatatcctctcaccaaaaatccaaggcggtaaggatcattcttagagtaatgaaaaaaagataccgctttttagaaaaaaataattgcatatttgactgttatattgatgatgggtcaaggtgttatctgaccaggatcttaccatggaggaatgagttaacaacaaggaactattgcgttacctcggtcttaactgggccgggtttaattgttgaggttttattggggttggcttataaggcctttaatattggatatctgatagagccctccagcattgcggaatatatgcaaaatcctgattttggaattgcattgtttcaacacaccatagatacccctgatggcgcctattccacgtggcgcaaataa

SEQ ID NO: 451431 - DNA, 5151 bp, Serratia marcescens
atgagtgacgactctgcctttttcacccaagccagtaactttatcagcgccgtatccgggggggtagatccgcgtaccggtctatacggcatcaatattaccctgggtcagttggttgccaacgatcgccgggggccggtcctgcctctgtcgctcagttattctcctctcaataccaccgatatcggtttcggcattggttttgctctcgggctgtcttcttatcacggtgacgctcagtccgggttgcttacgcttgccaccggtgaacgctatcaggtcattgacggcggcattcagcaaaaaaaactcgacaatttcaggttcgatatgtcggaagacaactatcgtattctgcataaagatggcagcgtagagctgctcgggcagattggcggtttctgcgttcctagccagatattcacgccaagcggcaacaatatcacgctacattgggatgtctcctgcggcccgttacggctgagcaatattaccgatgaggcaggtatatccttacttaccctggaatacacgggaaactccgccgttctgcacgtgttgcctgatcagacggaagggtacgacgtttggttaaccctggataatgaatatcacctgacggagctgtggtgtaatggcctgggtgaaaaagatacatcattaacctggaatattggctatgacctgctggaacaaagtggaaacagttgggggccgtgggcaacctcattgacctggccaggcgggctcagggaaagcgtcacttacctttgcggtgataatgcgcaacgctttccggaaggggctggcttccccccgttgccgtgtgtctcaagcataacaacggcggacatgtcgttttcccagacgcagcaatatgattattccgaccacaattttcttggttatggttcatctataggctgggaggcgcagcaagataatctctacagtgcggcaagcgactataaatacagctccacccagacgtacaccgacgatgccggggtacaaacgaccaccgttcgaacctataacaattatcacctgctcgaatcccaggtgaccacacgcaacgactgcgttaccgcgcaacttacggaatatcatattgcacagaacgcgacgtttgacgttcagccatcaaactatcagttgcccaaaaccaccaccaccacctggaccagaggcagcggtacatcggcaaaaactcgcagtgaaatcaccagcaccacatttgatgactcggggaacccgctaaaaaaatcaacagtatcgaaagacggcagtggggtgtgcacgcccatcggcaccgacatcgtctggacatattatcccgctggaggggagacggcggatgccgccgccgggactggctgtccagcggaaccaaacggatttatacggtttatcaagacaatgacggcgacgccccgactgaccggcggctacaagagccccgagcaggtcaccacttatgcttacgtgggcatggaaacgccggatgatgcaaaagaggcgatttctctgaccatcatgaagagccgcgaaacccattgtcgcggcaagcagctactggcgaactatgactacttctactcggacaaacaagataagaccaacgaatttggccgcctgattaagacggttgatatccattatccatcaggaaaggaggggaagacgtatcagaccacgaacggcacggcctacacgctgaatgcggcggacaatgcattaatccagactgacaccctgttaacgcatgacggcctgagcctgacacatcagcagaggctctcgcgtttcaccgggcgagtatgggaaacggttgacgcgctgggtgtgaaagatgtgatggagtacgacatgctggggcgcatgaccaagatcattacggcgaaaaatacggactatgaaaatacgcgaacctgggtctatgatatcaacgctgacaacagtaccccattctccatcactgcgacggatgcgaaccataatcaggtgcgtaccggctacaacggtgcaggaaaaatgatgagcacggacgtctgcctggccgacgacctgagccaaagctggaaaacgttaaaaacgggaagctatgacagcctgttgcgcccgacctcagtgacgaacagtgactatctgccaatgggctcagggaatctggagagtaaagcaagccaaaacctgtccagcacattgtcctatgatgactgggggctgcaacatcacgttgcgacgtcgcatgacctgctgcattaccgtgtaacagatccgatagccatgacgataactgcctataccgttgggaaaaacaatgtccgcagcgccacgacggtcacccggtacaatcttaatcgggtggcggtacaaattgacgtctataacaataccaaagatccgacggcgcccgatttcgccgttcaaagcgccgacagtacaaccagcgcggaattcgacggtctcaaccaactgcgtcggcaaacggacgaactgggccgcgtaacggcgttcgactatgatccgtttgggcggattgcggcgacaacattgcccaaagtgtattccgacagtatcagtgccggtacgcaaatcatccgaatttacagtgaagcctcgccatcagcctggctgagcgacattcaggtagcggcggaaaacgagactaagtcgggtgcgcggggagcaccggtatccatgggtacccaggactttgacggtttaggccgggtgacaagccgcacatctggcggccggacctggacggccagctacagcgcaggaaccaagcttaaagagggtgccatatcgcccggtagcctgcacggtccggacagtttgacctcgccaaacaacaacagggtcaactacggctatattgcggcgctgggcggcaagctggcctttgcgcagagtgccgcactcccgcagcgtaaagaatttacctatgatcgtgcaacgggcaagctgaaaaccgcgaaagtcaagaatggcagtcaggtggaaaacagcattactaacacctatacgccgtcgggccgcttatccgctgagcttttttctcaggcaacagtggcggcgaagtacacctatacggcggccggtgaagtcacgagctacatcgacgttacgaaaatagttcagtcggtaacgagttacgacggttttggccgtcagacgggggtcagcgataaagatgtgatgataacgcttgggtatgacgaattagatcgaccgaatcagtgggtgagtaaggatctgtccaccgaagcgacgctgacgacgacggtgcagtgggataatttgggccgagaaaaactgcgtacggtaaccagtaaccaaagtgcccatagctggacgctggagtctgaatggtactccaatgctcaggttaaaacgaaaatgctaaaacgcggcggacaagcagtacgtacggaaaactatagttatgatccgcgcaaccgcctcacgaactacagcgccagtggcagcgagttgccgcaagatgagcaaggcaaccagataacgtcacagtcattcagctatgatgcctacggcaatattacctcggtgcagagtacgtttgcggatggtagcaaggatacactggcttgcacctataacaaccccgctgacccttgccaactgacccaggcgacgcatacacatccaagctatgaaaccaccatcccgatgaaatatgacctgaatggcatgctgacggatgatggcatgggggcatccgcgaggacattgaactattactcatccgtccaggaagggcgtttatccagcgcaacgcgcaagctcaaagatgcctcatcgcaaagcacggtttatcaatatgacgccatgggccggctgatacagcaggacgaaacagcgctgcactaccgtggaacaacgctggtgaatcagcagaaagcaggagatgaggttcggctgataacggggccgggcggcaatctggcgcagatccgcaccggcgttaaccccggagtctggctgacgggaacggatgccaatggctcggtgctgagcatagagcaggatgcccggcaagaccagggaacgtacgatccgtacggccagagcatcaataatcccggcggcagcgtgctggggtataacggtgaacgtcaggacgagattcttggcggttaccatttgggcaacggttaccgcctgtacaacccttacctgaaacgtttttcctctcctgacagcctgagcccgtttgggaaaggagggattaatccctatgcctattgtgagggcgaccccatcaaccacaccgacccgacaggtcatcacgtacgctggcaagccattgtcggtggcgtggcatccgttatcggattggggctggccgcaacctttggcggaccgctggcggtagcgggagcattgctcgccgtgacgtccgctggaaccaatattgccagtcaggcggaaagcaattcgcatcccgaaaccagtcgtattctgggctgggtatcgctgggaaccggcgcggcgtccgccgccgttggtgtgggggcggcggtgcaggatgtgggcggttcaatggagaggacattgacggacaatcccagaacaagaggtcgcatcgaaggcggagtcgcggaggagcatgttaatatagattaccattctggttctgaagagaatccaagagcgtgggacgattccattcgtaatgagaatgggacctatcttatggcgagtaaccgtgtaataaatgccgattatgtgaaagatgctgtcaactttgtatctaaggccaatgataaagatatagtaattctatctggaagccatggtacttctcgaggcgttaactgggaaggctcttacaggcgcgatagtcttattgtgcgccaatttggtcgcgaggatcgttccctcagtctagggaactcgagggtatctgtcagaaacctttcgagaatatcaacaagtgagtactctcgtatagtaaacagtacagataaaaatgttattttaggctactgtttcagccgcaacgatgttgttctgagggatgccagaaacttacgcccggtgacttcttggtatgtggggagaaggcaatttgatgattatttgaccgacactggtcaagtctggcacgagttcatttag

SEQ ID NO: 451432 - DNA, 1602 bp, Serratia marcescens
atggaaaataaatcaaatcatgtgagtgaacttgtaacgtccgatgtctccacacagtggatggcagtaagtaacatccaaatcagaacggatgcgggttcaagtcccgtgcaaatttttggtaatgggctcaatatgataaaggtttatgtcagctttgaccttttgaatggaaacagcacgtcggataaaaacctcccggccaaaaacacgcctgacgttgccacgctaaaaaaagccacaacgcttattgtatacaatgatataaaacacaatgaattaaagaggttaaccagttgccccactatggataacctttcccctgacggttggagtgacggttgggcttatacggataagcctaatcaatttctggttgtgtcaagcgcagccaacaatgcggtgacaccaaccaatcgtgctcaagtgatctattacgttctgtgtaaaagcccaaaaatgctcagtcttcaaataggcgttaagatcaccccgacgggaccgggtgccagcagctattatgatgcgccaaagggcattagcgaggctccccttaccattatcgcaaaccccacagtaacttattatcccgacaattttgtctgcgcgtggcaaccggtatcccatagcggcagcagcgatacctgggactcgagcattgattcgatcagtaacttctggcggcagtataacggcgtcatcagcattgatcctggagtaagcggtgcgggaagtaagctttactaccaaatttcatgcccaccgcagaaacaatcgaataatcttatgtccccgtgcagtacgcgtaccattaacggttatcgtaccgacgcatatgtttggccgtcaacgcaaaaaaattcgccaccaaaagatcgtccaattgttggcatctctccgtcggaaaccgaccagaacgatgtgactctcataaatattggcgatgaaagcgataagataagaatcagtctgattttcagcgtgaacacggattatgccgagggacagcgatgcagcgccaacaaaatcacggtttatgatgaaaatggaaattccggcgcgttttatctgagccctgacctgcccaattatgcacagttattaaacgatacatcgtggtctccctgtagtggaaatcagaataacgttatcaatacaaactatcccgtagcaatagttaacaaccattccggtaacatgtttatctggaacaaccaggaggcgcaaactcaccaggacggattaagcaattactataaatggacactctcaccggtcaagtcccctggccgcacgatattcagtctatacagcacgaataccgagaggtatttaatgcggggcaataaaagcggcaaggattttaaaatgatcccttgtggcaatctcaatgataactggacgtcattcagtttaaaacctttgtggtcacaacaactatttgggatcgccacctacgcgggaaatatctatttaagagcggaaaacgaaacctccacacatacgaggggttattatcatgtctatggtgacggatattacagcccggaagatatccctaacctccctgcattacagtggtcatttaaacctataaaataa

SEQ ID NO: 451433 - DNA, 1185 bp, Serratia marcescens
atgaatgtatggaaagtcaacctgatttcggcttggttcggttgttttctgactgggttagcaatgagccaaattcttccttttttgccattgtatattgaaacactgggggtaaaaggtcattcctctctcaatctatggtcaggattagtatttagcggtatgttttttgtttcagcgatggtttcaccactgtgggggagtctggccgatcgtaaaggtcgtaaattaatgttgttgcgagcctcattgggaatggcggtggccactgcattacaaggtatggtgaaccaagtttggcagttatttgctttgcgggccttgatggggcttgccagtggttatattcccaatgccatggcgctgatcgcttcgcaagcaccgcgtgataagagcggatgggcattgggtatgctgtcgacagggcaaattactgggatgatcggggggccattattcggtggcatgatggccgatcacctggggcttcggatgattttttacgttacttccgggatgatgttcatcaattttctattgacgttactcctgattaaagagcgccatgacggggtcggaaagacagagcggttcagtggaaagaggggtattcagtctttaccccagccgatgtgggttgttagtttgttcatttgtacgttaatgatccaattagccaattcttcaatcagccccattcttactttgttcattcgtgcattggcgtgtaacaccggcaatattgcttttatcagcggcatgatcgcagccgcccccgggatagccgctctggtctcggcaccacatttcggtcggctcggcgatcgcataggtgccgtccgtatcctgatcgccgcgttgctgttgacggctgtgctattgtctgccatggcgtgcgtgagaacgccgttgcagttgggtgttctacgctttttgctcggctttgccgacggggcgctaatgcctgcgttacagacattattgcttcagtcttcttccgagcagacgacaggccgtattttcggctataaccagtcattcatgtatcttggaaacgtgtgtggcccattattgggggcaggtgtctcagcactggcgggataccgatgggtattcgtcatgacgtctattatcgtcatggcgaacgtgtggcaactgtatcgtcaacttcaaaagcgggagtaa

SEQ ID NO: 451434 - DNA, 915 bp, Serratia marcescens
atgacaacatataaaaaatttatttttagccttgctcccgtcgtgtttcttggcgggttaaatcagtacgtttatgtttttcataaacagaccatgcttttttttgagtcgaaactatggcaagtttctgccatagtggcagcctcgctagttgttgttattacactacaccgtttgaaaataaatggcgtatataaatcgataaagtttagtgcgataatttttttgtgcattattccatggaacgcgacaccttttcttgttgcattttctttttttgccggaacgttcgtgtctctgtttaatgtgcggattgatcgttgtacatttaatcttaatccagcaatttcaagcaggatgatcattttctttctaaatccgccaataataaagtatgacagtatatccagcgctacaccgctctctctttgccgtaaaagcatgatgcgaatgtcagagtgtggcgtttaccctctaaaatacttggtgttcggggcttggcctggtgctctcggggagacgtctaaagttggagtgctgattggcgcattaattctgatatcctttaaactttacaatcctttttttcttattgcaggtatattcggtgccgtcataggttggttttttctcggcgtgggatacacctttacgctattgccgcgaatgatagattatctatttatggggagttttttatttggtcttgttttcatgacgcaggatcattttactcatggcttgaggcgtaatgagatgcttacctaccattttcttgtggggttactgtgttttatctttagagggatattgcctttccctgaagcgacgttgatatctttggtaatgtcgcaagttttattcatggtgtttttcttctttaaaaaaaaggttgattcattgaatatggattga

SEQ ID NO: 451435 - DNA, 516 bp, Serratia marcescens
atgaaattaattaagctgttcgtcgttgcaccaatgtttttattcaccgtcatggctcacgcgagggagtaccctatcggggggccggttgaacatgagggtatggagattgcctcatcgtaccttgtgggtataactatggagccggatattacgtcaatggcgatgggtaacgatattatccatctggaaagtgacgttcatgcaacgcaaaataacatttggggtttttctcaagatgaatggataccttatctttcaataaactatgttatgaccaagaaagacgataaaaacttcgtcgcatttgggcaactacttcctatgatagccaaggatggggctcactatgcacaatccttaaaaatgaatggccccggaacatatacggtaagactgaaatattcggcacccgacgaaaagaacttcttgcgccacactgacaaagaaaccggcgtgccgaaatggtttaaaccatttattgaaacatttacattcagctatcctcaaaagtaa

SEQ ID NO: 451436 - DNA, 351 bp, Serratia marcescens
atgaaaatcatatctggacttgtagccgtttttttaatgattttgactacgtttacatgggccggtgagcgtcaaacgttcaatttgacgctgacggaacaaggttttgttccttcgcaactggaggttccggcacatgaaaagatcgaaatcaggatgtacaatgccacaaaaaaaatggccgaatttgaaagttttgatatgaaattcgaaaaaatagcgcctcctgcgaaaacgatctcggttttgactggcccacttaaacctggggagtatcttttcttcgatgattacagtgcgcaggatgcaaaaggaaaagtgatatctaaagtgcggttaaacagaagatag

SEQ ID NO: 451437 - DNA, 1092 bp, Serratia marcescens
atgaaccaatacgcagcgacagctatggcttctttgccattatttctcatgcttagcatgtgcccccgggtaaacgcgaccgagattttcaataaaaacggaaatagggttcaattaacgggaatgctcgatgctcgacatcaatttagtccggacagcgacacggatggcgaccagagctatgcgcgctttggttttatcggtgaaaccaaaataagccgtagtgtcactggatatgggaaatgggaatacgaaataaaagtgaataaaaccgagggcggcgatgatgacagcgcgtatacgcgcttgggttattctggcattaaagtagaccggtttggatctctcgattacggtcgcaattacggcattctgtatgatattggggcctggaccgacattctgcccgtatttggcaatgattcttatgaggatacggatcgtttcatgactggccgcagtagtggacttttgacttggcggaataacgatctctttgggtattttccaggggtgagtttggcactgcagtatcagggaaagaatagcgctgaagacaggaaatcagaaattcagaacggggacggttatggggtatccgtggtatggaatgggaacgatgagatcagcctgggggctgcattgacgcgctcccaaagaacaccgatgcaaaagattgatggccagggcgataaggcagatgcggtgactgcagggataaaatataacaaagaaaatatcctcttggcagccaactacacgcgaagcaacaatattatccatattgaggattatgggtggataagaagagcagatagttgggaggttgtggggcagtatagtttcgattcgggagttcaaccaggttttgcatgggtatacactcgggggcacggacttaaaaataacacgggagatacagatattgtaaattatgttgatgtgaatgcgagctacatattcaattccaatatgagtgcttatattgattacaagattaacttaataaactcatccggaaattctggagaaaatacactgaacgttcccactgatgacagtatcggtattggaatcgtgtaccagttttaa

SEQ ID NO: 451438 - DNA, 1764 bp, Serratia marcescens
atgagcgtagagaaactgattaccgatcatatcgatatctggtcctcggccctgcaaacccgctctaccgccgggcgcggcagcaacggtaaaatcgacctctatggcattaagaaactgcgcgagctgattcttgagctggcggtgcgcggcaaactggtgccgcaggatccgaatgatgagccagcgtctgagctgctaaaacgtatcgcggctgagaaagcggagctggtgaagcagggtaaaattaaaaagcagaagccgctgccggaaattcgcgaggatgaaaagccgtttgagttgccggaggggtgggagtgggtgactttggcaaccataggtgaaattgttggcgggggaactccaacatctgataatccactttattggagtactcaggggattaaatggttaactcccgctgacctcaatggactcaaaggtaagtatatatcttccggtgccagggatattacaattgatggtctttccaattcatcagcaaaactaatgccgaaaggttctgtgcttttttccagccgagcaccgattggttatgtggcgatttcaaataatgagctatcaactaaccaaggtttcaaatcttgcgtgccgtacatcaaagaaagtgcagagtatatatattattttctattgagtgctgctagaaaaatagatgaaatggcaagcgggacgacattcaaagaagtgtcaggtgcggtagtctctaaggttttgttgcctttcccccctctgaatgagcaactaagaattgttgaagtagccgatgatttaatgtccctctgcgaccagctggaacagcaatccctgaccagtctgaacgcgcatcagcagttagttgaaactctgctggcaacgctgaccggtagccaaaatgccgaagaactcgccgaaaactgggcgcgaatcagccaacatttcgatacgttgtttaccaccgaagcaagtatcgacgcgcttaagcaaactatactgcaactggcggtgatgggtaaactagtgccgcaggatcctaacgatgaaccggcttctgaactgcttaagcgtattgagcaggaaaaagcgcagctggtgaaagaaggcaaaattaaaaagcaaaagccgttgccaccaattaatgatgatgagaaaccgtttgagttgccgaaggggtgggagtggtgccggttgggttcattatttaatttccaaaatggatatgcatttaaaagtgaatggtttagcaataatgggattcgattggtaagaaataccaatgtttctcatggtaatattaattggaatgattcggttaatatacctttgtcaatgttctcagagtttgaaggattcagcctgaatttaggagatgttctaatatctctggatagaccaattattaatactgggttgaagtatgcatttgtacgtgagtgcgacttgccttgtcttttattacagcgagtggctaaatttaacagtgtagggaatgttattcgcggtggtttcttgagtaaatggctggaatctaattattttattaactccatcgacccaggcagaagcaatggtgtgcctcacatttcgactaaacagcttgaaatgactctgttccctttactgtctcaaagggaacaagacaaaataattttgttaaccgataagcttattcaactttgtgtggactttaaatcccgcctgcaatccgcccagcaaacccagcttcacctggcggatgcgcttaccgacgccgcgttaaactaa

SEQ ID NO: 451439 - DNA, 315 bp, Serratia marcescens
atgaacaatgcaattattagttttgacactgctttttcggcagcgtgttttcttcaaaagcagattggtcatcgtcgtctttggatcaccaagttttatgtgggattcaatggcgttggatactgctacgctcttgttgactgggatcaccgtgtgcttgcggactgggatcaggattcatgtcactgggatttacgtcaggatgcctggactgttgttccagacagcagggactatttcccggaagatatgttgactgaggtcatttctgaggagcaactctttcagcgctccactgtggaaagctttttataa

SEQ ID NO: 451440 - DNA, 627 bp, Serratia marcescens
gtgaccaccccgactctgtcccccgacatcgtccgtcgcatcgaggacgccgccgccgccctcatcgcggccggcaatgccaccccgaccaacgagcaggtgcgccagcacctcggcggtggctccctgtcgcacatctccccggtgatgcgcgcgttccgcgcccgcctgcgtgaacagcgtgcggaacagaccccggcgctaccgcccgaactgctgcagttgctgaccggccagttggggctactatggcaggcagcctgtaagcaggcggaggcgaataccctggccgcccgcgagcaggctgacgccgacattatgcaggccgaccaggagcgcgatgccgccctggcgaaaatggcacaattggaggcagaactggcggtactgcgcgaagtcgtcaccgagcgggaccggctgctggacgaggtgcgggcgttgcgagccgatgcgttacccttgcgtgaggcggtcgcccggctcaccgccacgggggagcacatgacagcacagttgaaagagacgaaggcagaactgaagggtgctcgggaagagacacggagcctgcaggctgagttgctgcgattggcacggaagggaataagtccacagggagaggcggtatga

SEQ ID NO: 451441 - DNA, 1065 bp, Serratia marcescens
atgaatgacaaggtgatcacactcgctccgggctctccgctgaataagatgctggatctgattgcaaatgtagcatcccgtaagatccccggcgtcgctgttgttttagaactacgccaggcgtatgcaaaaatcagggaggaaatacaccaggatcgaatgcttgatttcgcgctaggccttcgggactcagggattgataaagataactttgatttatcccccgaatgtttttctgccatcgtcacaaaattattactggatgacgagaagcgaaaaacggaattttatatcaaactgaccattgaacttgcccgaagtgacctcgatccagacctgaagatatattatatcaacacgctgagcgaactgaccggggctgatattgactttgcccgcaagctgtatatcagacagaccgttccactcagagggtacacatccctggaggatgcggaactggcgctgacatcaagcaaacaggggatcacgctgaaatcactgcacaagttgattaatcacggcttactggatgagaacagaagtggcgatatcagggcaaagccgctttataacatgacggatgaactgaaaaccctgatttcctatctgtttcacccaaatgacctggtcccgacagcgattgatgataaccagaaagaagcgtttgacgttatcattatcgatcactataaatcgctggataacctgtacatcacgcatatcagggataccctgacgaataaacagatttctgtgggtatcgtgcaacacaatgatgactaccggttgcaaaaaaacgccaaactttatatctataataatgtcatgacacataattcaggttccaggagcaaggaatatatacagcttttcgtactgttcgatcccgattctgacacccttaaactgtctcattccggcgaacgcagttttaaaattgagaaggagaattatgttgggacgattaggaacagcgcagacgcaaggaaggtattgcttaacacactgagtgaggtgaccgactatgttgtgggatatctgaagaagcctgagcacccatga

SEQ ID NO: 451442 - DNA, 2262 bp, Serratia marcescens
atgacgcattcaccgcaagaaaagcgccaggggcaacatcccgatcgcgccatcagcaataaggatgaagaccgctatggtttcacccacattgccactgagctggcccgcgccattaaggagatcggccgggagggcagtgccgtgatcggtatcgaaggcgcctgggggacggggaaaaccagcctccttaatctgctgcgcacggcgctggagaaacagcaggaagcgcggaccttcgtgctgaatatttccccctggctcgacggcagtgatacgcctctggtggcgtccttactacttcctgtcgccgccattattgccgaggaagaagaacgccggctttcagcgaaggaacggacagccctcaaaaggaaaaaagcgctgaccggtaccgcccagacgctgatggactacacccgagccacagcccggaatctggcgcctgtcgctcagatcgccgcggtcattccctgcgtccccaatgccagcggcgcacttaacgccgtggcagagtcgagctggctgaaagaaaaagaaaaaaccacggccgacatgcgcaccgagattgcccgaaaaatcgaggagctggatctgagcttcattgtcctgctggacgatctcgaccgcctcgaaccggcccaggccgtggaggtgatccggctggtgaagtcggtcgcggattttccccgcttccgctacctgctctgttatgacaaagcggtgctgtcacaggccatcagccaggggctgggcgtcgccgacggcagcctgtacctgcagaaaattatccagatcgccttcgcactgccgcgcccggaatcctttgcgttgcgccagcaatttcacgatgccgccatcgagttataccaaacggtgaatgatttccccccggagaagggcatacaggctgacctgacggcagtcgcgaatatttatggcgccacgctgaaaacgccccgggaagtccagaccgtcctcaatgcactgcggtttcgttatgcgggcatgcgggattatgtctatttcccggatctgtgcttcctgcagctgctccgcacgacaaattcgggtctgtatgactgggtggaagaatacctgtcggaacggaacgtggttcaagccgaagatggccaggtcagcgacgaggagcaaaaagccctggtaggcagccttgatcaccacctgaagcgctatttccctgcggcagcgcattccgcctgggagctgagagaatgggtccccgggatcaacggtggactggggaaactcccggtcacgctctttgaacgcaccggaccggaggaaagtgcccagctgaccgcagagaagcggctgggcagtcaggcatactggcgttactacttcgccttctccagcccacaaaatatcctgtcaccgcaggattttgagcaactcttcgcgctcgccggccagtataaccagcctgaaaaacagcaggaactggcggaatgtctgctcggttatatccagagcaagaacttatcttcccggacctggtttgaacacatcctggcccagctgacatctcccttgattaagaccagaatgccggccgagtgccggggtctgctggggttcttcttcgataacggggatgagatgctgaggcgctaccaggcccgtaacgcgtggttgtcgctgcatgatctggatacgtacagtgtcgcagatcggctaatccaacggatactaagggaagatgctgtggccaccatgaagttcctgacggtgcgactccagcgcggcaaagcctggtactggagcgcggaatatgtccgtcacctgctgtggcagcacggaatagccggagacagaatgacacatcagcaggaacaatggatggacctgggtaacctcgccattttacgggacacccttgccacgagactgaacagtcccgccattaccgagcaactgccgaccattgaccagttgagccggtatttctttgtatggcgtgatatcagtgggatccaggcagtgcgggaatgggtcaaaaaccaaatccaaggggatgaggcttttctgaacctgttgctgcagctccggtaccatggcatcagtaccgcgattgggcaatatcgcgcgctggatctggcagagatggtcgattttctgggcgacgctcagacagtgcaagcacgtattgatcgcatcaagcaggccgaccatttcccagaacagattgaagaggtgaatcagtcgatcaagagagccgctaatcgtcgtagaatttga

SEQ ID NO: 451443 - DNA, 267 bp, Serratia marcescens
  misc_feature (176)..(185): n is a, c, g, or t
atgaagattgatattaataaccgggttaagtattcactaagaaacctcgaccttgtcgacaaaaataaattcaattctcttgtggagaaatttacagatttcaaagataaaaaagatcttggagaattccctcaactaattacgctccatggaaactcactctactcttacaaacnnnnnnnnnnggtttttgtattagacataatcaataaagacaaagcagaaaaaataaaggaaaatgaatcactgaggaatcaaaaaaaatga

SEQ ID NO: 451444 - DNA, 624 bp, Serratia marcescens
atgaaagtgatgcaaaattttgttttcgatagtgctcagtgtcgtaaagatgttaatgagttgaagcaacttttaataaataaagctgagctcaaagaagctgtggatattcttcccttttttaagatgagacctaacatttgctctttgattacaaactattttccatacattaaaagtggtgatttaattgcacctgaataccctatcgacggggattttagagctgatttgattgtcggcagtagtatagataaaaaatatattttggtagagtttgaagacggaaatcctgacagtatttttaaacttaaaaaagggaagtctaaacgagattggtcgaaaaggtttgagggagcttactcgcagttaacggactggctctggaaattagaagacaatagaagcactgcaaatttcacttcgacttttggagggcaaagggcgaagttccatggtttgataataactggtaaggatatgaatcttataccagaggaggcggatagattgaaatggagaatggatacaacctctattgataataatcaaataaatgttatctcatttaatgaattacatgctgacatggatttctggcttacaaagtatcataatgtttaa

SEQ ID NO: 451445 - DNA, 645 bp, Serratia marcescens
ttggaaacgctcggacaaaggttgaagaagcttaggaaggccaagaaacttacccaagctcaagtagcaaaagctttaaaggttagcgatgtaaccattggctactgggaacgggatcttaatgagcccggaggaaaatctcttacgggacttgccagatactttggtgtggccgaagagtatctgctctatggaaaaactgatgtatcaaatgtaaccccggccactctgggctcaacacgggttccattaattagttatgtacaagctggtgtctggacagctgaaagcgatgcaagcagtctggagggaaatatagattacctgctgacagagcagactctatcagctgggacgtttgcattgaaaattaaaggaaaatcaatggaacctgattttaaagaaggtgatttgattatcgttgacccagagctcaatcctctcccaggtgattacgtcgtggcaaaaaacggggagcacgaagctacttttaaaaaataccgagctcggggtgtcactcaggatgggcaagacgtcttcgaattggtacctttaaatcccgactaccccactaaaagctcactaacagaacacattgaaataataggtgttcttgttgaacatcgtcgcttactacgccgctaa

SEQ ID NO: 451446 - DNA, 813 bp, Serratia marcescens
atgcgtttttcacacttatgtttaatggttattgccttttgcttactttattcctgtatcagttttacaatatcttggccatttgaaggatgggatcgagaatcgcttggacaatttggagattcttgggggtttgtgacatccgtatcttctgttgctgcttttataggggtggcttactcagtgaaactgcaagcagcctcgttaaggcaactgcaaaatgacgctaagtcaaataacctaatgatgataaggcagcaagttgaagggaatttctttcaaatgttaaatttgttgcaatcattaataaatgatatggatatacaaggagatggtaagggtggggtggcattcgaaagaaatggtagagatgtttttatatatctttataaaaacttcaaaagcaagagaataactgcacgccgattctatatagagccattagaattaaatcagatggattatacaaagttaaggaagtttataggtaattgttttgatgaattttacaaagataggcagcaggatttggctcattatttcagggtgttatataatacgtataagttcatagatagtgctaatataaataaagaggacaagaaagttcttgcaaatatacttagagctcaactttcaaactatgaactgttgatgttattttacaactgttttggtaagcatggggctaagttcaaagatattgcaattaaatatgaagtatttgataacctacctatagaaaaactcattattgatgagcataagttcttaattgataaaaaagcatttggtgagcaatccttggattga

SEQ ID NO: 451447 - DNA, 243 bp, Serratia marcescens
atgaccaaatgcaaaagaatctcttatagcggcaatgataaaactcgtgaagactatatcttcttggatctgcttgaagatggaacgtaccgagttagagagggttactcagaaaatgttggtaaattgaagtggtctggtgatgaaaaaacctactcaactgatgatttcttagcccaaaacccaggttatgcagatcgtgttagaacgttaattagtgaatttgagtcagagaatagctaa

SEQ ID NO: 451448 - DNA, 774 bp, Serratia marcescens
atgttgctgactaagacaaactcgaaaacttctttttcaggcgggaatattcccgtttttaaaacaactaaggctgaggacgatttatttaatctcggagtttccagctgggttgaaaccggcgatcgcttcatcagaactgactcatccgggaaagtaactgggttgctcgacagggctaatagtgatgtgcttattccagtatcaatttcaccaacaaaaattagcgctggaattaccgcgttgcatttcaataacacgccggtgcttgggggagttgatgtttttgcagataccaacatccagacgattgtcactgtgatgcgtgcgagtctgggtactgttgacacgattatcggaagccaggcggcagataaaaaaccgcttatgctgtttgtagatcgccctgatgactcgaaaatgcgttatctacagcatttccctgacaaccaaattaattcaacgaaaccgattaagggtatcggatggttctcgtgcgtgctgacgtataacctaccaaacccacaggcagtgttttatgttaacggtgaacaggtaacggcccctggccctgtttcagctgcgttatctactgctgccggcgcacgtaaaatggttgtgggcggtgctggcccgctgggcgcgcagaatccaggcacattcgattttgcgttatcaatcgtcattccaaatgttgacgcatatcgtgatcaaactgcactggctaaaattaatgcatatttggccgagttcatgccgcgtctaacggcataa

SEQ ID NO: 451449 - DNA, 1290 bp, Serratia marcescens
atggttcaaggaagcacaatttcatcagtttttaagacatcacgcgatctacctgaaaactatgttatcagaagagatattgatgataaatttatcgatgctcttgcacaagaaacacatgttgtaatctacggtagttcaaaacaaggtaaaacatctttaagaaaaaagaatcttgaaccagaggattacattgatatcacctgttctaataattggaaacttgaagatatccatgtggcgatattaaaaaaaataggttatcaagtttcaacctcatcgtcaaaaacactaaaaggatctgcaaaggtaaagcttagtatagacattccttttctaggaaagtctgccttagaaataaatggtgatgcagcaaaagccattaataaaaaaaacttggaattagaccccgaggatgtgaatgacattatcacttcattaagcgaagttgatttcaaaagaatcatagttatagaagattttcattatcttcctgaacaaacccaaattgatttctctgttgctttaaaagcttttcatgagtcctctaagctatgttttataattgttggtgtttggcttgaagaagataaactgacaacattcaatggcgatcttgcgggcagagtcatttccattaatgctgatcgatgggaaagcaatgacttttataaattatttgaaaatagcgagagcttacttaacataaaatttgataatgatttcaaaaagaacgttatcgatatgtgtaatggtagcgtttttttggttcagcaactatgctaccaagcttgtgatatagagggtatacataatcgccagcaagactctaaagttatcgggaaggatttttcagttaaagaaaaaatacagaaattaattaatgaacaatattctagatactttaaattcctagcagactttagcagcgggtttgaccaaacatctttagaactatataagtggattctatttgttctaatcaccgttgaccaaaaacatcttgaaataggtattccagaagctgcagccagacgattaattcaagaaaaacacccaaaaaggactgaggcgtcttcaaaaaaactcaatcaggccctgaggaagtctgtcgatttacaagtaaaaatatcgataaagcctattgtatttgagtttgactctagttcatcacggataaaaattgtcgataggccattcatactatggcgtgcatatcaaaatcttgatgaattatatgactatgcagacttaactgataatttaaagactaatataatatcatattaa

SEQ ID NO: 451450 - DNA, 804 bp, Serratia marcescens
atgaactaccccaaatttatatataaatacagacccattgagaattataatgacctgaaaagtgattactatttagatgctttatttaatcagtatgcggttttctcaagcagaactaatttcaacgatttgtttgattccaaaatagatttagcaaaaccaaatcccaaggacataaaagagctatcaaagctgcttcctaaaactaaacgtcaagagttgttaaaacacctgaataaaggtgattttacaattgaggggcatgaattcatttctaaacttaatctcagatttaatgaacgaattgattcatatgcttttatgtctttatcgtctattccagatagcaatctgatgtggtcacattatgcggcatctcatcgcggtttttgtattgaatacaaaactgagcatgtaaaagcaagaagagtgagttatgtggatgacataccatcattagaattacttgatttatacaagacgttctatgatttatcaacggacaataacctgggcattagaatattagatgcacttcattgtaagttagatgagtgggagtatgagtctgaatatcgatttatggctagcgaaggtctggctacgattaacgggggtgagaaatttaaaaaggttaattatgatactgactttgtgaactctattatttttggttacagaatggaagataaggttaaaagattaattattgaagaaatgccagttgggacaattttcaagcaagcaaccattggtagaaacactatgaaaatagtagattacaatccaattagtccagtatga

SEQ ID NO: 451451 - DNA, 912 bp, Serratia marcescens
atgattaactttgctgaaattgatagtgacggtgaaatctgggagtcatttgcccgtgactttcttgaagaacttggcttttatattgaatccgcaccagatagaggtgccgatggaggtaaagatcttttaatcacagagcaattgcaaggacagttaaataaatataaatttcgttggcttgttagctgcaaacattatgcaaaaagtaaaaaatcagtttcagaaaaggatgagattaatatacaagaacgtattgatggattcaatgctgaaggatttattggattttactcaacactaccaagcagtggtctaaattcaaggttgacgcaattaaaagaaaatggaaaaataaaggactttcgattctttgatggtaaattaattgaaaatcatttggtcagaattgggtactcaaaactacttcttaggtatcttcctgagagctataaaaaaataaagcccaaacattttatttttaatgaatatttacctataaaatgtgaccattgtggaaaggacttaatagaaaaccatcatgaagaaaattatgatggcattgtgtgcaatgcaaagatcatacatgatgacaaaccaactgaagtgatagcagtttattatgcgtgtaaaggcgattgtgataagcatttcgaggattattattggagtaaatataaagcgattacggaatggcaggatataagtgatttagccatcccattattctatctcaaatggatcatggggacatttaatgaacttgagtctggaaggaaaacatataccaaagacgccttcaataaaacaaaggagatagcattagcgttatctcaaattgttatgagagaaatgacggaaaaagaaagagaaagagtgatggatttaaattcactacctgattacatataa

SEQ ID NO: 451452 - DNA, 969 bp, Serratia marcescens
atggatctatgtgtcattattgttacttatggtgaacgagcccattttgtcaagcaggtcgtcgattcttgtgcgggtgaaatggtcaaaaaaatcgttattgtagataacggttctggtgaggagaataagcgtagtttatctgctattgctgaagcatatccacaaaccgttataatactgactatggatagcaatacgggttccgccggggggttctatgccgcaatggaatgtgctgcgagcattaacggcgtgaactttattctggctttagatgacgataacaagattgcatccgaagatatcaataaattggcttgctactggcaagatcatgttaataaacacgttgaagataatacggcgttactcgctttacgtgaagataggctgcattatatgaagtttattgagacgagaaatgatgacgtattactcggtgcaaaaaatagtttcatgggttttcatgttgctaattatgtaagaaaaatcatcggcgtatcaaataagaaaaaaaacattgcggagaaaattgtttcgccgatagcaccttatggtggcatgttttttcataagagcctgctgaaaaaacatggtctccctaaaaaagagatgtatttgtactgcgatgatacagagttctcctatagaattactaaggccgggggggaaattatcatcatccctgacgcgaaaattgtcgatctggatcagtcatgggattccggcgcgcgaaagaaacgttttaactctccggtgcttgagacgaaagatgattttcgagtgcgctatagcttccggaatcgcgtttattttgaaaggaattacttagttactaataaattaatctacttgatgaatatcataatatacttatcagacttggccgtgaaggccgtatgccatggcaagttaaaacgagtcggtctggttgtacgcgctattcgcgacggtttcagaatgtga

SEQ ID NO: 451453 - DNA, 1368 bp, Serratia marcescens
atgaccagctcactgacttgttttaaagcatatgatattcgtggagagttaggcaaggagttaaacccggaaattgcttaccgaataggtcgcgcttacggaacctttcttaaacccgggaaagtcgttgtgggaggcgatgtacgcctaacgagtgaagaattgaaaatgtctctggctaatggattgcgggatgccggtaccgacgttgtagatataggcttgagtggtacggaagaaatctatttcgcaaccttccatctagagcttgatggcggtatcgaggtaacggcgagtcataatccgattaactataatgggatgaagctcgtaaaagaaaatgcaaaacctattagcggtgactcggggttgagagagatccggcggctggccgaggaaaatcatttcccggacgttaagctgcgggggagttatgagaagatatcggttattgacgcctatgttgaccatctattgagttacgtcaacttcgcgaatttaaagcccttaacgctggtggtgaactccggaaatggtgctgcgggtcatgtgattgatgcgattgagcgtcgtttcgccgaccatagcgtgccgattaaatttgttaagattcaccatgagccgaacggtcattttcctcatgggatccccaatccgttactgcccgagtgtcgtgccgataccgccaaagccgtgatcgaacacgatgcggacttaggtattgctttcgatggcgactttgaccgctgctttttgttcgacagcaccggcaattttattgaaggctattatatcgtcggtttgctggccgccgccttcctgacaaaagagccgggtgccaagatcattcacgatccacggctgtgctggaataccatcgacgttgtaacagaacatcggggaacgccagtgatgtccaaaaccggccatgccttcatcaaagagagaatgcgtcaggaagatgccgtgtatggcggcgaaatgagtgcgcatcactatttccgcgatttctcttattgcgacagtgggatgatcccatggttgctggtgaccgagttgctctgtaagacaggacaatctttgtcttctctggtggccgaacgtatcactgcgtacccggcttcaggggaaattaatgtgcgtttaaacgatgcaaatacggtgattgaaaatatttgtcagatttatcaaccaggctgtctcgccatcgatcggacggatggtatcagcattgagttcgccgactggcgatttaatgtcaggacctcaaatacggagccggtggttaggttgaacgttgaatcacgtggggacatctcgttgatgaaggaaaaaaccagcgagttactgaagttattgcaagattag

SEQ ID NO: 451454 - DNA, 1122 bp, Serratia marcescens
atgaaagatgaatcattttattgggatatatcaaactcaccttacaagtcagatttcttagaagaaagcatgaccttcggcattaatgaacccatatttttaatagaccaatttaatggaaaaaggcctataataattaatcaagagtttattgataaaggtaatattagcttcaatatgttcccaagcgcgttacttgactcaaacgttattaataaaatagatgggctaattcaacatgaaaaaaaaactgatggcctaatagaattcttgcattttttgtccagaagacaatgggactcaagtgctatgttttattacctcgagcatttctcaaaatcctcagtagagacatttaggaaaaatgccattcgtcgaacagaatcattattaactcttcattccatgaatgatgagatttatgttaaaactggcactatcactccaaatgacgaagctatagctcattaccttctttcatcaaactccagctctctaagagaggtagcagaaaaacgagtagacgacttcataatatcctataataaagaaagtttaactcagatgatagaaactatagagattgctctcataaaaatggttcttataagaaaatatgaaatgaaaaactcatcgcctattgagcagtataacgagtttatacgtttcttagaatatgatctagaaatcatgcttgctagagaagcgcacttgtcacttcattattttttcgataaagcaggtcgactattaggaattcaatcgaatacgcctatcgaaaaagccacttcaattataaaatcaactgcatgggatatatttcttttacgaatgccagaaattatgttccacaataacccagaagaaatttgtattgcatatgtatctacacaagaaaaaaagctacaatcactagcaaaactattcactatagaaaatatagctttccaaaatggggggatgttaccgggagtaagctacaatatggtagaaataccggaaaatgtgaaattaaatatagagctaacgactaaaaaaacaaagaacataaataataaaaagaatattcctattggattacaccaagctatgtttaaacaacttcatcatttatgcaactga

SEQ ID NO: 451455 - DNA, 1230 bp, Serratia marcescens
atgcttgctgaaaaaagtgcggcctccgcgcagccgggcgtcgccgtgaccgccaatctgcgctgggcctttatcctggtcaccagcctgttcttcatgtgggggctgtcctatggcctgctggacgtattaaacaaacattttcaggagacgttgcacgttaccaaggcgcagtcgggtttgttgcaggcggcctatttcggcgcctatttcctggtggcgctgcccgccggatactttatggaccgcaagggctataaggcgggcattctggtcgggctgtgtctgtatgcgctgggggcgctgctgttcgtgccggcggcgtcggccaacagcttcggcgtgttcctgttcgcgctgttcgttatcgccagcggtttgggctgcctggaaacggccgccaacccgtacgccacggtgctgggcgacgcgcagggcgccgaacggcggctcaacctggcccagtcgttcaacggcctcgggcaatttatcggcccgttgatcggcggcacgctgttcttctccgccagccagtccgccggcggcggcgatcagagcgcggtgaagatgacctatgtggcgatcgccgtgctggtgctgctgatcgcgctgttgttcagccgcacccggctgccggcgatccgcgaagaggaaaaaccggtacacggcgtgatagcgcagggattgtggcagcatccgcatttcgtcggcggggttatcacgcagttcttttacgtggcggcgcaggtgggcgtaggggcgttcttcatcaactatgccaccgaacactggcgcgaagtgtctaaccagagcgcctcttacctgctgtcgatcgccatgatctgctttatggtcgggcgtttcttcagcacctggttgatggggcgagtcaagccggcgacgctgttggcggcctatgcgctgatcaacatcgcgctgtgcggcgtagtgatgctgagcgttgacggcgtgtcggtagtggcgctgatcgcggtattcttctttatgtcgatcatgttcccgaccattttcgccctgggggtgaaaaacctgggtaaacacaccaagcgcgccagctcctttatgatcatggcgatcgtcggcggcgccatcatgccgtactttatgggggcgctggctgaccgttacagcaccgcactctcttatctgctgccgctgctgtgcttcgcggtggtgctggtttacggcctgcggcagcgtcgcgcctga

SEQ ID NO: 451456 - DNA, 606 bp, Serratia marcescens
atgaaactttactatcatcctcatgcctgttcaatggctacacatattgcattacgggaatctggtctttcttttgacatagaacctgttgatttctcgacaaagaaaacagggactggtttagactttatgaaagtgaatccaaaaggaatggtaccagctttggttttagataatggtgaggtgttaactgaagttacaaccattctaagctatattgcagacttggtgccaaataaaaatctggtacctaaagcgggaactatttctagatacaagctaactagttttttatcatgtatcagtatggatctgcataagaacttttcggcttttttctttccaacagctatagaaccatggaaagaagtttcgaaaattaagcttgataatgcgtttgaatatttcaattctgttctaagtgataatgaatacctcatgggggataactattctatcgcagatatgtatctttttgttatgcttcactggtgtgattatttttccatgtcgatagatagatggccgaatttggcaaggctgaagggtgctgttagtagcagacctgcggtacagtcaacttttaaagtcgagttgggtagttaa

SEQ ID NO: 451457 - DNA, 909 bp, Serratia marcescens
atggacaagttaaaagcaatgaaaattttcacgcgtgtagtggaaacgctaagctttacaaaggctgcagaaagtttgagcttacctaggaccacagtaactgtagcaattcaaagcttagaaagctctcttgatgtacgtctcttacataggaatactcgcaacctaagtttaacagcggaaggaactcactactacgcagcatgcctgcgtgtactagatgatttagaggatactgaacaagccttccaacatggagcgaaaaatcccaaagggcatatacgtatagaagtatcgaatgctatagcaagaaatataataattcccaagctagtagaattcaacaccatcaatccgaacataacgatggctattagtactggcgatgacattgtggatttagtaaaaaatggagttgactgtgctatacgagtaggaaccttacaagactcctcattaattgttaagaaagttggcacattggacttcattatttgtggttcaccatcttattttcaaaaccacaaaataccccacaacgtccttgacctaaaagaacactccgctgtccgttacatctcacgtcaaaacggcaggcctcttgactggataataaacatcaatggcgaaaacactcaacttgatgttaattccagtttctccgtcaatgatgcagactcatatcttgaatgtggcttgcaagggcttggtctgattatgccggcacgattcatggcgcaacaccatattgcctcaaacaggctaactcaagttttacctgaactcaaaagcccgaaactgccgatctcaattttgtatccacaaagacaccacctcagtcctaaaattaaaatatttaccgagtgggttgcaagcattttcgaaaaaaatgcaatccctcttatataa

SEQ ID NO: 451458 - DNA, 555 bp, Serratia marcescens
atgaaactactacatatagactctagctctgccattcaagcatcagtaaccaggaaactatctgatgaaattgtaaaaaagctgaataagaatggagaatatacaattttgtatattgaccttgataaagaaacaatacctcacttaagattaaacaaagaagacaataaaaacactagcctggatgaaaaaatcctaaaccaatttttagatagcgatactatagtattgggtgttccaatgtacaatttaggaataccgtcatcactaaaggcatggattgataggattgttgttcccggtgttacatttcatcatgaaaataatgtccctgttggtttgattaaaaacaaaaaaatgtaccttgctttatctagcgggggtatctacggcgacaatgataaacacgaacaccaagaaagctatctcaagtcattgttctctttcctaggaattagtgacattagtataatccgtgctgatggaatgtcgattcctgattatcgccatgattcaattaaggaagcgcttgaagagatcaacaaaataacctga

SEQ ID NO: 451459 - DNA, 861 bp, Serratia marcescens
atgtgtattaagatagcaaaagccattaaattcggcgtgttgttctggctgctttttattattactcccgttgggaacgccataaacattcagttggcgctatatccctttgttgagccttcgggcaagattatagatttttccggacatctctatgattggtttggtgaagactccaggcccaatccttgttaccgtgccggaacgtgtgaactggggttacagctgtataccgtaactgcctcaagtggcgaatggtatcaaccttacggcaatgtcagttggttcgccagcggggcttgggtgagtggtgccgagaatctgggcgatatggggaaagccgtgcgaaaaaatgtcaacctgccggtagagagaaggctattgaacggcattccagttcctacttacgggccgtctatggtctgtctggtttaccgtgccaacggtggccccaccatacaattcacgccgggggtttgtagtgctagcgagtgggaggggccaacaggcacctggtgtgagccgaaaggcggtgcgatcacctttagctatggcgtgctcgaaagcgcggcggttaatggccagacccgttcggccctttattcgctttggtgcaaccgcacggtaactgccaaggtttacgccagaaacctgagtggcggtcgcctgtatctaagcgcggaccggcgactttatgccgatctgaccatcgatggtaaagaacttggcacgggcgtgacacaggtatttcgcgagggggttgagtcgagttataccattcagtctaagctgggcagcagcggcaatctccagggcggcgatttttccggttcaacggtggtttatatcgacatccagtga

SEQ ID NO: 451460 - DNA, 552 bp, Serratia marcescens
atgaatcggaatgccctattattattgaccatatacataaaaaatatgaggaatactatgagaacctttaaaattgtaggtgtgggtattatttattctgtgattcttacaatatcatcagcatacgcagaagaatatcgcattggtgatctgactataaatgatgaaaaatcgcatagaagcttcacatttagtaaaacacaaattgaaagtctcccaaaatctactatcacgacatcgactccctggttgccaaaaacaacctactcgggagtcagtgtaaattatatactgaaagcaactggatttcatggtgaacgattaagatttcatgctcttaatgattactgggttgatatccccatgagtgatgtggatacatacaacattatcttggccaataaacgcgatgggcaagatttaaaagtcagagactttggtccatactttgtcgtttacccacttgacgatcacgcctcagagctaagcaaacccatatattactcacgttctgtttggcaagtagaccagattacggtaatggaaaaatga

SEQ ID NO: 451461 - DNA, 1719 bp, Serratia marcescens
atgaaactcaaaaaaatcatcatacaatattttattgcatttttcatgctgacaggttccttttactggatgtatgaaaaatatttttccacagagcataacgtgagctctgcaggacctcaagagaactatgcttgggcaatcgcaaaattctctataaaacttgcctcatttgaggccaagatagaacatcagctaagacttggggcgacgaacataaaaggattacagagagatcttgacattttgttctctggttcaaatgtcctattaaataaaagcgattcgacgcgttacttatacatggaggataattacggaagaacaattacggctatacatgatgcgctcgaagacattgatagaacgttacaaaaccctagaccaaactttgattacatactaaataaaatcggggaaatcaggaagagtaaccttatattaattgcgattgcagatcatgcagaagttaggcaaaggacaattatctacaatgattatttgcaaaaaggtgactctttcaaggttcccatcatagcaatttacatcctatttttaattatgttgctaatatcatttaagcagctcacatcaatgaacaatcaactcgagtctgaaaaaaaagcatttaataataaaaatgcgtttctcggaaaattaggtcatgagttaagaacaacattgcaagccatagttagttctattgaggttattctctactccccaggcggggcaagtaataaaaacgtactgcaccgtttggaaggtatagtatcacaaatagaacagcagatgaatgaccttgctgaatatgctaaaattgataatggttcgataaaaataaataaaagcgttgttaatgttgctgaattgattaatcgaatagtatccgaatgcaatgctagatatagtagcaaaaaattgaaagcggaaattaactgcttacctaaagatttagttttgaccgataatattcgccttaatcaagttatggaaaacttacttacaaatgcatttaagtatacagaggaaggggaaattttagttagcgcacagattaaagatgaacgacatggaaaaatattgaccatagaaattaaggatactggtattggaattgaaaaagaaaagcaaaaggccatctaccaaccttttgttagaatagagaatggttcgtcttcggtcccaggttcaggtatggggctagcaatagttgatgggataataaaagcaatgaatggcaccatacatttaacgagtgaaccaggaattggcagtgtgtttactgttaagataccagttgatataaccatcgcaaaggacatggaaaatattcaaagttcaaacatcattacagatgtcagtaaaggcctatcgattttgtatattgatgacaatgagctaacatgtaacgcgatggtctcaaccctaaatagtgttggatacagagctgaatctgtttgttcagtgaatagagcaatcgaaaagctgatgagaataccatatgatatcgttttgagtgatttgcaaatgcctattatgaccggagaccaacttctaagtttaattagagatcgtgaaggaccaaacaaaaacactccttttatattcttgagtgcttatcctgagagttatactcatgctgaggtgccgcttattgtcaagccaggcaggatatcggaaataactcaagagataaataaaatcattaatgattag

SEQ ID NO: 451462 - DNA, 2724 bp, Serratia marcescens
atgacttttaaacccggtgaacgcgtcagccattttgaatttggccaaggtgttgttatctcggcagcgggtggctacgcccgtgtcttctttccccagggtgagcgacaagtacccgtcagcaccttggtggcggcacttagccataatgagcgcgtggtagctagcattggcagccatacagatagtgacacgaaagcctggctctcctggaaggcgcatgaattaccccttcaggattcagccagctcgctgacttcagccaagattgatttgctaccccaccaggtggtgctgactcatcgggttgcctgcgcgagcccacgtcgctttctgattgccgatgaagtcggtttggggaaaaccattgaaacagcgttagtgctgcgggaattggccagtcgtggcgagcttaaccgggctttaatggttgtgccggcgggtctggttaacaactggcaccgcgagctgaatgaagttttcaatttaaattttgaagtattcggccgcgaaggtgatgtcagcgaccgccgcagtaatgcgtttgctaaacataacctgctgattgccagcatcgacaccttaaagcgtccagcaagaatcaagaaaatactagaagcaccccgttgggatttgattgtttttgatgaagcgcatcactgcacggcctataagcaaggcggcaaaacccgcaagacccagaactacaaattggcggaagccttacgtgaccacagtagagatatgattctgctgtcggccacaccacaccagggcgatcattttcgtttctggaagctgattgatttacttgaccccactttgttttccagtgaaaccgagatggtggaagaacgctaccgcctgaatccaatcatcttccgccgcaccaaagccgacgcctgtaaagccgatggctccacgttgtttgctaggcgctgggtgcataccgaagccttttctatgtcagatcaggagcgcgatttctataacgccctgaatgaatacctgcgcgacggttttgctttggcgaagaagcaaggcggcaaaggaacggctctgggctttgtaatgacgatcttccaaaaaattgcggcgtccagctttgcggcggtgcatcgcaccttgagacgaagactgttggccctgactgttcatgagggcttgatgcacgatgaaaacctcgacatcgacgccagagactttgcttttaatgaggcgaaagaacagattcgagttgagttcgatttaggtcatgaccgtctttctgaccttgagatcgaccgtatattgaatgacatcaagcgtcgcctccttaaaaagatcaatgaagagcagctggctgctgcatccgatacgtttaccgatgagctggaaacagccgccgctgaagatgcggccatggatgctgtggcatacgccctgccagaagagcgattccgcattaaagaactactggggctgttcccttcagcccgtgaaactaaagtagataagctcattggggctttgggtgtgctgtggcaacaaaacccagaggaacgtattgtgatatttgccacctatctgggtacggttgaaatgctgtgcgaccagattgaaaaagcgtatccaggccaaggtgtggttgtgcttaaaggtggtgatcacggaagtaaactcgcggcagaacggcgcttcaaacaggctaatggccctcgcgtaatgatctgtacagcagccggtcgggaaggtatcaacctgcaacatgcacgggtgctgtttaactttgacctgccgtggaatccaatggatatggaacagcgcattggtcgtattcaccgctatggacagcgtgataccgcacaggtttataaccttgtgttgggtgacaccattgaaggtcgcattttcctgctgctggatgaaaaactggaggaaattgccaaggcgctcggcaaagtggatgaaaagggccaggtggaagaagaccttcgatcacagatcctcggccaactgtctgagcaggtgaactatcagcaactttattcgcaggcactgcaagacccagagcttaaacgcacccgactggagcttgaagcggcgatggataacgcccgtcatgcaaaggatgcggtattcgaactattccaggacctagatggcttcagtttggatgactacgcaccactctcagataccagggaatctatagacgatctgattcggtttatgcagaaggcctcgccatacgaaggggaagtcattgagattcggggacaaaagcaattggccctggtgaaagatggcctcgaaaaaatgcggtttaccacggatcggaaagaagcgaccaattcagaaaaattgcatttgattggtttggatcatcccgtgattgcagaacagctcgacaaataccgcaatcttgatcctgaatgccttggtttctcttctagtgagctgaatgctggtgaaaccgtttctttatgggaagtaagggctgccaacgaaaagggacacaatgttcactccatcatgaaacttgctgtcgatggcgatggtaaccggatacctcatttagaaaagcaaatagacgcagtgtttaaacctaagggaaagataggcgctcacgaagtagatttgcataaaattgaagccgtcttggagcgtgaacttcatcaccggaatatcgtgaaacctgagcagtctttctctgccaagctgatctgcttagcgtgtggttga

SEQ ID NO: 451463 - DNA, 507 bp, Serratia marcescens
atgagcgatgtgctgaccaacgacaaatggaagcgacgcggtatctcagtgctttggtgtggcaaaacactggctgaattaaatgctgcaagtcaggtgatcagtctgcgtcagttcatcggctattacgaagcgggctggccggaggatatgcctctgctgaatgacgatggcttatacgtcgcagggttggacgtagccgtagacgctttatcaccagaagatgctctggaatggctggaatccgagatttacgaaatgatctacgactttcagaaccatgccgatgctgcgctgattttctggatgccggatcaggggcgctggaaggaagatctgaccaccagtacctataactggtgcttggctggtaaatacgatgcgcaaatgttcccgttggggcaatgcatctggaacggcgcacaaaaggacgtgcgccggattgaatccgattttggcggaaaaacgaacgaatggctgggtttatacctagagcggatcagctaa

SEQ ID NO: 451464 - DNA, 3270 bp, Serratia marcescens
atggcaactaaaaaaacgaaagcggaactaacgactgagttagtcgcagaagctgttggtgcgggtaaaaaagcgcagcttgaaacggttgatttttctgatcccaatcgccccctaacttgccttgaggttgattttcctattctaccaatcaaccagattgcgcaaatcgaaggcaacgcaggtaagccaatatatcaaatgagtaagtggtgggcacgccggcgctccagtgtgttccgctcgatgttgattgcggctgcgactaaggctcctgaagagccagccgaggcagcaaaactggtttgggataactattacgccaatcaccaggacaaccaagcgttcagaaaattgaaagtggctgacattttcatggggggcggtaccacactggtggaaggtgcacggctcggcatgcagatgacaggcaacgatctcaacccagttgcctggctggttgtcaagaatgaattggctgacgtcgatctggatgaagtgaataaactgtttgagcacattgaacgggaagttaaaccccagatcatgccgttttacgcctgcgaaggccccgatggcgaaaaaggaaaatggacacagcgttctactggcaaagtcatgggcgatgattttgatccgctggctctaacacctgaagaacgcaaagactacgtatacgatggcccggaggttatttacaccttctgggctaagcacgggccctgtgcagctcccggatgtggtcatcgcacaccaattatgaattcgccattagttgctgttaagtcgcttactgttaaagcatggcttggaaccgcctgcacgaagtgtgatgggcgctttgatttagagaggcaccaagcacgaatggcgcctgatgcgccattggtgattgatggtgatgaaaaaccattcagtaccatggatgacaaggggaattttacttgccctcattgcggacacgtccataaagatgaaatcgcagcattaaaaggcgaatcttcccagttgcccaaaaagatttacaaaaacaagaaaatagatctttctcttttcgttaatccagaatggatgaaaggggctgccggtaaagacgatattggacagctcggcggtactgcaaagagtgatgctaatgcaaccgcacgctggaacaaactaagagcaaactcattacgactgattgaagtaagaggaaagacaggcgaacaatttctcgacccagagacaggaaacctaattgacgttaaaaaaggcaatattcccaagaaatcaaattttgcttgccaagaagatacctgcggtcgccaacaggacgttttagatagcatcaaactgtctggctctaacgggccgtttagtagttacttacttcatggttactcccagaagagaaaagaagaaggaaaaccatatggggggcgtttttttgcttctataacggagcaggttattgcccggcaaaacgcgtacttgaaagaatgggaagtaagaaaagacagtgatttggcaggctattggcccaaaagtgagcttccctatggattcatgacccatatgaataatggagggataccaaatcatgggtttacgcattggcatacaatgtttaaccctttgcagctgctaattcattcgcaaatattaaaagcaattgatactgcttatggcttttcagatacggcgaaagagattgcaattggggcatttcagcagtatctgcgaaaccaaaatatgttctgtatatggaataccaccgcagacaaaatggaaccgatgttcagcaatagtaactaccacccaaaggcgacagtggttgaaaattctgtttttgcgaatctggggcgtggcaactgggcgtcatgcagggcaaataccatttcaggattagcatgggccaaaagcccatgggagatcgtgtcaaatgcccatttggtaaccatttctgatgacctagcatcctcaatttcaggtaaaagtgagaaggcccgcttagatgataatgttttacctgggacaaaagtaacgtgtggttcttcaacagaattacaacacataacagacggcgagctagacctggtaatcactgacccaccatttggaggcttactgcactactccgaactagccgatttcttttacgtttggcttagactgttattaaaggataaatatccagattactttgctggcgagtatacccctaagacgttagaggctgtcgctaaccgagctcgtaatcctgacgatgccgatggattctacaaacgcattctcacggagtgctggaaagaagcgggtcgaatgctgaagccatctggaatactgtcattcactttccatcacagtgaagacgaaccttggctggatgtattggagagtctcttcaacgctggttactacttggaggcaacctatccgatacgtagcgatgagacaaaaggacaaggagctaaaccaggtacgtttgggtcccaaacgattgagtatgacattatacacgtatgcagaaagcgggttgagtcaccaaaaaaaatctcttgggctcgtttacgtcgtcagatcttagctgatgtgcgtcagttacagtctattttagagcaccaccagaatggtggtttgcccatggcagatatacaagttatcaagcgcggaaaagcacttgagtatttctctcgtcattatggacaagtgtatgtcgaagatggacgagagtttaccgttaaagaagcacttgttgggatcaaccagattttagacgatcaaattgaaggggacgggttaggcacgcctgtagtatgtgaacctatttctcgtcaattcttgagaatattttctggaaaatctgaaatccctcgtgatcaaatgcaaaagtatcttaagggtacaggaattggaccgagtgacttcttggctcgaggctggacggaagaaaaaaagaaaatcttctactgggtttctccactcgaatttgctagagaaaaaatagataaaaaaggcagtttgagccgcgactttgatcaggccatgttgcttattggtgcgtgttatccagaaagcggtatcaatagcaagaaaattctggatgaagacttcaaacctcaccccgcattagggcatctgttggattggcttattcacaacggagccgacttatctatgcgcagtgcctgcactttggcaaggcaattgtttaatagatgggaagctgatcatcagcaggttatgcaggaacaaatatcattgtttggtatggaagatgaaatatga

SEQ ID NO: 451465 - DNA, 999 bp, Serratia marcescens
atggataagtcactgatcgctgatatacacagactgcccgcagaggaagcatggccgaaaattttttcggccctctggcccctgtttgcagaaccgatccggcaggatctggcggatgcaaaaacaaccgaacgggaccgcgccatcaaaccattagatgacgtgttggcaggcagtgcctgggatttgtgggcatcgttcgagagtgcttcgccaaaaacggcagatgctctgaaagcattctggcaacgccagacaacaccgaaagccatcctgattctggatgcactgtcgctccgcgaagcgccctggattctcgaaagtgcgcagcagcggggctacacagttcacagcgccggtgcgaccgcctctgagctacccggtgataccacgccgtttgctcgtgcaatggggtttgggcagcgcaccagattgcaaaacaaccaggggaatagtgctgctttccctgaagccttcactgagtccaccgacttgccatgggtggattgtgcatctctgatcaaggctgacccgaatattattttctggcatcactggcctgatgaacgtatgcatcacctggcagaacagggagcaggttatcgggtgttggcgaaagaagccgcagccgtattaaccggcgatgaattctgggccttcatcgacaaactagccacgggccgtcgtctggttattactgccgaccatgggtattcaaaccccgcgttgtttccagatgtttacccggaagaccaaaaagcctatctgaaagggcaattcaagtctggccgcaacagcgaagtgaaagacgcaaaagctgaacagcattgggtgccaccattatctcaggtactgacgacgcagcatggcaattggaacatagtactgggccgcaagaaatggcgttcacaagggggctacccaagcttggctcatggtggacttagtctgctggaagtagcggtacctttcatcgaactatcgaaacagaataattag

SEQ ID NO: 451466 - DNA, 2682 bp, Serratia marcescens
atgctaggactgaagttacgtgaggagttttctggtcgtcgtattaaaggaacgatgatcgaaatgcataaccggaatggcaccggtgcgctcgataagtctgcaagtgaatttctgaagatcacttacccttcaatcgacatgcttaagactgtggaggctgtccaagctggacgggccgaaccagttgttattattggtgcgaggggccaaggtaaatcacaccttatggctgcactgtcacatatgcatcaggataaggatgcaacagtaaattggttgaatgactggtctgcccgactgaaaaatcctgacattgcgggtctcaaattacagtatggcatgcatgtcattaccgaaagcttgcacctgcaacgctataagcatgtatgggatgttttgttcgaccagcatccgcatggcaatatcattaaagccaagtgggaggtgcacggcaccgaggttccaggttatgacctgatactggaaatggcagagaataaaccattcatccttattctggatgaattccagacgtggtttgaaggcttaacaaactccaaccaatacaagcgaaagacctgggcgtttaatttcattcaaatcctctcggaaatatctgaaaagcacccagaacttctgacacttgtcgtatctgtgcgcgaaggtaactctgatgcggcgcagcagctgttccgagtaaatccggtgcggatcgactttaaagggccggaagctaagcgagacagacagcgcttgttgctctaccggatcttcgaaaaccgaatgaatatcccagagtctgatattgcttcactgatcaaaactcatgtggatgagttcctgcgtttgggtcacatctctggctccgagcatgaaaaacatagacagcaatttatcgaggcctggccttactcgccaagactcctgcaattgctggacgatcaggtgcttatcgcaaccgaaactcaagagacacgcgatctcttgcgtattctggtggatgtgtttaaggaatctggtgaagacacagccatacttacacctgccaacttcagcttaaccagtgaaaaatcaggcgttacgtcactactggattcggtagcgagtcagctgcatcgggatttgcgtgagaatgcactgcgcaacctcgaagctgttaaaaacggtgtacctattgctcatgtcccacatcttgagcccattctttccgctctctggctgcgttctctatcattggagaatcatgccggtgctgagccgtcagaattgcagctggatattactgagcgaaaagcgattgatgacaacctgtttgccgctgagcttgcagtcatcgaggacaacagcttcaacattcaccgccaagccaaccgtttggtcttcaagaacgaggtgaatccacaggccaagctgttagcacatgctaaaaacgacaagctctttcaaaaggatgaggatgtagaacacctcgccaaagagattcgttacgccctggttggggatggcaatcagtcgaatatctatcgaaccatcgtattaaagaaacagtggcgcacttcgccatgggcggatattgaagaaaaagaccatcctcagcattgggataaccggattccagtgattgttatgcccaaggcatcgctggacaacaaagagctgggagaatggctgaagacacatgttaccaaggcaagaaacactgtgcgcttcctgctgccacgtgtgggtactggcgacattttctacgataagtctttgctggtattagcccgtgcggtttatcttgctagcgattggaaaaactccgagcgtgagtacgctcaattgcatctgaaataccagaaggaactgcgtgagcagttgcaatcccgctttgatcgttttgcagtcttggtcgtatggaatttcgcagacccatctcaatgcgaatttgagatttcacagcacggcgcagaagggttacagatcctcgaaaagctggatgcaaaaatctgcagcgagctgttcattccagaagaattcgacaccatactgcttgatgccgcgaccaatagccgtagcgtggccgaccttatcgaacagctcaaagagccagccccaaaaggtgcagaaagcattccttggcttggtgaaacagccgttaaagagcgcattgggcgagcctgtgcagaaggcaaaattgccatcaacgccaaaggcagtctgtacgagaaaaagccgtcagaaaccacggatgatgcttggttgcgagtacgtgggaaactgggcagtggtaaagatctggaagacacgacactgcacctgcccggaggctctgttggttcaggcggctctgtccctgttcagcctgttccaggcgtgccagaagaattcaccaccggtggtgttaacaagccaaccgcaggctcaggcaatggcggcactgcatccggtacgacaccaacgccgggatcgctattcggtggttccagtggcggcttcgttgctcatcacagcgcccataatacatccacattgagcttgctcggtaagcttgaacaatggggcattaacaaaggcagtaaggtgaaggacgtaaagttgtctacctcgcagctcactggtgcacagttagagcatctgctaaaaaacttaccggatggtgttacttactctctggatttggataaagaacaatga

SEQ ID NO: 451467 - DNA, 195 bp, Serratia marcescens
atgagtgagcaaataatgaccgtcaaggatgtcgcgtcgtacctcaagctcaacgagcgtactgtctatcgcatggccacagcagcaaagatcccagcgttcaaagtgggtacctcgtggcgttttaagaaagaagagatagatatatggatagcgcagcaacacaaccaaatatcaagtaataaagagagctaa

SEQ ID NO: 451468 - DNA, 276 bp, Serratia marcescens
atgggggagctgtcagacttctatcaccgatacctgactggtgaacttcaattttcggaaaacttcggaaaaacctggagcaaggtcgaagaaaatgttctttacgacatgattcattatgcctgcactgtccggcagatagccgttgagctaaaacggcatcctgtaagcgttgtcaacaagctggcgaagtacttggacgatgacagtatccagaatcgcattactcaggatttttacgatgtccctgtgcgggagctagtgcgatggtggtag

SEQ ID NO: 451469 - DNA, 210 bp, Serratia marcescens
atgaaagatccaagactggtcgcttttggcgagaaggttcgccagatacggaaggaaaaaggcctctcgcaggaggctttggcggacctagcgggtatcgatagaagctatatgggacatatcgagcgcggtgaccagaacatcaccctgacgaagatccatcaaatcgctgatgccctggagattccgatcgtaaatctcatctcttaa

SEQ ID NO: 451470 - DNA, 732 bp, Serratia marcescens
atgtggccaaagctctttgatgacaaggagctgactattaccgaagctgatctggaaatggccaacagaatgacatttggccttgatccagagaagtttgccgtaggaaaagtctggccccttgcctggcatcaattacgacgcaccggtgctgttaatatgctggccagtggattggtgaccgaagcgtctcttcagtatcagctgaaacatgcctcacgcgccatgagccaatactacgggaaaaactactacagactcaaagaacctttgaatgacgaggcgcgtgcgtattacttgcgtgagatgtatcaatcaatggttcgggagtttaaagcgcttcaatctgatcagtatgtttcaccgcacggcgagaggcgaaagcagcagattctctctgaaatgtcggagaaagatcatgagcagttgctcaaagccgcaaaagcaggactgatcagctaccgtcaaacatttcttggtggctgcgccaattcaggcccgccttgtccactcggggggatcagcaatatcagttcctgtatgggatttagcagcaataagccatgcgcatcggcattgttagataaagccaagctaccaatgattaaacagcttaaaaacgttattactattcagatcagtgacgctgcgccagactcctcgttgtacgagtcattgcgagcgcaattagaatccgcagagcgagcaatccatgtcatcgaaagcaattga

SEQ ID NO: 451471 - DNA, 1326 bp, Serratia marcescens
atgaatttggcttacttcccgggattgcagattgaatcggccttatcaaaagaagatgcgctgaattttaaacctgacagctggccccctgcgccggattttcctgctgtgatagatgcctatggccatgttgtgtctcgatatggtgacgtaagatgggatctttcaccttggtctgggcacaccctcaccattcactttggggatggttctggtcagggaaaaagagttagccctcagaacgcggagttattgcgtaaagttgtagcgtggtggctttggggcgaagcggctattcgttctgccaaggcattggtgtttaagtttgagacgataaaacccctgtttgtggcctgcacagatgcaggtattctggctactgagctctatagatatcccaaggtcatcgagaagttatccgaatattataagcaacgcggaaatcgcttgattgaatgcctccattcattattcatcgcacgagagactttggggtttgtcttgcttgacgaaagcggaattaaactacttagcagcgtattaacaacgaatgattcgacgcagacagcttatataccagcgaggatatggagttaccaggtttcacgtcttcgcgaatgcttggaagactttttgttgcaccaagaaaaagttgaggcctgttacgatttttgtttgtcagcttatgccagaaatgctggaggacatttatctaaatcattcaatggcttgggttgtgatggaccatttagagactcgcgagttataggcgaaagcagaactggaaaaatcttttatgggtcatttacagagacagctgaagaatttggtatatctgaattgcttgatcgttgggtgttgtttaataaagttactggcatcagatcacttactacttacctctctttaattagtagtgttggattggcttatctattgaacttttctttgatgcgaattgaagaaggctccaaacttcgtgctgattgttatgaggttgaacgtgatcagctaggtgaagaaattcacatgctaaaaggtgtaacaacaaaaaccattgaagattctgatgctcgctggattgtttcgcccaccgttgaaatcgctctggcagcaatgaaggctgttgcttttatgcgattaaaggcagcaagagagaatccttatttagaattatcaaaggaagatgtcgagaacccagttcttcaatctattcagcatgaaccatggtgccccaaagcacccaaatctcaatcaaccaaaaaagtacaaaaagattcggtcatacggcgacattgccaaaaatatgtggccaaagctctttga

SEQ ID NO: 451472 - DNA, 1731 bp, Serratia marcescens
atgcatgagttaaatcttacttttccgggcatgagtcttggtacgcatcaaatcccttggaacctgaacatattgcttcatcatggtgctgcatgtgtaccgagaaaaaatgcgatggaatcgatacatcattcctcagtcgatgatgttgacgttcttcgaattccgattgtatgcgcatttcatgaagctatttccagcatgataagtcaggggcgctctcgttcacttatcgaaggcagtctggaagtgctttggcggttctttgcatggtcagataccaactcattgactatgtctcgagataaagtggtaaccaacttcaagaaatggtcggaataccagttatatagatcaaaaatcaaaaaggaagtgtctgaaatttacgtttacagacagacttcaaagttagccaatctcatcgctagagccttaaaacttcctggagctaagcctggcggcgcacttttgatgcaaacaaggatcagaaaacctagcgcaaaaaagagcgtactgaccagcagcgcagataagcaaaatctcagcagtacatttgagtttggtcattgcctgaggtcgatctgtgacgccttggattgtgcgacggtcagaggacggctacctatccgtattgcgctgcaaggcggcaagaccttggtggttgcaggaagcctccttaatccggaaatggatgtcgaatctataaagtgcagcaccgtcaggaaaaatgctgagaaagccagagcgccactgacggagagagaaagccttttcgatcggcataaaagatcgggaatactaaatctgagaatagaatctgagcttttgatattcatcgcacaaacagggatgaatctgactcaggcatcagcgcttgaaagagaaacttatcgttggaagtctaacggtgacgatctggaggttttccgcgtatacaaggggagacgcagcggcgaagctgtttttcgttgctatcgctcttataaggaacatctcgagcgatatttgcagtggctgaatgacacagggtttgctgaacacgatacccggcttttccctttacaaagtcgaggcatgattcgcgcaaaagattcaaagattggattctacacattgaaagaatccttcaagaaaattgatgctcggattttagggccacaggagctgcgtaaaaccagagtaaactggctactcaggcgaagcaaagatctcgaaattacggctgagcaaatggcccatgataaggaagtccttctccgtgattatgaaaggccgcatcatcaatcagcggcatccgaaatagtccggttccatgcatcaacagatcctgcttatacaccacctgggccgggtgtatgtatcgacaaagatcgcgcccccgagtcgatcaatggtatagctaaagaagcgccgaaaccagactgtaccagcccagaaggctgtcttttttgtactaagcatcgagacgttatgagtcctgattattgctggaaacttgcctcgcacgcaaagatcaagagcctggaagcaaacctgtataaaccaccggaaaagcaagacattcatcctgcataccgggttattgaaagaataagcaaaaaacttgaagcaatagcgtctggcagcgaaatacgagcaatgtgggtaagtgaatctcaggatttgattcgtgccggtaaatatcacccctattggagtggccatatagagctgatggaggtaattgcatga

SEQ ID NO: 451473 - DNA, 1266 bp, Serratia marcescens
atggcaagccttgagcaaattaactaccagccacaccgagcagaaatatcagagggctcgttgcaatggtctccattaaaaagaaaacccattaaaaatcttccccaaatagtctgggaagataactcaacttgggctgaagctaatctttgggccttggatcaagcaacatcatcaaaacgggatctgaaaaccgttcgatccaacatgtcccacctgcttgcctatgctaaatggctagaagcagagtctattcaatggtgtcacttcccagagcgagaaagtgagcgctgcctggttcgctttcgcggagcacttgttgccgccagaaataatggtgagcttgctccaagtaccgcatcccaacgaatggcggctgtcatccgtttctataaatggacacaattgcgaagattaatttcaccagaatggccaatgtgggagcagcgatttgttggaatcaaactaaccaatccttttggtctcgaacataccatgcgagttgcaagtacagaccttgccatccccaatcgaaaggttgctggggccatacagcttgaggatggccttctcccagtaactgtttctgcaatgaaagaaattctcgcgcaggcagatcgcagcgcaaccgaagagctttcgctaatgctacgaattggcttttttacagggttgcgcattggctcaattaccgatctgaaggttcaaactcttcacaacgcaaccctggttcctgaagtcggttggaagcgattagctgttggtcctggtgcgaggccaatggtctcaaccaagtttggcgtttccggttcagtgccaatacctgaggagcttctcgaaacacttattgcctattccatgagtacgagacggctgaaacgccaaatgctagcgagtcatgaagatagggacctactattccttactcgctatggcaactcgtacagcggagatgatagccgagcggttaacgtggaaatgtctcgtctccgatcatctggtaaaagggctgggctgcaagtgatgcgcggttttcatttccatcgcacaagagctacttttgccacagagttaatgcgcgtggcgctaaagttcatgccagtcggtgatgccatccagtttgtaagggaggcatgtttgcaccgagatgaaagcacaacgatgaaatacatcaagtttattgaagcaaacaaagcaatggcagatgcagcggaagctttttcggaagcctttatgggattggctagagggcgtgtcaatgcatga

SEQ ID NO: 451474 - DNA, 699 bp, Serratia marcescens
atgtcattggaaaggatggaaaaaacaaacaaccctgaagtattcgacaggctcttgacttttgttgagtcagataccttcgcctgtataggtgccaaaacggcgattgtaatgcaaacgctgatacacagagactgcagctttgaaagtaaaataaccctcaatgatgcatatggcttccttaaacaattctgcagtcaacgggaattactgagtcgcacaaacagcacatttgtgttgaccttcagtgatacgctcatcacggacgaagatgcgtttgagtcgtttctatgggaaacactgcaagccctccataagatcgatgcagattcaggtaattcctggagcggagagtgttcatccgacccactttcgcctcagtttggtttttctcttatgaatgagccttttttcgtcgtaggccttcatccgcattcatcccgcaaaagccggcagtctccctttcccgtgctcgtattcaatgctcaccggcagtttcgacatctcaaagaaattgggctgtttgaaaaaatgcaaaaagaaattcgcaggagggaaacctctattcagggtagcctcaatcccaatctcagcaatttcggagatgagagtgaagctcgacagtatgcgggaaatgaaacatctgctggctggaaatgccctttcagtaaaaaaaattccaacccccgaggtacataa

SEQ ID NO: 451475 - DNA, 756 bp, Serratia marcescens
atggacaccatcattgttaccggagcctcttctggctttggtgaagcaattgcaacccgttttctggatgaggggtttaatgttattgctcttgctcgaagagcagaaaaattgaatcagcttagtgagcgttatccagggcgggtgcttcctgtagtcattgatattaacgataagcatggcgttcaagaaataatcactaaccttcctgcaaatttcagtgaggtatcaggactagtaaataatgccggattatctctaggattcggccccgctcagagcaatgacattagcgactgggaaaccatgattaatacgaacataatcggtctggttaatataactcatctgctattatccgaattcgttaaaaaaaaccgcggtcatgttattaacataggctccgttgcggcaaattacccttacatgggagcaaatatttatggtgcaaccaagtcatttgtgcaaaattttagtctcaatctgaaaactgatcttgaagggaccaatgtccgggttacatgtattgagcccggattatctaaaacagaatttgcactcgtacgtttcaggggggacaaaaacaaagccgattctctttacgaaaacaaaacttaccttacacctgaaaacatcgcagaaaccgttttctggacatattctctccctcaaaatgtgaacgtgaatattcttgaaatcatgccgacagggcagtcattcgcccttggatttacgaaaaaacaggatgcaaaatga

SEQ ID NO: 451476 - DNA, 1032 bp, Serratia marcescens
atgagtattattaacagctatagcgactggggaaaacttgaagaaattattcttggcagccctgagaatcttactcttcccgatctggatatttcctctcgccatttctttgatttgcaggacgaattcagccaggaaaagaatgcagcgtctgtggtcgctaaagtaaagcatgaaatggaagaggattttcaggaactgacctccatcctgacggcttatggagtcaaagtcagacgtcctgaagctgtcaaacttggcgtggaatgccagagtcctcactggaagtctcagcagtcgcacgcgcttatgccgcgagactgcctgctcgtactgggtgacactctgatagaagcccccatgccctcgcggaaccgctactttgaaagcctgtcgtttcgtaatattgcacgcgaatatttttctaaaggcggtaaatggatggcggcacccaagccagtactcactgatgacacctatctgtgggatgaaggcgtaccttaccttgctgaaaacgacccgctgtttgacgcagctaacataatgcgctgtggcaaggatgttttctttaacatcagcaacagtggtaaccgtgccggatttgagtggcttgagagaactttcggcgataaatttaattttcacccgatgtcaatctgtagcgatcatgttggcactaccttacagttgttgcgacctggactcgcccttgttaatggtggccgacttaaacctgcagatcttcctccagagttgcgtaactgggaaactgttttcttcaatgaccccattgatattggccatgcgtttgactggccccgagcttctgtgtggatctctatgaacgttctctcggtggatgagaaaacagtaattgtagaaaaaaatcagcacaagctttgtgaacagcttgatcgagtgggcatggaggttattcaggcctcattccgtcatggccgaacagtgggtggcggtttccactgctgctcactggatgtcagacgtcagggtaaagcagaaagctatctttaa

SEQ ID NO: 451477 - DNA, 672 bp, Serratia marcescens
atgagcattgaaactttactcttcaagggcgctataaatacatcatgcgaaaaacctgaggtgttttctataaagctatctcgccatgacccctatggatacaaccctgaatgctctatttttaatctaattttctctctagatgaaacgcatttaatgacattggagttcgtcaatctgcacgacctctgctatttaagagatattatctattcagcacatcagtggtgtaccaacggcgttttgatggcgatttccatagctatgaaattttcaggatttcatgaaattaaagttattgggagctaccttttcggcagaatttctgagcttaagaaaaacaacaacatatttaaagaagttattattgttgaatcgattttcaagggtaatttttgctatcttattaaatatattccttctgaaattactatcgtgcataaaaaagaagtattcagccctgatggagggaatagtttactggattcagcactagcctgcggcatcgaattaaaacacatgtgcagggcaggaatatgcatgaagtgtcgcaaaaaaattgtatcgggagcttgtgttgaactgatactactggatggcaatccgatgctcaaagaaacccatctgcttacgtgtaacacactagcattaacttcattggaaataggataa

SEQ ID NO: 451478 - DNA, 645 bp, Serratia marcescens
atggaacatactagtctactcgcctttgctcttgccgcattactcctcaatctcagtccgggtccctctctgctctttgtcagtgcacgaggtatgagtcaagggaaagccgcaggtgcggtttctgcgctaggccttgccactggtagctctattcatgcagtacttgcgggcctaggtgttacggctatcgtggcccagagtgcttctgttgctaatgccgtcgcgttgattggtggtgtatacatcctctaccttggctatgaatctattaagtcggcacgagatacaggcagtggtgatggggaaaatggcgttaagtctaaaaaaagtagtctcagtcgcctgtttttacaggcagtttcagtagagtttctgaacccaaaaaccatactattctatctctctatcctaccgggactaatcctcagcggcggttacactcccgtgcaagcactcctggtttctcttatcgtccccgcaacagcgctcccagtggatatcaccgcaggcctgaccggtgggctgctggcccgcatgtcgcaacgtaacaaaacgatgactgtaacacttaattatgtatccggtgcggcactggtcattattggtctgatccttctttataaaaactttatggcaggatga

SEQ ID NO: 451479 - DNA, 687 bp, Serratia marcescens
atgtatttctcaatcgaacaaagcttggcagaagcaggcctctctcatgcgttgctccttgtagtgaacggaattatcgtttcaccctcgaaagaggaattcaagaacaggtgcgctgacactgtgacgggtaatcttccatctgataatgataaattcaacaggggaatgcgccagctgataaccaaaaccacagggaaaaatactttcttgactgcaggtgaaaaactgcgggataactttatttcaaggggatttcgctcaatcaataacgtcgttgatgcttataatgaggctgcattttactacggcattggaattggtggccacgacattacatctcttaatgagaatgcacacattgaaattcggctctcagaagagaatgagaaaataacccctttatttaagactaagtcgaaaaatattaagccgaatgaagttgtttatggagaggggaggaacatcatggcatggattggcattcaagatatggactccgaagagtttcgaattacagaaaagagcagaaagtgtgcatttataattatgggcggccccgaggtggcgcccacggaactttatgcagtaagtaatcggatccgtcgtaacctcattgacgcctcatacgaatttgactcgaaaacctatgattctcaggaactctacttcaagacgaggagctga

SEQ ID NO: 451480 - DNA, 759 bp, Serratia marcescens
gtgagtaacattaagtttttatacacctaccctttaaaatcaggggctgcagtttcacaagtaaatgtaagtggtgacactgcaggtattacgggagatagggagttttgcctttacagtccgaagcttaagagatttatttcgatgcgcgacaaccttaatattgtaaatttatatattaaggtggatgaaaaccaccttctcgtccgcactgctcatacagagatgttatttgacgcccaattttcaagttccgacaggattcgaatttggtcacgggatgttgatgtcttcgttatgccccaggaaatatcagagtacattagttcattcatcggggaagatgtcatcctctccagacttaaatttccgggagttatacctcagagttttatggataccggacctatacatcttatttcccaacacgcacttgaatccctttcatcagcatctggttataattatatagacccggcaatttttcgtccgaatctagttgttcctgattttaaaggtttgcatgacgataatattgatgaaatcattatcaatggtgtggcatttaccgttactgagcgaaccgaaagatgtaatgctgtaccgctacttcataaaaaactccaggacatagaaaactcttctctacttgaatatcttgatgaagccagtgattatgaaggcgcttattttggactatatctgcaagcaaagagtaaatttaatataagcatcggtgacgaattgactttcagttaa

SEQ ID NO: 451481 - DNA, 348 bp, Serratia marcescens
atgaaaaagcaggctaaggtgattattttggtggcagttatcgcgatcgctattgtgattttttggccgtctgcacccaagcacaattgtcttcagagcacggatgcaaaagttcaggaagaagtgaagaacgcttttgtcagcatgcttccacgctggccttcagcacaagagcagataggaacgtcagccccttcattctcatggggtaaaatcccgcgtggcgccaaccccggcaaagacgacacgttgatggttccctttaccgccagcggacctgaaaaatctcatggctataccggtatctacgtctgtgatacgggacatatcgagttttctgtggactag

SEQ ID NO: 451482 - DNA, 822 bp, Serratia marcescens
atgtcagacaccatgacagttgtcggtacacccaccggttttgaacctgcaggttatggcggtggtctgtctgatccatcgatgccaaacaccggtatcagttcaggtcagcttcatttgcaggtcaccttgccttattaccagtcaccacaattgtgtcaaagcgcaatggcctggctggccaaatatgtcaaagaccatggagcgaacgatccgctaaccattcaggtggttgcgaacaatattcgttgcttcgtgaacgcggataccaacctggtacataatcgtcgcctgacggtgtatgacgcctatcacagcattaatccgcatccgtcaaaatacgactaccactcgatgagcctctatcagatgagcggtaatgtcgttacgccggcggccgcttttggtcactatctgtggggggaggggcaggaacgttacgtaaatctgccggatgtggggttaaaggttgctcctacgcagattgaaccgttgatggccatggttaattccggtgtagtcggcaatattccgtttgccgctgattttatccgcgacaccttcgttgacgggattattccgggctcatacctgggtcatatcaaactgcgcacggaagggactctgtccatccagaatggcggcgcgtggagttataatggtgtgatccgcgcttataacgattcgtttgactttaacctcggtaatttccgcggccccattgccgagtcgatgacctacctgggcagcttgttcagcgggaccgcgtataacattgcgttgcctggccagattgcaatttcgggcacaggccaacgataa

SEQ ID NO: 451483 - DNA, 516 bp, Serratia marcescens
atgaaacaacccgttattgtgttaactctgatactgactggtattggccccgctctggcacaaagccaggtcgcattctcgacagatggtagtgctgagcaactggtgatccagacgctcaatgaggcgagtcggtctctggatctggcagcctatgcatttaccagcacgccggtggccaatgctgtctacggagcttggcgacgcggcgttaaggtgagagtgctggctgatgcgcgctacgcgcgcgagcacaagagtgcggtgtccacgttggccaacctgggcgtgccggtacgtatcaacagcaggtataaaattcagcacaataaattcaccattatcaacaatgagatagtccagactggctcattgaattataccaaagcagccatgattggtgacaacgcagagaatgtgttggtgatccgcaacgaaccggcagttagccaagcctacctgcgtgaattcgaacgactgtgggaagagggggaagctgtaacccagcgctactga

SEQ ID NO: 451484 - DNA, 522 bp, Serratia marcescens
atgtttgtgacgctggtcatgaccgttacggtcgttgtttttttgtttgtgatcctgtcctggcttccgatgatgcagccgaccaatgccgcattacagcgttggacgcgaggggagactgagggaccctacctggtggaggccacgaaaaatattgtccaggtgttctgccggcatcaccggctgtctgtggggctgagtaatgctgtcgtggcgctgacccatcggccccggatgtttccgctgatgctgtgcctgaagccgaccctggtccgttttgaacaggacagtttcgtcaaagggtggcagttgaaggcgctgatgcagagcatcgtagtgattgcgctggtgttcccgttaacggtcggttacgcggttaatcatcctgtcctgatgttattcccactgctgaatatcgtggcgttcatcctgtgctggagcctggttaagaccgcgctgagtgagctgggtacacttaatatgctgttgtcgcacagctttcagcatttatctgaaccctga

SEQ ID NO: 451485 - DNA, 5118 bp, Serratia marcescens
atgctatctgtagccaatgttaaaagtgccggcggcgctgcgagttactacgagtccaaagacaactactactttctcggcgagatggcgaccggctggtacggcaccggcgctgagtcgctggggctggaggggccggtcaaaaaagatgtgttcactgcggtgctggaaggcaagttgccgggcggggctgatttgacccatatggtggatggagttaacaaacaccgtcccggttacgaccttacgttctcggcacccaaaagtgcctcggtgttagcgctggttgccggcgacacctttctggtcgaggccttcaacaaatctattgatatcaccctcaatgaagtcgaaaaactggcttctacccgcaccatgaaggatggggtgactgaatttgagcagaccggcaatcttgtcgtggccaagtttctgcatgacacctcacgtaacctcgatccgaacctgcacggccatgcggtggtggctaacgccacgctgagcaaggacggctggaagacgctctctaccgatacgaaaaccgggcggggttttaccgacatcgtatggcatcagcaggtcagtatcggcgctttccagcgcggtgtgttccgcggtctgctcgaggaagccggctacccgatcgtcgacaccggtccgcgtgggcaatgggatattgagggcgtgccagtcacagagttttcgtctcgccgacaagaaattttggccgcagtggggccagacgcatcggccaaagccaaaagcatggcggcgctcgacacccgtcaggccaaggatttcagcaatattgaggagtttcgggaactgtggcaggagaagctgcaaactatcggcttcaatcatgctgattttgaggcgcagcggctggcgcgggcagttgagcgagcgcagaaggaacatgacctgcaggccggtccagctgaaaaaccgacgctggccttggccgtggccaatgccatcgacgtgatgacgcgcaagagtgtgcgctttacctacgacaacgtgctgaccacagtgctcaatcaggtggcgattcacgacggtgtattgattgaagctaaaagcgccctggataccgccatcgaaaaagggcagctcatcgcagtagacaaaaaccagaccctattcacctcagcagcgcatgtgcgcgacgagcatcgattggccgcgaccgccggccgattggcagagcgcgaggcgggcctgacgagtggcaccgcagaacagggcgtggcagcccgagtggcggatggcaaccgtggcctgactttggttgatgcacgcgggggccaggaatttcagcagcagctacttgccagttttggtcgactggccgaaaacagcgatcgtcaggcggtgttcctcactgctgacaaagggactcagacccagctgagcagtactcttggcaaaagcgcctctaccgtgatgacggccgctgaactggcagagaagccgttagccgcgaattcactgttggtcattagcgaagccgaacgtttcagcgtgccaatgatgcaggctgcactgcaggcggccgaccgcgccggtacgccagcagtggtcatcgatacccatgctcgcaggacaacgggctttgcggccgaggtactgaaagctgcaggaaccccggcgcacctgaccactcaaaaccgcgaacagagccggctgacgatggtgcacaaggatacggtagatgaccggatgagcgtcgccgcacgctatgtagccaaacaacgtgccgctgggcaggcggtggtggcgcaggccggaaacagccgaacccgcacgcaactgacccgcgagatccgtggcgcactgcaagaagatggcgtgctgggaaaggcagtggccaacattgatgtgttggtaccggtgtggacggacaacgacacgcgaggtctgcgtagtacctaccaaccggggatggtgttggagcggctgcagcccggtaatgtcatcgaacagttgacaatcgtcggcgtgggcaaagagaaccatcgcctgaccgtgtcagatgctcaagggcagcgccaggggttggccatcggcgccattgacagccgctatcgactgtaccagccaaaaacattggaggtacgggaaggagagcaactgaaggccaccggtgcgttgcacagccgaagcaaaaacggcgaggcattgaaggtggttggaatgaagaccggtaactggttgttcaaagaaaagctggtactggaaaaggccaacggcgaccaattgaaggtcggtaccgatgccccccttaaacttgattacggctatgtcgaagcattgggggcgagcagacacactcgtggtgcggtggtggcggtgctcagcggaaaggaagtcagcgatgccaccgtcaaccagttgcgtcgcagcggtgacaatatcgtcgccttcacaccattggatgaagccgccattactgcccgactggacaaggagcgtcctggtgtctccatcacccgggggcttcgcagcctcacggggcaagatgacctgacccatgcgttgcgcgatctgcagcaatcacgactggcaccacagacacgtgcgatgcacctggccatcgaaaaggtcacaggcactggcgtcaccttttccacgttcagggcggtggaaaacgcgatgtcttttgatcgtaacctgacgcctcagggggcaatggctgaactgggaaggttggagcggcggggcgatatcatcgcactggacggtactcagggcgccgccggggattacgtgtcgcgtgcgaactggcagaacgaactgaccattctgcggcatattgccgagggaaaacacagcgtcacgccattgatgccaggcgcccgtgaacaactgcagacggagatggccgggttgactgcagggcagaaacaagccggcggcctgatcctcgagtcctccgaccgctttatccctatacagggttatgccggcgtggggaaaaccactcaattcagcgtggtggccagcgccctgcagcagttagacagcccaccgcaggtggtggggttggcacccacccaccgggcggtgtcggagctccagtcggcggggattgatgcgcaaaccatcgccagcttccttggcgaacaggaacggtatcaggcgcggggagaaacgcctgatttcagcaacactgtctttgtcatcgacgaaaactccatgaatggcaacgcgcaaatggcggccctggtggacatcgtcgcgcgtggtaacgggcgggcggtgctaagcggcgacaaggatcagcttaaatcgctggagtcgggtgccccctttgcgttgatttttgagcgcagtgccgcggatgtggcggtgatgcaggaaatcgtgcgccagacgccggcgttacgcccggctattgaggcgatgatcgccggcaatgtgcgtgaggcggtaacggtcgctggccaggtgggacccgaaacggttgcccgtaatggcgaagcctttatcccggccagcagcatcgtcgatttgtctgcgatgacagagatggagcgggagcagtcggtaccgcgtgcaggtggagaaacaatccacgcgatgatcgccgatgactacgtggggcgcaccgcttcggcacgagaacaaacactgattgttgccgaactgaacgttgaccggcgagccatcaaccgagaggtgcatgcgcgactgcaggaacagcacgttcttggtgacagtgtcactgttccccagctggtcagggtcagcaatagcacggcagacctggggagcatgaccttctggcaggaaaacaccggcaataccgtgcgtatgggagaacagtatctgactgtgggtgaggcagatacgaaaagcggcgttgtggcattgaagggtgataacggcacggaacagtggctgtcgccactgacattacgtacgcagaacgtggcggtgtttgaaacacagtccattgagctcagcgtgggggagcggctcattttgacagcgaccgatcgggaccgggtgctgcgtactaatgatccggcgacagtgtcggcagtgtcacctgagggaaaaatcacgctgagcatgggggagagggatatcaccctggatccgattaatcagccggccgaccagcattttgatcatgggtatgccattaccaccaccggttcgcagggggcttctatcaacaatgttattggcctggtcgggactgaaggagcgcgcaacatgatggcggcgttggacagcgcctatgtcggtttctcgcgcgccaaagcgcatgtgcagctgtacgtcgacaatctggaaagttggcagggtgccgtagaacggaatagtggtcaacgtgaaaccgtgcatgacgtgctgttgcgcgccgatgatgtacgggcggaacaggccgatcgcgactggagtcgtagcaagccagttgaggaaactcgtttggccgaaaagctcgatgacggtgtcggtgatgccgcccgttttatgggcggcaagtcgccagaactgctgtatgcggtgcttaacgaacaggggcggcagcgaggtaactggcatgtcccggtttcgccgaccaccggcacgctgaatattgaccaggctcactatgaaggggctgaagacggacgtcggatcgtgctgcagcagggcgacagtgacgcgccagtggtacaggtcagccggcttgaggacgcagtggcggcgatggaggcccatccgggtagtgccgtggtgctggaaagggaagcgccgatcagcacgacggcagtcaccaccgacagcgagtcggcggtcaccgcggcggaaatcaccgccctgagcctggagagtgagctggaaacgggcttccgggaccctgccgacccgcttgaaccgacggaacagccagcccgggaggtcgatgaggaaaatgccccggtagaggagaaagataccgaggaagccatgtgggctgcgctcgatgatgcgctgtatgacctgcaggatggtgcagagtatgacggctggggatccggcgagcaaccgccgccgatgatgaacgaggaagtgaatattctgcgtcatgaagaaccggcgcaggacctgtcccacaacacccaaaaaacgctggagtaa

SEQ ID NO: 451486 - DNA, 2115 bp, Serratia marcescens
atgagtctaaatacccgtaacgtcacacagggtggccaagtattaaaatatatgatcagcatgtttatgcagatcaacaacattatcgtttattggatattgatggcctccgtcggtattttctttatctggtttttcatccgcatgagtgtggagcaaattctccatggattcagtttctggatactctacgtgtttgtttccgcattaccctcagcagctaaaaacgaatatacctttcattggaccagtcctcgcactggtgagtccattgagctgcatcgaacggcaggtcaggtactggctgacccctacttccaggcggttggcatcaagcttaaggatgtcgcttttaccggctggggtttgtcatccattgtttttgtttccggcattatagctgtgtattggtatttggggcgaaaaggcgcagcccaacgtacgaatgagcagatagggggacgtgagttaacgactgaagttaaagacgttaataaaatcctaaaatctcagaacaaactttcaaacctgaaaatcaacgatctgcacctagtgaaagagactgagatgcaaaacgtggcgttacacgggactgtgggttcaggtaaaagccgggtcgttattgaattcctgatgcagctgcgcgcccggggtgaccgggtcattatctacgataagggcaacaactttgttccgctgttctaccgccaggacaaggacaaattgctcaacccgctcgataagcgctgtccggcctggagcctgcgtgacgaatgccaaaccacctccgattttgaaaattttgcctcgaccctaatcccggacaccggccacggcgatccattctggctgatgtcggcgcgtcagttgtttgtggccaccacccgccggttggcccgctccaaggactggtcgattgccaatctgctgaaaatgctgctgtcgatcactctggctgacctgcgcgagttcctgaagggcactgatgctgccaacctggtggatggcagcattgaaaaaactgcgatgacgatccgtagtgtgctgaccagctatgtacgctcgttgcgctttttgcaggggcttgatgatgaaggcaaaaccccatttaacattcgcgactgggtggctaccgaagacattggtggagacaacagctggatcttcctgaccagcgatggacgtaaccacgaagcactcaaacctttgctgaccgcctggatctatctggctatggtcaacattcttggcctcactgagaaccgtgagcgccgtatctggttgtttctcgatgaactcccgtcgctgcattgtttacctattctgcccggattcgtggccgaagcccgtaaattcgggggctgtaccctgattggtattcagaacttcccgcagttgcgagagcaattcggtaaggactttgccgatgccatttgggacttactgaacaccaaattcttcttccgtgcgccaagcagcactgtcgctgagtgggtagctaaagaactgggagaaatgcggcacatgaagttccgtgaccagtacagctacggtgtcgacacgatccgtgacggggtgtccttctcaaaggatgaggtgcgtgaactgctggtgagttactccgacgtgcaaaagctcaatgacctgcagtgctacgtcacgctgcccggcgattacccggtggtgaaaatggacatcaagtacaaggcgatgcgtcaggtggcggaagggcgtattgaccgtaacgttgaagaaattttcgatcctgagattgaacagtcaatagcccaggctgaggcggaagccaatggccaattggacgcgatgctggaccggctgtttacaccgccatcgacacttccatcgaatgccaatgctacgtcctctgacgaaggatctccgtcaactgtaccgaacaacgagacggcgccggtgacagaaaacgacgggcgtacggcccagatccaacccgggccggtagtggcagcacctgcggagattcattccgagcccgttaaacccgcagcaccagaattaccagaacgcacagacgataaccggaacctccgccaccgggatattgatgtggagagtgacttcggggttgagaggtaa

SEQ ID NO: 451487 - DNA, 546 bp, Serratia marcescens
atgttaactcataagcaagttcgggaagaggtgtcagagttggtaaggtctgtgtcgacttcagatacaactcctccatctttgtttgatgcggcaaaacctgcattgtacttgtttgctatttcagagtttctaattgttatttcagttgcagtggaattctcaaactttggaacggttcaaggtgaaagtgtattttcgttatttttaaatctgtttttttgggcaatactttctgttatgtctgtttcgtatactatcctgttggcaatgataccatccgaggttagtcggaattctgaattgttgaagatgttacgaaaaaaggtaagggcatacattaaggttcttgttgttctctgggtcttggtttctgctgccatttgtgtgttggcaggtggtggggcgatagttatttttggtacagtatttgtatcaatattcctatcggtgttgctcttcaatatggatgtatctcgctatcagctatcaggattgtttggtgcgcttcaagaagcaaaaaaagcaatgatgctatcgcgttaa

SEQ ID NO: 451488 - DNA, 2883 bp, Serratia marcescens
atgatggcgcttgatatttgggctatcggaaacggcagcatgatcgcaatgggccttaatgccgtcgcgaccatgttcaactcggcaagttggcagaccctcttgtggttgggggagacccttggggttttgacctgtgttggggcttacatcaaaactcacgatttgcggggggtgtttgcctgggccatgaccttttgtatctgcacggcgatattactgacgcccaaggaaacggttgtggtcaatgaccttacgcgcccggagcggatagaccgggttgataatgtaccggtgggactggccgttccgctctatttgttgacaggtctaggctataccctggcaaccacctatgaagattttttccacttcccggatgagcgttcgtatagcaaaaccggcatgatgtttggctcacggctaatacaagactcctttgtaatggcggcgacggatccggaactgcagagcaacttcaatgagtacgtgaagaattgcatcatcccggatgcgcagctgaaccataagtactcgcttgaagctgtgatgcactcaagcgagatggccaatatcatttttagccaacccagcccacttcgtgggatctattttcgcaatggcgccaacagtacgttcatgacctgtcgggatgcgacgccgcgccttaaatcttcacttaacaaggaggccagcgggggcgggggaaccttcatgtatcatgcttcacgtatgttccctgggaataaacaggcacaggtgttgtacccaggcatgttggaaagcagttacagctatttcttcgaggcgggcaaaacagcacgggacattattcagcaaaacgtactgatcgccggcatgcggcgaggtgctagcagttacgttaaatcaatgaacgacactgcgtcgctggttgatattgcgtctgaacagtcgctgatgaagttgaggctttcacacgcgaccagttacaaaattgcgcaggaaatactgccccaactgcataccgtgatgctgatgttgtgcgtcagtattttcccggtcatggtgttggcgctctttgtcagggagctgacctggaacgtggtgaagaactacctcaatatattggggagtctgatgctgtggccggtgatgttcgcgatattcaacttcatcgtcaactgggggacgcagatctccctcagtggagaaggacctgctgggccaacactcagtaatatgaatcggttgatggaaaccagttcgaccacaggcgggattgccggctggctgatgatgtccattccatttatcagcttcaagctgtttacttctctggggcagaacatcgccagtgccggttcttatctggggaatgccttaaccggcgcggcatcggcggactcggcaaatgtggcctcaggtaactacaacatcaacaaccagtccgtcgataatatcaacggattcaaacgtgatctgaatgtggtgaaccgcgaaggaatggtaaccaatcagctggctaatggtgcgctggagacgcgtactggcggcgggcagacggtgtatgacggctcgggtgcgatgtctcgtttacctgttgatctcaatttcgaccaccatatggccagcgctgcacaaaaaatgacgcgcgatagcttatcccagacccaaacggcgatggagggttataaccactctgtagcgcaaacagccagccaggtgcggcagttccacaatcagttcggcaatagtgactctgcgaccgtcgccgcacagaccgggatgtcggtcaacgacgccgataaattccagaaggctaccaacgttgttgaggcttacgctcagaagaaccatatgagttttgatcaggcatatagtgaaattgagcagaagtcgaaaagtctggatgcgaacattggtgcgaaaacggcggttggttttgacaccagcaaatctgccggcggcaaagtggcgcaattggtgactggcggctcctggagaggggatattcacgctggattggaaggtcggggttctaccggcagcacctcgcaaactaccgatggcggacggagtgggaacgacaccagtcatgatatgtcggcgcaggacatgaagacgttcagcgaaggggtgacggtggcgcgtaactacaacaccagcttcaacggggcgcatgtggataacgcagctgctggattgatgacccaaatttctacaggtataaccacctctgacacccactatcagcagtttaccgatagccaggcgcggacccatgagtaccagcaaatggcctcacagaccgacaccctcagtgcacaggccaagagcaactatacacaggaattcgtggagtatgtgcgtcgtgaggccccaggggaggctgcagaattgctgactaacgctgacaatccggcgctccgggagcggcgggagaatatggtcgaaacctttatgcaggataaactgaaaggacgattggataaccattatgaaaccaatgcggcacacactggggataatatctcgggagtagggaataatgccgtcgggcagttgggagggacttatcagcaatataaccaagatattgatggcaaggtcaaagaggccggaatacaaacgaacgttaaaacgactgtgctgaataatatgaatcagacacaagatggcatggaccagcgagaagattacgttcataatgagaagaaggatgttgatacgcagcaaaccgacagaaagaatgaatttgccggtgccaacaaagattttagtgagaagcatcatgctgctgaattgcatcaagggaattggaatccaatgaatgcattgaagagtgattataaggattacatcgaaaagtctaaggacgatttgaataatgacaagagatga

SEQ ID NO: 451489 - DNA, 1362 bp, Serratia marcescens
atgaaaaataacatgaaatgggttgctttgtgcctggccgtcgcagtctttcaggcccaggccggtatcaatgatgatctgaactctttctttaaccagatgggcggcggcggcaatgtttcgatgccggcagcctggcaagggcaatcggccggctatttaacaggggggaacctgtttatgcgtatgcccgtgcgtaatatccaactggtgtctgtgacgctgcctgatatcaaggccggatgtggcggcattgatgcctacctggggtcattctcgtttatcaacagtgaccagctaaaggtgatggggaagcagatcctgagtaatgcagccggctatgcctttgaccttgggcttgaaacggtttgcccacaatgtaaggcggtaaaagattacctgcagcgtatggccactgatatcaacaatatgaacatctctacctgtcaggcggcgcagtctatcgtcggcggactgattccaaaaaactctgaaacgacacgcaaggtgtgccaggacatcgccggtcagcacaatgtgtttgctgactgggctgcctctcgtcagggctgcggggtgggcggtgaaacagacaaggtattcagcaaagcgacgccggaagagaaaaaacaaatcccacgtaaccgtaacctgacttgggccacctttgaaaaggttaaccagttcatcagcaacgatcgggagctgaaagaactcattatgtcgatggtcggtaccgtgatttatgacgatcgcggcaaccctacgttcctgtcgccgaggggcggcagtgaggccattttcaatacgctgctcaatggcggcacggcgaaaatctaccgttgtaacgataatgccgactgcctcaaaccttcggcggctgaatttacgctctcatcagataaaggcatgacggcgcgtgtcagaacgatcctgcaggaaattttccgtaaggcgcaatcggacaaacccattacggaagccgagaagaatctcatcgagagcacgcgtgtcaaagttttgcgctatgccatcgacaccgcgtccgtgggtctggatgagtcggtcgttaccagtctagccgagtatatcgcggccgacatggtgatgacctacatcaacggcctgcttgatgtggccgagactgcagcgtcgggaaccctcaataccgaagatgaaaatacgcgtttccgagagaacctgatgtcggtacgtagccagttggggcagcgtgtctcacgtattcaggtgcagcaaaacggcgtgatggaactggagcaaaacctgtcgtatatgcgtcagcaactttccagtggattgtctgacaaggtcatgtccaactatgaattcggggggcaatga

SEQ ID NO: 451490 - DNA, 324 bp, Serratia marcescens
atgctgagaacgtttttccttcatcccatgcgcttattgggtgtggcggggctgctggtgttggcggcggcgggggtggataacgcggggagatggttactggccctgtccctgtggcttccgcagcagcagtggttggcgggactacccgtcctggagcggcaacatcacgtcttggcgctcgggcttctctacctggctctgatactgatgtttatcggaacgctcgtgggttatgcgcagtgggtgattcagggcgcgaagtggatgacgtcacggtggatcaagctcagaagcggtgaacgaggtacgcatgaaaaataa

SEQ ID NO: 451491 - DNA, 510 bp, Serratia marcescens
atgatccggaattttctttttgtcagcgcgctggcgttacttcctcttgcgtcagcgtttgcagggacaccgactacggaaacgcccaatgtgcaacaacgtgcacactcaacgacgccagcttcatccccggtctggtttcggttggctgatggtcgcacgattgatattcagcactggcaggtggtgcatttcatccgctccgattgtccttactgtcaccgttttaatccggttctacgcgatacggccgaccgcttggggttaaaagtgttcgtctacagctttgatggtttgggcgacgctgtttttcctgatgtcttgccgacgaacgacgcggtacttgagcagttctttgctgaattgcccaaggtcacgccgaccgattttctggtgaatacgcaaacgctggtcacgatccctctggcgcagggggcactcaccgaagtggcgctcagccagcgtcttgatgaaagtttcgggttggccgttcggttgggggtgttgtga

SEQ ID NO: 451492 - DNA, 306 bp, Serratia marcescens
atgtggaaccgaactgcgcacctggctggtgcgctgctgtgctgtgcctgtcttagtatcaagtacggtggttgtttcttccaatggtttattacgaacaccgaaggcttgttacctgcggggagctccgtattccttattctgttcaccctctcctgggtgtgcctgtcgctggcggccggtttggtgctcagtgcctttgttatcgatgtcttcaatagactatgtattgctttaactcatgctggccgtgccggtcgggagttgcaacggtggttactctcttcatggaggaatgaacaatga

SEQ ID NO: 451493 - DNA, 771 bp, Serratia marcescens
atgaagcgtacctttattctgatcgccggtattttgtcagttcctatctacgccgcatcaccgcctcccaatggatataattatgacccggcggtggggtggcactggtataacgaaccgaaaaagtcgaatgacccgcaacgggctcaggagccagtagcaaatccacctgaaagcgccaccgagcagctggcgcggttaagtcggctgcgagatgagctgcgtaaccgtgctgtgctggcacctacatcagaaaatgttcgcgactacaaagtgatgcaggattatttggtcgaaaaagccactcagttcagcgccacatgggaccgtgttttattagaaaatcccgagctcgattacagcctgcagcatccctattacaacgggacggcgccgctggaatatcagaaagagcggcaggcgcaaaacgccgccattcgctacgtaaaccagcgatatggagtgttctttttttaccggggcaatgagccgttggataacaagctgggtgaggttatcaaggagttttcagcgcagtacggaattcctgttatccccatcaccgtcgatggccgtgtaaaccccgacttgcctgaaagcaaacagaattctggacaggcggagaatatggggatcaagcattttcctgcagtctacctggtcgagccaggaaaaaagactttcaagccattagcctacggttttatcactcaggatgatcttgcacgccgtatgttgaacgttgtcaccgactttaaacctcgtttttaa

SEQ ID NO: 451494 - DNA, 1935 bp, Serratia marcescens
atgtggcgcgccacgctttcgttatataccgccgccggcctactgtcgctggcgctgaatcagtgttatgccagtaatatggatgcatcgatggaagagggctatgcggcggcgaaagccgcaggcagtcaggcccagtcttccatcggcaacacgcaaccacagcagtattttgataactacaatcccaacccaccggaaaccggatattaccagggcggtacgcagactgatacctcactcggcgccaaaggtcagcaggcattggccgatactgagatgggggcgctggcgcgcgagtctttcatcaataacccaagcgataagattgactgggattctgacatgatgaaaaacgttctgaatattcaaaaaaatgcagaagtgatcgccgccggtactggccctcagtgcgtaaagcaggcgatcaacaaggttagttacagttcacactcctgtcagcaggctaaaagtgtggaagcggactgcaggcgtgaagcacatattgaaacgcgcagtaaggtcatcaaaaagaaaaaaacaataccccttgcggttcaaatgccgggggggtggggcaatcggtgggctgggaagttggttatgcccgaaaaagcccgtttgcttagggtcgctgtaaaggccagtggcatgccaattccctactctcaggcttgttactacccgtcacgagattcgtgtcggggatcggtcagcgaatccttctctctgatgggacgctcgctacccgttaaagtcgattccttacccaatcatagtgagcaatgctccggggggaaaaatgaccactgcacccatcgttacaacaatgggagcagcagtgtaaacaccgcattcgatctggacatgaatgtaaatgaagggcagcagttcgacgtgttgaaaagctccaaaaccagcggaaacagctcgaatgcaggttttacggtatacatcacgctaaccatcgaggtcgaagaaacggtcgcagatcctgttgtggtctggacagagtcctgtacggcgaacaaggaagatgatgtaaaggtgagttcacaatgcatatcaccgggcggaagccgtgttgtacatgtcgccggtcgggattacaccttgtatcaagattgctgggcgtataaggacgtatatcaggtctatgagagtgacgataacacctgcacaacatatgagaacgatcgtaactgtaccgtgggtactcgcacatgtttgcgcaaagtaggaatgtactgcgtgatggaatcgctgacctaccaatgtcagcatacggtcagcagtgaaggctgggtgtgtggtagccagttcttttgctcggatggtaaatgttccgccataaaaaatgacgccaataacgatttccaggctgcggtatcacaattggcggccttagccgctgcaggtaaagatgtgacaggtctggatccggataaagttcgggcgttcaccggcaaagcgatgtcctgtcgtaaatctgcgatcggcttcagtaactgctgcaaaggggggggctggggccacgatgtaggacttgcacaatgcaacgatgaggagaagtcgattggtaaggcgaaggaacggctactgaccgtcgacgtcggcgaatattgcgcgaagaaagtgcttggtggatgcctgcagaaaaagcatacctactgtgtcttcgatagcaagctggcgcgcattgtgcagcagcaaggtcgtggcgggcagctgcatatcggttttggaagcggaaaaagcccggactgtcgcggtgtcagtatggatgagttggcgagcatcaagtttgatcatctcgatttcactgatttctacagcgagcttcaaagcaacgtgaagttaccggatcagaaacaactaacagatcggatcgcagaacaaattaaaaacagcctacagcagagcggaggtaaatga

SEQ ID NO: 451495 - DNA, 396 bp, Serratia marcescens
atgctgttctgcctgtcgttgggtgtatacgccgccgacaataaaccactggatgaatcgcccaatgaaaccgcctatttcttgtcggcgtcattaccggaaaaagacttggtgctcctgattaaggcagcagaacagcaccagttgcccgtctattttcgggggctgattaataacgacatgaagcaaactgccaattacatccaatacctggtcagcaaatatcagatcgccggcattaatatcgatccgctgcgctttgaacggttcggtatcaataaagtgccagctctggtgaaacgctgcggcgagcagttcgatgtggttttcggcaacatcgcgctgagtcaagggctcgacatcatcgcccgacgcggccagtgtgccgggaaataa

SEQ ID NO: 451496 - DNA, 870 bp, Serratia marcescens
atgttccccatgagcctcggcagtactcaggtgtccaaaggcagtctgccggataccgagaacccgagctctccgatacagctttgtccagccccaccgccgatcttccaacgtctcggcattgctatcggattttgggaaccctttgccatgaccgatgtaacccgcgcaccggggtgcatggtgaatatgggaggattcaccatcccaatcccgaaggttggcacgggcgccggcacaaagacagctaacgataaccctggcactttctatcatgtgcattggtacaaatatcccttgatcagttggctcaacatcatcacttcagttggctgtatgcaggggggggaatatgacatcgcctacctttcggaacttgatccgatgtggaaggacgacatgctggcgctattcaccaacccggaggcgatgttattcggcaatccggtggcccaaatggcctgcgcggcggatgcagtggctgccgaagtgcataagcccctggatgcgttgttctggtgcgccggggggcacggctcgatgtacccctttagcggcaacctctataccgaaagcagtggcttaaacagcggcgtgctgcttagcgaacgaatgaacttcaaattgcatcggcagggcatgatttgggacacggtgggtgcaaacaaggccgtctgtttcgagtacccaacagtgatcatgccgaaaagtcgataccgttatcaaatggtcaacaccatccctgatgccaatcagtgccacccgctgggacgcagcgttatgcgctggcaggtggggaaggaaatgccgaactctcgaaaaaattatgggtatctcatatggaaaaaacgcaattgcgtcgtgctgtag

SEQ ID NO: 451497 - DNA, 795 bp, Serratia marcescens
atgaaaaaaaagcttcttgttgtaacgataccgcttctgttttctcttcataccgcccttgcagcaaacccaaaccccgacacgtttaccccagcgcaacagagtgccattggccagatcgcggcagagtacttacgtgcgcacccagaacttcttatcgagatgagcgaaaagctgcagcaccaagaggaacaacgaacacaaaaaagtgcgatcgaggcggttttagccaatcagtcaaacctgcttaaggacccggcaagtcctgttgttcatccggagggggacgttgcattggtgcagttctttgattaccagtgcatctggtgttcacgtatggctccggtggtggaaagcctgattgaaggcgacaagacgctgcgtgtggtctttaaggaatggcctatctttgggaagcagtggccactgtcgactttcgcggcacgcactgggttgtctgtttggaaagcaggcgccgccgacggatatctgaaataccacgatgcactctatcaaaccggtcatgtagaagggcagctgacgcgtgacgatatcacacgcgcggtgaccgcagccggctttacagaatcacaggtaacgcctgcaacggttgaggctctttctcctacggctgaactagccaataagctgggcattaacggtacaccggcattcattgttatgcctgttaaggatgctactgtcgacaacacctcagtgatgtttggcgccgtagatataaccacactgcaggcagctattgccaaggctcgggctacaggagggcacccgtga

SEQ ID NO: 451498 - DNA, 624 bp, Serratia marcescens
atgaaacttgtttatacagggttgtttatggttctttctcttccggccagcgccgcagacctaggcaccttcggtgaggtttgggatgttcgggaacagaatttacttacagtcatccaaacacgcctgaaagaccatttcgctgaccgcagccaagccgacatccagaaagaattacaagatcgcatcactgaaagcgcgatgcgcccggcgccagtggagggcatagaacgcggtactaaaacctgggtgcgccaatttgatccggccatcgtttccaatcaagaactggcagatcataacggcactgtcttcgtccgcaaaggacagcgagttaatcccttcgatgtgcttcctgcttttaaccagaccctctatttcatcgatggcgatgatgcagaccaggtggcctggatgaaacagcaaaagcccaaaacgccactgagcaaaataatcctgatcaacggcagcatcaaagacagtgctgaggcgctagacagccgcatttacttcgaccaaggcggcgccatcgtccggcgcttcggcataaaacaagtcccggccatcatcactcaggaaccgggaaaacccttactgcgcataaccgaaataggactcccctga

SEQ ID NO: 451499 - DNA, 348 bp, Serratia marcescens
atgaacatcaaagagttaatcatcactacgctactatctgcgctgcttacgctgggaggcagcgtggtcatctgggaatgttggctgaagccaccgacactggtcagttttaacctgaagggcactactgaccagttcttagtacagagcgccaaactgaatctatccaatgaacagcgcgacgcgctactaggacgtttcaaccggaaactgacactggtgattgaccgttggtcagctgaacatcaccaactcgtgatagtgcggccggcggcggtcagtggtgttgaagatgtcacccctcaaattcggcacgagctcgcactggccatgaaggataaccgatga

SEQ ID NO: 451500 - DNA, 2613 bp, Serratia marcescens
atgtttgatttttcacgattcaagttcgacccgcttaatgtcattgaaaccgtgggtagcattctcggtgaaaaggacacgttgaacgagacacaaaagaagctcaacgatatggagtatccccatatccgcgacctgctgccgttcgcagactataaaagtgacgaccagttttttatcaacaaggactccattggcttcattcttgaagctcaacccttgattggcgccaatgaattactggccgacagcctggatacgttgttgcaggataaagtgcctcgcggcacgccgttgcaggtaatgatggtcagcagtcgggcgattaaggagcagattgagtatggtctgaaggacttcggctggaaaggtcaccgggctgaggactgtaacgacatcactcgccgattttacctcaatggtgcccaacatgagtttcccaacgatctgggccatcctctgacgctgcgagattaccgacttttcttcacctgggggatgaaggtcaaacacgttaccgaaaccgattttgtccgactgcgagatgtgcgacgtaatttgcttaatgctctgacatcagcagatattcatgcccagcctatcggtgttgagcgttttatgggggtgatgcgcgagctgctgaaccacgatgtcaatcgtttgtcggcgtatgacattccctacgatccgcaggctgacctgaaagcgcagatggttgaccaaaccacctcctggcaggtgaagccgggctatatccaggtgagtggcagcgacgcgaagctgcaaccgttcagcagcaggatggtcagcctgaatctcgaccgtaatccgcaggagcactacctgtggcagaacggggacattttggccgaccttacgtcgccgaccaacggcatcccttgcccctttgtcttcagcatcgttctaataacggaagatcaggcgaaaagtcagggggaggcgacgcgggagtttctggcgctggattcgcgggttaatacctcttatgccaaatacattcccaatacggtacctcgtcaccaagagtggaaagatgttcgccaacggctgctggccaaccaaactgcgctgaccagctatttctacggtgtgacgctcttttgcgaagacaatgatgacgtaatggccagggatacagaacgcaccaaaaatgcctttgcagcgcaggggttgaaatttgtccgggccgatttcatgcagatccgcaacctgatgggggctatcccctttaccaccgtggatgagaagttgtggaacgatttcaagcgaacaggggcgttacaacgttcagaaacgttccattccgtcaacctgatgccgattatcggcgataacaagctcagtcctgcagggctcctgatcccaagttaccgtcaccagttagcctttcttgatgtgtttgatgaaagcttacccaacacgaattataactggttcctgtctggaacatctggcgcgggtaaatcggtgctggcgcagggcattgcgcggcaggtactggacgtcggtgggttcctcagcatcaaggatattggtgattcatataaagcgttctgccatagcgtcggcgggacctatatcaacggcagcacgctcaaatttaacccgtttgccaatattacccccgagacactccacctgatggcggagcgagtgcgtgaccagttatgcatactggccagtcctaacggcttgctcgatgaggtgcatgagtcgctgatattggagtccatcaccgaatcatggccgaaatatcagcaagatatgcgcattgaccatgtcgtggattatctaaaaaaacgccaaaacgatgtcggccggcaacactcggtacaaatggccgggcgcatcgatgaaatcgtgacgttgctaaacaagtacaccacccgcggtatctacggcacctatttcaacagctccgagcctaccctgaaaggcacagagcagtttgttgtaacagaaatgggcgacctgaagaagcagggcgatctccttgcggcagtactgttctcgatgatgctgtggaccgagaacctgatgtacagcactcctcgcagccttcgcaagatggacatcacggatgaaggctggaagatgctcagcagcaccagtgacagggttaggggctttatcgaagagggttaccgaaccgcacgtcgtcacaatggttcttacggcacggtgacgcaggccatccgcgacaagaacctgagtacggcagcgttggcggcgtacgacaacagttccttcaaatttaccaccatgcaggatgccaaggcgttcagtaccttcaggcaggaagaacccgacgcatttaacgagctggagtggaagctgatcagcaagttcccgcccgccaagaaagcgaaatacagttcgttcctggtcaacgtagggtcgtacagcagttttcaccgactcaaactcgatccgctgacggacaagctgttctcctctaaaggtgatgactttacctaccgggaaaggaggctgaaggagggcgctgacatcaaggacatcttatttgaaatggctgaacacgacccgcattcgcgggaggtgctcgaccacctgcggaggatggaagcatga

SEQ ID NO: 451501 - DNA, 546 bp, Serratia marcescens
atgaaacactcgctttcccgcatgctgctgtgcagcgtggtaatgctttccggctgtgccggcatgaactcagagtttgagttcgacaagcccgctaaagacactggcatctggatgtcccaggctgacgacatgacgctgggtaacaactcaggcgctgcaacggggcgctctaccagcggtacgaacgtcgacctgaacggttatcgacttatcgacacagggcatatccgtctcgacgtacagccactggtgattggatcacgtgtagtacagagacctgactccttagggtatccattacgcacctctgccccggcgctgggcggtgtgtttaccgcatctgccggcactccgtcagtcaataccggcacggtctcctgcaataccccgcgctgttaccccgaaccggctgcagcgttccgtaaaccggatggcgtgcagcgcatctggatagcgccttatgtgtcacccgatgatgcggtgcatatgggggagatcgtctttgccgtcgccaagccggcagactggaacggcgtactctga

SEQ ID NO: 451502 - DNA, 1347 bp, Serratia marcescens
atgaacctgaacatcaataaattggttcaaagcaaacagcgcaaactgttcgcattgatcctcgctggtatcgctctggtgttgggaacactttggttccttaatgatcgtgccggcgccgatacggctgaagcgccggtcgagaatgggttgcctgaacctgatttgactggtgctgtcaccaacaccttcgatggagatgtccagggcggcgtcctcgtcgatgcacagctgcgtgagcgtgaagcgaacaaggctgtgagcgacatgaaagaagcaatgctcgaaattaaaaagcagttggacgagatgaaggggaacaatgacagcctgaaaacccagatgagtgatctgcaggttgaattggataaagccaaaaatagccaacccgttgctccaaccccgcaggaagtgggaaacgggacgctgccacccgcacaatatcgactgggtccaccgccagtatcgcgtggccagatcgatagccctttatttgattataccgagatcgacaaacccaaaaagaaaaccagcgcggctttctatatacctaccggcacattctctaacgcaatcattatcgaaggggctgatgccaatgcgtcggtgcgcggccaggagaaactggtccctatgcagttcaagctgacgggtctctcgcatctgcccggaaaccagaaaagtgacaaattggcaaattgcttcgtaactgcctcagcctttggcgaaatctccagtgaacgtgctgaggtaaagactgagcgactctcttgcgttatcaacggaaagcatattgaccaggaagtggaagggcatgtgtctttctacggcaagaacggtatcaaaggtatcccggttatgcgtaacggcaagctgcttggcctctcctttatgggcggggcgctgagcggtctggggcagaccgcatcgcaggtaggccagacggtggccggcgtcggtgccacaacaacgatttccgccggcgatgcaggacgtgccgccatcggtggtggcgcgagtaccgccgggggcaagctcgccgattactatatccagcgcgccgaacagtatcacccgattatcccgatcggtgccggcaaccgtgttgaagtggtgtttcaaaaaggtttcaaggctgagtttatcgaagatatagaggaggcggagaaactggcgaataactcgacgggtcaacaggcgaaatccggtacggcggatacgactacccatgctcaggggaataccggattaccgccggagctcatcggcaaactgggagacgctgctgcactcaagattcaggactttgtcacacctgcgccgggtgttccgcagaacggcggttaa

SEQ ID NO: 451503 - DNA, 717 bp, Serratia marcescens
ttgaaaagtaagtctatgatatttgcaatgtttcttgccagtactgccgtccaggcgcaagaagtcgatattaaccctaatgctcgcctggcgttggctgttagtaacacagaccccaattatatctccgttatggatgacaggatcatcgctattcaggccactcagggggtgctttcagacaggcgaacaacagcaggcggggcagtgttgttttcaaccgtctcagataaaccctttacgctgtttgttcagacagagtcaggatttgccttctctgttatggcttcgccgcgtcaacaagcagggctgtcactggtggtaaataatcgtgaagttcgtggaggtgaagccgcgcgtgagtgggaacactcacaaaatacatacagcgcgcttgtcacaagcatcattacgaagtttatcaataacgataagccctctggatttgtttataccaaaaatcgcgaagtcccgttatccccctcaacagaaacctatttttcagttcgacctgtcgctgcatggcagggagataaactccgcattgtgcggttggatgtcactaatcgctccacctccagaattgaactgaatgaacgctacttctggtcaaaaggggtaatggccgtgtcattttggccacagatcgattacgtgtcacctggtactaccgtatctgccatcgtactactccgtgatggggagagaccacgatga

SEQ ID NO: 451504 - DNA, 576 bp, Serratia marcescens
atggaattcaaacttacggcggccagaaatagaaatctgtccgtcgctatcgttatccttcttgttatctctattctcagcctggcactctgccatcggctttattctgacaatcgcgatcttactgaagcgttggtgaataacaaacagatcattgttttacctatgggagcaaataaagcgtttgcctttaacggtgaacgtggtgatgcgcgttatatacgcctaatggctctgagccttttgaatctacgccttaacgtatcaaacgaaaccgctgctgaaagccatgcattacttcaggcttatgcgtgtgacggccaaaaagaaaaaatggaaccagcattgaatgctgaacgccgcctgcttaaagccaatgacggcagctctgcattctatccagctgattttaaagtctgggctgacaaagggatcgttgaagttgtgggtaaattgcaattcatttacggattacaaaaacctgaacccgtagataaacggtaccagctgcgtatcgacacccgtaatgacgggatgtgtttcaacgcttttgtggaggtgcccgttgaaaagtaa

SEQ ID NO: 451505 - DNA, 354 bp, Serratia marcescens
atgaacggtcaagtttcttcgtccgttgtacccccgcgcattttgggtgcggtagctatggctaaagcaaatttgtataacccaaatgtattgaccatggtcggattcacactttttgcattggcattgatgtttatgccgtctactcatgcagaagctgttgacctgttcactaagggcagaaccaatattaaggatacgtttgggttaagttctactgtcgtctggatcctgtatatcattgaaggtctgggtgctgtattttcttataccaaaaccaaaaacctggctgtttttggtggtatcgctgcagttatggttttcgtcaacgtactgttcggtattattccttaa

SEQ ID NO: 451506 - DNA, 858 bp, Serratia marcescens
atgggtcaatgcaaaatgaaatctaacaacaccagtgaaatgcacgcaggcgagatgctatcaaacgtcatgacaatgaaaggcatcccaaaacataaacaagcatcccacatccgtgatgtactcaatgtgtccacgccccaggctcaacggaagcttaaaggaacggctccctgggagctaactcaattagttcaagtagtcggttctcttgatctatcaatgagccagttttttgcgatgttcgagaatgaactatctgaaaaacaagatgcggttttcaatttggaaggtcatgaaataccgtgcaaaatatatctacttaaagataacagcaaagagcgcagggaatattcagcaataaaggttaatgacaaatggcatgtttttaaaacagaggatattgaggataatgagctttacagtgaggcaagaaggtttgtaggcatgataactattgaaagtagcaaaaccgaaacaataaagaagaaaatagcattacttgatgacgatagagatgtgcttgatagcatcacagaaataataagcaatggtgaatatacagttaattcatttaataacatacctgaaattgaggataagattaatcaatcaccttatgatgcatacataattgattggatgattcatgagaaatccgcctatgatacgataaagaaaattagagagtcaaagaaaccacacgcaatgataattgttttaacgggtaaagacagcgaagaaatagacgatgaaattgctgctgccataagtgactttgatatcatcgggccattcagtaagccgttgaagatcaactcaatacagagacttatagataaatatttcctaaggtaa

SEQ ID NO: 451507 - DNA, 552 bp, Serratia marcescens
atgaaactgaataaaattatgctggccgcagtgatggctctgggtgtttcctctgtggcgcacgcagtagatcagggtcacggtaaggtgaccttctcgggttccatcatcgatgcaccatgctcgatcgccccagaatctctggaccaaaccgttgagctgggcgctatctctaacgtggcgctgaaaggcggcggcaaatctaccccgcgtaatttccagatcaaactggaaaactgcgaactgatcaccgagaccaaagacggcaagaccaagaataacagcgttgcgctgactttttccggctcagcctcttcggtaaacaataaactgttgggtattactggttctgctaaaggtgcaggcatcgccattactgatggtgctggtaacgacattaccctgggtcaaccaaccaatgccagtacgctgcagaacggcagtaacaccctgagctttgccgcttacctgcagggcgctacggcctcaaccacgactatcgtcccaggtgagttccagtccgtcgccgactttaccttagcttatcagtaa

SEQ ID NO: 451508 - DNA, 384 bp, Serratia marcescens
  misc_feature (262)..(271): n is a, c, g, or t
atgtctgagattcatgtttttactagcgcagcgtttaactatattccgaaagtgagaatgctgtttcagtctattcgtaaatatcaccctgaatggacaattcacctcgccttggccgatgagaaacggcctgaaattgatcttagcaatgaaccgtttgacgaagtcgtctcagtttctgaattagacatcccggattggaaaggttgggcatactgccacaccatcgtggaattggcgacggcgattaaaccttttatgnnnnnnnnnngttgctgcaactgcctggctgtaaaaaggttatctatcttgatcccgatacggtggtcttttctcgcctcgatgacattctggaggcattggactctgcgaatgtcgtgctga

SEQ ID NO: 451509 - DNA, 957 bp, Serratia marcescens
atgagcgacaagatccctatcggtatcagcgcctgtttactgggcgaagcggtgcgtttcgacggcggccacaagcggctggcctttgcggtggaacagttggcgccctatgtgcgctttgagcccgtttgcccggaaatggcgatcggcctgcccacgccgcgcccggcgctgcgcctggtgaagcaggcgcagccgtggccggcgatgcgctacagcaacgacgccggcgtggatctgaccgaggagatgcgcggcttctccgcgcagcgcgtggcggccttgcaacatctttgcgggtacatcgtctgcgccaagtcaccgagctgcggcctggagcgggtgcgggtctacagcgaaaacggcaaggattcgcgtaaaaacggcgtcggtctgtttaccgccgaactgctgcgccagatgccgtggctgccggtcgaagaggatggacgattgcaggacgcggcactgcgggaaaacttcattgaacgggtgtatgcgctgtacgagctgaacatgctgtggcgtcaggggctgacccgcggcgggctgatcgcgtttcacagccgctataagctgtcgctgctggcgcattcgcagccggcgtatcgggagctggggcgcttcgtcgccgatattcaccgctgggactcgctggaggccttcgccgtggaataccgcagccgcctgatggcgctgttggcgcacaaggcaacgcgccgcaaccacaccaatgtgttgatgcacgtgcagggctatttccgccgtcagctcagtacggcgcagcgccaggagctggcacacctgatcgaccgctaccggcagggcatgcagccgctgttggcaccgattgcgctgctcaagcattacatggcggaataccccgatcgctatctggcggaacaacgctatttcgaaccttatccggaggcgctgcgtttgcgttacggccattga

SEQ ID NO: 451510 - DNA, 1686 bp, Serratia marcescens
atgctgaaggctatcaaagaactgctggttggaacccgggccatgtcgaatccaacggcaagcattccagcttctcaatgtcctgtcggttattttatgccggcacccgcagagcagcttttatgcgcgccatctcgtcaacagtgcctgcaacagctgtgggagaatagcgcgttgcccaaagatctctatgagcatttctatttgcaaccactgaagcagctcgtcacgctaatgcaggtgctgccggccacgacccaaggggaatatgccagggaaggtgggctggttgatgttaccctgcagacggcgacgtatgcggtccggctggccaagggacacatgttgcccccaagggcaacgcccgaagaacaatcagcgcagaatgtgccttggaatgtcgtggtgttttatgcagcgttatggcactacctaccgctgttgagccatctgcagggtgagttccaaagtggtcgggcttggttgccaggattgacggtgccgggtgaaccctaccgttttcgcttcatagtcacaccgccacccctgaccctttcagcaagtcagagtgcgatgattgcggtacggttgctgcctgaagaacttatcgaatggctgtcaacactgcctgcggtgacacattcgttgatgaagatagcgtccaggcaagccagcactttacctgaaatagacgatattatcctggaggcggtcaaactggcgcgtggcgatggtttggccgtatcgcttttgtcgatatccaactctgacaattcgtcaatagccctaccgtcagtggtgccgccgacagcttcagtaccagagattgatttgcaaagcgtagttagaagcatccacactcctctcgccccgcagcaactgccggcagagacattagatcagcccaacggaaatgcaccgttagtcacggaagtgttacttagctcggccctggatgcgccggccaatgataagcctttggctgagatggttctggcaccagaaacggtggctggtgtagaagaagatatgcaggctctgctgtcattaatggcgtcagaggtgtcagtaccgactagcctggataaccaagaagagggaaacgcccctcagaaagagagcctccttcctgaagaaaagcagcagccggtacatgacttaactactgtaattgaagatgactgtgttttaccaggcgcaataaagcctgaactactaaaaagcacggacacaacggctattttagaagttcaacatttatcaaatgttccacggttagaagagaataacgtggaagatactttgaatacagaaaataatgttgggaacgcctttctacagtggttgagtcttgggataaaaaaaggagacatatccgtaaataccatagtttcaagagcgcatattgtcagtggtttagtgtttctctgtgttccagacattttttatctgtatatcaaggaaaataaattggagcttactgataggaactcaatccaaaaggcatttgaaaaaacggcaagacatcggatccgtaaggggcagcggttctttattggccatctttatgaaaagcctgagggggggggcacatatcgtcgtatcaatggttacctaattaaggcaaatagtttgtacggggggacacgcgtgccagaggacagtcagttactggtgatcccgtag

SEQ ID NO: 451511 - DNA, 1179 bp, Serratia marcescens
atgccttattgtgatacacctgatagggccaccaccattagttggtcctgccatcgcctggtgatcagggagttttccggcaccgataaagcgtcaacattggtccgctttgcgcaagcaaacccgaactgcagaatgctctatcttgcatataatcttgccgtcaatgatgggaacgagcaaaaattcccgttgaacgtcgaatgtaagacatcgaatcaactggccagtcctaactttggacgccattatcagcggcggttgactgctaacctgcggatcactggcgtggcatgccaactcaatacccgctattggccgctggcacgcacatctatcaccacccttaacgccttcctctggaatggggatggcgaattgagtctgcaacacttgtctgatgaagactcacgcagtggttttccacctgataaaatcctggcagtgccgcaactgctctggagtgagtctgcacgccaggacggcactttccttgtaacccatgtcgtctacctcaagctgcgattccgaggcacggaaaatgccgtcgatgctccggagttggccgatgcgaaccaactttatctgactcactgtttttgttttggacctgccgtagcccgggtggtcaatatgctgcttgcccgacaaggcgaaatggtatttgtggtcggcaagaaggcgtactgggtcggggggagcagcggctacaaaacggaagaattggaagagttgaattggttttctggtgacatgcctgagcgaatgccgtccccgttgctggcgcgagagtaccgaaactttgagacgtgcgagttggttgccagagctaccagggatgtcgaaacgaaccaagggattcagttgtttgagcagtacctcctgctgccacaaaagctgcaggagatgcgtgaatgtgcagttacaaatgaaagtcaggtgcaggtaaccgtttcgacggaacatcggagcaaagggttggagtgccctgtggtgatgttgaatcatgattttgtcgatatcacggctcccatgttggccggctgcgaacgtactgatgaaaccaatctgctgtatgtcgctgtgcccgaggccaggcaaacactggtactgaatgaattgctgcaggtgttgatggacagcgagagtaatgatatcgccggaggccaggcatgctga

SEQ ID NO: 451512 - DNA, 594 bp, Serratia marcescens
atgctgagttctgataagaaaagaaagtatttgacacaagatgaaattacgaaattgatgatggcatcaaggtctggaaggtacccagaacgtgatgagtgcatgatatatatatgttttgctcatggacttcgtgtgagtgaggtttgtaatctcaggctatctgatattaacttgcatgatggagtaattcatgtccggaggcttaagaatggacttacgaccacccatccgcttttaccaacagaaataaatctaattgagaaatggctcgatgtaaggtgtggttggaataaagatgatgcagagctttttctgtctcagaagggaggtcgattatcaaggcaacaagtatataatctttttagaaattatggcctcgccgctgaaataaaaatacccctttacccccatatgcttcgtcattcatgtggctttgaattggcaaatatgggcgccgatactcgacttattcaagattaccttggtcatcgaaatataacccacacagttttatacactgcgagcaattcgggacggttcaaaggcatttggcgggaaagttttattttctctacatcttcaataaaataa

SEQ ID NO: 451513 - DNA, 303 bp, Serratia marcescens
atggcgagatatcgaatagggaaccgatttttatcacaggaagaatatgatgcagaaatggactggcgctgggtttgtggactgtttctcattggtgctatcggtacggggatattggtccactcttactttgtgaacccagagtggcataagttgattcgtttccttgttaccgtgatcccctctattgccattggctttttgctggtcagattgcgttattttattatggtgcttgttgggctcctgatcattctgtttgttgtctctctgattgtcagtattatttcctccatgatttaa

SEQ ID NO: 451514 - DNA, 228 bp, Serratia marcescens
atgttaataagtaaaaagtcactactggtcctgttgtatttgtgcgttgccttctttttaatgattttttttgtaagttttatttttcaagtggtggggtactggattggtggcggcgatcaaatgctagggtacttgaaggagaactttcataaagtattgaatacagctttagtgggggttggtgttggatttgcctactggttattttactaccgaaagatatag

SEQ ID NO: 451515 - DNA, 579 bp, Serratia marcescens
atgaactttttgagatatccttgtttcagccatcagccggtactcttctggcgtcaggttgttcagggattcatgaggccgctcgttgttatattccttcagccagtgctctgtaatttcccgcgcttcattcagtgttctgaacagataaaaatccagaatttctgtccggtatgttcggttgaacagttcgataaacgcattctgcgttggcttggcttgagaaattcaagtgccacaccatgtgtcttcggcccattgcgccattgtcagagacacaagttctggaccagaatccatccgcatcttctcggtttgccaccatcctgtccagctcgtcagtgcttcacggttaaaatcatctattacgttgaaggtccggaagcgcctgccgcagaccagcgcatcgtgcataaaatcaatggaccagctctggttcagcgatcccggtgtggccagcgaggccggattacgcactggcagacgttgcttccctttgcgacgaaaattcagtttcagcaggcaataaatccggtgaacgcgtttatgattccaggtgttgccctgtctgcgcagtag

SEQ ID NO: 451516 - DNA, 1665 bp, Serratia marcescens
atgcccgtcgattttctgaccactgagcaggaacagaattacggttgttacgttgcagaacccaatgacgtgcagctggcgcgctattttcatcttgatgagcgggatctgaccttcattaaccagcgacggggaaggcataaccggctgggaattgcgcttcagctaaccaccgcccgttttttgggcacctttctgacagatttaacccgggttttgccgggtgttcagcaatttgtcgcggtgcagcttaatattccccgtccggaagtcctttcccgctacgcagaatgggataccaccctcagagagtatactgcgctgattaaggaatattacggttaccatgaatttggcgattttccctggtctttccgactgaagcgcctgctgtacacccgcgcatggctcagtaatgaacgacccggtctgatgtttgattttgccaccgcgtggctgcttcagaataaggtcctgctgcccggagccaccacacttgtacgtcttgtcagtgaaatacgcgaacgggcaaatcagcggctgtggaaaaaacttgccgcgttgccggacagctggcagaccgcacgcgtgacggaactgctggacattcctgaggggcagcgaatttcaccgctggagcaactgaaaaagggacctgtcaccgtcagcggcccggcatttacagaagcgctggagcggtatgtccgtctgcgaaaccttgagttttcccggttgaattttaccggcctgcccgctatacagctacgtaatctggcgcgttacgcaggtatggcttcggtaaaatatatcgcacgcatgccagagcaaagaaaactggccgtgctcaccgcatttgttaaagcgcaggaaataacagcgctggatgaggccgttgatgtgctcgatatgctgatactggacatcacccgcgaggcgaagaaaacggggcagaaaaagcggctcaggacgttgaaagatcttgaccgtgctgcgctactgctggctcgagcatgttcattgttactagatgagcaggctgacgatgctgagctgagggagaccatattcagcagcatatcgaaaagtaggctggcagaatccgtcagcaaggtaaatgagctggcccggcctcagaacaacaatttccatgacgaaatggtggagcagtacgggcgggtaaagcgttttcttccggctgtattgcgcgacctgcatttccaggcagcgccagccggagaacatacgctgtcctccattcattatctgaccgaactgaacggttcgaaaaagcgcatcctggacgatgcgcctgaacatattattaccggcccctggaaacgcctggtgtacgatgcggatggccggatacaacgtgccggttactcgctttgtctgctggagcgccttcaggatgcactgcgtcgacgggatatctggttcgaaaacagcgatcgctggggaaatccccgcgagaagctgttgcagggggaagaatggcaggctcagcggatccccgtctgccgggcgctgggacatcccaccgatggacataaaggcgtgcaacagtggcggtccaactggatgaaacctggaaagcagtcgcatcccgctttgaaggaaatgcggaggttcatatctgccatgacggtaaatatccttccctga

SEQ ID NO: 451517 - DNA, 192 bp, Serratia marcescens
atgttaaatcattttaagcggtttgtttttttctttgttattttcttcttggggaatgttttttttggtgtggaggtcactatcaatatagtgaagtctagtgttttatcactagtgactgtaatatttatttctgtatttagtagccgttggtggaagaaaaacatcctcaaaatgaaagtagacaaatag

SEQ ID NO: 451518 - DNA, 660 bp, Serratia marcescens
atgaataacagaacggaaatgggtataaaacacggacttgcttgttttgcgttgtttattcttttggttgggataacattttacccaattgttgttcctgataaggttgcactcgaacagtcagggttattattaattattttatatattattgagttctcttttattgttcctttatatgtcattttcttcaggaaatggagcgacatggggcgggggtattttagtgttaggcaatttttaatatttctactcctcattctacttgctcagactgcggttgcttacattctggatatcaaggaagcagaacgctgggtgatggagcaggaaaccggaaaaggtagcttattttggcttaattttttcatgttagtgttaatcgttccggtttatgaagaattggcgttcagaggggggttgctgacggctttactgattttttttcgtggtaatatttacattgcatctctagtgacttcgttattatttgctgtattacacactcaatacacggatgtcagaacgttaattattttgtttctagtttctatcatcctgattgtgtccaggataatatcaagagggatagtaatgccgattgtactgcatatggcaatgaattgttttatattgagcgcaggtgtttatacaatgtag

SEQ ID NO: 451519 - DNA, 591 bp, Serratia marcescens
atgttgagttcttacaagaaaagaaagtatctgacacaagatgaaatcactaagctaatgaaggcatcacgctctggacgatatccagaacgtgatgagtgtatgatatacatatgtttcgcacatggactacgagttagtgaggtttgtaatcttagattatcagatattaacttgcatgatgagataatgcatgtaaggaggcttaagaatgggtttgcaacaacacatccactcttgccatttgaaaaacagcttataattaaatggctagatataagatgccgatggaaaaatgaaggggaggagtttttcttatctcaaaaaggcggggctttatcaagacagcaagtatataacctttttaaaagatatgggagaacagctgaacttaaaacccccctttatccccatatgcttagacactcttgtggctttgagttggcaaatatgggggctgatactagacttattcaagactatctcggtcataggaatataaaccacaccgttttatataccgcgagtaattctgggagatttaaaggcatttggaaacgaagttttatattttccacgccgtcggaatga

SEQ ID NO: 451520 - DNA, 579 bp, Serratia marcescens
ttgaaaaatagaaaataccttacgcaagaagaaattaatcgattgcttgatgcctctcgactaggtagtttccccagacgtgatgagtgctttattaaaatgtgtttcatacatggattccgtgtcagtgagttatgtcatttgagattctctgacatcaatctagttgacaaagttgttcacgtaaaccgattaaaaaatggactgaagacaacgcatcctcttatcagatctgaaatcattcttttagaagcttggttagaagaacgtctatcatggcgcgataccgattcaccttgggtctttctttctcaaaaaggaggtgccctatctcgtcagcaagtttataaaatgctgaagaaatttggtattaaagcaggcatagcgatccctcttagtccacatatgctcaggcattcgtgtgggtatgaattagccaacagaggcgctgatactcgcttgatacaggactacctgggacataaaaatattcaacatacggtattgtacactgcaagcaacgctgggcggttttcagaagtgtggcgtaaagaggggggagaaaacaagtcaaaatga

SEQ ID NO: 451521 - DNA, 552 bp, Serratia marcescens
atgcgtaaaattcatcttatcaacaccttaatcgcggcctctctgatggcctccggtctggctcatgcagcagacgctactgtaaacggtggtactgttcactttaagggggaagtcgttaatgccgcctgcgcagttgacgccggttctgtagaccaaaccgtccagcttggccaggtcaaaactgccacgctgagcgaggcgggtaaaaccagctcttctgtaggtttcaacattcagctgaacgattgtgatactagcgtagcccaaactgcgaatattgcattctctggtgtcgctgttaatgcagacaatccaactgctctggctctggaaagctcttctgcgggcggtgcgacaaacgttggtgtacaggttcttaatcattcaggtactgctgtaactttcgacggtaatttcaacgacagcggcaagttcaccctgactgacggtactaacactctgccattccaggcgcgttatatcgccactggtgctgccacaccaggtacggccaacgcgaacgccaattttaaagttcagtaccagtaa

SEQ ID NO: 451522 - DNA, 540 bp, Serratia marcescens
atgctcaaaaccagactgggactcttcatatttttcattgcgcccctgtctatcgccagcaataagtgcaacgcaacagttcccgcaggacagatgcgtttccagggggtgctcattgctgaaacctgctcggttgaatcgggggacaggcaactggttgttcgtatggggcagattagcagtaaccgtttcaaggatgcgggggacgacgcaaacccgatgccgtttagtttgcatctccagaattgtaatcccaacgtcagcgatcgcgtcggtatcgtttttcgtggcgtagccgatggcaaaaaccctagtgtactgtcggttggtgaaggcgagggaattgcatctggcgttggcatcgccctgttcgatgaacaggggcaatttatcccaattaattctgaatctcagttctggaaaccactaaccaaaggagcacgtatcttgcaatttgttgccaaatatcgcgcaaccggcaatacggtcattggtggtgccgcgaatgcccaggcttggttttctttgacataccaataa

SEQ ID NO: 451523 - DNA, 525 bp, Serratia marcescens
atgagaaaataccttccaatcctgtgttttctgccgttggttgcgggatatgcccatgcggcggacagtactaccactatcaaaggttatctaaaagacaatgcctgctcggtttctgttgactctcaggattttacggtggatttgctgagcaatgtatctagcaatattaaccggataggtgctgtaacgcccgtaatacctttcaagattgtcatcgataaatgtagtagctcagctaaagctgtaagagtgcggtataccgggacatccgataccgttaacacaagtttattgcaagttgctacaggaataaacactgcaagtggcgtaggaatacaaattctagacagtggcaagacgcctatacggctgaatgctgctcaatcgtctctgaaatggaacacattaacgccgaataaatctaacacattggatttttatgcacgtttgatggtaacgcgcactcccgtgagggctgggaaagtgactgcgacggccaatttcaccttagaatatcagtaa

SEQ ID NO: 451524 - DNA, 507 bp, Serratia marcescens
atgactaatatcaaagacattatgctgacgggggtcttgttttttttaacttcgacacttgtcgtgcatgcagcggatgtgaccattacggtcaaagggcgcttggtagctaagccctgcaccgtatcgacgccgtcggagacagtagatctaggcgatttattcacattaaactttgtaaaggctggctcgagctcagcctggcatcccgttacgcttaaattgatcaactgtcccataggcacttcgagagttactgctaagtttacgggtacaacggacaacacaggctattacaaaaacgagggtaaggcaaccaatcttcaattggaactgcaggacaccagtggcaataacctcaacaatggcaaaaccaaagtggttaatgtcaatgactcaacacagtcagcgagtctaccattacgcattcgtgcgttatcagtcaatggtaacgccaagcaaggcagcattcaggccgtgattaatgtcacctacacctatgcctaa

SEQ ID NO: 451525 - DNA, 948 bp, Serratia marcescens
atgttactggttttaaaattaaaagcagcactaaagaaaaaagagatagccactctcgtagcttctgcatgcctgatggcatattcatgcgaagttaatgcatttacttgtaaagttattgcgactggacagctagttaggtcaggaacatctaacgtttatgttgaccttacgccatctattggggtgggacaaaacctgattgttgacttatcaagccaaatacagtgtaaaaatgactctacacctccatatatagatacggattatgtgaagctcactggtggttcagcttatggaggagtgcttgaaaactttaaaggcacagtgtattggaatgacaagacttatcccatgcctttaggcagcaacacagataatgttgtaatcagacaaacctactatcgtggattgccttttaagctatatctaacggctttgggcgctgcaggaggaaaagcagtaaaatcaggtgagctgatagcagtaatgaggatgtataagatagcaacttttgatggtggatacccgagaaatttcacttggaatatttatgccaataacaatgtactgattcctacaggaggttgcgacgtgtcatcgcgtaatgtgacagttactctacctgattaccccggcacgtctgctgtaccgctcacggtacactgtggtcaaaatcaacgtcttgcttattacttaaacggaacaactgcagatactgcaggcaccatatttactaacacgtcatcatccaactctgcaaaaggcattggcatacagctttctaatcgaaacggagtaattgccactaataaaaatatttctctcggtacagttggaaccagtcctgtcagcctgggcctgacggcttcctatgcgcgaactagcggaaaagtagttgccggaaatgtccagtcaattattggtgtgacatttgtctaccagtag

SEQ ID NO: 451526 - DNA, 954 bp, Serratia marcescens
atgaacaacaatagaaataaagatgaatcgataaaacatctggcatcagagtttaaaactgatgaatactcacgatttaacaaaataaaatcgacaaaacaactgatacaagatatagcaaatgcagtaacatatctaaaacatgaaaaagagtacgaagggaggagaaaagagtggggaatcataagcgcccttaacggcttggctattttagccatattaatactgatattctccatcaaccgagatagcgactctgaataccttgggaaatggaaattttatgcgtatcttttttcagtctcccttacggcaatttggataggcgttaacattgaaagactgttattagtcagagaactctggaaatttggcataacaaaacttatggtgtcattatcatttactgcattgcttattttttctacagcaacagcatcatctgccataaatggtattttcggaattgactcatctcacttcccattcaccaggagttttcttactgcatatatctttttcacccacgcatcacagcttgtatatgctctgttgattgcagctgcatttaatcttttaccaataggcgattatctaaaaaaattatgggatgatgacactgacagagagattccatgggggtcaattacctttgttttgctaacactcgtgttcacctacttttcttggggttgggtaagtaataactttaataaagaaaccctgaatgagaaaatatacatccttgctcaccagcttgatttcaatgacaataacttgtgtttaaacctaaggaacaaaaacgccagtgttatcttcctgggaccagagcaaagacaggtaatggttgattttaatactattaagccagacgatatttcaagttttgttgagggtgaccgaagtttcagactggaaatgaaagattttcagattatgccttgtttatattga

SEQ ID NO: 451527 - DNA, 1011 bp, Serratia marcescens
atgaagaaaacatcatcatcacgccggcaggctaaagcccgccaggaacgtcctgacctgtatcaacaggtcacggacaacatcatcggtgccatcgagcgtggcaccttaccctggcgcaagccgtggcggactgaccggaaccggatttataccgggtctgtcatgccgcagaacggcactacggggtaccactacagcggcgtgaatgtgctgctgttatggatagctgcggaagaacgcggttttcactccaatcgctggctgacttataagcaggcggaagccgtcggtggccatgtacgtgccggcgaaacggcaaccctggctgtggtattcaaatcctgggacaagcaggtggaggatgctgacggtaagcctcaatttgatgagcagggtaacccgctgaaaacgcgaatacccatgctgaaaccgctgtacctgtttaacgttgcccaatgcgacaaccttcctgagaccgttgtcggcgttatgccgacaacagagatgggtgagggtgatgcgttggttgatgcgaaaacgcaggctcaggttaacaccctcgttgaggcctgcggtgttcgggttgaacaggtctaccaggacagggcgttttactccccgctccgggacaagattgtcctgccacaggctcagcaatttcgaaccgaggcggattactggtcgacgttgttgcatgagctggtgcacagcaccggtcatgcaacacggctcaaccgtgagggcataacgtcttcctcccgtcggttcggcgacccggtgtacgcgttcgaagaactggtggcggagttgggcagcgcatttatgtgcgcgcagcttggcgtctttggcgacgtccagcacgacagctacctcgataattggctcaaggtattgcgtgaggataagcgcgcgctgtttcgggcggccaaacaggcccgcgaggcgtcagagtttttgcttaaccccctggccgcaccgatggcaacagatcctgccgttgcggcatga

SEQ ID NO: 451528 - DNA, 603 bp, Serratia marcescens
atgttgcattttaaccctgcagaactgtgcgccgtcgtggctgaagtgcgcgccaatcagtgtgcgctggtattggccaaggacaatggtgtctatctgatgccggccgtgggcgagcgaaacgccaccggtcgtatcaagcacctggcgtatgccgacgggtgtcatcccgataaggatgatgcctggtatgaaacgtcccggcagcttgccggcggcgacgactttggcgaggagctggtgctgaacgacagttgcatcgagcgaatactgtcgcaaggccatgagctctggatccacctgttacccgaaacggtctatatgcacgttgctacggttaactgggtgtgtgtcgccgattaccgccgggtgaccgcgcgcatgctgcagctggccgaagtgcattactcggtttgcgtcagccaggatgagtttaaacactggcgtgagcgagccatcaacctgctggccacggcctgtcataccgattgcaaacgggcaaagcccaccgatcgagacgactatctggccctgttcgaacggctgaaacagcgtgttgacacagtgaatccgaaaggggcgctgcgttaccccgcgttctaa

SEQ ID NO: 451529 - DNA, 378 bp, Serratia marcescens
atgtatacccctttaccccacgtacttgacttaaaaaccgcgcttgatgcgtttcatttcctttgcctggttgaaggtaatctcatgagtatacgggcttgccagcggctgggcttggggctcgaacgtgaagcgcccacagagctgaatgatgtggaaaatgccgttatctatgccggggaggcctttggtggtttcctgctggtcatgcagtacggctacatatcgacgctttccgcaggcgggcaagcgcttctgactagcctggataccctgagtaaagatatacacgcgtcatattgggcgcaggccgtggagcaaggcaagcgcgatgtcgaagccgacattgcgattggagagctcgaaggcggttggtaa

SEQ ID NO: 451530 - DNA, 381 bp, Serratia marcescens
atgtctgtactttcactgtggccttctcagcctgaactctcgttcattgaccgtctgtgtgcctgttggcgccgaatgtacccgggccatccctgcgcagaagacgccattgataccgagtggtttaccaacgaaactcgcaacgttagttgtatggcgaccatttccccactgccttccggcggttggagagccacacttgtgtcgcgtaccggttattccaaaagggatttttcctactcctttaaatcgattacgcaacccttttcatcccggatagaagcacttcgtgcagcggaacagctggcaaagcagtttgttcatctgcgccaccgttattatcacggcacgcagcatctggcctgtgtacctgcggcctga

SEQ ID NO: 451531 - DNA, 231 bp, Serratia marcescens
atggttacagataatgaaaaaaaaaccaccgacattaccgacaaacttattgagatcacccaacgcattgatttaaacattaaaacactacttaaggtttggctttcgttgcaaaagaaggaagtcaaaaatgaagttctgaacaaggtaatatcagagctagttagagaacaatacacttgccttgaaggcttaagcatcaccatcgaaaaaatgaaaaaaaaaagatag

SEQ ID NO: 451532 - DNA, 594 bp, Serratia marcescens
atgaaaagaaaccaaattgctttgtcaattattttgcttctctttatgccaaatattatttttgcgggagagataacgaacaaagataatcacttaagagatcaccctcatgatgctcgttgtgacatttccgtcagcaatccaaatatagattatggtgttatgacgccctggaaattggataacatagggaatggaaatctctctcttggaactcgaataattacactaaatattacctgtccttatgctcggggtatgaaattacttatacatggcaactctgtcaaccataacagattccgttacggtaaccagggaattctttatatacgcattctagatgcacagttagatggatacccagtggaactattagcattaacacagaaagcatcatcgctacaagacactgctccaatcactaatgtagatgtcggacaattactcactcctactactcaaggaaaattagttgatgggaaagtctttacgataagggctgaagtacagcccgtgttagaagtaggtaattatcatatcaccagcccgcaacgaaatgagaccataataacatttagcttggtgaactag

SEQ ID NO: 451533 - DNA, 531 bp, Serratia marcescens
atgaagatgaagatgaataaattagtgttggctaccgcacttgttttgggtggttcagcgatcgctcatgcagcagaccaaggtcacggaaaagttactttcacaggttctatcattgatgccccgtgcactattgcaccagaatcagtggatcaaactgtagatttgggccaagtatcaaatgtcgctttgaaagatggtggccgctctactccgcgtcagtttgaaatcaagctggagcagtgcgatacggcaacgtataaaactgtaacaacgactttcgatggaaagtcatcagcagctagccctgatcgtctcggtattattgggaccgcaagtggagcgagcgtaggtattcaggacttggcaagtaacccaattaagctaggcacagctactcctcaacaagcattaaacgatggcaacaatactcttcgcttttcggcatatttacaaggtgatggtcaatccgtggatatcgtaccgggtgatttcacggcagtgactgatttcaaacttagctatcagtaa

SEQ ID NO: 451534 - DNA, 294 bp, Serratia marcescens
atgacttgtactaacgcatctatgagagagatgaatgctgataacaatttaaaaaaaataaataacattcaaattcaattgctggaggttaggcaacgcgtttgtttgaacatagacgtattgctttctcattgggttttattacaagagcgtgatgtcaaacatgattttttagaaagtaccatttcagacttaatccaagagcagtacacttgtttagagggtttgaacatcactttagaaaagttaaaaccagcatacggctcagcaaaaaaaaacaacgatagggaataa

SEQ ID NO: 451535 - DNA, 366 bp, Serratia marcescens
atgctgtatagcgatgaacaatacaagttgtttagttatgaactagaaggtacatctattggtactgtttggtcagccatgagagcagacaactttgaaaaagctgctatgtcttacgatgaaaaaaaagaatattttttagagctactacatcgtcttatgcaggatggaaaaataaagttagctaatgactccaaattcttggagggaagtgtagctgagcagattgcactatatcgagaaaaattccctaaagatcaagaggaaatggatgctggtgccttcgacggattttggtttctgacggaaaaatgtcctggcggcattgtctggatccatgagagcggctatgaagattggacctga

SEQ ID NO: 451536 - DNA, 1185 bp, Serratia marcescens
gtgtccgttaaggggtggagcgacatcacggcccgggtggcgggccagtcgctcatcagcagtggggggaacacggcgatttacggggggagtttcagggagaagctgacgacggcgctgctgagcaatgtggcgggccagctgcaggcggagggcgcgcactggctgggtgaccgtcagccgttactgggtgatgcgggcaaggcgctgagccatggggtgctggccaggggtgacgcccgtggcgccgtggttggcgccctggctgccgaactggcgggcgtagttatcaacgacaacctgattaagagtgagaactggcaagaccagcaagctcagataagccgagtagcaggagccttcgcaggagccattgctactggcaaggcatcgggagcaaacagcggcgctacggccggtgaatttgtcgagcgattcaacagacagcttcatcaggatgaactgaacgccatcaaggaattggcgcagggccgcaaggagcaggaagcgaggctgatggcggcttcatgccgtaaagtggcctgcacctcgcaggaagcgctaaactctgatgagcgcaaatactacgaagccttgatgaagaagtaccctgtcactccggaggaaaatggtttaatttctaattattgggtacagaaagaacggcagcgctacggtaactacccggcgtttgccggctatgacaatgaaaaactgttcacgtataatctgggtgaccagataaccgacggccagttgtttgcgcgcaaccaacagatagagcaaatcagcaagttgacggggtggtcgacagagacggtcaacgcatcggccatggcgatttccattgcaagcacgctggccggtatgggtaaggcaagcgttggcaaccagtacctgtcatccaaactggtggggccaaccagcgcctggaaagggtatctggtcaatgagaagaccattcagcaggcggctacgtttaagagcagagtcactgaattgagggctggtttgccatcagatccgaaacgtagtggtaacgtcgcagtggtcagcatcaatgtggaaggcatgcctaaggaaatggcggcacacagcagtgtcagtactgcaggaaaaggtcttgtaggtaaggggggaacaatttcaaatatagtgagctccctaataaggcaggggaattga

SEQ ID NO: 451537 - DNA, 384 bp, Serratia marcescens
atgaatgaagaaagaatgaattacaacgagataagatcaggttttatgagttgtttttatgtttatcgcagagataacattaaggatagtcaaaacagcaaagtacctacagctataaaacaatcaacagaagtgggatttgcctactatcaatgggaggatgcatacgacctccctattgagatgcttatgcgcgatgtttttacgctgattatgctggctggatgtactccagggatagttgagcaaaatatccgcaaggggatctatgagattctttctaaatatccctttgataagctattacttgatgttagcgaagaagaaaaaagtgagttgctttatgatatggagttgcttggattgcttgataaatctgagtaa

SEQ ID NO: 451538 - DNA, 624 bp, Serratia marcescens
atgatgtactcagaaattatcgctgtcagaggtcatgcaaaaaatacagtaaggaattatcagatgccatccccatacacactcaatgaactgctcgggttgcttgttttttcccgagaacatcactttctccaaaatgatatggaccgcctgttcattgcatgggcagaagatcaaatcaccgaaggaaatgattcagacactcttttaattctcgcttcactggggtttgataaacatcctgagcgtaccgaggttgagttatttttgtcccggtacatggcagagcagcggatagatctaccaccgctaaaaacagcagcattggtctggattaagctgtttgttcgtcaagtatcccagtgtgccaccatccatgatgcagaacagaaaatgtattttctggtgtgccattggtttaaacctgacgtaaagattttcgctgcggtcgtcgataccctgaaattgctttactggaacctctttgatgaatgggaggggccaggttcaagcgaagcagcaaagatggaggagtcagagttctttgagctgattaatcgtgcaatgctgccctattctcgtaaaattgagaccccagattggctggatctgcttgctcggtaa

SEQ ID NO: 451539 - DNA, 282 bp, Serratia marcescens
atgataaatatcaaagaattcataaacgaggttattcccaaactcgagggatatactttcaagtatagcactttttccgaaggtgactttggatctctcgaaagagtagagttcgaaggcaatggaaaggtcggagccattgatttctggtcttcgggatggttgggtttggatgtatacgatatgaggttaaatgatcagatattgaaccaattaatggaaccaaatgaagaacagtacgcagctataggtgagctagtacataaacttaaagttagttga

SEQ ID NO: 451540 - DNA, 1041 bp, Serratia marcescens
atggatgcgcctgaagtatcgcgtacaacagcatggatgcgagtgggagtactcactctatcagcctttatattcaacaccactaaatttgcgcctatcggtttgctgagcgatatcgccaacagtttttctattccgagtgaacgggtaggcctgattattatcctatatgcatggattgtaacgatttcttcgctgacgtgcatatttgtaataggccaggttgagcgtcgtagcttactcacaggtatttttatcctgttcatagcgagtcatgtacttaccgcaatcgcatggaattttagccttctggtgctttcacgtgcgggcgttgcactttcccatgccatcttttggtcgataacggcgtcattggcgataagggtggcaccgccaggtaaaagggcacaggcattaagcttactggcagggggaaccgctttagctatggtgcttggtctcccattggggcgcatcatcggccaatggtttagttggcgcatgactttcgccgggatcgcggcgagcgtcgccattgcattaatcatggtgctgaagtttatgccggaactaaagagcgagaatgcggggtcattcactatggtgcctgagctgcttaggcgatggcctctggtatttgtttatattatcactgtcattattgttacggcccacttctcgacgtacagcaatattgagccgtttatacaaaatttgacaggaatgtcagagaatgtcactacgctaatattgctaatcttcggtgtgtcaggaattgcaggcagtataatgtttggtcgatatggcgaatgctacccaatggcgtttttgaatactgcgctgacgttgttactgataagtcttatttttcttttcccttcatcgaatagccaggttagcctgactctgttatgtgcgttatggggtatggccataatggcatttgggctctcgatgcagtcaatagtcttgaatctcgcgaccgaagtgacagatgttgcaataggttatttttttccgggctctataactttggtatag

SEQ ID NO: 451541 - DNA, 510 bp, Serratia marcescens
ttggatcgtgcattacaacgatggatttcccagaatggtaaccctgttacaacgaggcagagagtttttgtcggtagaagagaaacatataatgaagtctgttatggactcatgtatgctagcaataataataaagtcatatctgcagtcccaggagctacttgcggtaaagccccgccaattgggaataggtgtgattttaatttggatagttcgtattttgatttcacgggcactccacagaaccttaactctctttataaggaaaaggtagttgatataacttgtagtgtaaattcaactattagcattagagcaacttctagtgctgttcgattagacgataacttattgggtaacatttacatcaatggagtggcacttattaatagcagggtgttaaatgtcccaagtaatggcgcaaaaataactgttggtgttaaattatctggatctgcagaggcaggtaaatacaatggatcggaaatattgattatcgacatacaatga

SEQ ID NO: 451542 - DNA, 759 bp, Serratia marcescens
atgagacatcgtaacgtagtacctgcaattatcattctctccactggcgtgttctttagcaaactcgccttttcagatgattccatctttaagatcatggatgatccaacatctgcaaaaaaacctttcgaaggcaatatcaatgcaggttatcttgcgcaatctggtaattcgagaagtaccaacctgatgatgagcagtaatatcacctggtacgattcttcaactgcctggtccgtttggggtaatgccagtagcgcctcttccaatgacgttcgatcctcagaaaagtactctgtcggcggacgaagcaggtacaacttaaccgatcgcgactatatattcggccaagccggctggttaagcgacagatataacggctaccgagcacgcgagacattcaccactggctatggacgccaattactgaatgggccggttcacaacctacgcctcgaaataggtcctggtgtacgtcatgatgtgtatacaggtggaggtagcaagactaacgcactgggttatgcatctgcgacttataactggcaacttaccgaaaatggaaaattcattcaaggcctatctgctcttgggagcaaagatactaccgttaactctgaaactgccctggaagttgctatcagcgaaagatttgcattgaaagcaggatatatgatgacctggaactcatctcctccatcatcagcaccaaatcataccgatagacgcacacaaataactttaagctatgagatgtaa

SEQ ID NO: 451543 - DNA, 921 bp, Serratia marcescens
atgatgctgaataccaacgtggccaatatgttattctgggataataaattactgagagtaatcatctcgatgattattttgactttttattcgggactatcttgtgcagaaaatgaaaatcgcgaacttgatcagttgactttcgatcctggagcacttgaagcagctggtattacacctagcgtggctgaaaatttccggcacgctccacgcttcatgtccggagaaaatgttgtttcgcttgtcgttaatggaagcaatcgtggtaaaattaacgtgaaatttgataatgcaggactcccttgtattaatcatgcttttatcacacatgcaggaatttcgatacctgcaagtgtaaaagaagacacagattgctttgacttagtaaaaatctggccacaaacggaaataaaacttgatccgaacgagggaaaaatatctctaattgccccccctggtgtgctgagtaaagtgcagagcgataactggcaacatggggggatagctggcgtgctaaattacgatgttcagtatatgaactctttcggcgaaataggcaacttgaattacgctcaagctggcactgagatcgggcttaatgcagctgactggatacttcgcagtcgacaaatattcacgagttttaatggaaaaaatcagctcacccatcaagctgcttacgctcaacgtacctttattggtatcaataaggtattacaggctggacaagttaacctttccaattcgttgtttggtactggccaggttctcggtttccagttgtttcccgaaatggctctatcttctcctcggggggggggctggactggtcgaaggtgtcgcagagacaacctcagtagtagaggttcgccaatctggggtattagtttacagcacaactgtaccagctggaccatttaa

SEQ ID NO: 451544 - DNA, 705 bp, Serratia marcescens
atgaatatgaatatgaataagttattttcaaccattatcatcacactatggttattacctttcaatgtgtcgtcaactggggtattcccagagtcatcagttgttatcgttgaagagagtgatggtgaaggttccattaatctacaaaacacagattcatttcctgttctattattatccaatttgcatgatattgaagatgataccgagaagctactagctgtcacgcccccaatagcacgtgttgaaccaggtaaaacacagcgggttcgatttatgttaataagcaaaagtaatttaaagacagagaggctcaaacgggtagtgtttgaaggtgtcccaccacaggataagggtagcaatgctgtgcatatgaccatccgtcagaatctgccggtaattattcgaccgacaggtttggcacgtgaggagacaccatggaagcttctggtttggacatttaaaaatggcgctttatatgtaactaatccgtccccttacattgtaagacttggacaggaggtaatatcactacctgaaaccttggtttggaatttgcctcaaccctatattctcccgggacaaaacatcatgctgaccagacctaataaaaacagcatacctattccgaagaggattcgcatctccccagcaaccacttggggatttaccattgataattacgaagcacctctagcaccatga

SEQ ID NO: 451545 - DNA, 696 bp, Serratia marcescens
atggttaaaaacctaaaaaaaaccacattgctcttggcaatatttgcaaccacatcaactacagcgatggctgaaagtattgatgtaaaagttattggtaccatcacccctgcagcctgcaaacccactttgacaggtggaggcgtagttgattatggtgtgattcatccaaacacactcaaaaaggatgactatacataccttaacgaaaaagaactcgaattctcaatcaactgtgatgctcccgctaagcttgcattaaaagcacaaactgcacggggtgcatcagcccttgacgtgaataacggtaaactatggtcagtagcaaaggcaacacctatctttggtggaaaatttgatacccatggcctaggccttgataacggcaagggaatcggcgggtttggcctccgctttgcggtaaattctactactgcagattctaatcaggtagataacattattcgtgatggtaattcatcgtggtcaaaatcaacggatggctctcttgttaaagcaggaggagttgaacgactatattcgtggtccaaacctggaacaactgaacctgttgctttcactactctagccggaaagctggggattcaagcttatctgaataagtcgtcagaattggacttaactaaacctatcaagcttgatgggctaactacgctagagcttgtctacctttaa

SEQ ID NO: 451546 - DNA, 510 bp, Serratia marcescens
atgaacagctcatccccacggccggcacggtgggtctcagcccaaacacgccgcagcaggtcagcatcccctttcggatcaaacacgatggtgatatcaccgcggcgaatatcctgggtgatcagcagttccgccaggcgggtcttaccgacacgggtagtgcccaacaccaggctatgccctacgcgttcacccagtgccatcgagacatcgagctcatcgggttcaataccatggatcgccgggttccccccgaccggtggcagcggccgcaccggattgagtggagaatccttgcgcagcagctgggacaaccacggcagggtatattcggttttaagctccagtcggcgcgccatctggtacaactgcgacggttggacatatttttccacctccggacggcgggtatccatcaggcgctgggtgtgcttttgctgccaacggaaaccccgccccaggaacagccgctgcctgctcaccgggatctgtcgactttccatgacatag

SEQ ID NO: 451547 - DNA, 1035 bp, Serratia marcescens
atggaacaaaaaaaagatgttgcaattgcaaaaaaaatctcctggggcagtattgccggagggataataactgttgtttcgacatcacttgtgttatccattttgggtacagctttggggttgactattgtggatcctctttcagacgatcctgataacggggcgagtaagactctgttgttttggaccggcgcctctatcatcgccagccttgctgcaggtgcgtttgttgccgggcggctagcaaccaatgatggggtcattcacggatttcttgtttgggcaacatctttaattgtcacggttgtcattggtataatgctagttagcagtgcagtcaaggcaactggtaatgttctaggctcattagcttcagtatctggaagcttagtttcaggtgctggttctatcgcaaatacaggcctgcaggaagcaagcaatttgggagccaagctcttcgaaagccttgatatcgatacttcattggaaccacaaaagctgcaatcaaatgtagttgaagcattacgcaagagtaaaattccatccctgcaaccagagttcgtacaacagcaattaaatggtgcgaagagcgacatcaactcagcattgaaaacattagctacaagacctaatgatgtagacgtgaccatacaaaacatcgtggataaattacaagaacgcgctgcaaccgttacaaaagacatcgaccgaagcactttgactgatgccttgtctaacaacacagatatgaatcagcatgaaataaatcaagccgttgataatatcattgccgcaaaaaaagaaattaataatatcataagccagagattcgatgatattaatgaaaaaatagaacagttaaaagacaagtatgaagaattgaaagaaaaggcactgaggcaggctgctaatgctgccacttccttagctaaatcagctttcctggcgttcgtattacttattcttggcgcaactactagttgtttaactggatatttaggcagcagaacatcaagaaccaatcatcaaatctaa

SEQ ID NO: 451548 - DNA, 249 bp, Serratia marcescens
atgtttaaaaaagcagaaaataaaactgaagagtttaccaatgcaactcaggaaaaactgtctgagcttactgaatctagcgagaaacagataagaagcgcaggaaataaatatatatcgcaaggaagcgaagcactgcaggatgcagctgatacagtgaaagaacaggttgagagcaatcccgtaggtgccgtagttattgctagtctggcaggtgttttcctaggatttattttgggaagaaagtag

SEQ ID NO: 451549 - DNA, 552 bp, Serratia marcescens
atggcatcacgcggaataaacaaagtcatacttgttggccaccttggccaggatcctgaagtccgttacatgccaaatggcggtgcggttgctaacattaccctggcgacctctgagagctggcgcgataaggcgaccggtgagcagaaagaaaaaaccgaatggcaccgtgtcgtgctgttcggcaagcttgccgaaattgccggtgaatatttgcgtaagggctcgcaggtttacattgaaggctccctgcagacacgtaaatggaccgatcaggccggtgttgaaaaatacaccactgaaatcgtcgtcaacattggcggcactctgcagatgttgggggggcgttcgcaacctgccaacgccggacaatcaggccagggcagttgggggaaacctcagcaaccgcaaccttcgcatagcggtacgccggctcagcaaccccagccagctcaatcgggtggaaatgccgcgccgatggattttgacgatgacataccgttccttgggtttggttatggtatcgcaaaatcagccatttacgctttgtga

SEQ ID NO: 451550 - DNA, 603 bp, Serratia marcescens
atgccggtgaacagcgcgtcagtctcaaagcccgccttatcaaggtcgattggatcaaaatcggtcaggaaaaggtatatcaggctgagaagtccgactctacgccgcctcagcagggttccgcacagcaacaatacgcggaaaactctttctgataacgccctctacgcctcgatttttcggggcgtttttccctttctaattctattcccctatgaggattcgattatggcgtctcgcggcgtaaacaaagtcatacttgtcggtcatctcggccaggatcctgaagtccgttacatgccaaatggcggtgcggtggctaacattaccctggcgacctctgaaagctggcgcgataaggcaaccgggaatgtccgcatcgatgatgaccgtttgtcggttgatttgatggatggccgaactatttcggcaccgttatcctggtatccccggcttgcggccggtacgcaggcgcaacgtgaaaactgggaactctgcggggctggaatgggtatacactggccagatctggatgaggacttgagtacggaagggttgttgatgggagcgaaaggcgttactcgtaccccttcattatcctga

SEQ ID NO: 451551 - DNA, 1320 bp, Serratia marcescens
atgttgctgagtcaggctcttgataccgttcttaaattctcccccaaagaattcgctgcgctttccgacttgctctcacctgagcttatcgatgaatgcctcgctgataccgggattgtgacgctccgaaagcgccgtcttcccatggaaatgatggtctgggccgtggtcggtatgtccctgtttcgctcgctttcaatgaaccagcttgtttcccatctcgatatcatgctaccggggagacgtccttttgtagcgcccagcgccgtagtacaggcgcgccagcggcttggcgaagaggtcgtcaggctggtgtttgaaaaaacacgtcaactctggtttgaaaaaaccccgttatcgcactggaatggcctgacactcctggctgtagatggcacgttgtggagaacgcccgatacgcccgaaaatgacgcagccttcggacgcaccgccaatgagcacgcgcgttccgactggccgcagcttcgcatggtctgccagatggaggtcaccagtcacttgctgacaggcgtgagcttcggcagcgtctcggaaaccagtgaggttgaccttgctgcacagttggctgagcagacaccggagcactcgttgacgatactggataaaggtttttatgcgctgggactcctccatcactggagcgcctcgggagcggagaaacactggatgctcccactgcgcaaagacgcacagtatagggtacgggagaggctgggtgcggggcaggagctcgttgagttgaagttaagtccgcaagcccgcaagaaatggccggctgccccggaaatgctgatagccagactgataagcaaagaggttaatggcaagaaagtccaaatcctgacctcgatgtgcgatccgctacgctaccccaaagccgatatcgtcgacttgtatgggcatcgttgggagatagaacatggcttcagggagatgaagcagtatctgctgcagaacgaactgactctgagaagcaaaaagccggagttggtcaggcaggaactgtggggcgtggcgttggcttataacctgctgcgcttcatgatggcgcagatggctaacagcctgaagcatgtagagccttatcaaatcggttttaaacaggctgcgttatatctgacggcccaactgagcctgcttccggcagttgccccagggaaagtcccgaagataatgaatgatatcctggcaatggcggggagcttcgtacttccttctcgacggcaaaggcattacccacgggcagtaaaaaagaagccgcaacgttatacgttgcggcttcctcaaaagcttaactga

SEQ ID NO: 451552 - DNA, 183 bp, Serratia marcescens
atgcgcaataccggccgcattccccatgttcaccggcaatacgccaaggcgctgccaggccgcatcaacctcacgctggaacttgagttctttctcggtgcgggcgaactcctgctttacccactgcacggcgtactttttacgctcggcatcgctctgagcctcgatgccaagggcagttaa

SEQ ID NO: 451553 - DNA, 276 bp, Serratia marcescens
atgaatgaaaaaaccgtcacaatggtgatgtcgcagcaacgcaccaaaacgcgtgatatgggacggtgtgatcgtccggccgtaacgcttggcctggatgaggtaggtcttaccgccgataatgacctgaccgtccaggccaccgtcgccgctgtaggagggattgcggataactgcatacccctggcgctcaaaggccaggagcaacagctcttcgaatacataggggttgattttgcgcagataggccagacgctggccatcaccgcccagtag

SEQ ID NO: 451554 - DNA, 249 bp, Serratia marcescens
atgccgggatttgagttgttccgcattcgcctgcagccagagtcggctggcatcgtcatcacccacaataaacagcgcaccaatcccgggcagttgcagcgggcgcgccgctaccacacccggggtcagttccggtgtcgtcaccggcaatacggccacttcaacttcatcagcagatacaggggtttgcggcatgaccggcggcgctgccgcgtcaccctgccgattaatcccctcaaagtaaggtga

SEQ ID NO: 451555 - DNA, 375 bp, Serratia marcescens
gtgcgtacggttgaagcggtgcccggtattcatccggtcaacccgcacctgccgaaacgtatcaccacactgtacccgtcagagccggtgaccatcacgccgctgggcggctggggtattggcagtcgcaacgtggtggcgctgaaggtgcagaacacggccagccgcaaaattacgctcgatccccgggtactgcaggggcagtttgtgacggcgacgttccagcaccgttatttgggacccgttggcacgccggaagacaccaccacgctgtatctggttactgccgatcgcccggacggggcgtttgtcgcggagccatcagcggttcgcaaagccgtaaaagcggcgaagaagggggctaatcatggctga

SEQ ID NO: 451556 - DNA, 504 bp, Serratia marcescens
atggcggccgacgatcagaagctgctgatggcgtccgatgccggttacggcttcgtttgcaccttcaacgatctggtggcgcgcaaccgcgccggcaaggtgatgatcacgctgccggacaacgccagggcgctgccgccgatggagatccacggcgcagacgacatgctgctgtcgatcaccgccgccgggcgcatgctgatgttcccggttgccgatctgccgcagctgtcgaagggcaaaggcaacaagatcgtctccattccggcagcccaggcggcggccggtgaagacaagctggcctggctgttcgtgctgccgccgcaggcgtccgtcacgctgcacgtcggcaaacgcaagctgacgctgcggccggaagatctgcagaagttccgtgcagagcgcggtcgcaagggcacccagctgccgcgcggactgcagcgtatcgatcgcgttgaagtggatgcgccggtgcgggcgtcgggcggcgatagcgaagagtaa

SEQ ID NO: 451557 - DNA, 1215 bp, Serratia marcescens
atgatgagtaatggtgatcgtcaactgctgccagtattacgcgatgcatcggatagcgaactggccccgctggtggaatacattacgaaggcgttcagcaacggtattgagagtaaagcacgttataaaacctattaccccgcacacagtcagtatgccgatctgattgcccatgagctatgcgagttcggtggcaataccgtcgtcaatctgtttcgcggcggcggcccggagtggaaaactgtggtaatcgatgtggcggacaagtttgacgcgacctacgagaaggactggagtgttgatcgtatcgaactggctgtgctggcggctattactcgcaaggcttggtcggatatggaccaagctcaacgcaaaaatctgcttgaaaaaatggatcttactcagggtagtacgatgcttttcccagaagcaaaattaatgacgcagttgcagtctagccgcttctcaagcttgctcttggcatcgttaattgccaacgtctttgccagccaactgctcggacggacggtggtgatgtccgcagcctcgtttgtggctgcgcgaggggcagcttctttcctggggccgattggctgggtgattactgggctatggaccgccctagacctggtgggaccagcgtttcgcgttacgatccctgcagtggttcaggtagcactacttcgccaacggattcatgctacggcggaagccgataaagtttggtgggagtatcatcgctggcaggatgagaaagatgctgacagctgggtggcgaacatgtttcgtattgtaggactttctactgcagccagtgtaaggcgtgagcgcaatatggcgtttgagcagggagtggtggccgggcaacagcagacgacggaagagtatgcagatgaggtcctcaaaaaaatggatgaagttcagcgttttgaaaaacgttgtgaggcaatgctggctgttgcctttgcttgtgctaaagaggacggtatcgcgccgtctgacgtgcgcagcgatatcgaaacctgctgcctggggatgatgagcgggcatctttcctcgatattacaagccacaattaatcgtcttattgtcaatccgcctgatatccacactgcacttgaacaggcgttcgagttaggtattcaggagactgaggctgctgagctaatggcggtgcttcgtgaggcatttagccagcgtgcaagtgcgttttaa

SEQ ID NO: 451558 - DNA, 993 bp, Serratia marcescens
atggcaaagcgaacaaatagcgtcgataccacgtttttttctcttgagctgttgcgtcgtattccgcgcagtcagcgcattaccgcccaggagttgcaccaacaacttaaggatgcgggaattgagcgcaatgtgcgtactattcagcgccagcttgaacgtctgagccaacacttcgatctggagtgtgatgatcgctgccgcccctatggctggcgatggcgggtaggttcgcgaggcctgagcttggcgcagctatcgccagcagaatcattgctgatgcagatggcgcaggcacagttaaagcatctgttacccgcacatttgatggtttcattttcgccgttttttagtcaagcgggacacactcttagccacagcgaacatgcgcagcgagagcgggaatggtcgcagaaggtgcgggtggtcgctgccagtcagccgctcctaccaccggtgatccaggaaggcgtgtttgacgcggtcagtgaagcgctttatcacaatcgctggctgaatattgattacagcaatgctcatggtactcgtcgtcaggcggaggtgatgcccctcgggctagcgcaacagggctcgcggctgtatctggtatgccgctttaaaggctacgataacgaacgcagtctggccctgaatcgcattacctcggcggtgtgcagtacctttcactttgcacgccccgcagattttaacctcaaacgttacgacgatgatgggcgcttcggattcggcgaggggagaagtatccgcattcatttcaccctcgaaactgcgcgggcgcaattgttgctggagtcgccactgtcagcggatcaacaggtcagtgaccttgaagacgggcggctgcattttagcgccacggtcatcgacagcccgatgcttgatggctttcttgccacctttggcaacaccattagcaacattaaacgcgaaacaaacaatgtcagtacagaacaggaaaacaatgatgagtaa

SEQ ID NO: 451559 - DNA, 723 bp, Serratia marcescens
atgtcagatgcagccagattagcaagccaatccttctctagtaaacctgcgggagtttcttatggccatttcactcctagcgctgccgagatttccgctataagttcaactattgatggtgcactagtaggatctgcatatgcagcagctttatcttacgccgaggccatctcaggactagagaagggatcaatatcttggtcaatcgtgaggctttattattcgtgcttctatagcctgcgtgcaatgctcatcttgaatcgagttattcccttcaactgcagcggagaaatgttattagatattcaaaacagtaagtttttaaaggggggtaagtcaagccaccattggaactgggttactctgagaaaaataccttgcctgaataaaagctggtttgtatcggcagattctcaggaagcttatgaaagcctcagaaagcacagggaaaatgtcaattatacacatggttttaccgacccagacttccatagctgtttaatatctggagaatcagacatcggaaagcgtttcaggtcatatagagatgacgataagtttatatacacctatcttactagccaccttgcaatagcctatccaacaaggctcatacatgagttagacaagtcaatgcgtaaagcatcaatcactttacctactgaaaatattgctcacctaaagagagtatggcccattaaagacaagtgtccgatttgctga

SEQ ID NO: 451560 - DNA, 192 bp, Serratia marcescens
atgattgatcgccagaagctagaaatggccatgattgaaatagccaagcagagcggggaagatattgaccgacacacccgctacaccatccgcaatgacatcaggaacgcgctggcggcaacggcaaggcaccatcagcgcatgagctccaacagctatcaatgggagcggccaaaaacgccacgcagatag

SEQ ID NO: 451561 - DNA, 1347 bp, Serratia marcescens
atggctacatggcaagaaggtaatggtggttccctgctggcggggattggcggccagaacgttaacgcaccacaagctagcgacattaacaccacgctaggcctgatccgcaacaataacgaacttgcacgctccggagcaaacaacgtaggccttcaaacgttgcaagggctccaggggttggcatcggtttaccagcaggatcaacaaaggcaagcgcaggcggcatttaaccaagcgcatgcaaacgcatggaaaactggcgacacatcttcgcttcgtgatttcgcggccgctaatcctgcgttcattaatcaggctcagcaggcattctctggattaaaagagcagcagcgcaacgaactaggtgatttggccatgcgggcaaacgtagctttgtcgcaagggccagaggtctacagtaaattcgtctcagataacaaaagcagccttcaggccgtgggggctaatcctgactggatgatccagacaggagtacaaaatccagaccaactatcacacatgcttacaacgatgagcctgggggcattggggcctgaaaaagcattagattttgccaacaaacgacaacaagtcggaatagaccagcaaaacgctgatacctcacaatactcagcgcagcaaaggacgcggcaaggcgacgagcaattggaattggataggtttaaagcgcagacagataaccagctacgtacaagggagatgtcgcttaaggctcgaattgaaaacgcatccaatgacttagcaagggaaaagcttaacgctgagttgtcaaaggtaaagcaggcccaaacagagaagcttaacgaaaaaataaataccgccgcaggcagtattgacaatcttaatcaggcgcttggcgtaggccatgaaatagctgccattgtcggggatcacccatcagctgttagtcgcgctcaaggtggcagtgttggatgggctccaaactgggcagatgacaccaggacgcttagcgcgaaggcagaggaatacaataccaaaatgatccttcccattcttaaggggacttttggtgctaaccctacagagggggagcgggcatccctcatgcaatcagtgaacagtcttagaaaggcaacaaacaacgccgattttatgcgcgaactgaacaagactcaggacacgatcgtgcgcatgcagaagcgacaaatatcagacctcggcattcctgttaaaaagtccagcgatgaggcaactgacacaaaaatgctattgcaagatccgtctctggttaaggaatacatcacagcgcacggctacctccctgagagctactaccaggccaaactgaaaggaggcatgtaa

SEQ ID NO: 451562 - DNA, 642 bp, Serratia marcescens
atgattgatattctatccatgctatctagcaaggcttctgcggcgttttctcgagccaaggaaacgagaagtggcatcaaagtaactgggttcgtgggaaatggattctgcggattcccaaccgttataacgtattcagatgccgtcaaacagctcgattcagggaagtttgatggaaaccttatcggcggcctaagtattgtttctgcgattcatcaaggaggtataaagggatggtatcagcctaatgatgaacaaatgatgctcgtttggcgttgggcaatcgcctgtctattcatccttgaacttgagcagaaaagggatttcaccctagaggcaacgcatggcatagaagagcatgcggccgtatatgcaagcaaccaaggagacaagtttgtttatccatcctcagagagattttcgttagctgccttcattgaagatatggcgatagataaatttggatatcagcaaggcattaagatggcaatgatgatttatggaggcatgacagagaatagcagtaaaggcggagggctaatcttgtctcaatgggggaaagccatcatggggattatccatgataggttcctagagaaagaaaaaaaagaagtatatcagtccactatgtccaaacattaa

SEQ ID NO: 451563 - DNA, 195 bp, Serratia marcescens
atgaaaaatcaaactaataaacagaagtctacccgggtaaaagtttgcatagagcatgctgaggcggtgctggtggcgctgagtctggcggcggaaaacatggaaccatgtgacatcgtggatgttgtcgacgtctgcagagggattcttgctcaggtcgggcaaaccattactgaattggagggggaattatga

SEQ ID NO: 451564 - DNA, 423 bp, Serratia marcescens
atggaaaagaaaaaccgccccgtacagcaggcggctcaccagaaggttggcacctctgataatagcgacatacctaccatcaagccagcaccgaagaagcaccgcgcccgtgtatatatgctgaaaacgggcgttaatggttggacagaaaatgacattctcaagtattgccgcctctcatctggccgcaactacgcaagcgagctggagcgcagtcttgatattcaactggagcgtatcgatgagaagaacccggatggcattggcagccatttccgatatcgctttgtgagctgtgctgacgctctgcgcgtgatccagttggttaaccataacgccgctgctggtggctatcacggcctatcacagagcgatatagccaacatcttgaccttgtacccagacgccttcaccgccgcctaa

SEQ ID NO: 451565 - DNA, 1020 bp, Serratia marcescens
atggctatatctaaaagcaaagatgaatttgaacagcaattatctatcattgaagaaaagctaaagtcatcggatgatttcttttcaattcttagagaaaataaattatcaatacaaagtttagccaagttgattgatgtaaagaaatatgatgatgttactaaggattttgagctcatacaatattatatttcttttgaaaaaagaagggaggccttgagtcaacttgactatattgatgagttggaaaaaggaacgtacgaagagtgcatagggtcaggaaatgatgcgattagtgaaaaggaattccttgccaaaaaggagagtgatattgcggcagagaaaatcgagttgctttattttattgaaagaattatttctggcgataatgctgctgtacttcacgaagatttaacttatgctgatggatggcaatatcaaacaccaattcggctatttgatatcaaggaaatagcttttgaaaatcagcggaatgggcttctgggtggtatggaaaatgactcatacaatgaggtccttagtaggatgataagcggcaaatacaatttggaggatcttaagaaatatagggaaattccagatggttatggatggcctacgctcggtcttaatcaaagggtttgggcggagattgacgtaaatactccagatgatatcttgatagaagcctttaagaatttcataaaggatgctcgttcacattcattttttgcaggtgatacaccatatcatcttttttctgaaggcgaggtaaaaggtagtcatattaaaaaatggcattctttgagggtgttggcatatttagatctgaaaattttcgcaagaatatctggtagtcggttaaccatgaaacagtatggggatattctctacttcgataactttgatattgataatactgagaaagttagaaaaacacttatacccttggtttctgaaattttctcgggaggatatctgaataacttacttaaaaaaattattgcggaaaatcaatga

SEQ ID NO: 451566 - DNA, 666 bp, Serratia marcescens
atgcaatctactaaaaaggcaattgaaattactgaatccaacttcgcagccgccaaaaccggctacgatgctgtagccgacttgctgcattatcatgagcgtggcaacgggattcagattaatggcaaggattcattttctaacgagcaagctgggctgtttattacccgtgagaaccaaacctggaacggttacaaggtatttggccagccggttaaattaaccttctccttcccggactataagttctctgccaccaacgtcgccggcgacaccgggctgagcaagttcagcgcggaacagcagcagcaggctaagttgtcgctgcagtcctgggccgacgtcgccaatatcaccttcaccgaagtggcggccggtcaaaaagccaacatcaccttcggcaactacagccaggatcgccccggccactatgattacggcactcaggcctatgccttcctgccgaacaccatttggcagggccaggatctgggcggccagacctggtacaacgtcaaccaatccaacgtgaagcatccggcgaccgaagactacggccgccagacgttcacccatgagattggccatgcgctgggcctgagccacccgggcgattacaacgccggtgaaggcaacccaacctaccgcgacgcgagctatgcgtaa

SEQ ID NO: 451567 - DNA, 147 bp, Serratia marcescens
atgttagctggaatgacgctgaaggatatcactccggacttgtgggaattgaaagcgctggcacgtggtacgacggtcatttatggcacgaaaaagttcgcttacccgttcactggtgactggccgggctttcctgatttcacttga

SEQ ID NO: 451568 - DNA, 2100 bp, Serratia marcescens
atgaataaaggtagaatcaaaaaaatcctggaaaaactcgatattgggcttaaccaccgtgttccggttatacatcaaacagagtcttccgaatgcgggttagcgtgcctggcgatggtttgcggctactatggcaaaaatatcgatttaatctcgctgagacagcgattcaacctgtctgctcgcggcgccaccctcgcaggcctcaatagtatcgccatgcaactggggatggctgcccgggccgtttccttaaaccttgaagaaatcgaggcgctcaaaacgccatgtatcctgcattggaattttaaccattttgtggtgctggtcagcataagacataaacgcttcgttctgcacgatccggcgcgcggacgcagaaccgttagcctcgacgaaatatcgcaatactttaccggcgtggctctggaagtatctcccaatagtgaatttacagccgaaacggttaagaatcgccttcaactgagaacgttgctcaacagtattcacggcattaaaggtgcgctaggtaaaatattccttttgtcgttagtgatcgagaccatcaatcttgtcatgccgatcgggactcaactggtcatggatcatgccattcccgccagcgatcgcgggctactgacccttatctgtataggcctgttcttctttattctgctacgaaccgcagtcagcatggtacgtgcctggtcatctttaatcatgagcacgttaataaatgtccagtggcaatcagggttgttcaaccacttgctgcgcttgcccttaggctattttgaacggcgcaaactgggtgacattcagtcgcgattcagttcattagacaccctgcgtacaacgtttacgaccagtgttgtcggtgccatcatggacggcatcatggtcgttggcgtcctcgtaatgatggtcttgtacggcggctatctgagttgggtcgtattaggatttactgcgttatatattctcatccgcctgttaacttacggttattatcggcaactgtcggaagaaactttggtgaaaggaggcagggccagctcatatttcatggaaacgctctatgggatagccaccgtcaagatacagggaatgggcgctcgacgaagtgccaactggctgaatctgcaaatagacacgatcaacagtgggattaaagtcaccaaaatgaacttttttttcaatggggtaaatacgtttattaccgcttgcgaccaggtcgtcattttatggttaggcagcagcctggttattgataatcaaatgacgataggtatgtttgtcgccttcggcgcattccgcgggcagttctctgaacgggtggcctcattaacgagctttttgctgcaattgagaatgatgagcctgcataatgaacgtatagcagacattgcactgtatgaacgtgatgctcaaaaaccggacatcccatatcaggcaacaatgcaacccatatcgctggagagtcgaggtttgagctatcgctatgacagccaatctccccccctattttgcgatctcaatatccatattgccccaggtgaaagcgttgcaatcacaggcccttctggagccggaaaaacaacgttaatgaaagtgttgtgcggcctattcgaacccgatgctggcatggtcatcgctgatgggatggatatccaacaattgggattaaataatttccacaaaatgattgcttgtgtgatgcaggatgacaaactgttttccggctcaatacgcgaaaacatctgtgggttcgaagaggatatcgacgaggagtggatggtcaaatgtacccgcgccagctatatccatgatgtcattgtaaaaatgccaatgggttatgaaacgttagtcggagaattgggtgagggactttcagggggacaaaaacagcgtctttttatcgcccgtgcgctctatagaaaaccagggattttatttatggacgaggccacaagctcactggacaaagacagtgagtattatgttaacgaggccatcaaacagatgaacatcacccgagtgattatcgcccacagagaaaccactatcgccactgccgaccgcgtgatttcactggcttaa

SEQ ID NO: 451569 - DNA, 1320 bp, Serratia marcescens
atgttgctgagtcaggctcttgataccgttcttaaattctcccccaaagaattcgctgcgctttccgacttgctctcacctgagcttatcgatgaatgcctcgctgataccgggattgtgacgctccgaaagcgccgtcttcccatggaaatgatggtctgggccgtggtcggtatgtccctgtttcgctcgctttcaatgaaccagcttgtttctcatctcgatatcatgttgccggggaaacgcccttttgtagcgcccagcgccgtggtgcaggcgcgccagcggctcggcgaagaggtcgtcaggctggtgtttgaaaaaacacgtcaactctggttcgaaaagaccccgttatcgcactggaatggcctgacactcctggctgtagatggcacgttgtggagaacgcccgatacgcccgaaaatgacgcagccttcggacgcaccgccaatgagcacgcgcgttccgactggccgcagcttcgcatggtctgccagatggaggtcaccagtcacttgctgacaggcgtgagcttcggcagcgtctcggaaaccagtgaggttgaccttgctgcacagttggctgagcagacaccggagcactcgttgacgatactggataaaggtttttatgcgctgggactcctccatcactggagcgcctcgggagcggagaaacactggatgctcccactgcgcaaagacgcacaatatcgggtacgggagaggctgggtacggggcaggagctcgttgagttgaagttaagcccgcaagcccgcaagaaatggccggctgccccggaaatgctgatagccagactgataagcaaagaggttaatggcaagaaagtccaaatcctgacctcgatgtgcgatccgctacgctaccccaaagccgatatcgtcgacttgtatgggcatcgttgggagatagaacatggcttcagggagatgaagcagtatctgctgcagaacgaactgactctgagaagcaaaaagccggagttggtcaggcaggaactgtggggcgtggcgttggcttataacctgctgcgcttcatgatggcgcagatggctaacagcctgaagcatgtagagccttatcaaatcggttttaaacaggctgcgttatatctgacagcccagctgagcctgcttccggcagttgccccggggaaagtcccgaagataatgaatgatatcctggcaatggcggggagcttcgtacttccttctcgacggcaaaggcattacccgcgggcagtaaaaaagaagccgcaacgttatacgttgcggcttcctcaaaagcttaactga

SEQ ID NO: 451570 - DNA, 195 bp, Serratia marcescens
atgaaaaaactcttacttatttttccgctggtgtttactgcgccggtacaggcttctgaagtcactgtaggtcaggtttgcaaggctgcttctgctgcgatgtttggccgcgactttaagctcatgcagctggataaagtcgaatcaggtattgcctacgtacatcatatgcgactgaacgatggcacccgttag

SEQ ID NO: 451571 - DNA, 888 bp, Serratia marcescens
atgaaaaaaatcggactggccattgcgttagagaaagacgccaatagccatacatggacctttattgaggctatcaattatagcctcaaacatttccctgaattcaaacaaaacacgttgaaaatcgtcaacgacgagaaatcagcgacaggaggaaaacgcgccgctgctgagttaattgaatggggcgctgacgtggtggtcgggcatttttccagttttgccgctttggcggcattaccgttatacacccgacaatccgttcccttgctcctaccggcttcgacagcgtgtgaacttggcgaatataacaaatttaacagaaccgaggtattgaaataccagaaagatgacgccgccttgctggcctattgtgctaatgacagcattattaattgtcagggtgggaacgtttatattgtgatgcaggataacctttatgctaatcggatgaaggagcacctccctatactggccgatgttcggattatccgggaaccgccgctgcgagtagaaaaaggggacacgtttataatcattggctacagtgactttgcgtcagcagccatcaaaaagctgtctcagacacaggtctatcggatcctgttggttgatgactcggatggtgttgaagtccataaatcatgcattctacgacctcaacgtttgtcacgtgttcgctcggcatcgcatatttctcggcatggtatgaaacgtccatactggaatgaaaccttgctggcattatcgctagcctgcagcattacatctcaacaggaagccgaatatggggagggattaagtttcaacacctatcttggattacaggacttcgataaatttaattgctatggcgattgcatattgatctcagaagacctgctctag

SEQ ID NO: 451572 - DNA, 729 bp, Serratia marcescens
atgactcgattcatacgccggaccatgacaatcctggcgcttatctgcatgactggacctgcgcactcaacgttcatcttcgaccgctcgactaacatcctacgcggtgaagggtacatgcctcccatcgtcggggggcagcccgggttgctgggggctgatcggtgccaaataaagatcgtcgtcgacgggcagttctataacaaaatctggtctccagtcagtgagcccgactgccgattttcccctcaagaagcgacactgaaatggatgctagcccagatcgccggcggtataaacatgacggccgctggagccgctcaaggagcgaactacatcgacctcgcttacttggcagaatggggaaactcgtggtccacccacgggctggatattaaatcaggtacgtcaactgcgtgctcggtcatgagttccataacacttgaacatggcaccctagctgaaaacaccgctgtaggacatatggctagaaacacagctaccctgatgtgcaatggcgaggctgacgtgaaactgaccgtcaatccatctaatacaaaaatgaccaacggcatgaattcgcggattctagtcctaggggaatcgtccaagaaaataaaagtcggggaaggggtgacaacaattgacatctcaagcgagttgtctgggaaacccaaacaacctgggggggcaaccggatctgccgtgctgcaactcgaggtgcagtga

SEQ ID NO: 451573 - DNA, 1293 bp, Serratia marcescens
atgacatttgatcagattttgccagagttgaaatcattattcttacgtttcgaagatgacttgacgtcatgcaaacctatcctgataaaccgcgatttaaatgcccggattcgcttgatcgttgatgaaaagcatgaaaccgaagagacactaaagctattggaaaaattggtatctgaaatatatcaggtactgactgacaagcatgcttatcctcctgaaagagcactgttatttgaagaggatattgaggcggaacgtttggcctcccatgcttttttattagacagtagattggatggagtttacgttgtagatcgccttgcaactccaaccgattggtcgcaaataacaccggttagtgagaaaaaaaatagaacggtatttttctccatcaaaggcggcgtagggcgctcatcttctatggtggccgctgcgtgggctcttgctgagagtgggaaaaaagtcatggtgctagatttagatcttgagtcgcctggcttatcttcggctttattaccagatgatcgtcgcccaggctatggtattgctgattggttggtagaggatttagtgggaaatggggatgctatttttgacaatatggtagctgctagctcactttctcataatggcgatatttgggtcgtacctgcacatgggcgagaacccggtgaatatattgcaaaacttggccgcgcttggatgcccttgaaaagtcaacatggcatggagacttgggccaaacgattggggcgtttgcttgataagttagaggagcgctggcagccggatgtggtgctcattgattcaagagcaggtattgatgaggtcgcttctgcctgtattactgagttaggggcttctaacattttgctctttgccttaaatggctctcaaacttggtcaggatatcgcatcttattccagcattggcgccggactggcgtgatccaagatatcagggaacgcttgcaattggtgggcgccatgttgcctgaactggatactgctcgttattttgatgagttacgggaagatgcttggaatttgttcgcagaggaactctatgatgagattcctgccgcaactgagggggatttctggaacttcgacattgctgatgaaagtgcccctcattatcctttagctattcgctggcatcgtagttttgctggtttaaaaagtttgcatggacgtttcaatgaaattgatggtagcgaagttagcgctattttcgggccgttgattgactatattaagttacagcagccaggagaatatgatgagtag

SEQ ID NO: 451574 - DNA, 1443 bp, Serratia marcescens
atgagtagtcaagaaatcagagatgctatatccaaagctttaccggcgggaacatcgaatgatgatggtgagttgactaaagacgctcgttgggtatacgtaccaccttcgcatatcaaagccctacgtttagagtccaatttagtgattggcgggcgtggtgtaggtaaaactttctggagtaatgcattaaccaatcctgccattcggcaagcgctgggtaaagacgtgccagatctttcccatgtggatgttaaagcagggttttcacttacaccatcaaatcagcagtatccagatgctgaggttttttcctcactcttaagccagggtttttcccctgctgatgtatggcgtgccatcgttgctcgttgcctgtgctgtgagctgaataaatcagaaatgggtgggcgatggagcgagtgcacggcttggttaaagaatgatcctgagtttttcagtatgttgctggaggaagctgagcagcattacgctcaacgaggtagtgcgatacttattgtttttgatgcattggatcgcacgagtaatgagtggcaaaaagtggatgctatcgtgcgcggccttttgcaattagtgttacagctaaagagatacccacacctccatactaaggtatttctgcgtgaagaccagttccgccgtaaggtaacggattttactgatgcatctaaaattctagcaacacgtgtagaattaacgtgggccagttatgatctgcatggtttgatttggcagtatttctgtaatgcttctgatagttcggggaaagtgttacgagaaatctatcgtagcgtcgttggtaatgaacctgaaaagttacctaacggtgtttggcaactggatgccaaagtgaaaaaaaatgaagatattcagcgccaactgtttatacaaattgcgggtaactggatggggcgagaccgacgacgtggagtcccctatacatggagcgtaggccatttagcggatacccggggtttaacatccccccgctcttttttatgtgctctgcgatcggcggcggatgactcgcgattacatcatgctgagcacgggatacctctacactacgatagtattaaacgtggggtattggcagcttcagaaattcgtgtcaaagaaatggcggaagactacccttgggtggaaacgtacatgcagccactgcgtggtatcacggtaccctgcccttttgaggcgatagagcaggcatggacaaatgtaacaatgcctgattctacggctagtttgcctccagagaacgttactgaaggtgctcaaggtgtttttgcagatatgaaagggcttggtattttcgaaacgatgaaagatggtcgggtcaatatgccggatctctatcgtgttggttttgggctaggaaggagaggtggtgtgaaaccagcgaagaagtctagcgatgactga

SEQ ID NO: 451575 - DNA, 345 bp, Serratia marcescens
gtggtgttctatttctcgctggtgggaacgttggttggcggcctgatgaccgcgttgctgggtttttccttgctggacggtgcaatgctgttgtgcgtctgcgccatcggcgtcttcggcagtctggggcagatcgccatgacgcgcgcctacgggggcggcaatgcggtgattgtcagcaccctctcttacagcaccatcattttctctacgctgcttggttatctgatatttggcgagcagctgtcttatatcgccgccgccggtatggcgctgatcgtgctgtccggcgcgttggcggtgcgcaaacgtgcctcggccaggcctgagcaggcggtggcataa

SEQ ID NO: 451576 - DNA, 222 bp, Serratia marcescens
atggcagatactattgatatggcccaggagcgccaggcattgatgctcgagaaacaaatcgcgtacgccaggccggtggtcgcaacgccctcggcgttctcttgcagcgattgtgaggcggcgatccctgcagcgaggcgtatcgcggttcctggcgttagccgctgcgtgacctgccaggagatcacagaagccaaacaacgccatgtcgcccaccgttaa

SEQ ID NO: 451577 - DNA, 513 bp, Serratia marcescens
atgaactcactcgctaaacgctgcagcgtggcggctattttagcgctcgccgccctgctgcctcagttcaatacgctgaaaacctccgaacaaggtttgcgcctgatcgcagatttcgaaggctgccggctatcatcctaccaatgcagtgccggcatttggaccaacggcataggccacactgccggcgtgaagccggacaccgtcatcgacgaacgcaaggcggccgccaatttgatcgaggacgtgcgcaccgtagagcgcggcatcgcgcgttgtatggacgtcgacatgccacagcaggtttacgacgccgtcagcgctttcgctttcaacgtcggcgtcagtgccgcctgccattcaacgctggccacctttatcaaacgccgccagtggcgggcggcctgcgatcaactgccacgctggatttatgtcaacggcgtcaaaagcaaaggcctggaacgccgccgaacggctgagcgtgcgctatgtctgagcgccgtcccacactga

SEQ ID NO: 451578 - DNA, 465 bp, Serratia marcescens
atgttaaaacccgaacagctgcgtgccaaattgctcaatacggtccccattttgcaacaaaaccccgaacggctgcgtcttggcattgctaacggccgagtggtctcaacgctcgccacctcgctgtccttcgaataccgctatcagcttaatctggcactggatgggccgtcagccgacgacgatctgatcatcgtcaccgtgctggcctggttacgcagccaccaacccgacctcttcgccaatccagaaaaacgaaaaaatgatttttcgtttcaaagagatatcgagactccgaaccagctgacagtgcggcttcaactcaccgaaagaatcctggtggagatgcgcgatagcgcactgcatatcattccgcaggctgaaccccccgaaccggagaacgtcattcgcttcacccaggtttatttgcacggcgagctactcagcgaatttcggcaaccgtaa

SEQ ID NO: 451579 - DNA, 558 bp, Serratia marcescens
atgatgaataacatgaagaactttaccctcgccgaaccggaaacggtagagcagaaacagctggccgcctcgcacggtgttttgtttttgaaatctgacaccggagaagactggtatgaatgtcaaaaaagcttccgacctgagacggtaaaactgatgtatgataaggacgggatcattcgttcaatcaccgcaaaaccgaataccgaaggtcattatgacgtttccggatttttcccggaaaatatgagcgtggcggaaataaagagtctacctgaaggggcagatataaacggacgctggctatttgacggagaaaaaatcacgctcagggaatattcagaggaagagttgcaacagcaagccgccaataaaaaaaaggagctgattaagcagagttcattgcaaatagaaacgctcaacgacgccgccgatctgggcatggccagcgaagaagaaaagcggctgctggcccgctggaaaacctatcgcgtgctgcttaatcggatcgattccgaagcggcccctgatatcgactggccgcaaccgccgcaataa

SEQ ID NO: 451580 - DNA, 2055 bp, Serratia marcescens
atgagtgataccggcagcaaagcagcgttaaaagacgcggacaacaccgtccgcaaatatcgtcagcagctcaaaatcgagcggaaaaaccaatcccagctcgccgaattgttgaaggtcaaaacggcgcaagcggacgcgctacgcgaactggatgatatccgcaatatccgcgcaagcttgcccgcgttcttatcttctccagaggatattgcgacggcgcaacaggcaaacttaaattacgtcgtgcaaagcgcgcggaaagccctcgcatctcgcagtcaacagcgtctggaacagcaattgcagtcgagagaggtggatatcaccgacttaccccttgcccaacgcacattccaaaagaagtcagacgtgacgcaaagcctccttactcatcaacgcgaccaacgccagggcctgcgccaaaagagacgtgaggaggtgcttagcgattaccaacgtcgccaagaaaaaattggcaagtttcgcgacttcagcgcacaaagcgcagagacggccggtgagattttcggtgcaggaaagacgttgtttacaccgggcatgaaattcgagcaacagatgtcgggcgtacaggcacagttggggttgaataacggcgatccatatctggccggtttgcgccggcaagcaaccggcatgactaccgaaggacaatcgccgcaagaggtcgttcaagcacaaaccgcgctggcaagctccggttacaatgcgcaggaggtgctggccgccgcaccggcggcgttgagcctggccacagccagcggcagcagcattgaggatgcggtaaaagcgctgacggggatccaaagcacctttcagctgccagtcgctcaagcaggcaatatcgctgatgtattggccaaagccggcgccagttatcaactgagcctgagcgagctcgaaacccagctgcgttcggtcgcgcccgcagcgaaacgcgatggcctaagcctggagcaagccgcagcacaactggcgccgtcgggacgcagcctgggcaaggttgacggcgcggcccagctgttggtcaccgttaaaggcgacaatctggatggcgatgtcaaaaagctgttcacctcatgggacagtctgcgcatcggcctgttcgatggacagactgccgctttgcgccagctgacgcaaaccgctaccggctggttgaccgcgctcgaccagtggtcgcaggccaacccggcgctggccaataccttgatgaccgtcggcactgccattaccgcattggtcggcggcctgtcatccatcggtgttttcatcgctccggcattgagcgccgtcaatatgctgatggctggcgccggcctgttgggcacggtattcacctccgttggcggcatgatcgccggcgcattcgccgcgctcagtctaccgatcgcagctgtcgtcgcagcgatcatcggcggcgccgccttagtgtataagtactgggagccgatcagcgcctttatgggtggcgtcgccagcggtttcgtcgccgccatcgcccctatcgtcgaaagtttcactcctatgctgtcgctgttcgaaggggtcatcggcctggtcaaagccggctttaatgcgctgctggagctgctgacgccgatcaagatgacgcaagaagggttaaacagcgccgctggctacggcaaagcgttcggtgagatcctgacgaccgtcttgacggcgccgatcgcgatgtttgccaagctcagcggtagcgtgatacggctgttgaaagccttcggcctgttgagcgccaacccaccggacttggatgatgagcaaatcaaaaccgtgcagaacgatttggcagccggcgcgctgaaagagggggcggcggtacagaactatcaaccggccatggccccgggagctatctcaacggccaacaaccgtaacatcaccaatcatatgaccatcaataccaccccgggtatggatcgtcaggaagttgaacaaatcatcaaccatgtgaatcgccagaaccagctggatagcgacaacgcggtttattcaaactatcgctttgcataa

SEQ ID NO: 451581 - DNA, 462 bp, Serratia marcescens
atgatgctaacgcttgggctgttcgtatttatgttacgcacagtcccttatcaaaccatgaatcgtcagatggactaccgttggcctgaaaacaacagggttggacaacgtgccacctcacagtttcttggcgtcgatacggagacgatcacgctcagcggtcaactgctgccggaactgaccggcggacgtctttcgttgctcacgctgcagaccatggcggagcaaggccgcgcctggccgctgattgaaggcagcggcaccatttacggtatgttcgtgatccagaaaatttctcaaaccagcacccacttctttccggatgggcagccgcgacagattaatttcgatatcacgctgaaacgcgtcgatgagtcgttgcatgccatgtttggcgatctgcagcagcaagcgaccgacttgctcgataaagcgcaaaaagcgacggggataagcttatga

SEQ ID NO: 451582 - DNA, 1152 bp, Serratia marcescens
atgatcactgaaacctatcaacccgtgggggcgaaactcgcccccgactttattctgacactgagcgaaaaagacgtcacggagaatatccgcgatcggttgatctcactgaagatggaggatttcagcgggttcaaagcggacaccctcagcctcacattggatgacggcgacggccagctgcgtatgcccgagcggggggcgattcttgagctgttcctcggctggcagggttccgccttaatcggccagggaaaattcgtcgtcgataccgttatccacagcggcacgccggataccctgcaaatcaccgcccgcagcgcggattttcgcagctcgatgacacaattgcgcagcctgtcttatcacgagaaaacggttggcgatatcgtgcaacagatcgccgatcgcaataacttgccggctccctcgctggcggcggagattgcagccatcagcattcctcacatcgaccaaaccaacgagtcagacctgcagtttctcacccgccttgccatccttaacggtgctcaggccagcatcaagtatcagcggattttgtttctgacgccgggtatggggcgcacagcgaacggtgatccgatccctatgatgacgttgacgcgcaacgacggcgatcgccatacctttcaattggcggatgccaaagcctacagcggcgtctccgccgtttggctcaacacggataagcccgaagaggcgcagaaaaaggtcagccttcaccgccagcctttggcgcccaggagcggcgaagcgcggcatcccgccgccaagcccggcacgcccgtcgccaagcaggagaacgcgtcaagttatatggcgggccaacccgaccaggtctaccacataccgaaagtattccgcgacaaggtttccgccatgcgcgcggccgaagcagtatttaagcgcatccaaaaaggcgtagccaggtttacgatcaatctggcggtaggacgtccagacctgtttcctgaacgccctattcaggtgcgcggctttaaaaacgtcatcgatgaccagcggtgggtcatcgataaagtcacccataacctgagcgccgccggctatacctgcagcctggatctggagatctcgttggtcgacctggcgtaccaaagcaccgagtcgtga

SEQ ID NO: 451583 - DNA, 591 bp, Serratia marcescens
atgttgctgagtcaggctcttgataccgttcttaaattctcccccaaagaattcgctgcgctttccgacttgctctcacctgagcttatcgatgaatgcctcgctgataccgggattgtgacgctccgaaagcgccgtcttcccatggaaatgatggtctgggccgtggtcggtatgtccctgtttcgctcgctttcaatgaaccagcttgtttctcatctcgatatcatgttgccggggaaacgcccttttgtagcgcccagcgccgtggtgcaggctcgccagcggctcggtgaagaggtcgtcaggctggtgtttgaaaaaacacgtcaactctggttcgaaaagaccccgttatcgcactggaatggcctgacactcctggctgtagatggcacgttgtggagaacgcccgatacgcccgaaaatgacgcagccttcggacgcaccgccaatgagcacgcgcgttccgactggccgcagcttcgcatggtctgccagatggaggtcaccagtcacttgctgacaggcgtgagcttcggcagcgtctcggaaaccagtgaggttgaccttgctgcacagttggcttag

SEQ ID NO: 451584 - DNA, 123 bp, Serratia marcescens
atggaacagcggaataaacctgaaatggacgtagaggcgatgttgctgtgtaagtatcccggcaaaacggcccattcacatttagagagcctttggcacaccaacttccgttcttggcactaa

SEQ ID NO: 451585 - DNA, 1455 bp, Serratia marcescens
atgatttcggataaaataaataaaaagactatttctccaaagaaaaatataggttttactgaaaccgaaaggaaattagcggcgatttgtgataaaacttttctaaagctctggtcttggacaagtttgtatagcgatgaaggtatcaataaaaatggaaaagggaaggaaatctgcgatcttttggtttattacagaaatacagttattattttttctgataaagaagtgatatacactgaaaatagcgaaaaaaatattcctgaagaagatggaacttctgtagcttggaaacgttggaaaagaagagcaattgagagttcagtaaagcagattgaaggtgcagaaagttggattcgcacacattatgacagaatttattttactgaacaatgtttatcgagtgataaatttccgtttataaatagcgaaaatatcaatcaactaaagatttatcgcgtggccatcgctaacggttgccaatatccgctttatctaggtaatggtatttatgatggtattatcactaactgtagagaccgtcatggtaactatatacacgtttttgatagttcaacgattgaagccctaacacaagagctaagtaccgtaaatgaattcgtaagatatctggaggaaaaagaactcgtagctcgggaaggattttttaccaactatgataagttgatagaacttgatttgttagcgacatatatcctcagtccatccacaaccagaggcgcaggtttatactttaaggaagaggggtttaaaattgaaaggtttaatgaacttaacaaagctagtgattacttaaatggaaaacaggaggatcgaacctcacttatttttgatgatttaattgagtgtatttctgatcagtttgtaaaaggagaggttatctgtacaggcttaactaagtttgaagcaaaccaaaaagtgttggaggttctgtgtgattttgatcggttgagtcgtagagaactttccaaaagtattattgcaaagtttaaagaaaccttagggcgggctattagtagtagatctattctattgggagaggatgacccatcttatgctcgtaattccatttttgccgttgttatttttccaaaggcggtttgtaagaaaatgaataaagtggagtatgagaaggaaagacgtttgattgcacaggcttacgcaatttattatcagcagaagatatcaatggacagagagattgtagtggctgtgtttgataatatttcagaagttccagcggcgtgggacacaaactatagagactttatggctagagtgtacaaaaaagactttgcgctggtttatcgtgataagaaaattattaccgaacaagaaaataacttatttcatgaaatacaagataaatgggggatattaaaatcgtctccaataaatagtttcctaggcagggtttatcagtttcatgactaa

SEQ ID NO: 451586 - DNA, 1392 bp, Serratia marcescens
atgagtttcaactcaactccgaaggagttaattgaacaaaatatcaatggattgctttctatccatgatagttggcagcgtattcctatggatgcgatagccaaaatcactaatggctttgcatttaaatcatctgaattcaatacaaaaaaagatggcttaccgttaattagaatccgtgacgtactaaaaggtaatacatcgacttattattctggcccagtaccagaaggatattgggtgaatccggaagacttaatcgtcggaatggatggcgattttaatacaacaatatggtactcagaacctgctttattaaatcagcgggtatgcaaaatagatatagatgaagaaaaatatagcaagagatttttcttccatactttaccggggtatttatcagctataaatgtaaatacatcttcagtaacggttaagcatctttcatcccggacactgcaagagactttatttcctctaccaccactagctgaacaaaaaatcatcgccgaaaagctcgatacgctgctggcacaggtagatagcaccaaagcacgtcttgagcaaatcccacaaatcctgaaattttttcgtcaggcggtattgattagtgctgttaatggaagactcactaaagaataccatccaaatggaatttttggtgttcaaacatcattgggagaattaatttcaaatggacctcaaaatggattatataagtcgtcaaagttttacggtgaaggcgtcaagattattcgcatagatagtttctatgatggaaaaatactgagtctggataaattaaagaaagttgatattagcacagatgaaaaaaacagatggcaattgcacgaaaatgacattctaataaatcgggttaatagtattgagtacttaggaaaatgtgctcatgtaaaaatgctttctgaagatgttgtttttgaaagcaatataatgagattttctattgatacaacaatgatatcaccggagtacctgactctatttctttgcagtgccgcgggaatcaaggagttacgtaagaacgcaaagttagctgtcaatcaggccagcattaatcaaacagatgttaaaaactgtaaactaactcttccaacattgacagaacaagccgaaatagtccgccgcgtagagcaactcttcgcctacgccgacaccattgaaaagcaggtcaacagcgccctaacccgcgtcaataggctcacccagtcaatcctgtcgaaggccttccggggcgagcttaccgcccagtggcgtgctgaaaacccggaccttatcagcggtgaaaacagcgctgccgccctgctggaaaaaatcaaggccgaacgcgccgccagcggcggtaaaaaaaccgcacgtaaaaaagcgtga

SEQ ID NO: 451587 - DNA, 4767 bp, Serratia marcescens
atgaccgacaacaaatcttcagccggcttgcgccggcggcaacgttccatgcagacggtgcgttatatcacgctggcgacggcgcttagcgtgggagcctcctgggcccagtccgtcacggtaacgggcgacgcttcggcgagcccgaaccccaatccgatcccgcactgggattacactcactttttagagctggttattggcaacagcggtgagggagagctggccattgaaaatggcggtaccatgacttccggtctttacccttggcaccgggtcatccttggcaagcttgccggcagttcgggtactgccacggtctccggactgggttcactctggaaacatcttggcgatatccacgttggcgacggtgggcgcggcgagctgaacgttgtggacggtggcggcgtcagcgccagtgagattgaggttggtatcggtgggttgagcatcctgaacggcggcaccgtcagtgccgttggcgttagcgctaaaaatgaaaatagcgccattagggttagcggtgcgggctcgcatctgcagagttctttgtccgtaagtgctggaagcgcacagattggcgaggggggacaggtgagcggcgaaagcggcagtatcggcggcaacggcgcgataactgtctcggggcccggttctcgctggacggttggttggtatttgggggttggctctggtggcaccggctccttgctgatcgaaaacggcggtgcggtggttacgaccgacgacagcggctacatcatgcttgggcataatagcgatacgggctacggcaatgtccaggtaacgggccagggatcggtatgggatctggcggggaaactgttcattggcaacaccggcaacgcttccgtgaccgtcgacgatggcgggcggatcattgcgcgcggcgaggccagacttgccgatggctccactagtacgtccaacctgaccgtggagaacggaggccgtttttccagcgatcggctggtagttggcaaccatggagaggggtcgctcaatttgcgcaacggcggtgagttgtctgtcaggctactcgatcttggctggaggggtcttggctccagcatcatgaatatcggctcggcgtcgaacaacccatccgatgccgttgctgcaggcaggctgaatacagagtttgtatcattaagagataacgccgtcctgaacttcaaccataccggggacgaattgaaaatcgatggcagcgttataggtattggccggctaaaccatatttccggcacaaccagagtgagaactatgtctggtgcttttcagccattgatcgtatccggcgggaacctgattatcgaacaagtaaactacttatctggtaagttggctatcctgtccggcgcttcgctggcggtcgatgccaggcacggagagagcagtatcgacgcgacgttaaccggcggcggcaacctgaccaagtctggagacgaaaaactggaattcctgggcgacggctccggtttcacgggcgataccagggtgacggccggcgagctgcaggtgttttccgaactgggcggtaaggcagacgtgagtggcggccggctcagcttgtttagatacgatgattatgatggcaccgtcggcggcagcgtgaccgccagcggcgacggtacggtcgcggtcgccggcaacggcatcatcaagggggacctgacctttaaccgcggcggcgtgctggaaggcgagcaggggcaaacgctccacgtcggcggtgcgctgaagctggaccgcgattcgcaggtgaacgtgggcctgagcagcgcgccgagcccgaccctgtttaaggtcgccggcgatctgacgctggacggcaccctcaacgtcagcgaccagggcggcttcggcgccggcatctaccgcctgttcgactacggcggccggttgttcgacaacggcctcacgattggcagaacgccgaccggcgtgacagccgacaacctcgctattcagaccgcaatctacgggcaggtgaacctggcttccaccgccggcgccacgctcagcttctgggacggcggcgacgccggcaaacacaacaactcgcaggttgacggcggttccggcgtctggcgcgcggacggccgcaactggaccgacgtttccggtgcgctcaacggcccttatcagcctaacccgagcttcgctattttccagggcgaagccggcacggtaacggtggatcacgccgcgggcgccatcgccgccaccggcatgcagttcgccagcgacggctatcggatcgagggcgacagtatcgacctgcagggcgcggacggcgaaaccttcattcgcgtcgggaacggcgcggcggacggcgcggccatgacggcgaccatcgccaccgatctcagcggcgacagcaaactggtcaagcatgactacggcactctgatcctcagcggcgacaaccgctataccggcggcacggagctgcgtgggggaaccctgcaggtctccgccgatcgcaacctcggcgccgccgccggcgagctggcctttaccggcggaacgcttaaaacggagagccgtttcgacaccgatcgcaacgtgctgttgtcgcagtacggccgcttcgacgtggtcgcagacggcgagttgggcctgagcggccgcgtttcgggccgcggggatctgctgaaaagcggtgcgggcacgctgcgcctggataacgtctcgaacgactatggcaatacgctggtgcaggaaggcacgctgatcggcaacgccgggtctatctccggcaacgtcgccaacgccgctacgctggtcttcgatcaggcttccgacgccagcttcgccggcaatatcggcgcgctgggagaaacgaaggggcaaatggtcaaacagggcgccggctcccttaaccttggcggtatctctgcgctcgactggaccatccgcgcaggcgatctgacgacggcggccgaacgcttccgcggcaacgcggacatcgcctctggcgccagcctgacctttgatcaaagcggcggcggcagctatgccggcagcctgagcggcactgggctgtttgtcaaaaatggcggcggtacgctgtggatggatgaggatagcgccggtttccgcggcctgacccaggtcaatgatggccggctggcgctggatggtaaacttggcggttctatgctggtacagagcggcggcgtgctgtccggtaccggtaccctcggttcaggcgccggttccacgttgaccatcgccgatcggggcgtgttgtcgccgggtggcgagttcagcaccctgaaggtggatggcgacctgattttccagcaaggctcacgctttgaggtcgctgtggatccggcaggcaaagaggccaatctggtgcaggtcactggcaatgccgaccttgaaggcggtacggtcgctcatatcggtgcgaacggccactatcagctgcgctccagccataccattttggcggcagatggccggctcagcggcgcgttcgacgacgtcacctcagacttcgccttcctgatgccagaactgagctatgactatgacgccggcacggtcgatctgcgcctggcgcgcaaccatcgcgaattcgcctcggcggcgttcacccgcaatcagatcgcaaccgccaatgccatcgagtcgatcggcctgtgggccggacatgcggtttacgatgcgatagcgcaactgcccgacgatgttccgctgatccgcgaaggttttgaccagctttcgggtgagattcacgcgtcgatgaagaatgcgctgatcgacgagagccgctttgtgcgtgacgccgccaccgctcgcctgcgcgctgcatctggggacgctgcagcctctgtggctacggtgatgagctatgaaggggggcaaccgcagcaggtcagcccgactatcgacggcctggcggtatggggccagagtttcggctcctggggtaaaaccgacagcgatggcaacgcggcttcgctcaagcgctctaccggcggtgcgttgtttggcgtggatgcaccggctttcgacagttggcgctttggtgttatgaccggctacagccgtacccgcgcggatatgggtaaacgcgcgtcatcaggcaacagcgacaactatcacctcggcgcctatggcggcggcagctggaagctggccgagaatacgctcagcctgcggaccggcatcacccatagctggcatgatatcgagacccgtcgttcagtttcgctccccggctttaacgacagcctgacaggcgattatcgcgccggcaccttccaggcctttggcgacctcggttacctaatcgatctggctccgctttccttcgagcccttcgtcaatctggcgcatacccgcctgcgcacgcaggggttcggcgagaaagggggcacggcggccctgcatggcaaagcgcagaataccaatgctaccttcgctacgctcggcctgcgcagttcagcacagttggagacggctgtgggaaccgcaacgctgaatgggacactgggctggcgacacgcgatgggggataccacgccgttatcgacccatgctttctcggcgggtgatgccttcaccgtggcaggcgctccggtggccaaagacgccctgcagctggaggccggggtgaagatggctatcaccccttccgccagcgttggcgtgtcttacgatggccaggtatccggcagcgcgcagcaacatggcgtcaaggctggctttagcttcagtttctaa

SEQ ID NO: 451588 - DNA, 936 bp, Serratia marcescens
atgaaacttaaaaaattatattctcttgattttatcatagatttcgaaagacatttggatacagaatttgaaagagaactctaccgtgcaagtctaaggaattacgcttcacatggtaatccattacgatttcataactttgcttacgctttaagaagtctcatagatcatatacttgataaaaaggccccagataatgaggtaaaaagctccccttggtacaaaaaggatcatccacattttgatgtttcaagaagacaacgctttaaatattgcgctcaatttaaaataagtgatgagtacttgggagaggcttttcttgagcaatcaaatgacgaaattcagtacatgcttaagctatacgcaacactgaataactttactcatatcaatgagaaatcattgcaccctgatccaaaaagattttttgaagacgccaaaaaccttcttacaacagcatcaaaaatacttggtggaattgaaagttgcaaacatgaacttatagatactctcgaagaaaaaattcggaacgcggtgattgatattgcagctaatagcgcccctgaggcacttattacaattgcaaatcatgcctgggtcaactacacagatatagaatgttttgagatcacatccatagatgatgagtttatatacatatctgtacacggtgtcgcatatgtcacacaagagtatggttcaaaaaatgacggggtgacgatagacgaagattatccattcacgttgagaatggtttcacatgttaactcaccagaaacattcgaagtcgtatctgaagctttagaggtcgatgcttcgtcgtggtacggagatggggaccaagaagcccaaatgttggaaatggaaagaacggctcaccagcatgtacttatgacaacctatgacttagaggctgatgactctcccccattctag

SEQ ID NO: 451589 - DNA, 2112 bp, Serratia marcescens
atgaacaagaataaattcttgagagtagcagagtcattgagaaaatttcaacgagccgagcttcgtgagtttgagaatgaacttggtgagaaacctgtcgatgctgtttacgttgacccattgcctgataatgcagtattaggtactgtattatcaggtaatactacctttttattcggaagaaaaggaacaggaaagagcacaataatagcaagggcccaatctgaaattagattgaaaaaagaatcattatccgtgtacttagatgtaaaatcaattaatgaaagctcaaaaacgtctgagataatatcaaaaataaacactgattatgatctttcgaatgaaataatacaaccacatctaatgagaaagtcttttttaattgaaatattctcaagattagttgatgaaattgactctatttgcaaaaaaacaagtgtattaggaaaagtatttggtaaaaataagagatatgaagagttaaaaaatgagttaaatcaattaaaagatcaggtccgaagtggaataatgacatctgctgagctcccaatcctccaattaattgagcgtgaggcaaagaaaaggcaacaatccacagtaaaagaaaacttagcaaaatcagtttctataaacattggagtagatgaaacctctttaaaaacagattttaaatctgaggatattgaagaggttcttgatgataacgaagtatatgaaaaatattcttccgcagttctacgcacattcccttatcaagagttcattcagaaactatccatgatattaaatgagttatcttttgataacttgatactattctttgatgacttttctgaattaaattgggtagatcaaagactatttgttgacgtaatcctggcaccactaaataatacaagcaatgaaaaaataaaactaaaagtggcagcgtacccgggacgggtttattatgggaatatagacccaggaaaaatagatatattaaaccttgatttctatcacttgtataaaagctcagatgttcaaacaatggaacagagagccactgactatactcgtagattaatagaaaatagattcaaagtgtttggcatcaaccctgatgactatttcttaaatatctctgaaattgaagagtattattcattgctttttcaagtgtctttcaatgtcccaagaattatagggcacatacttcactcctgctatttagatcaaatatcaagaaacgaaaaaataacattgcagagtataaaactatcatctagaaaatattacaacaacattctcatggcttatttcgatagaaagaatcgctatgccactgaacctttctctaggaaactagatcggcataatcagcaactacttttacaaagaataataaacgaatctaaatctttgaaaacaaggatatcaacaggaaaagttggtggtacatatttttatggtctatcaaatccacctgttagtcatttcaccgtttatccaacattagaacctatgctctcctcattagagcttaacttccttgtaactaaatatcacgagatgagagataaatctggtgaggatgtgtctgtttattgcttaaactatggtctatgtgaggatgagcgattatcatggggataccctaaagggcgacgcgatgaccgtagttacttcgttcagcgatgtttttcttataatagtgtgatccaccaatttttggctgccacattaacaattaaatgtgataattgtgatgcaacatttcctattgaagaaaaagagaaaatagagtatttcgattggttatgtaaagagtgtaaaactggtcgttgtaaagtagtatctttgtccgaagattatattaacgaattaagaatgcttaatgaggatctcaagttagaagaggttgagctcgatatacttgaggttctttatgcagaaggcagaaatatgagagcaggtgaggtatcagctttgatcgacagatctcctcaactaataggccgtaggacagcaaaactaagagacaatgacttagtcgacaaagagacaaagaataacattactttaaataaaatcacaaacagagccaaagagatctattttagaaaaaactga

SEQ ID NO: 451590 - DNA, 807 bp, Serratia marcescens
atgaccgagccaaacaacaaacaacctgaacttcccctctccgcgctgctcactcagcgctgtaccaatttcgccaccagcgataaggctgtggaaattatcgatcagggcatcgaaaagatgttcaaagaccttattggcgaggcattccgctcatatggcgacttcggcaagctgctgagtgatgcgttcaagtcggcgctgcccaccaatatttccgatgttgttgacctgccaagctacaactctctggttatcaactccatgcgcgagtcctgggcgaattctggcgtccacgtcgatatgcagcaacgcgtgttggaactggcgaaggaattcaccagcaacgaggtcattcccaaattcgtcatggcatctgatctgtggaaggcttttatcgaggataacagcgagcgtgctgccgaagagcaatgggagcgccctcaggtgttctatgaggagagcgaagatatggatggatattttcgcatcggcctacacccagaacaagaaagcaccgggcgctacagcagatcgagagatagcgcttatgcctgtgacttctattttgccttctcacctcaaaaagagccggaaagtagaaacacgccactcatgcatgaaggccacccggtttacgagctgtattccggtcatgtggatggcggcgtgttgggtaagaaggtaatcagcacctacagccggttcgataagctgattatggcgctgtactacggcggcagcttcttagtgatggatgaaattccagacgccgacgaaataacctacccacgttacggctattaa

SEQ ID NO: 451591 - DNA, 180 bp, Serratia marcescens
gtgaaagaagccaatgttgttagctcattcccttcagaggaagagaagcaccagctgataaaactgttggaaaaacatcctaacttcgttttccaacagctgaataaacgtatgaatcaagacggtttgatgctgtcaattcgtaccattgaggaaggaaagactacacaggcacactga

SEQ ID NO: 451592 - DNA, 189 bp, Serratia marcescens
atgaaaaatttcgtcgaaaaaaactgggtgtctttgttgcgtgtggggcctgtggtaagggcggcgctgaaatatgtcgttgaagcaatatcattctataagctaatagggactgccattttagtagtgtttccgccgtacatactgctcttcgtgatcgtgctttacacaaagaaaatcaagccgtag

SEQ ID NO: 451593 - DNA, 1275 bp, Serratia marcescens
atggcaattgtcagaaccaaccgccagcgtggattcaccatgatcgacaatgcggctatcggcaatcaaacgctgagctgggcggctgaaggaatgctgcactatctgctgtccaagcctgatggctggtcagttaatccgtctcacctgtggcaggagaagaagggcgttcgcggttgtggccgtgatgctgtatacaaactgctgaatgaactgatccaggttggttttattcaccgattccaactgcgcgacgccaagggcgtgaccgacggtttcgattatttcgtttatgacgtcccgcaaccgcatcctgaaattcaggaaatggatgaacctcaagtgccgcaaggcttggctccgaatcctgaaaatcaggaaacggataaaccaccgtatcctgaaaatccgtatcctgaaattcagggcattagtaaagacggatctttagtaaatactgatctctctctcttaggcaacgctcaaaattcaaccggtgatgtgccaccaacaaacccacacctgaatgccattctgaacaaccgcccaccggcgccacaatctgcaccgcaattcggtatgttcccgatgtcgctcgactgggtgcctggtgccgactttacgcaaatcgcgcacctgtccggtttgaccgcggcggaattcactcctgagctactgaacgagttccggctctactggaacccgacgggccgggtgtattaccactcccagtggcagcaaaaattcatcagctcactcaaacatgagcaattgcgagggcagcgctatgagcgaccgcaacgggacgaagccggtaactgcggcggcaatgcagcagatcgcttcaagcagggactcgccgcaattcaggccgtacaagaaaaatacggctacggcggcggagcggggagcaattcaggggattgtcttgacggtgattttgcccatatatccgatccactggccggcgtgggtcagccgaatgaatacgacggcgctcagcgccagcgccgctttgacgccgaagctgtgaaaacgacagaggcatatctcaatcacgtcatggtgaaggccggcttctgtgacctgattgccaatccggacggaggaacattaaaacagcgttggagcattgctttcgtcaatatgagccaggagaaattcgacaaggtttatagcggcgtcgccggcgtcatctggaacgagacgctgcaacagcattttgtagataagggggtatttgaaaatgtactttattgcatgttgaattattag

SEQ ID NO: 451594 - DNA, 522 bp, Serratia marcescens
  misc_feature (493)..(502): n is a, c, g, or t
atggaaaactatgactctttcattaatgacttgaatgatactctcgatggcattgaaagtatgtgtagatatcaaatgactgaatcggatcttgattgttttttggaggtgctatcaggggtaaggctcaagtctacagatgaggcattattttattcttattttttgtattgtggcaggatgctcagttcagcatatgaaaattatccaaatgtatttatgtttaaaatggactacacaagaaagcaaattaatgaattgggatttgagttaaacaaatcttttcttagagaaaatccatcagatatgttattttatatagtgatggccttaatggagttctttataatatcgccattccacaacctaagaagtgtcggaaactctaacgactatgtggattgctatccagtaattcaaggtagaattacagaggtcgcagctatcgcaaaaaaaacatttccagaggctgagatgaggctttcctatcttnnnnnnnnnnggtttagtaatggatgttaa

SEQ ID NO: 451595 - DNA, 591 bp, Serratia marcescens
  misc_feature (571)..(580): n is a, c, g, or t
atggatgttaatgagtcgagaattaatgatttaaaaaatggctttgataatttagaatcatccggggttagaagcttattggaaaatgtagtagagtcagatgaaaaagtaaaggagtgcattttaaatcagagtgcatttttgcaggaaataagcgtcataaacaataagctttccgagcataaatcacattttaattttgcactattgagtaaagcatttgttaatatgaaaaaatcaaaggaaaaagaaaagatatttgcctacggacggctatggatcgtattgttagtgttgttttcaattcctctgagtctgataattttcgatgcaaattctaattcattgaattggtcgagggttttttattacattccatttgttactctagagttattgttattttatatcatgaggttgttttatttagaggttggttccataaaagcacaaattctccagatagatattaggctaagcctttgtgaattcatccatgattatatagagaaaagagaaggtagcgataaaaattctgactcttggggtaagtttgagactcttatatttnnnnnnnnnncttatatttag

SEQ ID NO: 451596 - DNA, 1254 bp, Serratia marcescens
atgggtatttataacttaaataagactaatgatcttaatgcaataaatgagtatttttctaagaatgtttttccaaatgagtttgagcataattttgacttgaatgttaatgaatgtagcgaacatgacaagaatgttttttttaatagtgttttaagcagtgcatggacgtacttctttgatttatttaatgagcgaatggaaaatttagataggaatacaaaattcaatcaggaatatatatcgagacctagtgattttaaacttgaagattacttgagtgatcctgtgggttttttatctgatctacttagggttctgtttgagtaccaatactggactgggcaaaggaaaacacatcgattcttagatgcagatatattaactacgctagataaattgtattcaaaaagtgagtttaataaacattaccagtttagatggatacgagatgacctttccgtagcattggctaagtttattattgactctccagactttaagagtgcaagagagtttgtctcacaaattgagtcacggagagcaataataatttctgaaattgatgtaaagcttggtgaggtcagcgaaaaaatagaagctaaccgaaaacacgcaacttcagatatatctaaaaaatacagtgatataataagggaaattagagagactgaaggggagataaatgagtcgctagtaaacataaagtttaaatcagatcaagtaaccgcccttgaggagagggtcagtaagttaagaacggaatataattttatcggactatcagctggatttagtaaaataaaagataagaaagaggttgaactgaggacttccgaggtttattataaaaatttgtttggctgtttgtttattgcccctataattataattgcaattcatttatttaaatctgagttatatcctagcgacttttccgttatatttcttatttttccttttttgaccatagaactggtactgatttatttctttagattatcatatcttgaagctaaatctataaggacgcaactcattcaaatagaattaaggttgagtttatgcgcaagcatagagaactatgtcgagttcaggaaaaacaatattgaagcaggaagtaaggtgtttgatattttcgattctttaatattcagccctattcaagtaaatgataacaacatcccttcgatgtttgatggtgttgatgcaattgccgatcttgctaataaagtaatgaagtctagaggttaa

SEQ ID NO: 451597 - DNA, 744 bp, Serratia marcescens
atgaaggaaatgacaattgttagagctgcaataattacacagaattatattatgttagctgttgaatgcttagttttagctttggccgtattcgtagtctattgcattacttcagcaaaaaaacaggctgatctagatgttatcaaagctaattttagtagtattttgcaacaggaaatagcgagggaaagaggaaaggaaactgcaaaatattcggttttagaagataagtttgatctggttctgcagcagcagcgtgacctagcaattgccactgagactataaaatcaaaattcagtcgggaaaacttatctttccaaataaaattgtcaaaatttcatgaaagagagatatctgccttcgatgaggtttataaaaagctaactgcattaaaagcagcatcaagattatcacttaccccaaatgatgataatattgctatatttaggggatcagttactaagtttaggagtgtttttgatgagaatagagcttggatccatagcaatttagctaagagtatggaagatttagctattgaaattgataccagagtgttccagttgcaaggcctaagtagaatggcaagttataactatgcgaatattagcgataaagtaataaaagaagcatttgaaaggcaagatcaacataccgaatttatccaagtcgatgttgaagaaatacttaggaatttggaaggtgacataagacgatacctcaatccatcagacttttgttga

SEQ ID NO: 451598 - DNA, 939 bp, Serratia marcescens
atgaaaccagttgacgttagatatctaatcctgcctttaattttaattggaggcacggtaaatgcaagctgggtaagtgaaattactggcgtagatatagatttaaacagagggacaatagatataaaaccacctaatataaatgcgataccaccaatgatccaaaatttgccgaaagatgttggccaggcacttctcgatcctaacgccccacttttagcaacagccattcgattttcaagggggcaggctcttaatcgaggtgtgaaaccaattccagaaaatataaagcagacattagcatcatatttcccttctgacattttgaataaagtacgttggacaactgccgacggtataagcctcgatgggatgttaaaaaactggtttaatcaggaaggagctattacttatgatgaagttgtagttttcgccaatcaaaacttagttggcgatgtcggcctttgggcccatgagttgactcacgttctacagtactcgcaaatgggtgttgaaacatttgcattccagtattcccatgactggaattctctggaaagccaagctcgtgaaaattctcgaagaataattgaaagtatcaattcaactcaacaagggcatccagcaacatggggatattctggaaatgtagctcaggtaaatcaacaggtgcaatggggtcagctaaaccagatcgcaatgaaagcaatcccacctcagcaatgtatatggatagatacagtgcataatactactggaaacgcttgcccaataaatatcagagttgctggcgtggtagtgcagccattcaatgcacctcaatatgttatgccatgtaacgagccaacttgcattatccctgccggtcaatcaggtcctttattatcaccaccagggacgcaaatcatcggcgttacggctgcatatcagttaaactaa

SEQ ID NO: 451599 - DNA, 1044 bp, Serratia marcescens
atgtctgggaaacgtcaacatttcatacctcaattttatcagaaagggtttctttctaaggataataaaaaaaattatacctaccagtacttaaaggatggtcgagttctcccggcgaatattaagaatgttgccacggaaggcttcttttattccgagggtgaagatcatagtattgataatgtgatcactgatgctgaggatgagtttgcgaagttaataacgagatttaggtccgatgatattgacggtgtttatttaaatgatgctcctaaattaatatctcatttggaatctagaacaagaagtataaggatgtcattccaaaaatctgcaggatatcttatgggtgaagttaaagataaattcctcagagaggatgttctcacaaggtattttaaagaaaaggtattctctgacccaaataaatttaatgaaataatggatggccagttagatgaaaataaagtgcctttagaactgagggacggtatcaagaaactaatgttcgccaactcggaacagttgataccgcctattttaaagaatcttgttaaagagttcaggccattaattgacgtaatgataagtacgaaattgccggaatcaatgaaatctggtcatttgaaggctttgcgagaatcaatacatcctgccgtaaaagttcaaaaatataatttactgacattcaaagtgataaatactgacttcgatattccacttggagataatattgttcttttcgaagttgatagcgaaaggagttttaaaccgttctgtgaaaaagatgatctactaaagaatatatatctaccaattagctcaaggaagttattatggggtacgttagaagatcttataccaaatttaaatgatttagatttaaatatagctagatgttcaatggagttttttatagcatcatcaaaaaacgaacggttaaattatattcaacgtgagataggtaaaaattcgcatatcttcgctgaagaagagatcgatcaaatgcttgatgaacttatcggtgataacctgaatttttag

SEQ ID NO: 451600 - DNA, 837 bp, Serratia marcescens
atgcagactgaacctgaagtattaaccgaccacacagcggtgatttgctcgaccagcattgaacgtattgtcaccggacgtaacacggcgctgatgcaaattgaagcgttaatccatcagcttgatgctatctcaacgctgaccaacagcatcggtggtggcaccgccaaagactggggcatgcggccggggcatcgctacgactgttggtttacggaacaaccgggaactgccatgaaggccattacccgcaatattgaccgcgacatatggcgagacctgatgttgaagtccggcatgctgagcttgatggatgcgcaggcccgtgatgagtggcataagagcctggaaaaggaggatattccggctgtcagcgaggcaaatatcctcagtacgtttgaacaactccatcagagcaaagaggaggtatttgagcgtggggtgataaacgttttcaaaagcctcagctggaattataagtcgaactcaccttgtaagtttgggaagaaaatcatcgtggagggcgtcgtaaaacacgacagatgggggtttgggcttaactggggccggcagcgcgaccgattagcagatcttgaacgcatgctgatgcttctggacgggcagcctctccccgacaaccgtgaagatgtcacccgacgcctgggcgatcacattcatgcaaaaagaaacaacgacaggtatgaggatacgatgttcaaaattaagtacttccagaagggatccgcgcatatcatcttcaagcggcccgagctggttgagaagctgaacgatatcatcgtcaggcactttccctcagccctgccaccccgtatctga

SEQ ID NO: 451601 - DNA, 330 bp, Serratia marcescens
atgagcagtgacacattcccctccggggcgctgctcacgggtattcagtgcagtaccgcgcatattaccgatgacgacaacacattgctgtaccacgcttcacaccagcatgaagagtatggcaacggcgagtggctccattttaccggaacggggtacctgattcggctcaatgcctggcggcatccggtacttcatcttaaacggttaggggtgtcaaaagcctgccgccggctggttgttacgctgatgaaccatcaccccatcgctctccttaacctcgacgctgcaggcgatattctgtcggggattgagacctttgattggtga

SEQ ID NO: 451602 - DNA, 369 bp, Serratia marcescens
atgcgaacagtacccgcaccaccgtcaagggcggcccaaacatgcccgtcccccataactgtctggcaatccttgctcacctacttgctggcgcagcactacggcctgacgctcaacgacaccgcattcagcgacgatgccgtgatacaggcacatatcgatgacggtatctccctcgcggatgcgctgaataccatggtggaaaagtttgagctggtacgtattgaccgccggggtttcagcggtctggcacaatcgccctttgtaaccgtcatcgacatcttgcgcgcccgccgggcttgcgccctgatgaagcgagccggttaccagaaggtcacgcgtgccattcagggaggcaagcaaccatga

SEQ ID NO: 451603 - DNA, 357 bp, Serratia marcescens
atgccatcgaacgacactgttcccacctggggactgaaacgcagcgtcacgccgcagtttggcgcccgtctggtgcaggagggtggacggctgcattttctggccgaccgggcatacatctgcgggattttcagcgacgcccagcgccgtgacctagagagtgcttttccgcaatttatcaatcacctggagttgatgctgctctccggtgagctcaatccgcgccatcagcactgtgtcacgctgtatagccatggtctggcctgcgaagcagacagcctcggctcatacggctacgtctacatttcgatttatccgacatctgaaacgccaaggcataacgccccgcatttttag

SEQ ID NO: 451604 - DNA, 483 bp, Serratia marcescens
atgatgaatatcaccttatctccggcaaccgccggtctgcccttgcccacccaacgcaccattcagcgcgctttatttctcctggagcaacatctgcgaaaaccgggtgaagccttcaccgccccgttcatggtgcgcgactggctgcgcctgcagatggcccggctggagcgcgaagtctttatggtgctctatctcgataaccagcatcgcctgttggcgcatgacaccctgtttagaggcagcatcgccagcacccaggtgcatccgcgtgaaatcgtgaaaggggcactgaagcataacgccgccgcggtcatcgcggcgcactgccatccctccgggcatgccgatcccagcgaggcagaccgactcatcacccaacggatacaggacgcactggcgctgattgacgtcagggtgctggaccactgcattgttggcggcatgacggtgtactcgttcgccgaacacgggctcttatga

SEQ ID NO: 451605 - DNA, 435 bp, Serratia marcescens
atgaaagagaatactgccgacaacacaccatcaacactgacagcgagcctcgttagtgatacggatcgccagtcattttggctacagcactttggtgacattccgcaatggcttcatatcgagtcaccgatattttcctggctcaacctgctgtgtaaggactaccacggagattattgggagttttataccctcagtaacgggggagcattcattatcccgtccaccgaaggcgagtacacgctctttaacgcccttaacggcaatggcgcaacggtgggacatgaagccgccggcatcgttgcttgtctgataacctacagtcaccacgcctgccgcaccgaatgcgacgccatgaccgaacactactatcgcctgcgggattacgccctcagccatcccgaaagcaacgccatcatgcgcatcatcgactaa

SEQ ID NO: 451606 - DNA, 1245 bp, Serratia marcescens
atgcaattcaactcagcagtttcctcgtcgatacagacgccccctcagcaacggttgtttgcgtttaccgcctttttgctgggcctctcacttccaacctccaatcccctgatgaatatctcactgggactggttgtcgtttgtctgctctggcagcgcgatatccggcagtgggctgccctggccggccatcctctggtctggttgccggccctgatgtttgcgctgctggcgttgtcattactgacgcatgaccacgcctacggccccaaaatggtcggcaaataccaaaaattgctgtatgtcctgccgctggcgctgttctttctggccgactcgcggctgatgacgcaatttgtccgcggctttttgtgggccaatgccgcgatattggccatcagcttcatgagcgggcttggccatgtcacattgggcgggctgaaccccgacaaccctacggtgtttaagctgcaaatcacccaaaacgtgtttatggcgctggcggcgctggtctggttgtcgcgtgcttttgcctgtagcggaaaacggcgctgggggtatgcgggactggtgttgttggcgacggttaatgttctgctgatggtgcaggggcgtaccgggtatgtggcattggccgttggcatgggcatctggttattgctcacactccggcgcaagcagcaagtggccgtgctcgcctgcggcatactggctgtcgtgatgctggtcatgacccccaatcgcgccatggagcgcctgacgctgggcgtccagcaaattcaggggtgcgttttcgccccggcccaaacggcttatgcggcctgcgacaactccatggggcaacgcaccgccttcgcccgcgaagccctgcgactgataaagaaatccccgctgctgggcaacggcgccggcagcttttggtacggcaatccatccaccggctatggcgtgcataatccgcacaatgaatacctgttggaaacggtgcagagcggtttgctgggattgatggtgttcctcacctggatgtggagttgctaccgcgtcgcctggcgcttgccgccggcgcgccgaaatctgttcgttgcggtgctcagcagctacatggcctgccatctgttcaattcattcctgctggactcgtccgaagggcacctgtttgtcattatcgccgccttgctggccgggctttccctcaacgcacggcaaccacagcgcacaggcgcccgaccgccccaaacatga

SEQ ID NO: 451607 - DNA, 333 bp, Serratia marcescens
atgaacctgactgctatcgccgcccgctgcgcgcagcggctgcatgcgcccgcggtgcgctggctgctgctgctcgccatttgcgccgcctacatccagggcgggttggtcaaggcgctgaacgtcgaaggcgcggttgccgagatgacccacttcggcctgcagccggcggcgctgttcgccgtgctggtgacgctgctggaactggcggcgtcgcagttcgacggggcggagcgcggccagatgatgaacggattttttgaacacctcgggctggccggcgcgctgttgctggtggcatttaacgatttgaaggagcgaacggatggctga

SEQ ID NO: 451608 - DNA, 633 bp, Serratia marcescens
gtgaaactgtatgcctcgatcattgtccgttctgtacacgggcaaggatggcctttacccattatgaatgagccggttgaggtaacaatcctcatggaggatgaggccgaagccccaacccgtctggtagggaaaaaaattgtccccattctggaaaaggaaaacggctctcatatgacagagagtctcgacattgtgcgctatatcaatgctatcggtatccccatctttttctcagatccttcacctgagacagaatcatggttgaaggttatctggccggtttcacttaaattagccattccacgtttcactatggccaactttgctgaactttcgacgtcgacttcgcgtgacgcataccggcagcgggaagaaaaggcgttcggcaacctgtcagaactgatggagcgcacaactgaattagtggaagaaataacgcccaaacttcaggcgctggtctcgcttatacagcaacggcagcggacagatatcaatgacattctgctgtggccggtattacgttgcctgtccattgtcaaagcacttactttctcgccggctgtccatgattatgccctcagtcttgaggcacagactggcattcctttactgttccgtcaggcaatatag

SEQ ID NO: 451609 - DNA, 312 bp, Serratia marcescens
ttgaagttaagtccgcaagcccgcaagaaatggccggctgccccggaaatgctgatagccagactgataagcaaagaggttaatggcaagaaagtccaaatcctgacctcgatgtgcgatccgctacgctaccccaaagccgatatcgtcgacttgtatgggcatcgttgggagatagaacatggcttcagggagatgaagcagtatctgctgcagaacgaactgactctgagaagcaaaaagccggagttggtcaggcaggaactgtggggtggggcgtggcgttggcttataacctgctgcgcttcatga

SEQ ID NO: 451610 - DNA, 267 bp, Serratia marcescens
atgacgatggcttcccggggcgtacttctggccttcacactgctgtctgctctggctgtgagcggttgtggtgacaagaacgaacgtgaatttatccgcggctgtaagtccggcggcggtactaccgctatctgcggatgtatctgggatgacctgaagacgaaatacacccacggggaactggagaaaatgaaccagcaggtcggctatgtacccccgcgttttatggacaacatgctgagtgccgctcagctgtgcagaaaataa

SEQ ID NO: 451611 - DNA, 504 bp, Serratia marcescens
atgaaattaggtacagccctgctgctgagcgtgggaatgatgctgacatcgctgtcgcccgtaaatgccggtacgcccaatgcacttgtacaggcacaccaccagcgctgcggtaaacccgtcttctatgcgcagaccgttaaccacaaaaaagaggtcgagatttgcatcatcaccccgtcggtatcgtattcattcggcaggaccggcgcagaacataaggaaatggacattaccgtaccggcacacaccaccacgtatgcataccagagcaaccaggttatcagcctgcaggaattcacagtccggaatggcgacgtctcataccaggtatctgccgggacaaacgatgaaggcaaaccgttcgcgtccctggacgtgtacaaaggaacacctgatacgggtaagcatctggcggaaatccggctcgacccggatacggtggtgaacaatatcagccattcacttgaacaggaaggcgtggcgcaatcggacagcctctga

SEQ ID NO: 451612 - DNA, 729 bp, Serratia marcescens
atgcgcgccacggatcctgcgcatcgacacgacaggctggcactcaggttgtcagttattatcagccggcttttggccggtgaatccctttcactgaaagcgctgtccgacgagtttggcgtatctgaacgcacccttcgccgggattttcatcagcgtctgctgcatctggatctcaccggcgataacggctgctggcggttacgaacaaacccgatgcgcgatcatactcctggtgcgctggcgtttgcccgcaacaccggaatagtccgccttcttcccgtacagagccgtcagttgatgcagttgctgatggatgaaaacggcacatcaccatgtctgattggccatatacaccaaccagtggggatccttcctgactgcttccagcggcttgccgaagggatttaccaccaccggctggtcagcttgctggttaagggtattcgtcacgaccaccttgagccctaccggctgattttctctcaagcatgctggtatctggtggcctgcaggaagggagctattcacgtcttctcgcttgacgagattatctccgtctctctttcagatcagcatttcagatatcgcaacgagactaacgcacttatcgccatggaggacttcatcaacgctcttccgcattttcactttatcagcaacgtcattcataccttccgggagcgttctcctgaacctcaggccagaccaaaaggagttaaaacatga

SEQ ID NO: 451613 - DNA, 237 bp, Serratia marcescens
atgatattcatgaagctgacatggcccctgttacgcatgctgctgcgctatatccgaagacagatagttaacaggatcctggattactgccggcgcgcaggctggccggagaaagagatccacagcgtccgttgggctttcatcattctgtttcgcatcttactgcgattactgagggcgagattaataaaacgcgatactgcagccatcttccgccctgacaacgcatcctgctga

SEQ ID NO: 451614 - DNA, 885 bp, Serratia marcescens
gtgtccgataaaactgaacagggtcttgatgccctgaagcaacagctgtctctcctgccagaaacactctcccgcacaatactgaaccgtatccgccagcatatccattacgagccggtgattggcataatgggtaaaacagggagtggaaaaagttcgctctgtaatgcgctctttcagcagcccctcagcccggtcagcgatgtgcagggctgtacccgtgaaccgcttcgctttacgctgaatatcggcgggcgccgcatgacgctggtcgatttacccggtgcaggagaatctctggactatgaccgtgaatatcggcagctgtataaggagcagttaccaaagctggatcttattctctgggtgataaaagcggatgaccgagcctgtgccaccgatgaagcgtttcaccaattcctgctcaaatgtggcgtcttgccaggcagcattgtcttcgtcatcaaccaggccgacaaggcggaaccgtcgctggaatgggatcgggaagcgtgtcagccctccaccgaccagcagctgaccctcacggccagaagctcagccatctccagccagttttccacaccttatccggtgcacgccgtgtcggcaaaaaccggctacaacctggcctgtctggtcgagacgatgatatttgccctacccccggaggccagcagcggcgtgtttcgtcaggtcagggaagagcacaggactacggcggcagagactaccgcccgacaggattttggcgatctgctgggtgagctgttcagccggatagtggacgccattccgctgccaaagtcggtccgggaagcgctggggacgatccgcgacagcattgtcaatgccgtttctgcgctgtggcactggtttttttga

SEQ ID NO: 451615 - DNA, 630 bp, Serratia marcescens
atgagcattaacaccaatagctacggcacactgaacaagagttacgtcaaacgtattcaggatactatcactaaagccctcgctgaatatccccgtgtgatgattttacgggttgaccttcgcttgcctgagattgagacagggtcgtataactcagattcaggaatagtcacccgtttcgttgtttcccttaaaacacagatcgaagccgacttactgaaaaaacaacatgcaggtaggagagttcacccatgtcgtgttcgtcatatctgggcaagggagtttaatgagtacggtaaaaaacattatcacgtggccttgctctttaatcgtgaagcgtatgcttatccagggaattataccagcacaaatggagaacatatccacaatctcgccatgatgattatggaagcctgggtaagagcgttggggctgaatacgatggttaatcatcagcagtattatcccttagtggagtttcctgctaattgttactaccacctgaataaaaaacacaatgaccttacggctcagttatctaatgtcactgacaggattaactatctggccaaagactacagcaaagacagttccgatggtcagcgtaactttggttgcagccaatactga

SEQ ID NO: 451616 - DNA, 213 bp, Serratia marcescens
atgacaaatacaacaaaccaaagcctactcagtgacaagatggtcgacatggcattcattacagaatttacgggatgcagcgacaagtggttttataagttaatccaggacggcctgttccccaagcccattaaactcgggcgtagttcacgttggttgaaaagtgaagtggaagagtgggtgcaacaacgtatttctgactctcgttattga

SEQ ID NO: 451617 - DNA, 1593 bp, Serratia marcescens
atgaatttacccctagaactgtataatgcaagtttggcaaatcagccgcggttgcaataccgcccagtgaaaaatatacctctgccttatccggtccagtcttttccgccggttcttcgaaatgtcattcagtcattgcataacaattcccagatcccggtggagctgattggtaatgttgtgctggcagccatatcattaacctgtcagtcattaattgaagtcatacagccccacaccaatatggccgaaccctgctcactttacctgatgaccattgcggaatcaggagaggggaaaacaaccatcaacaaacaggtcatgaaaccgtgttacgcattcgcatcaagtcttatagagcaatacgagcaacacatcgctgactataaacatcagtttaaactctggaaaattcgtcagcaggctctggaaagtaatctcaggcaagcgatacgcaaaggctacaccggtgagaatgaagaacaggcaataaataaacacgcagagaatgaaccacaacgcccatccaggcccaatttcatttatgaagacaccactctcaaggcacttgtggaaggtctcagtgagcatcccgaagccggatttatttctgacgaagccattacgttttttaggagttacctaaaaaacaccccaggtctgctcaataaagcctgggatggtgagatgtttgattttcgtcgcgctgacggagaaatctatcagataacaccatgcctgacattttcgctaatgtctcaaccgggcgtattcatggattacgtaaataaacatggtgtcgcggcacgagccagtgggtttatgtcacgctttcttttttcttgggttgaaagttcaattggaactcgcgagggtaatcgagcaacgattgctgcagaatacgacctggaaactttccatgaaagagttattgaacttctggcgttgaatgaaattccacgtcccgatggcgccactcaaaagaaaaaattatcgctcatgccggaagcactggaaatctggagagactatcgagcagacaccgaaaggaaaatggcgccagaaaatgaatgggaacatatcagggatattgtatcaaaagcaagctctaacacattgagaatcgcagccttgttccagtgcttttaccaaggcaactcagaggaaattcagccggacactatagcgtgcgcaattaaaataatggattggtatctaaatcaggccagccaactattttaccctatgtcagagcgtttccagtttgaacaggacgtccgggagttatactcatggatagagaatagaataaggcaaaacggcggatgcgccattctaaaaaatgatctggagaagtatggcccgcatcgtctcagacgaattgaacggcttaccccagttctggagcagttaatcagccaaggattttttggtattattcggatgttttcacacagtgcgctttatgttgccccccgttctcggaatggctattttaatctccctcgtggttattcacaatatgattacttcatgactatccaatcatgcgataacacgagagggagagcataccctgttgagatatactga

SEQ ID NO: 451618 - DNA, 219 bp, Serratia marcescens
atgctgatggcccgcgtggagagcgaagagaagaatgacccgtatgcgcatctggacagtcagggccgctatcggatgaagctggactttagccgtgaagacgcagagcccggttataattacctgtggatacgtcaggcgaagccgtatgctggtgaaacgtacggccggcatacgcagctgactgacggcaccgaagtcagcgctttatgtctttaa

SEQ ID NO: 451619 - DNA, 921 bp, Serratia marcescens
atgaccagtcgtccccagatgataatcaacgtgttacaggcgaatcccggccagcagttcactgcccgccaactggcgcagaaaatcatcgatcactacagcgcagaactggctgaaaaacgtaaaaatccacgttttgtcagcgatgaagattttttaagccaaattaccgctgaagttggtggcagtcggacagttaaagcgaaagctatgtgtccgcaggtgatgacgcgtgataagccaagaccaagattgttttattggggagggtctgtggttgaacaaacgaatgccaatgtggttcccgagccaacggttgaaacggttagccttgccgagcattcgttatatccgatcctgattgattacctttcacaggaagaaggtctgttgtgtcgtcgtattgacgaaaagcgatctagtaacaacaaaggactgggtggcaaccattggctttatcccgatattgtcgctttggagcctctggataaagaatgggacgatgtagttcaaaactgtgttcgtcatagtgaagggcgtctgacacggttgtggtcttttgaggtgaaaaagcagctaaaccgtagcaatgtgcgtgaatgtttctttcaggcggtcagcaattccagttgggcgcatttcggttacctggtggcgactgaaattaacgaagataagcagcgtagcgtggagcgtgaacttcagatgctctgtgcgttgcacggtattggtgtgatccttctggatccacatgatttctctaatagccagacgttgattccagcgcgtgaacgtaccagcgtggactggcagtcagtgaaccgtctggtggaagaaaatcgggattttagagattatattgaactggtgggggaataccatcagactgggaaaattcataaaactctatggaataaatag

SEQ ID NO: 451620 - DNA, 2634 bp, Serratia marcescens
gtgaatggcttgccgctggtacaggtggaactgaaaaagcgcggcgtggcgatccgcgaagcctttaatcaggtgcatcgctacagcaaagagagttttaacagcgaacattccttgtttaagtatttgcagctgtttgtgatttccaacggtaccgatagccgttattttgccaatactactcagcgaaacaaaaacagcttcgacttcaccatgaactgggcgaaatctgataacagcttgctgaaagacctgaaagactttaccgcgacctttttccagaagaacaccctgctaaatgtgctgctgcattattcggtgtttgatgtaagcgatgcactactggtaatgcgcccttaccaaattgccgctactgagcgcatcttgtggaagatcaacagcgcctatcatgctaaaaactggagtaatactgaaagcggcggttatatctggcacaccacaggttctggtaaaaccttgaccagcttcaaggcggcacgcttagccactgatctggagttcatcgacaaagttttcttcgtggtggatcgtaaagatctggattaccagacaatgaaggagtaccagcgtttttccccggacagtgtgaatggctctgacagcaccgctggcctcaagcgcaatctggataaagatgacaacaaaatcattgtcaccaccatccagaaactcaataacctgatgaagaacgaaaacgacctgcccatttacaacaaacaggtggtgtttatctttgatgaatgccaccgtagccagtttggtgaagcccagaagaacttaaagaaaaagtttaagaagttctatcagttcggctttaccggcacaccaatttttccgcaaaacgctctgggggcagataccacagccagcgtgttcggtcgagagttgcactcttatgtaatcaccgatgcgattcgagatgaaaaggtgctcaagttcaaagtggactacaacgatgtgcgcccacatttcaaagccattgaaagcgaacaggacgagaaaaagctcagcgcggcggaaaacaggcaagccttattgcatcccatccgtataaaagaaatttctcagtacatcctgaataactttcggcaaaaaacgcatcgcctgcacgcaggggcaaaagggtttaatgcgatgtttgccgtgagcagcgtggatgccgccaagctgtattacgaatcgttcaaagacttgcaaaaagacagtgataagccgctaaaaatcgccaccattttctcttttgtggccaatgaggaacaggatgccgtaggcgatattctggatgaaagttttgatgtatctgcaatgaacagcagtgccaaagagtttttaagtgccgccatagccgactacaacgcgctgttcaaaaccaacttcagcgtagaaggcaatggttttcaaaactattatcgcgatctggccaagcaagttaaggctaaggagatcgacttgctgattgtggtcggtatgttcctgactgggtttgatgcgccgacactgaacaccttgtttgtggataaaaacctgcgctaccacggtttgatgcaagcctattcacgcaccaaccatatttttgacgcaaccaaaaccttcggcaatatcgttaccttccgtgacttggagcaggcgacaattgacgccatcactttgtttggcgataaaaacaccaagaacgtggtgctcgagaaaagctacaaggagtatatggaaggctttaccgacgtagtaaccggtgaggcgaggcgtggctttgtggacgtggtaagggagttagagcaacgctttcccgatccttctgccattgagaaagagtccgacaaaaaagcctttgcgaaactctttggcgagtacttacgcgttgagaacgtgctgcaaaactacgacgagtttgccagcctgaaggccttgcagaatattaacatcaatgaccctgaggcggttgatgagttcaagaccctgcattatttaagcgatgaggatttggcgacgctacaaacgattaaagtaccgtctgaacgaaaaattcaggactaccgttcaacttataacgatgttcgcgactggctgcgtcgggaaaaatcttctgctgaaaaagaaaaatcgactattgattgggatgacgttgtcttcgagatagatttactgaagtcgcaagaaattaatctagattatattctcgagctaattttcgagcacaaccataagaataaaagtaaagcaggcttaattgatgaagttcgtcggttaatacgcgccagccttgggagtcgagccaaggaaagcttagtcgttgatttcattaatcaaaccgacctagacaaaattagtgacaaggccagtattatagacgccttctttgcgtttgcacaagtagagcaactgcgcgaagcacatgagttgattggatccgaaaatctgaatgaagaggcagctaaacgttatattaccacttctcttaaacgagagtttgctagcgacaatggtacagagctcaatgctattttacccaaaatgagtccactaaatccccaatacctcacaaaaaagcaaagcgttttccaaaaaattgctgcgtttgttgaaaaatttaagggtgtgggtgggaaaatatag

SEQ ID NO: 451621 - DNA, 300 bp, Serratia marcescens
atggaggagtcccagcgcataaaaacctttatccagtatcgtcaacgagtgctccggtgtctgttcagccaactgtgcagcaaggtcaacctcactggtttccgagacgctgccgaagctcacgcctgtcagcaagtgactggtgacctccatctggcagaccatgcgaagctgcggccagtcggaacgcgcgtgctcattggcggtgcggccgaaggctgcgtcattttcgggcgtatcgggcgttctccacaacgtgccatctacagccaggagtgtcaggccattccagtgcgataa

SEQ ID NO: 451622 - DNA, 564 bp, Serratia marcescens
atgacgttgctattctgggcgataaataacgccatcttttacaagaatacgccagagcggctcaagatcattacggatttggttaaggcaggggcagatccattacaacctcaacctaacacaccaggtagccctgctgaatttgttatgaaagcggataaaggcgtctggatacaggttatgttagagggcggactttctccaaatgctagggataaggttcataatcaacccattatattcaatagcatctttgcaaaaaatactgagacattagaggtcatgttggagcatggtgctgatataaatataagaaattcactgggtgatacgttactcatcgatgctttagactatcactcctatgaccacgtcattcttctattagaaaaaggcgccgatagcgatataagaggcaactcgggttggacgatgggcaatcaactgcaacggctgattaataggagtcaggacggcagtgaggcgaaagaatctcttgagcgcatcagagacgaactaattaagcgtggcgggaagtggccacctgctcctgtcagtcaataa

SEQ ID NO: 451623 - DNA, 972 bp, Serratia marcescens
atgacaagcacccaacaacgcgccgcactgcaacgccagatctggcagattgccaacgatgtacgcggtgcagtggatggctgggattttaagcaatacgttttaggcgctctgttttaccgcttcatcagcgaaaattttgccaattacattgaaggcggtgatgacagtgtcaagtatgcaacactcccccggagcatcattaccccagaaatcaaagacgacgcaattaaaaccaaaggctatttcatttacccagatgatttgtttgttaacatcgccgcaggcgctagtactaacgaaaaattaaataccgatttggctgacatcttctcggctattgaaatgtcagccagcggatacccttcagagaacgatatcaagggattgtttgctgattttgacacaaccagcaaccggctcggcaatacggtaaaagacaaaaatacacgtctggcggcagtgctcaaaggggtggcagaattagattttggtgattttgagggtagccacatcgatcttttcggtgatgcttacgagtttcttatctccaactacgcagccaacgctggtaaatccggcggtgagttttttaccccgcaacacgtgtccaggctgattgcacagcttgccatgcacaagcaaatcagcgttaacaagatttatgacccggcgtgtggttctggctcactgctccttcaagccaaaaaacactttgacgcccacattattgaagacggtttttgggggcaggaactcaaccacaccacctacaacctggcgcggatgaacatgttcttgcacaacatcaactacgacaagttcaatatccagctcggtgatacgctgcgtaatccgcattttggcggtgacaaaccttttgatgccatcgtctccaacccaccttactcggtgaaatggataggctcagacgaccccaccctgatcaatgatgaccgttttgcggggtaa

SEQ ID NO: 451624 - DNA, 342 bp, Serratia marcescens
atggactggatcgactggttggtgtccgcaaaagaatggaaagaaaaagttaaactggcaggtaatgtctgtgcgatctacacgccgaaagacgagctgcaccaggtgttcagtggcacgggtgaactcatcaggccgatggagctacggcttaccggcgatatcagcggtattcctgcgctgaccgcccagtgcaatatgaacgcttgcctgatgacgagggatttttcgtttgtcggctattacctgacctattccctgagcataagaggctcatgcccaacgagatttcggatgaaaaaagaatatagcgataaaagaacgcccggccacataggctga

SEQ ID NO: 451625 - DNA, 204 bp, Serratia marcescens
atggcaatttacgtaggccctcacagcaaagtaggtcgtgatggtggttcattccaagaatgcgacatcaacacaaccaatcacacaataattcgcaaatatggccgatattgcaccatacgcgataacgaatacgcccctcccactagtgtccctggccgctactgggtacaaatcttccgcaccccagataacaccgaataa

SEQ ID NO: 451626 - DNA, 357 bp, Serratia marcescens
atggcatggcacagtgtggctcaggcacaggcattgaccggcaaaagtcggcggacgctctaccgcgatatggccgcaggtcgcgtgtcatggcgaactaatgccgatggcaagcgggagttagaaaccacggaattgctgcgcgtgtacggcgagctgcaacctgctggcacggatgcgcggcacacggtgtcacaccccgttggcacagaagaacaggcggtgttactcgccgaaattcgcgcattacggcaggagatcgccgatctgaaagcgaccgtcttgcgtctggagcaccatccggtcccggcggaaccggcgatcgtcaaacggtggtggcagcgctggcgcccttga

SEQ ID NO: 451627 - DNA, 216 bp, Serratia marcescens
atggaaaaacagcccggcgggctgtggccttttcccgtttttctgccttcccttcactctttaacctttgcctttttatccccaccgctcgccgcagtgttgactagcgcagtctgtcaacgcgaggaagcggaagtgcatctgaagctgatgtgtcgcacggtcatcgcggggcttttgttgacgatgcaagataggcaacgtgttcccgtttga

SEQ ID NO: 451628 - DNA, 486 bp, Serratia marcescens
atgatgttaacgctgggcctgtttgtttttatgctgcagacgctgccctaccagtccatgagccgcaacgcggaatatcgctggccgagcaacgcccgcgttggcctgcgcccggcggcgcaatttctggggatggatgaggaaaaaatcacgctgtccggggtgctgctgccggagatcaccggcggccgctggtcactgctgacgctgcaactgatggccgagcagggccgggcgtggccgctgattgaaggcaccggcacgatttacggcatgtttgtgatcgagtcgatttctgaaacgcattccgagtttttcgccgacggcagcccgcgccgcacagagttcacgctcaacctgaagcgggtcgatgaatccctgtcggcgatgtttggcgatctgcgccagcaggccggggaactgtacgataaagccggagagatggccgggaaggccgccggtgctatgggaggattgttatcatga

SEQ ID NO: 451629 - DNA, 243 bp, Serratia marcescens
atgttcaacatctcgttgggaaaacactattgccggatgcccccctgcaatagcaaacgcaggaacgtgcttagttacgacactacctgcttgtatgattgcgccttcaccaattgtaacaccaggaagtataatcacattgactccgagccagacattatcgccgataataacatccttgataatataagtgttatcgtatgggatagcattgccgtggtgattgtgattctccgtaattaa

SEQ ID NO: 451630 - DNA, 486 bp, Serratia marcescens
atgatgttaacgctgggcctgtttgtttttatgctgcagacgctgccctaccagtccatgagccgcaacgcggaatatcgctggccgagcaacggccgcgttggcctgcgcccggcggcgcaatttctggggatggatgaggaaaaaatcacgctgtccggggtgctgctgccggaaatcaccggcggccgctggtcactgctgacgctgcaactgatggccgagcagggccgggcgtggccgctgattgaaggcaccggcacgatttacggcatgtttgtgattgagtcgatttctgaaacgcactccgagtttttcgccgacggcagcccgcgccgcacagagttcacgctcaacctgaagcgggtcgatgaatccctgtcggcgatgtttggcgatctgcgccagcaggccggggaactgtacgataaagccggagagatggccgggaaggccgccggtgctatgggaggattgttatcatga

SEQ ID NO: 451631 - DNA, 486 bp, Serratia marcescens
atgatgttaacgctgggcctgtttgtttttatgctgcagacgctgccgtatcagtccatgagccgcaacgcggaatatcgctggccgagcaacgcccgcgttggcctgcgcccggcggcgcaatttctggggatggatgaggaaaaaatcacgctgtccggggtgctgctgccggagatcaccggcggccgctggtcactgctgacgctgcaactgatggccgagcagggccgggcgtggccgctgattgaaggcaccggcacgatttacggcatgtttgtgatcgagtcgatttctgaaacgcattccgagtttttcgccgacggcagcccgcgccgcacagagttcacgctcaacctgaagcgggtcgatgaatccctgtctgcgatgtttggcgatctgcgccagcaggccggggagctgtacgataaagccggagagatggccgggaaggccgccggtgctatgggagggttgttatcatga

SEQ ID NO: 451632 - DNA, 450 bp, Serratia marcescens
  misc_feature (239)..(248): n is a, c, g, or t
gtggataacaactacgtcgaaaccgtgatttcactcgcgcctaacctgttctttggcaccaccatcgccgtgaacattctggtgctatccaaacataaaaccgacatgaccacccagtttatcgatgccagcgggttgtttaagaaggaaaccaataacaacgcgctcactgagaagcatatcgagcaaatcatgcaggtgtttgatagcaaagcagacgttgatcattttgccaaatnnnnnnnnnnatcggtgagctttgaagacattaaggccaatgattacaacctatcggtaagtagctatgttgaagccaaggacaaccgtgaagtagtcgatatcactatgctcaatgccgagctgaaaatcaccgttgctagaattgacaagctgcgagcagagattgatatcatcgtggaggagatcgaaggtaaggagttaggggcatga

SEQ ID NO: 451633 - DNA, 303 bp, Serratia marcescens
atgttgttggctactgaaacacaaaaagcgatcggcattaagcgcatttcacagattaagcgtgagctgttccctcataaacagaatcaggcgcaagaggcttttgataagtcgccggaacatatccgcagaactgtttgttttcatgccgggctgaaagagcggcatataaaaatgaagtttgcagaaatgagttattcagagcgtaaacaaattgtgtgggcgctgaatgacctgattgatttatcaaaaaccttaccgcgatttatcagtgatgatgattgcgaattaaacgttaattaa

SEQ ID NO: 451634 - DNA, 300 bp, Serratia marcescens
atgaaggagtcccagcgcataaaaacctttatccagtatcgtcaacgagtgctccggtgtctgctcagccaactgtgcagcaaggtcaacctcactggtttccgagacgctgccgaagctcacgcctgtcagcaagtgactggtgacctccatctggcagaccatgcgaagctgcggccagtcggaacgcgcgtgctcattggcggtgcgtccgaaggctgcgtcattttcgggcgtatcgggcgttctccacaacgtgccatctacagccaggagtgtcaggccattccagtgcgataa

SEQ ID NO: 451635 - DNA, 285 bp, Serratia marcescens
atgagcactgagaagctgagcgaactgagcaagccaaaggcattcattgtcaccggcggacgagcgcatcacgactggccattcattattaaatcgacagcagagcgcgcacgtgatgagcggaaagatggggctgtggttgagcccctctactcgcaagagtacgtctccgccctcatccatcgagcagagcgactcgatgccatgctgacagaatcagtgcaggcactgaaagcggtggagcagcgtaatgcagagctggaagccaagctggctaaccggtag

SEQ ID NO: 451636 - DNA, 375 bp, Serratia marcescens
atgtctggcaaaataacgtctgcggcggtgagcctgctggcgctggcggccatttctggcgctggcgcctggctggcatctcgacactaccagccaacgattggccggctcaacgaggcgctgacgcagtgcaaagacagcaacaaacaacaggcagcgatgattgataaccagaacgctggcattgaggtgctgcgacgcgctgatgttgaacgagcagccaaggccaaggctgaccaggaaaaagcccgtaggcaggccaatggagattatgagaaggccaacgcagtgatggctgaacgcaccataggcgaagcctgcgcggcggcatctgctgcgcttgacgcagagctgcgccgggagcgtgcacaatga

SEQ ID NO: 451637 - DNA, 339 bp, Serratia marcescens
atgagtaaagcaacctatcttaacgagttgaacgaggcacaccgcatcgaaagagcttcccgccatcgtgatgctcgctccccctataaaaacaggggaaatgaccgttggattgaagtctgtaacgcccataaccgaagagtaatccgcaaagccaagcgctctgtcggcaaagcaaataaaaacggttgtcgtcgtactgcaatgggcctgcgtggttttctcaatgagctgaatatctgggcacagtttaccggtggtaatcgccaatctgccggcatgccgaagcgtatataccgtattagccaccgaggggtgatcagccatgcctccgcttaa

SEQ ID NO: 451638 - DNA, 1563 bp, Serratia marcescens
gtgacggttcaaatagtgagtttttccggtggccgcacgtccgcctacctggttcacctgatggagaaacgccggaccggtggtgaggatattcgatatattttcatggatacaggggctgagcaccctggaacgtatgattttgtgcgtaatgtcgtcaaacactggcagcttaatctgatctgcctacgggtggtggtaaaccctgagttgggtaagggcaacggttacaaggtagtcagcgttgatgagatcggtcctgaccttcagccatggcgcgatgtttgtgcaaaatatggtacgccttacgtccatggtgcattttgtacccgcacaatgaaattagagccgttcgagcgttactgtaaagatcatttcgaaagctaccatacctggatcggcattcgttatgatgaaccaaaacggttgaaggaacgggagaatgtcagctacttagcggatatcagtgattttgataagcaggatgttttggcctggtggaagacacaatcttttgatctggagataccggaacataacggtaactgtgtcttctgtgtcaaaaaaggcatcaataaaatcgcgcttgctgctcgtgataatcctgagacctgccaggaattcatggaactcattaccagtgacagcgtaagggtggtagaccggcgccaacaagagaataagatcatgtacagggggaatcattctcttgagagcattattgccatgttttccgaacattctagggaggaaattgcggcgactattcgtggtggtggtggttatgatacaggctcgtgcactgagtcctgtgaggtcttctcatgtgacatcgctgatgatgcagaggaagtggccgaggcgccaaagatcagcacttattgctcgaaacttaccgaactacgcgagaagccaactcatcttttgaaagaggttggcgatcaatggcgtacacctgatgccctgttctggggcatcaatgcgatgtttggtccgctggtgctggatctgttcacagacggcgataacagcaaatgcccggcattctacacagcagaggataatgccctcactcaggactggtcagcacggctggtggagcttcacggtgctgctttcggcaatccgccatattcccgcgcccagcagcatgaggggcaatatatcaccggtatgcagcacatcatggcacacgctatggacatgcgtgagcgtggtggacgatatgttttcctgattaaggctgcgacatcggaaacttggtggcctgagcaggcagatcacgttgctttcatccgcgggcgtgttggttttgacgtaccgcaatggtttgtgcctgctgatgaaaagcaagtgcccaccggcgcattctttgctggggcgatagtgatctttgataagtcttggtccggtcctgcaatgagctatatcagccgtacgcagttggaaaccatgggggcggcgtttgtagcgcagatccgccgggaggcagaacggctgttaccacatattcaaccgcaaaatattccagaatatattcctgggcgagaggtggctgcgtga

SEQ ID NO: 451639 - DNA, 1200 bp, Serratia marcescens; identical to SEQ ID NO: 348069

SEQ ID NO: 451640 - DNA, 1137 bp, Serratia marcescens; identical to SEQ ID NO: 348070

SEQ ID NO: 451641 - DNA, 789 bp, Serratia marcescens; identical to SEQ ID NO: 348071

SEQ ID NO: 451642 - DNA, 903 bp, Serratia marcescens
atgcaaaaaccttcctttcctgccgccgaacctgctgagcctaaggggctaagttgggggctggagagcagacttcaattcatcgatttccgtctgcgctgggagcggcgcatcaaccggatggatctcaccgagcactttggtatttcggtcccgcaggcatcgctggacatttccaagtacatggagttggcgccgagcaacctgacttacgaccgcagctccaagacctacacggcagcgcagagttttcacccgctttaccaacgaagctcggcgcaacgctatctagcagaactgctagcgacaaagatgggaattgtcgagccgacggccagcttcatcggctccgcgccggagacagattgggccccgtccccttggcgcacgatcaatgagcagaccgtcgaagcagtggtgcgcgcaatccgccagcaggaatccattctggtgagctaccagtccatgacgtcgttggatgaatcggttcgcttgctgtctccccacgcccttggcaatgacggttttcgctggcacatgcgcgcgttttgccacaagcgccagcgcttcagcgatttcgtccttgctcgaatcctgcgcatcgatggcttcgaggcgacccaagtggactccaaccaagattcgcattggcaaactgtattgacgctggtacttgcaccgcatcccgatttgcctgcagccaagaaacgagtcttagagttggactacggcatggaagatggagaggtcaaacttccatgccgccaagcgtttctgtactacacgctgagacgtttgggtttgcataccaaggaagcaccagaccccctcgcacagcagatcacgctgaaaaaccgcgatgaaatccaaccctatatcgacgccttggcggcacaggcctga

SEQ ID NO: 451643 - DNA, 1194 bp, Serratia marcescens
gtgcctacaaccatcacgttttttcccgtcgacaacggggacatgaccctcatcaagttcggcgatctcgacgcgacgactctgctgatcgacgtaaacatcaggcaagacgccgacgaccctgacggggaggcgcgcgatgtcgccaaggatttgcgcgaacgactgaagaaggatgagaacggcaggccgtatgtcgatgcgttcctgctgagccacccggatcaagaccattgccgagggttgaagcgacacttctacctagggccactcgacaagtacccggacgacaagaaggacgacaaggacaagaaaatcgtgatccgcgagatgtggtcgtccccgatcgtgtttcgacgcgccagcaagacgcacaccttgagcgacgacgccaaggcattcaacacggaggcgcgtcggcgcgtgcaactgaaccgtgacaagaatttcgccgtcgggaacggtgaccgcattcagatcatgggcgaggacatcgacggaaaaaccgatgatctcacttcgattgtgcggaaggtggacacgcgcttttcaacgatcaatggcaagagttccgcattcttttctgcgtttcttttggctccactggacgcccaggatgacgaggaagaggaagagtgcctggtcaagaaccagtccagcgttattctgaacatcacgttggcggctgacgcgcagacgccggatggtgcgaaattccttactggtggcgatgctgaggtgttcatctggaaccgccagtggcaacgccacaaggctgaagcagatgtgcttgagtacgacatcatgcaggcgcctcatcattgttcctggcattcgctgtcctatgacagctggtccgactaccgtgaaaaagccaagctcgatgctgatgctcgcaaggcgctttcgcagacccgtgacggcgccgtcatcgtcgccagctgcaagccgattgcagatgatgacagcgatccgccctgcatccgtgcgaagcgtgagtacgtgacgatcgtggacgaagcaaaaggcgagttctactgcacaggcgagtaccccagcgaaaagtccgtggaaccgctcgttttcaccgtaaccgctcagggtgtgcaacctccctcgaagaaggagtccggatcgaaggccgctgccgtggtgacctctgcgcgcacccccatgccgcacggagcatcatga

SEQ ID NO: 451644 - DNA, 2256 bp, Serratia marcescens
atgacgggcaccatcgcagacgcactgcatcaacttcagcggcatcgaggccttatccgcgttggcgagccaaggacaactggtgcatcgacggagattgaagtcgatgttgcggtccaactgccgaacaggtctcggcgcaatggtatctctgagaccggagtgcgcaccgtcgagacgtgcgtgctggtattcggtagtgactggcccctgtctgcacccgagcccttcttacgtgcggacttcccgctcaacttgccgcacatcaacccccatcgccaaggcgagttagtctcgccgtgcctattcgaagggtcgttgaacgagctgctgcatcggtttggcctggacgccgttgtcgatcagttgatcgactggctgcacaaggccgcggccggaacactcctggacctggagcaggggtgggaaccaacgcgccgagacagctgtccttcgaccgttgtattcagtgccgagaaggtcgcggccgccgctcccgctgacggcacgattctggtggttcccgcaggctacgtgacgatcgatggcggtctgtacgccatcatcaacgccgaactgaccgcacaagtcgatcctgtgttttatcaggatgttcacaacgacaagctgggcaaatgggggaacggccatgccgcggccttcatcgcgcgcgctccgatgaccgacggcctcccgcatgtgatcggacgctatcaaccagagacagttgtcgatctcgcgacgctgctcgatcgagcagcggagcttggtattgatcgcgacgctttggcccaggaagtggacggttatttcggacgctcaatcctggatatgcgacaggactcgcatggctgggtgcatggtttgtacgcgattgtgattctggctgtgcaaaggccagcgtcgcttgtgggctcgccagggaggagtgtcgaggtattgccctatgtggtgcgctatgaactcaacgctcaatcgctcctggagcgtaacgccacggttcacccggcctttcacgcgcatgcgttgtctcctgaactgctggcaaggacgtccggcattccatacgcagccacatcacagccgctggtcgtgctcggctgcggaagcgtgggatcgaaagtcgcgatgcaactggggcgagcgggctttggttcgatgactttcgtcgacaacgaacccatgtcgcctcacaacgccgcgcggcatgcactcattgagcgggcatcagttctggttccgcctcggaagtcggcgctgatgaagacagcctttgaatcgctgtcgcatcttcaatcgcgagcgttcgacaccgacgcagtgactcttttggtcgatccggaacagtttgcggcaaccgttccgcaggatgcggccctcatcgtggatgcgacggcgtcacttcaggtgctggctgcagaaacacaatcggcagcgttggatcaatccccagcccgattggcacggatcgcgatgtatggtcaggggcgctgtgtggcggtattgctcgaaggagctggccgtgccggccgagttgacgacctcacggcgttcttgttcgagtgctgccggtttgcaccggaactgcgtgcgtcgattgccggcgagacgtctgagccgactcggattttcgtgggtgacaactgtcgttcgctgacgatgcctatgtctgacgccgttgtttcgcggtcgacgtcactggccggcctgcaactggaacgatggctcgttgatgggcttccgaaggaagcgacgctttgcgccggaatctcagatgccgaaggccttggaatggcatggacccgcgccagccttggcccgaccactgcgcttgaagtcgcagacgatggtggctggaacattcgggtcctgtccccagttgcgcaagcaatccatgctgatgcgctgcgctggggtgctctggaaacaggcggcgccttgatcggccgcatctcgtttgaaaatcgaaccatcaccattgcaggccttgttgaggcaccgcctgacagtgttcgagaggccgcccgcttcgtcctcggaaccaacgggcttgttcaaaatttgcgcgccgcaaacgcggcctctttggggtatctcgcctttataggaacgtggcacagccacccgaaaggcggcgcacattcgggtatcgaccgaaatacattgcgcggcatcgccgaggatgctggcggccttccggccgtgtcgttggtatggactccgacaggactcacgtgtgcggtggatcgctggtag

SEQ ID NO: 451645 - DNA, 1071 bp, Serratia marcescens
atggctgactacttcgagatcgactttcttggcgtcgaaacagcgaaaagcggggacgcgatcacgctgcgctactcggtgaatggcaccgagggcgtgcacgttgttgacggtgggtatctggatacgggtgatcagatagtcgagcatctgaagacgtactatggaacaacagtcatcgaccatgtgatcctcacgcacccagatcgcgatcacgccaacggactacgaaaagtcctggagcaatgcacggtcaggaatctttggatcaaccggccgtggatatacgcggaccagttgatcgatcgctttgagacctatgaatcggttgaagccctgcgacggaagttgcgctcaatctacgatgccacggcaattcttgaggatattgcggtggagaagggaattccaatccatgccccccttcaggggcagagcatcggtccgttcgcggtcatggcacctaccctggggcgctacttggacctgatcgtggactccgcgaagacaccggaagctgtcgaagaaagtgcttttgatagcgcgctgagcagcatattccgggcagtgaaggccgcgaccgcctacatcaagtccctgtggggcgaggaatatttcccgcctgagccgaccagtcgtgagaatgaaatgagtgtggtgcagtcggctgtcttgaacggtcatcgcgtcatgcttactggcgatgccgggcgtgaagcactgcaggaggtgatcgactacgcacctttcgtgggactcgcgctgccaggtattcggtatttccaagtgccccatcacggcgggcgacacaacgtttcgaccgaagtcttggatcaactgctcggcccacggttgaacagtatgccggacaagcaccattggaatgccatatgcagttctgccaaggcggatgaggatcatccgcggaagtcggtgattcgcgccgtattgcaccggggtgggcactgggcggcaactgaaagccagaacatacgcatcggggcaggcatcacccgcgatggctgggtgccgattccccaggcggcgtatccggaagatcaagaaaattga

SEQ ID NO: 451646 - DNA, 279 bp, Serratia marcescens; identical to SEQ ID NO: 348072

SEQ ID NO: 451647 - DNA, 300 bp, Serratia marcescens; identical to SEQ ID NO: 348073

SEQ ID NO: 451648 - DNA, 828 bp, Serratia marcescens
atgcaactcgcatcccgcttcgcttcccattcccccgcattgcgcagcgactccccgctgtccgatgaccagatccgccgcgtggccccgtccatcttcgcggatgccccccatgaaagccgctccgagcggtacagctacatccccaccgccgccgtgctgaccgagcttcgcaaagaggggtttcagcccttcatggtgtgccagacccgcgttcgcaacgagggccggcgcgagcacacgaaacacatgctgcgcctgcgccacgccaaccagatcaacgcccgcgaagccaacgaaatcatcctgctgaactcgcacgacggcacgagcagctatcaattactgggtggcatgttccgcttcgtttgcagcaatggccttgtctgcggcgacaccgtgggcgatgtgcgcgtgccccacaagggcgacgtggcgggccatgtcatcgagggcgcctatcaggtgctgagcggcttcgagcatgcgcaggaatcgcgcgaatccatgcaggccatcacgctggatgccggggaatcggaagtgttcgcccgcgccgcgctggccctcaagtacgacgacccaaccaagcccgcgcccgtcacggaatcgcaaatcctgatgccgcgccgcttcgacgaccgccgccccgacctgtggagcgtgttcaaccgcacgcaggagaacctgaccaagggcggattgcatggccgcgccgccaatggccgcagacagcagacccgccccgtgcagggcattgattcggacattcgcctgaaccgcgccctgtggctgctggccgatggcatgcgcgccctcaaggcctga

SEQ ID NO: 451649 - DNA, 2067 bp, Serratia marcescens; identical to SEQ ID NO: 348074

SEQ ID NO: 451650 - DNA, 519 bp, Serratia marcescens
atgaccatccagctacgacacgaaaccacgaacgacattgccgctatcgaggccgtgaccattgccgccttcgccgatgcgccgcacaccagccacacggagcaattcatcgtgcgtgcattgcgcgacgctagcgaactgacgctttccatcgtggccgaagaacacggccaggtcgtcggccatgtggctctgtcgccggtgactatcaccaacgaccacggccacaaggccaaaggctggtgcggcctggggccgatctccgtcctgccgcagaggcaggggcacggcatcggctcgcgcctgatggaacaggcgctgtctgaactgcgggccatgcaggccgaaggctgtgtgctgctcggagagcccgcgtactacgggcgctttggcttccaggcccatgcgggcctgcaactgccgggcgtgccgcccggctattttctcgcactggccttccatgggccagtgcccgaaggcatcgcgcagtacagcgatgccttcaacgccgccgcctga

SEQ ID NO: 451651 - DNA, 294 bp, Serratia marcescens
ttggcagcgaaacatacattgtcggaggcactaaagaccatcaggaaagcacgtggtttgagccaggaagcgttctcggacgtgtccagccgcacctacatgagcacgctggaacgcgacctcaaaagccccaccttgaacaagctggccgagctgtgcgaggtcatggaggtgcacccgctcacgctgctgacgctggcctatgccggcgacgacctgcagcaggtcgatcagctgctggcgcaggtgcgccaggagttggagactgtggcgaagaagagtgacacgccatag

SEQ ID NO: 451652 - DNA, 348 bp, Serratia marcescens
atgaaccaactcatgaccgaggacgagcgcaagcaactgctggaacacggccgggtccgggccgctggccgggccatcgacccgctgcccgtggtgcggttgttcacgccggacgcacacgccacttggctgctggtgtcgcttgaccccgctgacggcgatacggcccatggcctgatcgacttggggatcagcatgcctgagctgggcgagatcaagctgtccgacctcgcatccatcgtcgggccgagcaaacagcccgtgatgcgagatcggtatttccgggcggtgcgcccgttgtcggagtacctgcggctggcccaggagaacggttccgtcctcgattga

SEQ ID NO: 451653 - DNA, 750 bp, Serratia marcescens
atggccgaaccgcaccaccttgcgcactggtatccgaccgccgcctacctctacgtgctgtgcctggacacactggcgctggcctgggagtacctgcgccgccatcccgattaccggcttgactggctgcaccgtgcgcgccgccccgatgctgcgcatcgctggggcttgcgtctgctggaagacccggccctggatgcgcgtgacgcgcatccagcctggctccccggccatggggccgtggcgcagctctaccctgatgccgacccgccaccggatgccgagccgttcgcgttttggcgcatccctggccacaagcaactgctccacgacggcaagggcctggcgctgatcgcgcgcagtcccggccattgcctgcgcttcgtgctggcacctggcctggaggacggcatggccgtggcccatgcctaccgtggccgtggggccacccacgtgcctgacacgcctgcgccgatggctcgcccccgaccgcccccatccgcgttgctggagctgcacaccctgcaggcgctcgacgccaccctcgcgggtgcgtccttgcgtgacgtggccgagggcttgttcggcgtggacgccgcggccggttggtacagcgacggcggcctgcgctccaaggtgcgccgcctggtgcggcgcggcgatgcgttgatgcgcggcggctatcgccgcctagcacaactgcctccgcttgagaagggtcgttttgaagagggcgcaaaacgaccctga

SEQ ID NO: 451654 - DNA, 858 bp, Serratia marcescens
atgtccagccctgcgctgccgtcccggcagcggcccctgccggagcgcgaacagctcgacctgttccgcgccctgccgggcgacatggcgccgcgcgacagccaggacctgatggcctttccgttcttctcgctggcgaagtcacggcgcacggcgccgatcgacttccaggccagcggcgtgacgatccgcgtggaggggacgcaggagcatggcatcgcgacgatttgggacgcggacgtgctcatttgggcggcctcgcagatcgtggaagcgcgcgacgcgggcttgcgcccgtcgcggctgatgcaggccacaccctacgagatcctgcgcttcatcgggcgcggtacgtcgctgcgcgactaccagcgcctcaaggcggccttggatcgcttgcagtccaccacggtggccacgtcgatccgcgagaccacggggaggcggctacaccgcttctcgtggatcaacgagtggaaggaactcgccgatgccaaaggcacacccttggggctggaactgatcctgccggactggttctacgccggcgtcatggacgccgccttggtgctgaccatcgacactgcgtatttccggctcacgggcgggatcgagcgatggctgtaccgcctagtgcgcaagcacggcgggcgacagcctggcggctggcagttcgacttccagcacctgtaccgcaagtcgggcagcgtggcgcggtactacgacttcgccgccgacctgcgagcactggtggcgcggcaagcccttccgggctaccagttgggcatcgagtacgtctcgggcattgcctcgccgctgctgacgttccggcccgtgccgtccacggcacggggataa

SEQ ID NO: 451655 - DNA, 525 bp, Serratia marcescens
atgaacacacccgcctcgacggcttcggcaccgccgtccatcccgcctgtcggcgtggccgacggcgtaccgctgacgcgcgttgcgctcgcatacatcgaccaacgcttcgacctctacctgcgcttcggtgatcctgcccgcatcatccggttcgaccgctggcgccgctgcgcggtgttcacgccgaatgcggttctctgccgcatccgctggcaggccaacgactacggcacgatccgctggcagctcatggtgatgcaggcgtgcatgccgatggatggcgcgcagcgcatctccggcgtgcaacccggcgcgcgcctcttgctgcacgccgagggtgagcaatcggtgcgtgccgtgctggcgcgcatcgacgccatcgaggcgctgggcatcacgcctgtcggcgtctcgcccgcgtactggcgcacgctcgccaaccggctcgcagcgcacttgccgctgcccgaatacaccgccgagcggcacgccgcctggctggccgggagggcgctgccatga

SEQ ID NO: 451656 - DNA, 588 bp, Serratia marcescens; identical to SEQ ID NO: 348075

SEQ ID NO: 451657 - DNA, 1434 bp, Serratia marcescens
atgcgcctgatgatgacctcgcgccataagccacggcgaagccgtcccgcgtcgcttgcattgagggtcacggccctggttggcattgccactaccttggtatttctagcgttcaactgggttgtcgttagatccctggagcaccactttgcccaacaggacgcccatgaactggacgcagtggtcacggccttggcagagccgttgcgacagatcgctaatgacatggacaaagatgagttgcggcagcatttagccaatgcagtggcaggacatcatgggatgacctatggtgtctatgatcggccgggcaataccatctatgccacgccgggtcctgacctgtcgaaacttgccagcagcaaaaagttggtcaaccgcatcaccgccgacgatttgacggtgtggcaagagaatcagaggtcttatcgaggtgtggcgctacaactgcctgccgacgattcggcggcacctggctaccgcatcgtcgctgccatggacatcggctttcatctcgatttcttggcagagttcaagcgcatgctctggtgggcgacctgccttgttctctgcattgcgctcggggtggcttggctggccgtgcaatggggccaccttccaatccgcaaggtcaacgaggagattcgcacgatccgctcttcaaagctagatgtgagacttgatcctctggacgtacctatagaactggctgaacttgtggtcgccttcaacgacatgctggccagaatcgaggaagggtttgtccgcctgtcgcacttttccgccgacattgcgcacgagttgcgtacacccgttaccaacctgattacgcagtcccatgtggcgctcgggcaaccccgcagtgcagaggaatatcgggagatcctctactccaacttggaggagtttgatcgcatgagtcgcatgatcggcgacatgttgtttctagctcaaacggaaaatgaccctcgaaatctccgcctcggcgaaatcgacttggctgagttgatccgaggtttgtttgactacttcgaggcattagctgaagaccgcaacatcacactttacgcaaagggtgctgccgaaccaatacgagcggatcgtgagatgttgctgcgggcgctcaacaatcttctttccaacgcaatccgtcatactccctatgggtcgcgtattacagtcgctttggcgcaagatgagcgatggacaacgataagtgtcgaaaatccgggcgagcgaatttcggaggctgatctgccgaagttattcgatcgctttttccgagtagatcctgcccgccaacgaaagaacgcaggtgcagggctagggctggccatcgtcaaatcaattgccgaagctcatggtggacatgtgcaggcaacgtccagcgatacagcgactaaatttgatctaacgctgcctcgcatcgcttaa

SEQ ID NO: 451658 - DNA, 750 bp, Serratia marcescens
atggggcatcgtgggcggcaaaattccttacgccgcagcgatttcatggggcatgcgatgaagctgttggtcgttgaagacgagaacaagacggcggattacgtccgccaaggtctcatggaggcagggttcgtcgtggatctggcgcgtaacggattggacggacaccacttggccatgagcgagacctacgatttggtggtcttggatgtcatgctgccggatgtcgatggctggcgcatcgtgcgttcgctgcgagatgctggcaaacaagtccctgtgctatttctaaccgcacgtggcagcgtagatgaccgcgtcaaggggttggaactgggggcagacgactatctcgtcaagccgttcgcgttctcggaattgctggcgcgggtgcggacgctgctgcgacgcggaagcgctccgagccagcctgatcgcatccaagttgccgatttggtgctggacttgccgcgccgacgtgcaacgcgcgctggtcagcgcatcaatctcaccagcaaggagttcgcgttgctcgaactgctggcacgccgacagggtgaagttctgccgcgttcgttgattgcgtctcaggtatgggacatgaatttcgacagcgacagcaacgtcattgatgtggccatccgtcgtctgcgcgcaaagatcgacgatgcgttcaatccaaagctcatccacactgtacgtggcatgggatacacgctcgatgcgcctgatgatgacctcgcgccataa

SEQ ID NO: 451659 - DNA, 1902 bp, Serratia marcescens
atgccgcctcgttcgccctttgtaatcgcgcccccactgggcctgtctcgtcggcgttttgttcaggggctggccgctggcggcgtcctggccgggctgtccaccccggcgctcagggcatttgcccaacaaggctccgcgacgcgcggtgccgcccctgtgctgaagggcaccgagttcgacttggtgatcgccgaatcgcccgtgaacttcacgggcaagccaggcgtggctacgaccatcaacggctcgctgccggcaccgacattgcgttggcgtgagggtgacaccgtcacaatccgtgtgaccaacaagctgcgtgaagccacatccatccactggcacgggatcatcctgccgtatcagatggatggcgtgccgggcatcagcttcaatggcatcgctcccggcgagaccttcacgtaccgcttcaaggttcagcaaagcggctcctactggtaccactcgcactccggcttccaggaactcacgggcatgtacggggcgatcatcatcgaccccgctggtgccgagaccatccgcgccgaccgtgaccacgtgctgctgttctcggattggaccgacgaagacccgatgcgggtgttcaccaagctcaagtcccaaagcggctactacaactacaaccaacctaccgtcttcgacttcttccgggacgcctcgcgcgacggcatggccgctgcgatcgacaagcgcaagatgtggaacgagatgcggatgaatccgacggatctcgccgatctgtctgccgccacgctgacctatctggccaacggcgtcacccccgccggcaattggacggcgctgttccgaccgggtgagcgcgtgcggctgcgcatggtcaacggtgcgggcaacaccttctacgacgtacgcattcccggactgaaactcacggtggtgcacgtcgatggtgttgacatggagccggtgacggtcgatgagttccgattcggtccgggcgaaaccgtcgatgtgatcgtccagccacgggatgacgcttacacgatcttcgcccaggcgatggaccggacaggctacgcgcgggccacgctggccgtgcgtgaaggtcttcaagctcccgtgcctgccctcgatccggtcgaatggctgaccatgaacgacatgatgggcagcatgatggggggcatggaccacggcgggtccggccaagccatggagatgacgggcatgacgggcatgacgggcatgaccgggatgaccgggatgggctcgggttcgatgtccgggatggatcatggggcgatggctggcatgaatcacggcgccatgaaccacggtggcatggcgatggatcacagccaacacgccgcggcggcggggggactggccgtgcccagcactactgctcgccacgctcgcaccgagtatggtgccagcacggacatgcgcgttgacatggcgcgcaccaacctcgatgaccccggcatcggactgcgcaacaacggtcggcgagtgttgaccctcgcggatctgcataccccgtcggggccgctggacaagagaggccctggccgggaggtcgaactgcacctcacgggcaacatggaacgctacgcatggtccctggacgggctggagttcggaaagtccacgccggtgcacttcaaacacggcgagcggctgcgggtcattctgcacaacgacaccatgatgacccatcccatgcacctgcacggcatgtggagcgagctggaaagccccgacggtcgcttccttgcgcgccgccacaccctgccggtgcagccggcacaacgcatcagcttcctggtgacagccgacgcgctcggccgctgggcgtggcactgccacctgatgttccacatggatgccggcatgttccgcgaagtcgtggtgtcttga

SEQ ID NO: 451660 - DNA, 981 bp, Serratia marcescens
atgtccaaagcactccccactcgcgcactggccacgacgcttctggccctggtaagcgtcgccgcccaggcacaagcacagaacgaccatgcagcgcacggccaggccgacgctcaaacggccgcgccatccactcagaccgtggctcctgccgccgacccgcacgcgggtcacgcgacgtcggcgagcggctcgaccgcggccccggccatggatcacggcaacatgcagatgcagggcgggtcggcgcctcctgacgcccgcgatccgcatggctactccaatggcctgacattgggatcgggcgactacgccgtacccggtgtgccgcggctgatgctggccgacgaacacaggttcttctcgttgcgcggcgaaaccctggaacgccgcttcacgcgcaaaggggacgattccacggcctacaacctccaggcttggtatgggacgacctacaacaaggccgtcgtgaaggccgaaggcgatatcgccaaaggaaagctcgaaaaatcgcgtaccgagcttctctgggggcacgccgtcgcaccgtactgggacacccagctcggcgttcgggtggataacggaaaaggcccgagccgtcaatggttggctttcggcatccagggcctcgccccctactggttcgagctgaaggcgacgggctacgtgggaagtggcggacgtacggcgctgcgtgtcgaaggcagctacgagctgctgctgacccagcgactgattctggagcctcgtgccgaattgcagttctatggcaaggacgacccggaacgcggtatcggcaagggcttggccgaagcgtctgctggcttgcgcctgcgctatgaattcagtcgccagttcgccccctacatcggcgtggaacgggcgggcagcttcggacgcaccgcggactatgtgcgtgccgaaggtggccgcgcgcagcagacgcgctgggtggctggcgtgcgattctggttctag

SEQ ID NO: 451661 - DNA, 486 bp, Serratia marcescens
atgaacatgcactacgacagaagccagggcaaagtgccgagacgccaagcattgatcgctggcttgttggtgatggcactcgcaggaccgagcctggcgcagagccgaccgatcgccaaggtgtggaaggacccgagctgcggttgctgcaaggactgggtctcacacctgcaaggcgcaggcttcgatgtgcaggttcttgacaccgggaacacggcagcgcgcacgcggctgggcatcccgcagaagtacggttcgtgccacacggcgcagatcggcggctatgccatcgagggtcatgtgcctgcctcggacattcaacgcttgctgcgcgaagccccgcaggccatcggcctcgcggcgccgggcatgccggtcggttcgcccggcatggatggtccggcctatggtggacgcaaggacgcctacgacgtgctgctgatcgggaaaaacggtagtagcacggtctatcagtcgcatcgctga

SEQ ID NO: 451662 - DNA, 273 bp, Serratia marcescens
atgcagcatcagcacacacagacccccagcgatcgtccccggttctggcgatcgcgctacggcgtggcgttcctcatcatcgccgctgtcgccgcgtatttcctgctcaaggagcacacggcacatgttgccggctatctccccttcctgctgctggcggcttgtccgctgatgcacctgttcatgcaccgtggtcacggccacggcggacacgatcatgccgcgcgtcagggtgaggaaggtgccgcacccgccaaggagcagaagcaatga

SEQ ID NO: 451663 - DNA, 2439 bp, Serratia marcescens
atggcggcgggtgccacaacgtccggcccgcatacgcaccaccatcacgccagccatgccggcagtgacgacgcgggcgggtcctcaagccactcgcagcccgatgccgcgacgcgcgatccggtgtgtggcatggcggtcacggcggcgtcggagcaccgctccacgcacttggggaacacgtacttgttttgcagcaccggatgcaaggccaaattcgacaccgatccggcgcgatatgccagcggtggcgcgggcataggcacaggcagcggccatgcgccgcatcaccatgccagcaccgcagtttcaccggccccggcggcatcgccaaccgcacccggaacgatctacacctgcccgatgcacccggagatccgccaggatcatccgggaacctgccccaagtgcgggatgacgctggagcccctgctgcccgacctcgacgacgacaacccggagttgcgtgacttctcgcgtcgcttctggtggaccttgccgttgacgctcgtggtcctggcgctggcgatgctgggcgagcggctgcacctgatggacatggctacgcagagctgggtcgagttggtgctgtcgttgccgatcgtgctgtgggccggctggcccttcttctcccgcggctggctgtccgtggtcaaccgcagcccgaacatgtggacactgatcggcctgggaacgggtgcggcattcatctacagcgtcgtggcaaccgttgcgccggaagtgtttccagcctccttcatgtccatgggacgggtcggcgtgtatttcgaggccgccgccgtcatcatctcgctgacactgctcggccaggtgctggaactcaaggcccgctcccagacttcggcggccatcaagtcgctgctggggctggcgcccaagaccgcgcggcgcatcaatgcggacggcagcgaggaagacgtgccgctcagccatgtgcacgtcggcgacctgctgcgcatccgacccggcgagaaggtgccggtggatggcatcgtgcacgagggcagcagctcgattgacgaatccatgctgaccggcgaaccgctgcccgtcagcaagcgcgcgggcgacaaggtcatcggggccacactcaacaccaacggcgcgctggtcatgcgttcggagcggatcggctcggacaccgttctatcgcagatcgtccagatggtcgcccaggcgcagcgttccaaggcaccgatgcaacgcatggccgatgtcgttgccggctacttcgtgatggccgtcgtcgccattgcggtcacgacgctctttgtatggggattcttcgggccacagcccacctgggtctatggactgatcaatgcggtggccgtcctgatcatcgcctgcccgtgcgcgctgggtctggccacgccgatgtcgatcatggtcgcaacgggccgtggcgccacgcagggcgtgttgttccgcgatgccgcggcgatcgagaatcttcgcaaggtcgataccctcgtcatcgacaagacaggaaccctgaccgaaggccgacctgctttcgatcaggtcgtcgcagcacccggctttacgaacgatgaggtgctgcgtcttgcggccagcctggaccagggcagtgaacaccccctggccgacgccatcgtgcaggccgcgcgtgcccagggcctccaactcgtgaagcctcagagctttgaatcgggaaccggcatcggcgtgcgcggaaaggttgagcaccggcaactggcgttgggcaacacagtgctgatggaacagtctggcgtatcggtggaaccgctcgtaccccaggccgaaactctgcgcggcgaaggggccagcgtcatgtacttggctgtggacgggcaactcgcgggtttgctcgccgtatccgacccggtcaagggcagcacccccgaggccctggccgcgttgaaggctgcgggcctgcgggtcatcatggccaccggggacgggcagaccaccgccaaagccgtcggtgcacgcctaggcatcgacgaggtgcatggtgaggtcaagccggcggacaagctcatgttgatcgagcggctgcagaaagaaggccgcatcgtcgccatggccggagacggcatcaacgacgcgccggccttggcgaaggcagacgtgggcatcgccatgggaacgggaaccgacgtggcgatgaacagcgctcaggtcacgctggtcaagggcgacctgcgtggcattgctgtcgctcgcacgctctcggtgagtaccgtgggcaacatgaagcagaacctcatgttcgccttcctctacaacgcgctgggcatccccatcgccgccggggttctctatcccctcacgggctggttgctgtcgcccctgatcgcagcattggcgatgagcctgagttcggcatcggtcgtgggcaacgccttgcggctgagagcgagccgactgtga

SEQ ID NO: 451664 - DNA, 387 bp, Serratia marcescens
atgacccgttcacatttcatcgccaagctcgtcgcgccgatcgctgctggcctgttcgccaccgccgcattcgcgcatccttcgctggtgtcttcaacgccggccgacaagtcgcaggtttccgcgccagccaccatcgagctgaagttctccgaaacgctggtgccgcagttctccgccgcaagccttgtcatgacgggcatgccgggaatggcgagccatggcccgatgaagatcaacgccagcgtcgcgggtgccggcgacggcaagaccatggtcatcacgccggcacaggcgctccagccgggcgactatcgcgtcgaatggcgtgccgtctcctcggacacgcatccgatcacgggtaacgtcaccttcaaggtgaagtaa

SEQ ID NO: 451665 - DNA, 927 bp, Serratia marcescens
atggccggggattggttgaccatcgtcctgcgcctggcgctttatctggacctggcggcggcgtttggcgtcgccatgttcggactctatgctttgggcaacgacgagcgatcctcgacgatctcgcgccgctatcgcgtactcattggcgcatccgccgccatcggcattgtcctgtcgatgtggggcatgacggtcatggccaaggccatgtccggcgcccaaagctacgcggagctgtcaacgcacgttttcgacatgctcattacgggcacgcacatgggcatcgcctggtgcattcgcatcctggcgttagtgacgtgtgtgctcatcgcagtgttgcgcatgaattcaacactgcgttttgcagcgatggccgcttccagtggtgtggcgttggcgacccttgcatgggcgggacatggcgccatggatgacggcgtgcgcggatacattcatctcgcttcggacatcacgcacctctgggcggccggtgcctgggtaggcgcattgatcgcgttcttggtgcttgcggcgaacaaaccaaataccgggcaaggctcagtagagatcctgagccgaacatccaatggtttcgctcggataggtactgtgatcgtggcggcactcgtcgtgaccggagccctgaattacctgttgatcgctgggccatcgcttgatccgctcttctcaacgctctatggccgcctgctcgtaggaaaactcctgttgttcggaggaatgctcgcgctggcggcagccaatcggtttcgactgagcccaagtctggaggcggcattgagaacaggcaaccacgcacacgcggtcgtcaagctacggcagagtctgttcacggaggcgacattagccgttctggttttggcgagcgttgcgtggcttggcatcctttctcccaacggcacctaa

SEQ ID NO: 451666 - DNA, 285 bp, Serratia marcescens
atgaaatcgcaaattgtcattgccgccctgttgagcgccctctccgtgcctgccttcgccggtcatgcagcagcccaggcagccaaggagatggttccgctggctgacgggggaacgctgtacgtcttcaaggatggaaagatggcacaggaaagtcgcttcggacgcgccgtgtatcaatccatcggcgcctcagtggcgacgaaggacgggcggaacattgccattaccagcaatgaagttgctcgcctcagctcgctgcttgaacaggagcacggcgggtaa

SEQ ID NO: 451667 - DNA, 927 bp, Serratia marcescens
gtggagcttcgtcatctacggtgtttcctcgctgtagcagaggagcttcactttgcccgcgctgccgagcggttgcacatcgaccaatctccgttatctcgcaccatcaaggagttggaggaagaactcggcgcacgcctgtttgtccgcaccactcgcagcacacaactgacccgcgctggacggctgtttctggagcacgttcagcgagtctttacagtgctggagcaggcccgcgatagtgtcaagtccgccgccaacggcttttgcggccagttgcgtattgccttgtccgatggcgtcacgccttcgcgcctgccggcattgctggcgcgcagccgcgaagaggaccccgaggtggaaatccgattgttcgaggtgcctttggatcagcagatcaaggggcttcatagcgacctgtatgacgcgggcttctcgatggcagaggatgcaggtgatggcatcatcgtcactcctgcatgggaagacgaattgatggtggcggtaccagcccgccatccggtgcttgccttcaaacagatcccgctgaaggaggtgttgcgccatccgctggcgctgggcgacccagcagtgtgcgaaggccacgcgcgccaggtcgatcggttcctacgcacatgcggacaagagccgctgatcgcgcagcgcgtggcgaccttcgacgtgatgatgactttagtctccgccggcttagcattgggcttggcgggcgaggcgcacattgcttccagccgcgagccgggagtcgtggcccggcgcttggcgggcaagccgactatgctcatgacctatctgctgcgccgcgatacggagccgtccgaaatgctggctcgatttatcgaacgagtagattttattgattcggctgatgaactcggcatccccgaagaccttccacgcgaccgatag

SEQ ID NO: 451668 - DNA, 228 bp, Serratia marcescens
atgaacaaagtgatattgctgatattggtcactgcactgcctgcatgcggtccttctcaaccttcggaaaccgtggatgcgctcgtagccaatcccgaacgcatcaaagagattcaacgtcaatgcaaggaagaccgcgcgaaggttggcgacgaactatgtctgcgtgctgccgaagccgccaaacggcgatttttcggtgatcggcccgagcaaaaatccaagtag

SEQ ID NO: 451669 - DNA, 300 bp, Serratia marcescens
atgaagtacgcgcctgtcgtgttcgctctcgcgttcctgctgtccggctgcgatcagccgctgtcggtggcttcactggccgccgatccatcccggttgcacacgctgcgcgcgcagtgccgcacgggcgcgcacgacggcgcgttttgcgcgcaggtggcccaggccgacctgcggcgctttctctccggccagaccgggccgagcgagtatcagacgctagccgacctgccgccgattccgcccagcttcgatgaacccgccgatgccgatgcgcctgggcaggaggactcaccatga

SEQ ID NO: 451670 - DNA, 1374 bp, Serratia marcescens
atgaacgacgtaacgatcatcgaccgcttcctcgataccttctcgcgctacatcgactcgggctttggactgctgcatggcgaggtggcgtttctgaccgccacgctgatcgtcatcgacatgacgatcgccgggctgttctgggcgatgggccatgccgtcggccagggcgaggacgtgatcgccaagctgatccgcaaggtgctgtacgtcggtgccttcgcctacatcatcggcaacttcaacacgctggccggcatcctgttccgctccttcgccgggctgggcctaacggccagcggctcgaccttgagcatggagaacttcctacaccctgggcggctggccaaggtcggcatcgacgccggtgcgccgatccttgagcagatcggcaacatggcgggcttccccgaggtgttcgtgaacatcacgcccatcgtcgtgatgttcctcgcgtggttgatcgtcatcctgtgcttcttcgtgctggcgatccagcttttcatcacgctgatcgagttcaagctgaccacgctcgccggcttcgtgctggtgccgttcgcgctgtggaacaagaccgcgttcctcgccgaaaaggtgctgggcaacgtggtgtcgtccggcatcaaggtgctggtgctcgccgtcattgtgggcatcggctcggggctgttcgccgagtttcaggtacatcccgccgagccatccatcgaccactccgtggtcgtgatgctggcctcgctgaccctgctggccttgggcatcttcgggccaggcattgcaaccgggctggtgtctggcgggccgcagcttggcgcgggtgcgatggccggtgctgcgctgggcgctgcgggcgctgccgttgccgtcggcgccgcagccacgggcgtcggcggcgcggtagctgctggagcgcgcatggcgcccgctgccgccaagctggccggcagcggcgcgcgggctgccgctggggctgccagcagtgcacggtcggcgttccaggccggttccgcttcggccggcggcggcctcaagggtgccgctgcgggcttcggcaatgtcgccaagacaggcgctcaggcagccgggcagaaggtggccgatggcgcgcgttcgatgaaggaacgtgccgccgcagctttccgccaggaaggcacgacttcggcgggaggcggtacagccgccgcatcgggcggcccagcgtctggtggtgatacgccctccaccgcgccgcaggagcaacccgcctgggccaaacgcctgcatcgccgccagcaactcacccatgccgcaaccaccgccgcccacacgctgcgcgggggcgacggcggcagttccagccaggggccgagtctgcgcgattccgattcctga

SEQ ID NO: 451671 - DNA, 246 bp, Serratia marcescens
atgagtaccgcccgaaaactccgcctcggcccgttgccgtccagcggtagcacgaagctgacgttcacctgcccggccagcctgaaagccgacctggacgcctacgccgcactgcacgcgcagacgtatggcgaggccgtcgatgcaacgacgttgatcccgcacatgctggagacgttcatggcgggggatcggggattcagaaagggaagcaggggcaaggccgcaccgccgaagtcgggttga

SEQ ID NO: 451672 - DNA, 378 bp, Serratia marcescens
gtggccgtcgtggccgcgcgccggagtcgcgtggagtgggaaaataaacagcgcaaaaaacagagtctgccgcagctggggatggatgaactgatcgccaaatcctggcggtttgtacgcgagcgtttccgcagctatcaggctgagcgtaaatctcatggccagaagcgagcaaccgcgcggcgggatgcttcgcgccaacggaaggacatcgagacgcgtgttcgtcagcagctgacccgtgaatatgccaccggccgcttcagaggcgatcgtgatgcgctcaaacgtgaagttgagcgacgcgtgacggagcgtatgctgctgtcacggggcaataactatacccgcctggcgccgtaccccgacccagtatag

SEQ ID NO: 451673 - DNA, 549 bp, Serratia marcescens
atgcccttgatccgaaaagccttccggcggctgcattatcccgtcgatattatcgcccagtgtgttcgctggtatctggcctatgccttgagcctgcgtaatctggaagaaatgatggcggagcgcggtattgttgttggccattccatgctccatcgttgggtcatccgtctggtgccgttactggataaggcatttcgccgacataaacgtgccgtggggtgccgctggcgcatggacgaaacctacatcaaagtcagagggcagtggaaatatctataccatgccgtcgacagcacggggcagaccatagactttgtgttgatcgccaaacgggatgccgccgccgcactgcgtttctttcgcaaggccatccgtcaccacggcgaacctgaagtggtgacgatcgataaaagcggcgccaataccgccgccctggcaacgctcaatgccgacaagccggctgaagaaagcatcaccgtcaggcaaagcaagtatctgaacaacttagttgagcaagatcaccgcaatatcaaacgccggatatga

SEQ ID NO: 451674 - DNA, 261 bp, Serratia marcescens
atggaaacacgccatgtcccagcagggattaaaatcttaattggtgttgggctctatatactgacgttcctccttgcgaggccatccagtccgataacaaaaggtgagtacgctttttggaacaaagccgccgctctattcggcgagaacgacgttgacggctttatcggtattgcacttttgatcggctgtaccctggccaccgttgtggggtatcagataattgttcgcgttatcgagaagagactgagcaagcaatga

SEQ ID NO: 451675 - DNA, 528 bp, Serratia marcescens
atggctttaaaaggaaaatttgtcgttaacgatgcggactttagtcctttgaccatgtacggcgtcggcacattcatggcttattcaggaaaagataaataccgtaatcaatcaggctgtacagcagtacccagcaccgggccgatacctgcggggacttaccatattgtgaagcgccctacaggtggatggaaaggcgttattcgcacagaccttcacgatttttactcctggctaacaccaacccccgttattaaagctgagtggttcgccttatatcgcgatgatggaaagcttgacgattacacctggattagcggtgtaagacgcggaaactttcgtttgcatccatccggccctgccggtgtttcattgggttgtattacactccagcatcgcactgacttccttgctatacgtcaagcattgcttacgactccacaggtcaaattgtccggcggtcttatgtcatacggcacgatagaggtaattctgaatggaaacacgccatgtcccagcagggattaa

SEQ ID NO: 451676 - DNA, 1179 bp, Serratia marcescens
atgatcgattggaaacaacattgcgttcccggcctgcttgattcttttgaagaaatgcggcgcatacggcaggatattcatcaacatcctgaattaggttaccaggaacatcgcaccagtaagatagtcgcagattacctggcgcagtggggatataaagtgacctgcggccttggcggtaccggtgtggtcggcacgctcaaggtgggaaaaggagagaaatccctcgggctgcgagccgatatggatgcgttgccgatgagcgaagccgagggatgtccgtatgtcagtcgccacgctggcgtcatgcatgcctgcggccatgatgggcatacggcgaccctactggccgttgccaggcatttggcacaaacccgcagcttttcgggcacgcttaatcttatcttccagccgtccgaggagagcggtgccggcgcagaagcgatgttgcaagatgggctaatggacatcgccccttgcgacatgctgttcgcctggcataactacccttcccccacgctgcaattcggtcagatgagtatcggcatgggggctgtcatggcctcagtagacagcctgcacatccatatcacaggcaaaggcggtcacgccgcctcaccgcattttacctgcgatccgatcgttgcggccggcgccatgatccaggcgttacaaaccatcattgcacgcaacgtcaatccatttgactgtgccgccgtcagcattaccagcattcatgccggtaccaatttcaatgtgatccccggcgaattggaaatgaagctttcgttgcgtagcttcgataagcaacagcggcaactgatagtcacccgcgtcaatgacatcgtgcagcatcaggccgcctgcttcggcgtcaacgcaaaaatcagcgaagcggccataagttatccgtcacagatcaaccacgaggagccgacacgcctggctcgggccgtagcggtgcagcatttcggggccggcaacgtggttttagatcatcctcccatcctcgccgccgatgatttcgcctttatggctcaacgagtgccggcctgttacatcaacatcggcgccggtgactcagcgccgttgcataacacgcattacgactttaacgatgcgctgataccggtcgccgggagtctattggtttatctgacacaggcgcaattacgttga

SEQ ID NO: 451677 - DNA, 1293 bp, Serratia marcescens
atgccgtgtgctcatgctcagattgagctgacaacccaacccaataactatcgattgatcatggcagccagcctggggaacgggctggaaatcttcgacttcacggtttacagcttttttgccatggtcatcggcaaattatatttccccagcgataccgcctacggctcattgctgatggcagttgccgtctttggtgtgggttttgtcatgaggcctttgggcagcgtgttactgggcggttatgccgaccgccagggccgcaaagccgcgatgctggtgactatcatgctcatgggcatcggtaccgcactcatcgcgttcgcgccgactcacgagcaaatcggctggttggcgccggtgcttatcgtcattggccgtcttttacaggggtttgccgccgggggtgaggtcgggtcagcgaccacgctgttgctggagtccgccggcgccaatcagcgcggattctttgttagctggcagtctatcagccaagggattgccgccctgtttggcgcttcactaggcttgttattaacctccagtttatctgaggaatcgctttacagttggggttggcgtgttcccttcatcatcggcctgctcatcatcccagtcggggtctatattcgtcgccatgttgaagaaacctttattggtgctcaacagaacgaagggaatgctgcccaccccgcgcagcaaatgttgacgagctaccgccgcgatttaattctcggcgtgatgataatcatgtccggtacggcgatgatatatatcgtacttttctatatgccgacttacatgatccaaacccaccacattgccgctcccatcgcttatttgttcagttgcctcgccgccgtcatccaggtgatttcggtttacttcgcaggacgctatgtcgatcggttcaagaatcataaaaacgccatgattttctccattgtggcgggcatcgtcatggcctatcccaccttttggtttctcggcatggctgattcactctggctggccgtcgcatgccgtctgctgctgattgtcgcattgggcatcaatatgcttaccagtaccctcctgatcgtcgaagcgctacctcggccagtcagggcgaccggtatgtcaatgatctacgcactgggcgtgacgctgtttggcggcacagcacaggtcgcggtgacctggctgctcagtgtcaccggcaaccccatggcaccggcatggtacctgatcggtatgttggccatcagcctgatcgccacctgcttattcaagcaacgtgactatgaacaatga

SEQ ID NO: 451678 - DNA, 267 bp, Serratia marcescens
atgtacctaaaagttaaactaatcaaaggaaggggccttgttggtaaggatccaagcaatgataaagtttacatgataaacacagggttatcatttaccggtgttacgaacaacggggataaatgttctgtgattaatacctctggagttgaatctcttcaagatatctctgaaagaatgattgttattcatggtaatactgtgcttgctaatgatttgctgattcgccctgatgagcagtgggatttgagtgaaattaagctataa

SEQ ID NO: 451679 - DNA, 3381 bp, Serratia marcescens
atgactgagcagattgctgatctcgtcgtcaatctggatgcaaatacagtttcgtttcaggagcagatgggacgtgttgaacgtcaactgctcgagtctagccgaaaagctgatgtgtctactgaacgcatgcggcgcctggctgagcgtcaggcatctgcgatcggcggaatagcagaaaacagcgccagcgcaaccacaaagatgctggccagccaatccactgccgtggatggcatgaagggaaaatgggctgaggcgtcacgcgccgttgatgaaacgcaccagcgtgtcgcagaactcagcgccagacttagagaggagcagcagcaaacccaggttactggtgacgctcaggatcgtctgactgcatcttttttccgccagattgatgcgatcaagggcgaggaaaatagcctacaggaacttcgggttattcaggaacagatccggaccgccagggcttccggaaacattacgcagggagattacctctcactggtgacggagacggcgacgaaagagcgtgtattggctcaagcggaacgcgaggccactcagactaaaattgcgtttctacaaaaattacgtgatcagaatgcgcttttccgttcgtcggcatcagaatcagcggcttatcgtgcctcccaacttgggatcagccaagaggccgcccctcttattgaatcattgcgtcaacaagaagtggcgactcgtcgtgaagctgatcaaaaacgcgctgcagcaatagccgcacgtggtttgaaggctgcacttgcggagcaggaagcggctgaacgagcagccacgagagaggctgaacgcgcacgaagccaacgcgaaaattttttgtctactctgcgtgaccaggtggaattacagggtaaaaccacttcgcaggttcaagaatataaagcagcgcaattgggaatttctcagcaggctgcaccgctgattgccaaaatcagggaacaagagaacgcgtggcagcgcggcaccatttcagtgggtcaatatcgaatggcaatgcgccaattaccgatgcagatcaccgacattacaacctccctggcgtctggcgcgccaatctggttggttgccattcagcagggtggccagatcaaagatagctttggtggagtagggaatgcgttaaaagcgatactcagtctgttaacgccagcgcgcttactgctgggcggtactgctgctgtgatgggattgctggcttacgacgcttacgacagcagtaaaaggatcgccgaccttaatcgcgaacttgcgcggaccaatggtgtatccggattaacaaaacagggcctgcaagaattagtctttcaaggtacgtcagccggccaatcatttacggcagtgactgactcgctcaaggcgttgattgccgctggcgccacgtctggaactaatttttcacaggtaagccaggcgatcgctgcattctcgaaagaaagtggtgaaggactggacgccttggccgggaaattcactgctattgccaaggatcccagtcaggggattctggcgctgaatgaaagcctgcatttcctgaccgctgaacagtacgccaacattcgatcccttgaagaacaagggcggcacatggacgcggtgaagctggcatctgatttggcggcacaagccatgcatagtgctgccgaaaaaatgaaaaccgagctttcttcggttgagtcctacatgcgcacgctgaaagacatggctggcggtatgtgggatgccatcacgggggtttttcgtgacaaaaccgccggcgatgctgcagctgaattggcgtcacgtgctgccaatctgcaggcgcagatcgaaaattcggaacggacaggttacaaccagaagaacggtaaacttcaagcgtggcgtgaggaactcgcttctctcaactcccagcttgacgctctgaatctgcagcgcggtgttcaacaaggcctcgcaaatattgcgcagcaacaaaaagcggaagagcaggatcggttgcgccttgcacagcagcaggatgcgttagcaaccacgctgcaaaccaaggaagagaagcgtgcaaagctgatccggcagacgaacgaagcttttgaaaaagggctgatcaagtccgaagttgagcgtgacaaacagatccagcgcattaacgagcaattcaaggatccgaaaaaaccaaaggggccacaataccgcacgccggcaggtgaaaaagcatcggatagcgcagagtcggagctgctggcgcttcaggcgcaattgcaggtgctacgtcagcacacgggcctgaatgatacgatcagccagcagcgcaaagacctgtggaagacgcaggcgcaattcgcagtgcttgaagaggctgccggtaagcgtcaactctctgatcaggaaaaatcgctgctatccagcaaggataaggtgctggctctggcagagcaaaaagccgaactcggtgatcaaattgctcatcaggaacggctgaacaaattgcaggatgcctcgacaaaatatgtcatccaaatggcagaaaagcagcaggcgctgcagcgcagcgccggattgggagatcgagctgcgcagcgggagagcactttcgctcagcttcggcagggctggcaaaatcagggaggagatctgaacgatgcgggttatcagcggcagctgcaagcagctcaggactactatgccgctgaggacaaattgcgcagtgattggatggctggcgcttccagcgcctggagcaactataaggatcaggcttcggacgccgccggcatgacaaagtccctgttcacttctgcattctcaggcatggaaaacgcattggcgtcatttgtaacgacagggaaggctgggtttagagagttcactagggcgatcctctctgaccttgcaaaaatagcgttgagaatggcaatgagccaggggttgcagagtcttttcggcgccatgggtggtggtggcaataaccccggccaggttccattgtttgcgaacgccaaaggaggcgtttattcgtcaccatcattgagcgcatatagcggacaggtagtgaaccagcctacgttcttcgctttcgccaaaggggccggcgtgatgggtgaggccggtgctgagggcatattgcctctgaaacgtggccctgatggccgcttgggcgtcagcatgtatggtgcacaacaacaagcgccttcatcgcctaatgtgtacatcactattgaaggtggcggaaatattaatacgcaggccgatcctggctgggaagagttcgggaaacagatgggaagtattgccgcgcagaaaagtcaggaggtcatcaaccgcaacctgaagccagggcaaccgatctggaaagcaatcaaggggacataa

SEQ ID NO: 451680 - DNA, 597 bp, Serratia marcescens
gtgatattaactttgctatctggtactatcttattagtgattacatatggaggtagtgatgtggatctgatagcaatattaattagtttcgcaataattggttgcattccagcggctatagccagtagcaaagggcgttcttttggtgagtggtggctgtatggggcattattattcatagtagcgctaattcactcattgtgcataaaaaaagatcagaaagctattgaagactctcttttatccgatggttttgcaaggtgcccatattgtgctgaattggttaaacaagaagcattaaaatgtaagcactgcgggagtgatattggcgacgagcttgaaaaaattaaaaataaaaagttctcaattaaagatatagaacatactactttattcgaaaagtttaatgatgcctacattctaaatgataacgcagtaaagctaatggctgaaagtatcaagaagaacgcaaagtctactaaccctgcatatatttttggtgagtttcagccagatattaactacgttaaatatttacttcctaactcgcttcatgaacagttcataaaaagaattaaatattggataaaagcgtag

SEQ ID NO: 451681 - DNA, 186 bp, Serratia marcescens
atgggtaggattgaaaatatagacagcattaattccgaaatcggacgagcggttcgcagtctttccagtaaaggctacgttgtttgcttgaatggcatactagctaagctagcagaggagcgcatcaatgaaccgaatttcacgcgtaggcgtgtactgacaagggcaattgagacattaatttaa

SEQ ID NO: 451682 - DNA, 219 bp, Serratia marcescens
atgggctacttttgccaaaagggacaatggcgcagggaggcgcgggaaggcaggcgtaaatatgtaaccgacgttgaccagatagcggttaagttgttgatatcaagttttcatattttaatttttatatcttatttttcaaatagatatttgttttatttttttatttatcaaattttgatgtttttactctcattattattggtttttttattttaa

SEQ ID NO: 451683 - DNA, 135 bp, Serratia marcescens
atggtgtcgttcgcacttggcaaggagctggattggctggtagcaaccttaagactagaaaccaagaagaaacagaacgtttcgcccgtatggtcaagtcgatgggtaacagtgaagaacccttacgacgcctga

SEQ ID NO: 451684 - DNA, 189 bp, Serratia marcescens
atgagtagtagaagttttgactgggaatcggcccttaatgatgatgacgggctttacttttacccaataggacacagagttgacagtcattttaaaattcatttcgagctgagcggctcatacggcttaagcgtttcagatgcgttttttctgaaaaatctgttctttttttcgaatattccgatatag

SEQ ID NO: 451685 - DNA, 2115 bp, Serratia marcescens
atgactactataccgacacagttcccgttggcaagtgaatctccgcgtgatttaaaattcaatgctggaaaaattgatgagtttgtaacatcgctaaaacttatctatgaagaccgttttggagcgaagcattatactattgaagggcttcgatgggttgcccaacaggccatttcagcgtttggttatattacgattgactcatttcaggatggggcgaaattaacgttgccaaatcatgttttgcgagataaaaccacaggtgagtattatcgttgggatggtgattttggtgagagcggaaagattgttccacctggttcaacccccgattcaactggcggtatcggggtgggaggatgggtatcagttggtgacgcatctcttcgtgctaatcttaaggagcgtgatggcgcgtggcttttgggttataacgagtcaacagtcggagatgaactggactcaatacagttttctaaatatgtgccaagtatttattatggctcatttttcgaaaacgtatcaaatgcagtaaacatcgtaacatctcacgatggcattacttttagcgatccaatccgcctaaaaaatcccaatggtgatttgttgcgggcccgagacccttcgcttgttttctataatggcatgtggttaatggctaccactgcaaacactcctggttcagttgacctgattatttattcaagtcttgaccttgttagttgggtagccaacccgataaagcttaacggcgataatgctatttgcagcaataccgctccatgggatggtggaactgtgcccgcatcgctgctgtggggtggtgaattagtaatcgacagaaaaacagggaagctccatcttgtaattagcatcataatcggagtggatggaacgacgggaagcccagcctctcggttgtttggtacgtatatatcagaactaaatgatttatcaggactgaaatttagtgttcctgttagggtgtcatgtgtagatcatgacggagggtttaataaatatagccgtattgatgcaaccatagcttacgatgatgttaataatcgttacctcatggctgttaaacgcgaaaactacgggattattgatatattctctagttcagcaatatctggcggatacagctatataaactcaatttctggtttacagaatacagacgcagggagtggatatttcaggcgttcatctgtcgaaggccccgctctataccgcatgaaggatggccatacatgggttgttgcatttgacccgaacgacacattcgacggaattttatacgtttcatccagcgatgggttcgctacattgtcagtacctaaaaagcttgagatggcaaggttccgtcatggttctatcactgccggtgtggggcttcctcctcaggcgataaagaatttagaggatgtgagaaatggaattagtgggtattcagcgctaacacaaattcccctaaattttgttaagctgacagaaagttgctcaattatacctcgctcagatactgtgtactggagtgatacggatataacggtaacgctagttgctccaaatacaattagtgggaatatgaattacccgcgtaggttttatttttgcttgcgaacaaactcacgccttatcaaaatgagaatatctggtgccgtttccgggggggtgtgggatattggttggggcgtcaatagtgaccgtctaattgagtttttctatgaaaatctaaataacgtttatcgtagtgaagctatgggcgctgtttcatatacacagacccgactaaaagctgataccggtactaactctattaatgcatcttctgttacttgggctcctcgtcatgctaaaacttacgtaataacagatggtgacgggacaatgataattaacgcattacctaacatgcctgttggaacttatttcaatattgtcattcagtctggcatcggatcgtttgttggattggttttaaaggcagcagttaatggaaataacatggggatgccgacagattggtcgtataacgggggaggttcaaattacgacggaaaaataattagattggaaaagggaagtgacctgtggtttgccactagataa

SEQ ID NO: 451686 - DNA, 471 bp, Serratia marcescens
atgccgacatatagagaatataaggctcaaaggccaaaccggattctttatgaaacggtcgagttttatcactcgtcgttcggttatgtgaggttggttcgcgatcagatattcccgaagatgctgggcggcaatgaatatcagccatgccgttttgaactaaccgaaagccagcaaagcaacacgccagtgatagacagcacgctgaaatttagccagctggccactgattttaagcagaaacttaagttgtggcgggggaattcccgtattgacccaatcatctgcactatccggcgctttgactcgatcaacatgaatatagcgatcgcgcaatggtcgctttacgttagcgattgcagccttgacggagctgatgtgaatgtaagtttgtcgctaaccaatcccctcaacaagaacatcgccagactatacgacccggctgagtggcctgggctaattaacggttaa

SEQ ID NO: 451687 - DNA, 147 bp, Serratia marcescens
atgaaaaaaatcgcagcattgttaaccaatcaaaactacctggcctgtgtcgtagcggcattgctcttcattgttacggcagataacatccatctgcgtgatagcattagctatgggctgcaggcagtctttgatgctaaaagataa

SEQ ID NO: 451688 - DNA, 633 bp, Serratia marcescens
atgaccagaagctatgccatcatgattgatgctggttttttgcgcgcaaagctgggcacaaaagacaagccaatagacgctgaagtaattaagtcatttgtagaaaaaataaaagctagagtggagcttgatggcttaatacttcaccgagtttattattatgatgctgagccattaaccggcattcaaacccatccgataagtggtgaaaaaatagatttctctgagactgatgtttcaaagaggaacaagatcatgctggatgagctaaaaaggacagcattctttgcggttaggctaggggaaacaaattttagaggctggaaagtagatcgttgggctttaaaaagtgaagatcagaagacgtctaaaataaattctggtaatgttaaacctaacgttcagcagaaaggcgttgacatgagaattgctcttgatatgtcatccatgtctttgaaaaaacaagctgaagttttcgctttggtaactggtgattcagactttgttcctatcattaagtttgcaagaaaagaaggccggcagatctacctatatacattgggccacggggtaaaacaaacaatgtatgaacactccgatttgttggttcctaatcaatatgatcagctttga

SEQ ID NO: 451689 - DNA, 267 bp, Serratia marcescens
atgtacctaaaaattaaactaatcaaaggaaggggtcttgttggtaaggacccaaacaatggtaaagtttacatgataaacacagggttatcatttaccggtgttacaaacaacggggataaatgttctgtgattaatacctctagagttgaatctcttcaagatatctctgaaagaatgattgttattcatggtaatactgtgcttgctgatgatttgctgattcgccctgatgagcagtggggtttgagtgaaattaagctataa

SEQ ID NO: 451690 - DNA, 447 bp, Serratia marcescens
atgattcagcgctttaaccctgactacaaaatgcacgcagttcgctttgaggctttcgcccgtgaagcggagcacggcgagcttgttcggtttgatgcccaccagcaggtagtgagcgcgattgagactgagcgcgatgcgcagcagaaacgagccgatgcgctggctgttgagaatgcggcaatgcgcagcgttatcgatgctgcgataggggtagcgaataattcttctggcattgcaggctggcacctgaacggtgaaatcgccgattgggaagagatattgccagagctgaatatcgaaaccccagccactgacgcagcacttgcagctatccaggcgcatggagtggagaagtttgctgatcacatgcaagggggagagaaatattctcgcattgctgagtacgcgcggggattcgccaccaagctgcgggaggccaaatga

SEQ ID NO: 451691 - DNA, 354 bp, Serratia marcescens
atggataagctgagcgaactgagcaatccagcatggattgtaggccagcaggaaattgctgacttcatgcgtggcgatgaggcgctaattgtgcgcggctatgaccctgaaagcacggagccagcattgagaatgtactcgcaagagtacgtctccgccctgctggcgcgcatcgaagaacttgaatggcgagagcttaactctacggaactgaaggaacttctcacctggcaccctacggaaaacagcgcggcaaccgacccgattctttgggctgccatgcgcaacaaaatcaacttaacgcgagttagggttgctagtgatgaagcgaagaaggagcagagcaatggataa

SEQ ID NO: 451692 - DNA, 534 bp, Serratia marcescens
ttgagcgctacgttgacacagcattcgcaggaaattatggatattgtatccaaaatcattattccagtaattgtagcattattagccgcacatttttccaccagatttgctctggataagttctacaaggaaaaatggtgggaaaagcgtctggaatctttcacggagattatcaatattgcgtatcgaatcaaaatggcaaatagatacttcgttgaactagagcatgcaaaaagaggcgattccaaaccagaatttaaaccacaccctaaagatattgaggataaattaatagccgaatactggcttgattttcaggagcttggaagaatagcacaattagccgacttcacattaactacaaatgtcaaaatcattttagataattttgtaaatgccagagaaaaaataaccgatgcgtgttatcacgacgctcttgacagcttagaagcatctgaaagagattttgctcttacagaagagttacttgatgacttagtctcagaagctaaaaatgagttaagaattaattaa

SEQ ID NO: 451693 - DNA, 210 bp, Serratia marcescens
atgatgattacttttttagtgcagcgagataaatctaacaattgtcgcgtatttttattgtggattatcgtgctgtcattcatgaaaaaaacagagcatcaatccacaaaaccaatagcaagcaaattaaacgtgctgtttatgttcgcaaggagaataaccaactactggcgatacaccgactcgaagaagagagaaagcgatgaataa

SEQ ID NO: 451694 - DNA, 492 bp, Serratia marcescens
atggaactagaatacgaaagcaaacgcccgctctacatcccttacgccggcccgattctgctggaatttccgctgctgaacaaaggcagcgctttcaccgaggaagaacgtagccacttcaacctgcacggcctgctgccggaagcggtggaaaccatcgaagaacaggtggaacgcgcctaccgtcagtaccaggatttcaagaacgataacgacaagcacatctacctgcgcaacatccaggacaccaacgaaaccttgttctaccgactgctggactcgcacctgagcgagatgatgccgatcatctacaccccgaccgtcggcgaggcctgcgaacacttctccgatatctatcgccgcgcgcgcgggctgttcatctcctacccgaaccgcgatcgcatcgatgacatgctgcaaaacgccaccaagcagaacgtcaaggtgatcgtggtcaccgacggcgagcgtatcctcggcctgggcgactag

SEQ ID NO: 451695 - DNA, 393 bp, Serratia marcescens
atgcaatcccggatgacaaaggacattgtcctgaacgcactgctgatggctgtatggcggcgtaatccccaaaaacaggtgctggttcattcggatcagggcagtcagtacacaagccatgagtggcagtcgttcctgaaatcacacggcctggaaggcagcatgagccgtcgcggtaactgccatgataatgcggttgcagaaagctttttccagttgttgaaacgcgaacggataaagaaaaagatctacggaacgcgggaagaagcccgcagtgatatttttgattacatcgaaatgttttataacagtaagcgtcggcatggttctagcgatcatatgtcaccgacagaatatgaaaaccagtattatcaacggctcggaagtgtctag

SEQ ID NO: 451696 - DNA, 828 bp, Serratia marcescens
atgtttcatttagataatacaagtggcgtacctgacatgcctgagccaaaagaacctatgagtaatactcctcgttggttcggtgaaggagttcaacaaggtgggatcagttggcctggtgcggattggtttaatattgttcaagcggaattgctgaatttgctgaaagcggccgatattaagccggataaatcctcgtttgaccaactaagcagagctatccctgttttgggtgacgcggggctaagagcgaatttacaagatgctgaaggcgcatatatttcaggctacaatggttcaactgttggcggggagctggattcattacagttttctaagaatgtcccaggcatttactacggagcattttttgagaatggtaccaatgcactaaacctagtcatgtctcacgacggtttgacgtttggcgacccagtcagattaaccacgacttcaggccaattgttacgcgcacgtgacccatctttggtgttttacaaaggtaaatggttgatggcaaccacctcaaataccgttgataccgttgacctgacgatttataccagctccgatctgataaactggacggcaaatgatataaagctgaatggaagctttgcaatttgtagcaatactgttgcatgggattcgggaactgtccccgccagtctcttatgggctggtgaactgtttattgacccgccgtctggggctttgaagttaactatcagtattctgttaggcgttgatgacaccacaggtggccgttactttggtacatacatttccgaactgtccgatcttgaaactgaatcgccacgggtttaa

SEQ ID NO: 451697 - DNA, 876 bp, Serratia marcescens
atgtcattttcattctcaccatcgccgcaggcactgtggctttatcaatatgatgacgatggtatctttattggctccgtattcatgataattccggccaatatgggcttaccggccaataccacgcacattccctgcgaaccaagcctgggtgaaaccggcatatttgctggtgagtcctggagatatattgaagataatcgtggcacgcagtattggaacgatcgggggcagggatttgttatttccagccctcgcgaatcattgcctgaatgggctattactacggagcctcccgcaatagagtccggttatgttctgttgcattctaaaggccggtggcagctgatagaagacaattctggccgagcattttttgaaagcaatggtacgaagcatgttgtacccgatgcctattttacattgccagaaaactgcacgtttgttgaaccaccagaagataaaccaacgttcgtaacccattggaatggcagtgaatggtcttatttaaaagacctgcgaggacagcttgcgtacaacacctcaaccaaggagcctttgtcaattacggatgttggtcccctaccagcaggttacacgttaaatgcaccggggccattcgaagtatgggatggtaaaggttgggttaaagatgaggttgccgagcaactttacgcatcagatttagcaatccgcaaaaaaagcaagctatttactgaggcaactgaacaaatagcagtgcttacatttgccgtgagtcaaggaactgccactgaagatgagttgacaaagttaactcagtgggaagcctatcgcctagaactaaaccgcatcgagccatccaccggtaatattaactggccggataagccgtaa

SEQ ID NO: 451698 - DNA, 756 bp, Serratia marcescens
atgtaccacttggataatgcctccagtgttccagatatgccgccggttaagcccgtgctttttactgaccgccgtttttttactgaaggtggtgatggtattgcaccgagttatcccggcgctgattggttcaatattattcagatggaaatgctgaatgttttggcactggccaatattaccccggacaaatcacagttcgaccagttcgccagggcgatccgtatcttttcatcggattacatgctgccacctggtattgcgtttgcctggccaggtgccaatgcccccaagggtttcgcgttgatgctgggtcagcgttttgaccctgtggcctatccgcgcctgggccaagcatacccgaacagcatcatccccgacatgcgcggccagactatcaaatttttgcctgctacaggcgggcggatgctgttgtcttatgaagcggacggcattaagtcacatggtcacggtattactatcaacagcaccgatctgggtaccaaacagaccagcgacgacaatgaacactatcatcaggggggggttgcagcgccaggtgcagtctggagcgacttttatacgggtacggataacaccggcaactatacaaaaaataacaccagtaccactccagcccaccatcataccgtctacatcggtccgcatgcgcataccgcgtctattacggctactggaaatgcagaaagtaccgtcaaaaacatcgcatttaacgccattgtgaggttagcataa

SEQ ID NO: 451699 - DNA, 324 bp, Serratia marcescens
atggcaggtgttatttttgtcaatttggtgataatcgtttgtgcattttgggtatttaacgatgcagcgaatcataaagttggtgtttataaaattaaagaaggacacagcaaaggctacagtacggggttgtcccctatagtttggggggttggttctctattcattttcatgttctttatttatctggtgcgccgaaaagcgttaatcacatcagcaatagataaccctgttgatactgacaagagtacaggttttattattcttttcctgataacctcggctctgctgatgttctcatttagagacatcttgttcatctaa

SEQ ID NO: 451700 - DNA, 441 bp, Serratia marcescens
atgaagtacctgaaactgggcaacaccgatctgaacgtctcacgcatctgcctgggttgcatgacctacggcgaaccgaaccgcggcaatcacgcctggacgctgccggaagagagcagccgcccgctgctgaaacaggcgttggaagccggcatcaactttttcgacaccgccaacagctattccgacggcagcagcgaggaaatcctcggccgggcgctgcgcgactatgcgcgccgcgaagacgtggtggtcgccaccaaggtgtatttcccgctgagtaacctgaagcgcggtttatcgcgcgccaacatcatgcagtccatcgacgacagcctgcggcgcctggacaccgactatgtcgatttgctgcagatccaccgctgggattacgaaacgccgctggaagagagacgctggaagcgctgcacgacgtggtga

SEQ ID NO: 451701 - DNA, 1098 bp, Serratia marcescens
atgcaggctgcattgctctctgtttttcttcttttgccgtctaacatcatacaagtcagcaaccggctattggtgatcgttctgctgacccttgccgccggttttggtgaacttttcctctatggtagcggcgtgagttttttacacccgaactacgcctatatcggtacgcttatctctctgcttcagccaccggccatctatctgtatacccgttcgctgatgtatcgccattttcgaatacggccagctcatgctgtacacttaatcccgtttgctactggccttattgtgtttttcacgctgtacgttccgttatctgactcagcaaaaataacgctcttacagcagcaggatttaccgggcatgccagtatcactgccccttgcattggcctatcacggggtatttctcggctggcttggctattccctcagacgtttgcggtcatttaattcggatattcagcatctttattccgatattgcccgccagcaaatgctctggctccgcttcctgctgtcaggttatttgggactttggatagtcagtattatttgctgcctgtttttctatctgttcaggctaaccgataaaacgagttgggtactgcccgttgtcagcatagcggggtttgcatttattaatacgttattagtttgtgcgctgcggcaacccgctgcgtttatggggctaacgcaggcagatgaaatcctgctggagaatattcagccggttaaagcaccgcagttacggggggctgaacaggtggataaggtggcagaatttatgcaccggaatcagccgtttctggattccaccctgtccttaagccagcttgcgcatcagttaaaactctcgccgcacgatctgtcagccattatcaacaacgggtttcagcagaatttttttacgtttatcagcgagtaccgaatagagcacgctaaaaaactcctggcaatgccggaagataagcggaccattcttgatattatgtattcctcaggctttaactctaaatcggtctttaataccgcgtttaagaagcaaacgggtttaacgccttcagaatatcggcggcggcactgttgcaaatag

SEQ ID NO: 451702 - DNA, 603 bp, Serratia marcescens; identical to SEQ ID NO: 143543

SEQ ID NO: 451703 - DNA, 1584 bp, Serratia marcescens
ttgcgctccggggacatctgggttaaaggctcacgccgctacaaaaactttgatgattacctcattcccgaaaaggactttgacaaactcacaccggcgctgcccctgcccgtatctgctgattatcatgagtacattaccagccgtaagactctgcttcagtccagacttgaagaggtcaatgccatggctgcccttggtgagctgcccgatgtcgaaatatctgacaggggagtaaaagtctctccgctggataactgcgtcccggtacaggtttcaccgctggcagaactggtttacagcatgctaccgcgccctaaaatcacggaaattctcgatgaggtaaacagctggacggcgtttacccgacatttttcgcatataaaaaatgacattacccgtcccgatacccgccagctcctcaccaccatccttgcggatggcatcaatcttggcctgaccaaaatggcggaagcctgccccggaagcaccaaatcatcactggaagatatccaggcatggtacatccgcgacgaaacctattcagccgccctcgcagagctggtaaacgcgcaggggaaaagaccactggcggcattctggggagacgggacaacgtcatcatcagatggacagaatttcagaacaggcagctcaggccgctacgcagggcaggttaacccgaaatatgggcaagagcctggacgtcagttttatacccatatttcggatcaatacagcccgttttacacctgcataatcagccgggtcagggattcaacccatgtgctcgatggcttgctgtaccacgaaagcgacctggaaatcagggagcattacaccgataccgctggtttcaccgatcatgtctttgccctgatgcatctgctgggatttgcgttctgtccgcggatcagggatctccacgacaaaaagctgtttatcaaagggaaagcagaccaatacccggcgcttcagtcactgatatcaacgaccagcctgaatctgaaagagatcgaaattcactggcgtgaagtacttcgtctggccacttcaataaagcagggaaccgtgacggcatccctgatgttgaaaaagcttgccagctaccccaaacaaaacggacttgccaaagcactgagggaaattggtcgtattgaacgaactctgtttatgctcgactggttccgcgatccggcacttcgtcggcgggtacaggcgggactgaataaaggagaagcccgtaacgcgctggcgcgtgcggtattcctacaccggctgggtgaaatcagggacagaaaaccggaaaatcagagctatcgcgccagtggactgacgctgctgacggctgccatatccctgtggaataccgtctatatggaaagagcggtcgatgccctgaagcgcaaaggggtgaagatcaacgagcaactgctgtcgcatttgtccccgttaggctgggaacacatcaatctgacaggcgattatatatggaaaagcaaccggataccggcttccggtaagtttcgtcggctgagaccagctaaagtcgaaaggtcaaaaaatagccttaacgtacaataa

SEQ ID NO: 451704 - DNA, 924 bp, Serratia marcescens
atgactaaaacaaaagggttacctcgtccgctgacgcactacgcttggctttccattgccacggctattgccactatcggactcaaaggtgtggcgtggaaaatgaccggttcggtcggtctgctatctgatgccatcgaatccgtagttaacctcgcaggagccctaatggcgctctggatgctgaccttggctgcgcttccgaccgatgagaaccatgcatatgggcacggcaaagccgaatatttctcgagtgctttcgaaggatttctgatcctattggcggcagccagtatcgcctataccgcagttgagcggatgttaactccacagccgcttgaggagattggtctcggattactggtttcaacagtcgcatcaatccttaattttgtgacggctcgcattttgttaagggctggcaggcagcacaactctatcactcttgaggcagatgctcatcacctgctgaccgatgtctggacgtcggtcggtgtcatttttggtgtcggactggtttatctgaccggctggttttgggtcgatccgatcgttgcattgctggtcgcagccaacatcgtttggactggttatcagcttatgagtcgttcagctgcaggtctgatggacgtatcgctacccacggaagaactcaaaaaaatcgagtcactgctggcaggatatcgtgaacaggggcttgatttccatgcactacgtacacgccaggctggcgggcgggcgtttatgacaatgcacatcctagttcctgggcgatggactgttcaatatgggcacgactgggccgagcgtatagagaatgatatccgcaccgcactgccttttatccatatcaccactcatgtggaaccgttggaagatcccgcgtcaatgaacgaccaaacgctcgacatttctgatcactaa

SEQ ID NO: 451705 - DNA, 573 bp, Serratia marcescens; identical to SEQ ID NO: 26658

SEQ ID NO: 451706 - DNA, 306 bp, Serratia marcescens
atgttcagctattttattttacgcattgagaagcaattattctgttatttgtatgggggcatgctggcgctgtttctgatactcctgtctccgttttttttcacaggagggggactgctcctggtgatgctgtcagttgcgttgttctggggcgggctggccctgtatacgcggcatactgaccggatgagaaagcctgacgtttctccactcgtcagtgtccgggatggtatccaggtggtgcccgagccgccagatgatgatggggtcagtttggatatcgaaaattattgtacgttaaggtga

SEQ ID NO: 451707 - DNA, 792 bp, Serratia marcescens; identical to SEQ ID NO: 181311

SEQ ID NO: 451708 - DNA, 594 bp, Serratia marcescens; identical to SEQ ID NO: 181312

SEQ ID NO: 451709 - DNA, 720 bp, Serratia marcescens; identical to SEQ ID NO: 181313

SEQ ID NO: 451710 - DNA, 5259 bp, Serratia marcescens
atgatgtcgattggttcggtaaagtcggcggggagcgccagcaattactatacagacaaggataactattacgttatcggatctatggatgaacgctggcagggaaagggcgcggaggcgctgggccttgacgggaaggtggacaagcaggtgttcactgacctgctgaaaggaaagctgccggacggcagtgacctgacccggatgcaggatggcgtgaacaaacaccggccaggttatgacctgaccttttccgcccctaagagcgtgtctgtcatggccatgatcggtggggataagcggctgattgatgcccataatcaggccgtcacagaagccgtaaaacaggtggaaacgctggcggcgacccgggtcatgacggacggaaaaagcgaaaccgtgctgaccggcaatctcattgtggcgaaatttaatcacgacacaaaccgcaatcaggagccccagttgcacacccatgccgtggtcatcaatgcgacgcagaacggcggcaagtggcagtctcttggcaccgatacggtgggtaaaacgggctttatcgagaatgtgtacgcaaatcagatagccttcggaaaactctaccgggaggtgctcaaacctctcgttgagaaactcggctatgagacggaagtgacaggcaaacacggcatgtgggagatgaaagatgtgccggttgagccgttttccacccgcagtcaggaggtcagggaggctgcaggccctgatgcctccctgaagtcccgcgatgtggccacactggatacccgtaaatcgaaagaaaccctcgatccggcagaaaaaatggtggagtgggtgaacaccctcaaagagagcggtttcgatattcacagctatcgcgaggatgccgataagcgcgctgcagaaatcaaccgtgcgcccgtcagtccggcgaaaaccgacggcccggatatcagcgacgtggtcacgaaagccattgccggtctcagcgaccgcaaagtgcagtttacctatgccgacatgttggcccgcacggttagccagctggaggcgaagccgggggtatttgaactggccagaacgggcattgatgcggctattgagcgcgaacagcttatcccgctcgatcgcgagaaaggtctgttcacctcaaacatccacgtccttgacgaattgtccgttaaagcgctgagccaggaggttcagcgccagaatcatgtctccgtcacgccagatgcctctgttgtgcgtcatgcacctttcagcgatgcggtcagcgtgctggcgcaggaccggccggcgatggggattgtttacggacagggaggggccacggggcagcgggagcgggtggctgagctgacgctgatggcccgggagcaggggcgcgatgtgcatatccttgctgcagataaccggtctcgtgattttctcgccggggatgcccgtctggtgggggagacggtcaccggcaagtctgccctgcaggacggaaccgcgtttatccctggcgggacgctcattgtggatcaggcagagaagctgagtctgaaagagaccctttccctgctcgatggcgccatgcgccataacgtgcaggttctgctctccgacagcggcaagcgtagcggaaccggaagcgcgctgacagtgctgaaagagagcggggtgaatacgtatcgctggcagggtggaaatcagacgacggcagacatcatcagtgaaccagacaagggcgcccgctacagccgtctggcgcaggagtttgctgtcagtgtgcgtgaggggcaggaaagcgtggcacaaatcagcggggtgcgagaacagggcgtactcaatggcattatccgtgaagtcctgaaaaatgaaggtacgctgggggcgaaggagatgacagtcactaccctgacgccggtgtggctggacagcaaaagccggggcgtgcgcgactattaccgcgaagggatggtgatggagcggtgggacccggagacacggaagcatgaccggtttttgatagaccgggtgactgcgagcagcaatatgctgaccctcagggacaaagagggggaacgtctggacctgaaagtttcggctgtcgacagccagtggtcgttgttccgggccgataagctaccggtagcgagcggagaacgtctgtcggtgctggggaaaattcctgagacgcggctgaaaggcggcgagagcatcacggtgctgaacgcggaggccgggcagctgacggtgcagcgtcccgggcagaaaaccacccagaccctggcggtgggcgccgggccgttcgacgggattaaagtcgggcacggatgggtggaaagtcccggccgttcggtcagcgaaacagcgaccgtttttgcctccctgacgcaacgcgagctggataatgccacgctgaatcagctggcgcagagcggaagccatatccggctgtactctgcacaggatgcggcccgcacaacagagaagctggccaggcataccgccttcagcgtggtgtctgagcagctgaaggcccgttcaggcgagacagacctggatgcggccatcgcattacagaaagccgggctgcacaccccggcagagcaggtcattcacctttccattcctttgctggaaagtgaggagctgactttcacgcgcccgcaactgttggccaccgcgctggaaaccggcggaggtaaggttccgatgacggagatagacgcgaccattcaggcgcagattaaggctggcagtctgctgaatgtgcctgtggccccaggccacggtaatgacctgctgatttcccgccagacctgggatgcagagaaaagcattctgacaaaggtgctggaaggaaaagaggccgttgcacccctgatggacagtgtaccgggaagcctgatgacggacctgacgtcagggcagcgtgcttccacccggatgatactggagactacggatcggttcacggtggttcagggctatgccggggtggggaaaaccacccagctccgggcggtgacgggagccatcagcctgctgccggaagcgacccggcctcgggtcatcggtctggggccgacacaccgcgccgtgggggaaatgcagagcgccggcgtggatgcgcagactaccgcctcgttcctgcatgacacgcagctcctgcagcgtaatggtcagacaccggatttcagcaacacgctgttcctgctcgacgagagctcaatggtggggctggccgataccgcgaaggcgctctccctgattgcggccgggggaggacgggcggtgctcagcggcgataccgaccagctgcagtccattgcgccgggccagccgttccggctgatgcagcagcgcagtgccgccgacgtcgccattatgaaagagattgtgcgccaggtacctgagttgcgaccggcggtctacagcctgattgaccgggacgtgaaccgcgcgctggcgacgattgagcagattacaccggaacaggtgccgcgaaaagacggggcctgggtgcccgaaaactccgtggtggagttcacccccgcacaggaggagacgatacagaaagcgctgaacaagggtgaaagtgtgccggcaggtcagcccaccacgctgtatgaggcactggtgaaggactatgccgaccgtaccccggaggcgcagtcacagacgctgattatcacccatctgaatgatgaccggcgggtgctgaacagtctgattcatgacgcgaggcgggacaatggtgaagtgggcagagaggaagtcactctgccggtactggtgacgagcaacatccgtgacggagagctgcgcagactgtcgacctggacggctcataagggggccgtggccctggtcgacaatgtctaccaccgtatcgggagcgtggataaggagaaccagcttatcacgctgatggatggtgaagggaaagaacggcttatttcaccccgggaggcgttggctgaaggtgtcacgctctaccgtgagcaagagattacagtgtctcagggggacaaaatgcgcttcagcaagagtgacacggaacgcggctatgtggccaacagtgtgtgggaggtgaaatccgtttcaggtgacagtgtcacgctatctgacggcaaaaccacccgcacgctgaacccgaaggctgatcaagcgcagcaacatgtcgaccttgcctacgccatcaccgcgcatggtgctcagggggccagtgaaccgtttgccatcgcactggagggcgtggcgggtggtcgggaacggatggccagctttgaatcctcctatgtcgggttatcacgtatgaaacagcatgttcagttgtataccgacaaccgtgagggctggataaaggccataaatcattcaccagagaaagcgacagcccacgatattctggagccgcgtaacgaccgggccgtgaaaacggccggccagctgttcagccgggcacgagcgctggatgaggcggctgcaggccgggccgccctgcagcagtccggcctggcgcgcgggcagtctccggggaaattcatttcgccgggcaaaaagtacccgcagccacacgtggcgctgccggcgttcgacaaaaacgggaaagacgccggcatctggctcagtccgctgacggataacgacggacgtttgcaggtgatcggcggtgaggggcgcgtcatgggcaatgaagaagcccggtttgtggcgctgcagaacagtcgcaacggcgaaagtctgctggccgggaatatgggcgaaggcgtcaggattgcacgcgataaccccgacagcggggtggtggtccggcttgccggagatgaccgcccctggaacccggaggccatcaccggcggtcgcatctgggctgatcccctgccgaatcctccgatcaatgataccggtactgacatcccgctcccgccagaggttctggcacagcgggccgcagaagaggcactgcgccgggagatggaaagacagacggagcaggcgacccgggaagtgtccggagaggagaagaaagtgggcgagccgggcgagcggataaaagaggttatcggggacgtcattcggggtctcgaacgtgaccggccaggagaggagaaaacggtgctgccagatgacccgcagacccggcgtcaggaagcggccgttcagcaggtggccacagagagcctgcagcgcgaccgtctgcagcagatggaacgggatatggttcgtgatctcagtcgtgaaaaaacgctcgggggcgactga

SEQ ID NO: 451711 - DNA, 2295 bp, Serratia marcescens
atgagttttaatgccaaagatatgacgcagggcggtcagattgcgaatatgcgttttcgcatgtttggtcagattgccaatattatattttatgtgctgtttattttattctgggtgttatgtgggctgatgctgatgtaccgtctcagctggcagacctttgtgaacggctgcgtttactggtggtgtacgacactggcgccgatgcgcgatattattcgctctcagccggtctatacgattagctattacggaaagtctctggaatataatgcggaacaaattcttgccgataaatatactatctggtgcggtgagcagctgtggacggcatttgtttttgccgccattgtgtcgctgacaatctgcgtggtgacgttctttgtcgccagctgggtgctgggccgccaggggaaactgcagagtgaggatgaaaataccggggggcgccagctttccgataagcccaaagatgtggcccgccagatgaaacgcgatggagcggcctccgatattaaaattggcgacctgcctattcttaagaattctgaaatccagaatttctgcctccacggaaccgtgggctccggtaaatccgaagtcatccgccggctgctgaactacgtccgcgcccggggcgatatggccatcatctacgacaggtcctgtgagtttgtcaaaagctattacgacccgtcactggataaaatcctcaacccgctggattcgcgctgtgcggcctgggatttgtggaaagagtgcctgacgctgccggatttcgacaacatctccaacacccttatcccgatgggcacgaaggaagatccgttctggcagggttccggtcgcaccatctttgccgaaggtgcctacctgatgcgcggggacaaggaccgcagttacgaaaagctggttgataccatgctgtccatcaaaatcgataagctgcgtgcgtacctgcagaacaccccggccgccaacctggtcgaggagaaaattgagaagacagccatctccatacgtgccgtgctgaccaactatgtcaaggccatccgctacctgcaggggattgaaaagaatggcgagccgttcacgatccgcgactggatgcgcggcgtacgtgaagaccagcctaatggctggctgtttatctcctcgaatgccgatacgcacgcctccctgaagccggttatctcgatgtggctgtcgattgccatccgcggtctgctggcgatgggggagaaccgtaaccggcgtgtatggattttcgctgacgaactgcccacgctgcacaagctgccagacctggttgaaattctgccggaagcccgtaagtttggtggctgttatgtgttcggtatccagtcttacgcccagctggaagatatttacggcgtgaagcctgccgccacgctgtttgacgtgatgaacacaagagccttcttccgttccccgagtaaggagattgccgagttcgccgccggcgaaatcggtgagaaagaaatcctcaaggccagcgagcagtattcctacggggctgacccggtgcgtgatggtgtgtcgaccgggaaggaaaaagagcgggaaacccttgtcagctactccgacatccagacgctgcctgacctgtcctgctatgtcaccctgccggggccgtatccggccgtgaagctggccctgaaatacaatccccgaccgaaaatcgccgagggctttattcagcgccgtctcgatactcgcatcgatgaaagactcagtgctcagctggaagcccgggaagccgaggggagtctggttcgggcattgttcacgccggatgagcctgtgtctgagccagccgaagagaaagccggtgttcagcctgagcagactaaacctgctaaagacagcgtactgcctgtgccggtaaaaacctcgtcgatggcagcagagggtgccggtaagacgccagccgtcccgttatctggtgctcccgtcacgagagtgaaaaccgttccattaatccggcctaaacctgctgcttcggtgaccggcactgctgcagcggcatccactgccgcggtgagtgcgactgcgggcgggacggagcaggaactggcgcagcagcctgtcgaggcggaccaggatatgttgccggccggaatgaacgaggatggcgtaattgaagacatgcaggcttatgacgcctggctggaaggtgaacagatacagcgggatatgcagcgacgcgaagaggtcaatatcaaccacagccgcagtgagcaggatgatatcgaaatcggaggaaacttctga

SEQ ID NO: 451712 - DNA, 528 bp, Serratia marcescens
atgttaacccataaaataatacaaagtgaaatcgaggagttaaaacagatcctggttcataatgatttagagatcccatcattctggcgctgtatctggcctggcctagtatgcatggtgtggtttttactatcatcctatctctcgtactggttgagtgattatgcttctggtctcgagagactagctgccatggttttttctggtgcaataggtgttttttctatcattgcaaccgcgaataccagagcactcttcctttctttacctcaatccttcagggagaaatcgttgttttttggctttttagctaagaaatgcagaatttatggagtggttgtttttgttatcttctcatgtttagtatttttctccgcatataacgctattaatgcggttgtctttattgttattacaggatttagccttttactaacaattatggtaatgaatattgatcttggtcgctatcagttagcaacacttacgtccgttatcgaatcggtaaaaagcaaagaagttaagtaa

SEQ ID NO: 451713 - DNA, 2844 bp, Serratia marcescens
atgctggaaatctacacgatagccggcggcgactggttcaggggcaacctgaatgccatttccgccttcatgagtaccggtacctggtcctctattgagaaaatgtgcattgctttttccgtgctgatcgtcgccggcagctgggtgaaaaaacacaacatcatggatctggtcggctgggtgtttgcgctgacgctggtctcgatgctggtcgtcatccgcaaaccggtgcagattatcgactacagcaatgtgtcccaggtctatcaggttgataacgtgccaattgggctggccattccggcgtcactgaccacgcgtgtgggcaatgctctggtgcagagctatgagatgattttcgccctgccggacagtgtgacgtacagcaaaacggggatgttatttggcgggaacctggtggcgaaaagtacggactttatctcgcagaatccagaaatcaccaccctgttctcagactacgtgcagaactgtgtgatgggagatatttttctcaatcacaagtatacgtttgaggaactactgaactcgtctgacccctacacgattattttttctaaccccagcccgcttcgcggcgtttttgacaaaaacaatcagtttaaaacctgccaggaagcctcccgtgatttgaaatcagccctggcgctggatacccagaccggcgggaagacctggagctactatgtgcgccagctttttgggggtaaacctaacccggacctgctgttcagccagatgatcggtgacagctacaacttcttctacagttcggggcagaatgcagggcagattatccgccagaacgtgacgatgaatgccctgcgcagcggaatccagagctacgcagcccgcagtggcgatacggccagcctggtgaacattgccaatacctcgtcgctggaaaagcaacgtctggcccaggcgacaatgggacatcaggcgctgcgttctctgcccatgatgcagacagtgatactgggtattatgtttggcctgttcccgatcatggtcatggcggcgatgttcaacatgatgaccatgcaggtgctgaagggctacgtctttgccctgatgtggctgcagtcgtggcctctgctgtacgctatcctgaacagcgcgatggcttactatgcgaagcaaaatggggtgccggtggtcctctctgaactctctcagctgcagctgaaaaactcggatattgccaccaccgcgggctatatctcgatgatgatccccccgctcagctgggcgatgattaaaagtatgggagcaggtttctccagcgcctacagccactttgcttcgtccggcctcagctccacgtcgcaggcctcctccagcgtagtggacgggaactattcgttctcaaatatgcagacggataatgtcagcgggaacagctggaataccaacagcaccaccgcgtttgggcagatgacccgacagctggcgaatggggggatgggtacccagacccgggatgggtctatggtctgggatagtagtggcgccatgtcaaaactccccgtggatatcaatgttggtcggcagatagccagcgcacagcaacagatggcccgggaatcagatgttcaggcagaaagctctctgcacggttataacagcagtgtgacgagtgcctggaacagcctgaagcagtttggcacaaatatggggaccagtgcgtccatgacgtcaggcgctgataatactgagtcgtcgcaggattcgatggccagaagtaaaatgtggagtgctgttgtttctaatgcaaaagccaacaacatcagcaatgaagagtctttccagcagttgatggataagtcaacgaaagggtctgtatctggtgagatgtacggtaatgctaagtgggggtctggtgaccagctggctgggaaactgggtaaatgggctacgggtctctctgctgaggggggggctaaaattagtgctggcttgaatgcatcaagtggctctactgactcgacaaatgaatcaggaagatcatcctatgacagtcgacatgataccagtggtcaggcagccaaagactttaaagaagcatctgattactttaccagccgtaaaacaaccacatcgggtaatataacggacaataatgccagctcgcgtgttgatcagtttgctgcatcactctctattgctaaaaacagctatgaccagtatacgaacagccggacacgtagccacgaatacagtgaaatggcttcacgtacagagagcatgagcggacagatgagcgaaaatctgacccaacagtttgcaaactttgttcagcaacaggcaccacaggatgctgaagccattctgaccaacaccagttctccggaagttgcagcgcaacgtgaagctctggcgcgtgaattcgtcaaagctcaagttgaacctaagattgatggtgcgtatcaacaaggtcgtgaagccattggccaaaatatgcctggtgtgtcaggcggtggtgacagtgggtcggtaacggccgactacgggcataatgccggtaatatagaagccatgacacgagatgcaggtattaaggataatgtggggccgaaagtggatggaatgatagtgcagaataaccaacagcatcaggaatcccgtgaaaccatacaacagcaaggcgttggagtgaaaaaagagaatgctgaactggaaaatgaccacaaaacaaaaggaaatgatttcaaaagtacttataatgaaaggaaagaaagtcagactaaattgcctggcgcagatacgacaaaagagctattggataaggcagctaagttagaaaaagataaaacaaaaaaatag

SEQ ID NO: 451714 - DNA, 576 bp, Serratia marcescens
gtgaaaagcaacctgaagataattaacgctggcgtcgcgacgctgctgttactggcattttcacggtcttccgttacccacgctggcacgctggatgacgtgaaatcactctgggacccgcagggcataactggcgcggctccggcgacatccgctggcgtatctgcgtctgcgaagccggtctctcaggcccgctggtaccggctcagcaacggcaaacaggtcaacctcagcgactggaaagtggtgttgtttatgcagggacactgcccgtactgccacaagtttgacccggtcctgaagcagttatcaggccagtatggtttctccgtgttctcttacaccattgacgggctgggggatgaagcgtttcccgaagcgctgccggcaccgcctgacgtgatgcagacctttttcccgaatattccggtggccacgccgaccacgtttctggtcaacgtgaacacgctggcggcatacccgattctgcagggggccacggatgcacagggctttatggccagaatggatacggtgtttcagatgatggaggttccggggaatggacaaaattaa

SEQ ID NO: 451715 - DNA, 327 bp, Serratia marcescens
atggatgagaaaaaatcgtacggggtggtgatgctgtttgtcggcgtgtttgtcgtttttctgatcagcatcatgtcttacagcctgtggcgcgataagcagattaatgcgtttatggccaccaaccgggcctggggtattcagtgtgaccgggtttctcaggccgcgtgggtggttaaagaaggggagcgggtgaacctggaaatgaattcacttccactgtactgcagcgggtatcgctttgaagcccgcaatgacgcaggaaaaacacggcgtcttcttgataaatacagcgtttatcagcacctgacacgccagccgcgttaa

SEQ ID NO: 451716 - DNA, 186 bp, Serratia marcescens; identical to SEQ ID NO: 181319

SEQ ID NO: 451717 - DNA, 237 bp, Serratia marcescens; identical to SEQ ID NO: 181320

SEQ ID NO: 451718 - DNA, 612 bp, Serratia marcescens; identical to SEQ ID NO: 181321

SEQ ID NO: 451719 - DNA, 1944 bp, Serratia marcescens
atgagatcgcttcccgtcattgcaaccgttctgggggcctttatcgggtttgcaggaccagccggtgcagacagtaatacggattacaaagccggttcggatttcgcaaaacaggttcagggaggggggctcgatgccctgaaaaactttaatggtgagcagaccttacccggttatacctcccgacccgaccagacgaaatactacggtggcgtgacagccagcggtgacagttccctgaaaagtgactctgcttcggagttcagccagaacgaggccggacaaagtatcacggagtcgttcaccaaccggccccctgacagtatttcagcggatgccccctttattcaggcggcacaggacaccgaatcccgggcggacagcattgtcggcgataccggtcaggcctgtacggcacaggtggttaatcgtagcgagttcacgaaccatacgtgcgagcgggatttgcaggtggagaacttctgcacgcgggaggcgacgctgaaagacaacgccacgacgcaaaaggtcagtcgtacctaccagcaggctgtcccgatgaatttcacccgaaacagcacccgatggagcgggacgctgaccatcccgtcgacagggcggctgctcagcgtgtctgttgacggtgaacctctgccggttccctggatttatgaatgtgacaacgaaggaaaggtcagagacagttgcaagcttgcagtcagtgaaaacatcagcctctttgataaaacattccctgttgatgtgatgacctggccgaatacggtgacgacgtgctccgggggccagaacacacactgtacaagtcattactacgatggcaccgggaaaattcatcagtctttcagcatggaccggaacgttgtcgccgggcagagctttccggtaacgaaaacgtcgaaaacccagccatcagtgaatgttaaatccattcaggtgacggtcatactagtcatggaggagacggaaaccgtatttgcaccagaggtggtctgggttgaaagttgtccgttcagcaaggacgaaggcacgaaaacaggtgaagaatgtatcagcccgggcgggacaaaaaccctcaacctgggcgggaaggcgtattccttcacagaagcatgctggaaatacaaggacacctggctcacacagcctgcggatcatggctcctgtgagagcctgatgaacaatacagcctgcacgctctcttcacgtcagtgtgccttcaccggtgaagacgggacctgtctgcatgagtatgccacgtactcctgcgaaacccggaccagcggtaagcagatgatctgcggcgaggatgtattctgccttgatggtgaatgcgataaagcggtcagcggcacgaacaacggctttggacaggcagtttcggagctcgcggcgctggccgctgcgggtaaagatgttgcggcgctgaatggggtggacgtcagggcattcaccggcaaggcaaaattctgtaagaagttcgctgcaggcttcagcaactgctgcaaggacagcggatggggccaggatgtgggcctggcacgctgcagcagcgaagagaaggcgctggccaaagcgaaaaccaacaagctgacagtcagtattggtgagttttgctcgaagaaggtactggggatctgcctggagaaaaaacgcagttactgccagtttgactcaaaactggctcagatagtccaggagcaaggccgtaacggacagctgcatattgggttcggtggcgccagcagtccggactgccgggggatcacggtagcagaactgcagggcattaactttaatcagctggactttacgaacttcatggaggacctgataaataaccagaaaataccggataacagtgagctgactgataaaacaaaacaacgcataaaagaacttctcacgcagtcttcagcaaaatga

SEQ ID NO: 451720 - DNA, 627 bp, Serratia marcescens
atgaagttgataaatgtattaatgattctggcattacagtcaggttcagcagtcgctgcagttactccgggtagtccgactacggcagacagggagtggctgaaacagcaggaaaacctcagtgaacagttacgtcagcatccggacaaacaactgcagcaggaactggaagcgcagattaaccgtaacccactcgccagcgctgaccgtcagtttatcgacaatctggccagccagcagaatgcgtcaaaccagacaaagccagaagaaggggcggtgtactttgtctccttttcgataccggaagagggtctgaagcgaatgttgcatgagacccggcagtacagcatccccgctaccttgcgaggactggtcaacaacgatatgaaagcgaccacggatgcggtgatgcacctggtgaacgacggggtgactgacggtgtgcaaatcgatccgacgctctacacgcagtacaacatccgtagcgtgccggccctggtggtgcgctgtcaggccggcttcgacgtggtgcatggcaatatcaggctgaaacaggctctggagaaggtcgcagagaaaggggactgcgcgaacacagcccgtcatatgctgggggggacgaaatga

SEQ ID NO: 451721 - DNA, 993 bp, Serratia marcescens; identical to SEQ ID NO: 181324

SEQ ID NO: 451722 - DNA, 627 bp, Serratia marcescens; identical to SEQ ID NO: 181325

SEQ ID NO: 451723 - DNA, 390 bp, Serratia marcescens; identical to SEQ ID NO: 181326

SEQ ID NO: 451724 - DNA, 2640 bp, Serratia marcescens
atgcgtaataacctgatggataccgtcgctcaggccgtgaattcgcttgtgtcggcactacagttgcctgacgaatctgcgaaagcgaatgacacgctgggcagcatgaatttcccccagttcagccggattttaccctatcaggattatgattctgaaacagggctttttattaacacgaaaacgatcggctttatgctggaagcccggcccctgccgggggcaaacaaagatattgtcgccactctggagcatttgttgcggacaaaaatccctcgtggcgtgccgttcactattaatctggtgtccagtaagctcgtcggggacgacattgagtacgggctgcgtgaatttagctggagcggtaagcaggcggagaagttcaacgccattacccgtgcctattatctccgcgcggcagaaacccgcttccctttgccggaaagcatggatttacccctgaccctgcgaaactatcgggtctttatttcctgctgtatcgcgagaaaaaagaaaagcaaagcacagatagtcgagcttgagaaccaggtcaaaattatccgcgcctcactgggtggcgcatatattcccacgcgtgttatgggaggggctgaactggtcgaactgatgcgcgaagtgattaatcctgatccgggcgagatgtatcacaagccctataaactggacccgtatcaggacctcaactatcagtgtgtggtagacagttttgacatgaaggtcacggccggacacctgaaaataggccgtcttggccacgacgggaaagagacggccaccagggtgaccagttatcaccttgaacgggatccggaaattgcctttctctggaccagtgcagataactacgccaacctgttgaaccctgagctctccatctcctgcccgtttgtcctcacgctgaccctgatggtggaagatcaggtgaaaacccagaatgaagcgaacctgaagttcatggacctggagaagaaaagcaaaacctcttacgccaaatacttcccgtcagtggagaaagaagtcaaagaatggggtgatatccgccagcggctggcgaccaaccagaccagccttgtgtcatattttttcaacatcaccacctataccccggacaatgttgaagcctcactcaccaccgaacagcaggtgctgaacagttttcgtaaaggcggtttccagctgatccccgcccgctaccatcacctgcgcaactttctggccatgctgcccttcaaatccggtgagggtctgttcaaagagctgcaggcggccggggtggtcaaacgggccgaaacgttccaggtcgccaatcttctgcccgtggtggccgacagcccgctggccccggcgggtctgctggcgccgacctaccgcaaccagctggcgtatatcgaccttttttatgaagggatggataacaccaacttcaatatggcggtctgcggcacctccggggcaggtaaaacggggctgatacagccgctgatccgcagtgtgctggactccggcggttttgcctgggtgttcgatatgggcgatggctataagtccctgtgcgaaaacatgggcggggtctacctcgatggtgattcgctaaagtttaacccgttcgccaatattctcgatgatgcccactttgacctctccgcggagcgtatccgtgaccagatgtcagtgatggccagtccgaacggtaacctggacgaggtccacgaaggcctgttgttacaggccgtgcaggcggcctggctgagcaaacggaggcatgcccgcatcgatgatgtggtggcgtttctgcagagcgcaaaagacagtgaagagtatgccgactctccgaccattcgcagccgcctggacgagatgattattctcctcgatcagtacacggtgaacgggatttacggggactactttaactcggacaaacccaccctgcgcgatgatgcccggatggtggtgctggagctcggggggcttgaatcgcgcccgtcactgctgattgccgtcatgttctcgctgattatctatatcgagaaccggatgtaccagtccccccggagcctgaaaaagctcaacgtcattgacgaaggctggaaactgctcgatttcaaaaacgaaaaagtggggcagtttattgagaaggggtaccggaccgcgcgccggcataccggcgcctatatcaccatcacccagaatatagtcgacttcgattcccccaccgcatccaccgctgcccgggcggcctggggtaactcctcgtacaagtcgatcctcaaacagtcagccaaagagttcgccaaatataaccagctgtatccggatcagttctcaaaactggagcaggacatgatcaacagtttcggttctgcaaaagaacaatggttcagttctttcatgctgcaggtagaagcgaactgctcctggcatcgtctgtttgtcgacccgctcagccgggccatgtattcctccaaaggcgcggactttgaatttatccaggcgcggcggaaggctggtgtcgatatccatgacgcggtgtatgagctggcctgtcgtaacttcccggcggaaatggctgagctggaagcccgcatcgcgcacgacagcgtaaggagtgcagcctga

SEQ ID NO: 451725 - DNA, 384 bp, Serratia marcescens; identical to SEQ ID NO: 181327

SEQ ID NO: 451726 - DNA, 402 bp, Serratia marcescens; identical to SEQ ID NO: 181328

SEQ ID NO: 451727 - DNA, 279 bp, Serratia marcescens
atggacaataataaggctttgctttctttatgtgtgctgtcggtcgtgttgatgagtgctgtgttagtttttaagcaaacccaacccggcaatgacgatttaattaaagacgggaagtactggaccactgcgtgttccctcaaagaagttgatatccccacaggaatgtttaccagtaacattaatcgactggattgttcaggtgttgttgtgaatgtagtgacggataaatacgatcaggcagtatccgcgtataacaaatctaaaaatcaggggtga

SEQ ID NO: 451728 - DNA, 555 bp, Serratia marcescens
atgttaattcctctgggcagcgctttgcttttaacagggtgcgcgggcacagagacggagttcgaatgtaatgccacgacatcggatacctgtatgacgatggagcaggcaaatgagaaggcgaaagcaaaagaggaaagtgcttcggcaaagccggctgcggccgggttgctacgactggctgacggcaatttcagaacgacgtcgccgggttcatacccgttgccgccacaacccgggtttgtgaaaacaaaaagtgcatcggttgcgccggtaaataaaagcaattccggtttgctgaataataccgctgcggcagccagaccggtttataccgtgaatacggttatgccgtcagtgcgtccggtaacggtatcaaccctgacttcaccgccgacggtacccggccaatatccgcgtcccctgagaaagggggaacagataacgtcgttgtgggtggcaccctatatcgacaccgatgatgtttatcaccagccgtcgacggttttatttgttgtcacaccatcggcatggggtcagccccgcattaactaa

SEQ ID NO: 451729 - DNA, 1422 bp, Serratia marcescens
atggccaacttcaatacgatcatcaaacgtaagcagtacctgtggctgggcctcattctggtcggtggcgcgggcgccatcggggggggaatgtatctttctgacctgaacctgagttcggaagaagaggcccctgtgcagggagagccggccccggatatgaccggtgtggttgacagtaatttcaacagcaaagtggagcagcatgcgacaacggagatgcaggccactgctgcggacctgaacaagcgctttggcgcgctgcagggcgaagtggacatactgagtaagggccgtgctgccgatcaggttcgtatcgagcaactcagcaatgagaatgccgcgatgcaggagcaactgaggacgctgggcgtcaggccatccgttcctggtggagagccggcgccgacccctccctctccggcacccgggccggaaggtgaaccgcaaccggcaaattatccgccacagcctggtggtgcggtaccaccgccgaccgctttctatccgggtaacggtactgtgcaacccccgcaggtcagttatcagtctgtaccggtaccgaaccagatcaaccgtaaaacgttcatctacaacaaagggaaaaagggcagggagctgccgtatatcccgtcaggcagttttgcgaaaagcagcctgatcgaaggcgccgatgcgaatgcttccgtgaccgggaatgaatcaaccgtaccgatgcagttacgcatcatcggtcgggtggaaatgccgaacagtaaaacctatgacctgaccggctgctttgtcggactggaagcctggggggatgtctccagtgagcgtgccattgtccggacccgcaatatcagctgcatcaaaggggataaaaccatcgaccagccgattaacggtcacgtctcatttatgggcaagaacggtgtgaaaggcgaggtggtgatgcgtaacggcaaaatcctcggctgggcctggggcgcaggctttgttgacgggattggtcagggcatggagcgggcttcgcaacctgctgttggcctgggtgcaacggcatccgttggcgccggtgacgtgctgaaaatggggattggcggcggggcatccaaagccgcacagaccctgagtgagtattacatcaaacgcgctgaacagtatcacccgatcatcccgattggtgccggtaacgaagtcacggtggtgttccaggacggtttccagctgaaaaccattgaagagctggaagcggaaaagaacgggcaacagcaggcgcagaaccaggcacaacctgaacaacccgagagcaggtcgcagcaatccggcgggaacctcaatggttttaataccgatgagatgctgaagaaactgggcaagcttgacccgcgtgagttctcgccgggggctgcacctcagggagataacaatggttaa

SEQ ID NO: 451730 - DNA, 735 bp, Serratia marcescens; identical to SEQ ID NO: 181332

SEQ ID NO: 451731 - DNA, 567 bp, Serratia marcescens; identical to SEQ ID NO: 181333

SEQ ID NO: 451732 - DNA, 702 bp, Serratia marcescens; identical to SEQ ID NO: 181188

SEQ ID NO: 451733 - DNA, 393 bp, Serratia marcescens; identical to SEQ ID NO: 181187

SEQ ID NO: 451734 - DNA, 408 bp, Serratia marcescens; identical to SEQ ID NO: 194199

SEQ ID NO: 451735 - DNA, 531 bp, Serratia marcescens; identical to SEQ ID NO: 194200

SEQ ID NO: 451736 - DNA, 363 bp, Serratia marcescens
atgctggtgactatgtcagacaaagaattaaaccgcgtcaacaaatcactgaccttccgttatgataaaatgatttatcttgttgacccgacagaagaaaactcacgtattgccggtgaaaatatcatagtctatgactatccggacggtacattagcatttaaatacggccatcgcgctctgagttgtcaggcattcgataaactggactgtattgaccagggacaagttgttgataacaaacgtcttggtacggtgctgaaattggctcaggacaaaatggacgaactggatcgtcaggataagcgcaaccggagtaaatcaatgccaagacgccgggcacaggccagagttcaactgtaa

SEQ ID NO: 451737 - DNA, 141 bp, Serratia marcescens; identical to SEQ ID NO: 131154

SEQ ID NO: 451738 - DNA, 2754 bp, Serratia marcescens
atgcagcaaataggatctaaatggtggaagtttgattttcatacccatacacctgcatcaatggattacggtaaatctgatcttgaactgaaaaataccatcttacctagacaatggctaatggattacatcaacaaaggtattgagtgtattgctatcaccgatcacaactctggtgaatgggttgataaaattaaaaaagaagcagataaattaagagatgagggatatgaaatacatatattcccaggtgtagagattactagtcatggaaatatacatatcctaggaatatttgacccaataaaaacaacaagtcatgtatcacttgtaattggggagactggatataaaggaaccgtgggcgatagtgatgccgttactgaacgtagccctcagcaagtgattgaagttataattggaagagagggcgtggcaattcctgcacatatagacaaacccagtggattgtgtcttgttcataaatctggttctactttacaacaaatattaagtaaagcttccgccgtagaaattataaaaacacacagtgagtatgaagcgcagaaactaaatagcagtccattaaaaggatatgaagatttaaaaaccaaccttatatctgtactaggctccgactcacaccaccccaatacagttgggagagcctttacttgggtgaaaatgtgcaccccttctattgaagggctaaaattagctttgcttgatgggagtgactctattaaacgctcagatcagcaccctgactctccaaatatttacgcccaaaataggattagtaaaatacgagtaaataaaacaaaatattgtggaagactaaatgcttttgagttgaaccttcatccttggctcaattgtataattggaggtagaggtagcggtaagtcatctcttcttgaattcgccagaacatgtttagaacgagatcatgaactttctcagctggcatataatcctgaaccacatgatgcgtataaaagattagctaaagttccggcatctaaagaggatgacggcgtttttacaaatgaaacggaaattgaaatttcgtatgtaaaagacaaaattgagtacattctgaaatggagtgttaaagaaaactccacaaaaatatatagaattgaaaatgaaaatttaatattggaagatggtgatgtattaagcagattccctgtaaaaatatttagccaaaagcaaatatatgaaatatcacgatcgccaaattatttattaaaaatcattgatgagtctgacatagtcaattactctgaatggcagagagattttaatcaagaagttagtaaaatcactcataatcgtagagaaatcagaaatttgtatacaaacatcaatttaaaaagttcttttactggtcagctaaatgatgttaatcagaaaataacctccatcgaaaactcaagccatgctcagttattccagagttacaatagagcaattgcaaacgaatcattaatccaacagtatattggaacaataagatccacaatcgatgatttacatcaaaaaatatccaatataaaaattgaaagcttccctaaagagaaattagacagaaccaataagaatgaaagtgagttaattgatcaagttgaagtattagaaaatgagttcacctcagtaataagtaacacttcgggttggattagttatgggaaatctaaggtttcagagctcgaagaatggtttagaacttcggagttaagtaatacaatacagcaagacaagaatcaatataacaatctggttgaaagtcttaaattaatgggaattagcaaccctaatgaatatgacgcattaatcaggcaaagaaaagaaatcacagaaaaactacaaaaaatctctcaggatgaggagtctgtcaaaaacctaagaaataaatcaagtgaaatatatgcaaatctagtaaaacttagaaaagatctaacacaaagaagacgtcttttcttgagcagcattaatctagatgacaatttcattaagattaatttagatttttgttgcgacaatcaattcattgaaaacagctttagagacaccatcgctaaaaatgatcgtacctttagcaatgatatatataatgatgacgaaagtggtattataaatgttctccataaaaagatagttgagcttaaagacgatcctgataaagttatcgaaataattcaagaatttaaaaaaccattttttgataaaaaaacaaaagaagttttaggcgccaatctttcaaaacgttttgatgattataaaaatactctatcagatgatattatagatcacctgatatcatggttcccaagtgatagtgtaaccgtaaaatatagtgatggtagaaagttcaaagacatatcacaaggctctgccgggcaaaaagctgcaacagttttagcatttctattgtcatatggtaacgacccattaattttagatcaacctgaagatgatttggacaatcaactaatctatgagctaatagtaaaaagaattaaggagtgtaaaaaagataggcagattctaattgtaactcacaatcctaatattgttgttaacggagattcagagcttgtaattactctaacacaacgatcaggattgacccatcttacttcaattggcggactacaagaacgaagcgttaggcactctatatgcgatattatggagggggggcgagatgcattccaacagagatacagaagaataattaacatctaa

SEQ ID NO: 451739 - DNA, 726 bp, Serratia marcescens
atgagcaccaccaccttaccaaaatccatcaccgataaactgcaagtcctgcgtgacgcgcgcgccgcccacgacaaaaactatcaggcattgaacgacgtcgtgaccggcattgcccgctgccaccaacagaagaaagagactgaagtggagagccatgaggcagaaagccagtggcgcaccctgttccgcaaactgcgcggagaaatgacgccggaactgcaagcgcagcaccacagccggatttccaagcgggagctggcgaaagaattcgacggtctgattgaagagatggaactggacaaaatagagtttcaccttgattgcggtgggtcggccccgaaggtggtggccgcgcacaaagacgctctcacggcctttgctgaccatgcgatgtgccaagccgtggatgcgctgagcaaggcgcttatcagccctgagattatcaaggcctgcgcgctggcgaaaaaggcgtatagcgtttatggggatgacccggtaaaagcgattgaacaacagctgctaggcacgctacggggccatattaacgttgccacggctatgcaaaatatcgaccacccggttctcagcgatattggcctgacgataccagaagaaaccggcgtattgcgggagctgcaaagaagtccaattcgccggacgcaagtggcaaaagaattagctgaaaaacgtcaacgcttgcagcagaaaggagccaaatcatga

SEQ ID NO: 451740 - DNA, 510 bp, Serratia marcescens
atgaacctccagcatgagcggatcgacgccctgtgccagcaactcaaactcgaacgggtggcaacgcattaccccgtcctggcgcagcaggcggtgcgcgaggacttcagcttcaccgacttcctggaacacctgttgcggcatgaagcggggtgtcgccagcagcgcagccgcgaactgctgacgcggatggcttgcttcccgggcatcaagaccctggaggactatgacttcagcttcaaccccggcgtgcccaaggcactggtgcaggagctgggcagtctggcgtttgtcgaacgggccgagaacgtggtgctgatcggaccctctggcatcggcaagacccacctcgccatcgccttgggttacaaggccgcgcaagccggggtcaagacacgcttcatcacggcagccgacctgatgctgcaactgagcacggcgcagcgacaagggcggctgaaggaatacttcaaggggtcggttccggctgagggcgaaatgacaccctaa

SEQ ID NO: 451741 - DNA, 1026 bp, Serratia marcescens; identical to SEQ ID NO: 22856

SEQ ID NO: 451742 - DNA, 3030 bp, Serratia marcescens; identical to SEQ ID NO: 94088

SEQ ID NO: 451743 - DNA, 1716 bp, Serratia marcescens; identical to SEQ ID NO: 94087

SEQ ID NO: 451744 - DNA, 741 bp, Serratia marcescens
gtgggttttgtcgtcgacgctgagaatagactggtaacggttgaccactcgcataatcacttttgcattaccacgccagcaggcaaccccgtagagttgatgctgggaactttgaaagtgacgtctatttttgcgagaacaaaagggaaacgcgataaaagcgcacccggcgataatagccccatgctttatgtgataaaggggctgcatgaattgcgaacgaacccgcgcgatatcgctatgttgtgtaccagcttccggaaaatactcccgttgtacttagaaaggggctttcaatgggattggattgtgcctttaccatcaagcagctcggtttgttgccgcttcgctgaaaaggttttcaaacgcactaatcagggggtttgttaccctgatgcgttggcaaaaatcacagcgggcaaagtgatagcgaacctggatgagttgcacatctcatcgaaggacaagacggtattgcgtggcgacataaagcgttttatcgatcaacacggcgaagaacaaccctttcaaattaaatcaattcgtcgggtgaaattgcgcaaacacatcaacccatttatgcgcgggcacgtaacggccgccgttccgccgagtgctatcttattgatagacgatatggttacttccggggcttcactcattagtgccgaggccatattgaaacaacaatacccggacgcgagaatcgaagcactgacgctgtttggttcctcaaagtga

SEQ ID NO: 451745 - DNA, 1455 bp, Serratia marcescens
atgaaaagctttactcaaagtgaatatccagaagaggtacaagagttattgggggacacggaaagagaaccttggtatcaacatactaaaatatctcttgaatggtttttatcatttattaaagctgaagattggaatgctcgtaaggaaaatgtagtaaaatactttaaagaacaagaggctcgagcatataaggatcaaaagcaggcttccaaaggtgcagaagacccaaaaaacagaattgcattttacgatgactgggttgcatggtatctttatttagttgaatgcttacatcagcgaccactagtaagtgaattatcgcaatctgcaagagttttcccattttttgctgcaattgggagacatattgaaattgcgaaaaaaatagaaggaatagaggcgaagctttctgagtttctaaatagcaaagttaaccaaccggattcaactttgtttgaattagtagttgctattatgtatgcccgcaatggctacaatgtggaatttatacctgaaacagcattgcataagacaccggacttaagcgttacgaagggagaagaaaggttctttgtagaatgtaagcgcttagcaaaaataactaattattcagaggctgagcgtcaggaatggaggaaacgatggtttaatttagtgccatctttaataaataataaaaagtctgtatttattgacattgcttttaaagtggagttgaaagatacaagcgaatatgttttggttaaagcctttaatgcgatgaagtcaaagatatcaaaagacaatatcttgaggtttgaaagtgatgaagttgctatgaagatcaggcaaatagacctcaagaaagtaaacaaccattttgataatttttacgtcaaatggaactcaggacaaatgatttccctgttagcagatggctttgatagtagtgagaattatactcatctttgcacaccaaaaaatcttgtccgaatcggcggagatgaaaacaacgacattcttaatatcttttgcacaggggtaaaatcagcattctgtgccagatgggaatgtattgctgaagagtcaattgaaaaaaaagcaaaagacattaaaacacatttaagcaaagcgattagacaagtccctgatggtgaacctaccgttgttcatatttcctatgagactttacatggccctgtcattgagtttaaaagagctagaaagatagctgaaagcattgatagctttgattgtggcggtaaggatattagagccatttactgccatgcaattcaaccttcaataagtgaagaagattgggaaatagccgaaacaacactccgttttggaaaaaatggttatgagcctacaagcatcctatctcatgatctgctgctcgatgaggaaggaactataatttcaccagatacgcattggaatgaagatttcagagccatgttaaaaatttag

SEQ ID NO: 451746 - DNA, 393 bp, Serratia marcescens
atgaagctgattaaattgatattggtgtcggggctgctcgctgggtgttcttctccgccgcctccgacgcctgttgattgggataagacgccgacagcgatgaacggaacgctgccggaatggcgtgaaaactatgttgttaacccggcaccgcatgtagacggaaaatggtcgcgtgttatacgaagtttttcaaccgatacgccgtatggcgtagacgtctattatgcagtggttcattcgccgtttgttatggtgacggccaataatgccgatgatttttttaatgcgaaatcttggctgcgcacgcacggtgctaagggggtaatcagatatcaaaagagcgaatacagttggtctggtcgaaatacggatatttatctctcccgctaa

SEQ ID NO: 451747 - DNA, 591 bp, Serratia marcescens
  misc_feature (571)..(580): n is a, c, g, or t
ttggattcacttatctacgagcccattgagtatgtgctaacgcagtcgtttaccagcatgagtaagtctgaggccaaaaaagccatccatgatcaggaaaaacggctgagtagtacgcaggacgacgctgtagaagagaaggaagaccttgaaatcgccaaaagcatgctgacttccggcgatatcagttttgggttgtatcactattctcttctagtttatgccgattcgcttgaacagttgattaaagacaccaaccagatccgctctacgctgacggatatcggcctgatcgtgacgctctcaacgttgtcgttgccagcggctttttgcgctcaattgccgggtgtttaccatttacggcctcgtctggtgccggtgagtagtcagaacttcgttgaactcacttcacttcattctgtgatgagtggtaagcgtgacaaaaccccgtggggtgaagcgattgttattgctaaaaccaacagccaggcaccgtattatctgaatgttcataacaccatgatggggcaggatgatttcaaccgtaaaacgaccggtaacgttaaaatcnnnnnnnnnngccaaccctga

SEQ ID NO: 451748 - DNA, 162 bp, Serratia marcescens
atgagaagaatctataccctcatcatgatgatgttgctcagtggctgtatccttgaaaagcaacgtttttacgctgcggacattacgctgcggggaaatgatcttaccgcaaacctactcaacacagagtggcaggttcagtctggtcagcatcgctattga

SEQ ID NO: 451749 - DNA, 384 bp, Serratia marcescens
atgggcggccgccagctccgttgccgttttatccgcctgctgcgtcgctttatctcgctgctgcacagcctgcgcactttctgtcgttgccgttaccaggcgttgttccagcgccttagcctgttcggtttgcgtcttgtttttttcctgcagctgcgccagctgctgctgcagttcgcctatcgccttggcggcttcggccttttgctgcgccagcgccgtcttcaggcttttctcttgccgctctgcctgttggcgttggccatcacgctctttctgcagctgcgccagttgctgctgcagttcacccgtcgccttggcggcttcggccttctgctgttccagcgccgtcttcaggcttttctcttgttgctctgcctgtag

SEQ ID NO: 451750 - DNA, 141 bp, Serratia marcescens; identical to SEQ ID NO: 131154

SEQ ID NO: 451751 - DNA, 3495 bp, Serratia marcescens
ttggatggctggagtattaaccttttccacaccaagctattgcgttattaccaccaatacagggaagggggacggcccgccaaggtatttcacgatgatttcctgcgcaaatatgtctctttggagcaagctgcgcgcagcaatgagacgcatcgccatttctggcagcaacagcttagcggctatgagccgatgccgctgccgcgtttacgcgtcaaaaaccacgacattcccaccatcgaatatcatgatatcgctatttcttcatcgctttcccacggactgcgagaagtggcggcgcgtctgaatgtgccgttgaagaatgtcttgatggccgcacatttgcgcgtgcttagctttatcgccaacactgaaaatgtgattaccggttatgaacacagtggccgtcctgaagaggagggggtggatcaggctattggcctcttcctgaactcgatacccttccgcacgacgttgacggaagcggaaagttgggaggcgctcattctgcgagttcatcggcaagaagcggagttcctgcctcatcgccgctatccgatggcggagatgaagcaaatcgtcaatacgacggaaacgctgtttgagtcagtgtttaactttacccacttccatatgctgaaagaattgcaaagcctgccaggcatgcaaacgttggatgtccgcgtgcgtgcagagaccgagttcgtgttgcgcgctgagttctcgcaaaatgcttacactgaccaggttcaactgagtttgcattatcacagcaatgagtatgatgcggagcacattgaacgcatcgctgcctattatgccggggcgttgcaggctattgcttcgcaaccgcagcaagcctatttgagctgcatgctgatgtcggcggaagaggcgcttttgctacagcagattgggcagggcgagcagcggccgctgcctgaagagggcatgattcaacgcattttggcgcaagccgaagagtgtgcggataagccggcgttacaagatgagaaacacgcgctgaattattcgcagtttgcgcagcagtgtcggactttggccctgcatttggccggcgttggcggccagcagcggcagcaggttatcgctgtgagtttgccgcgaagcgtggagtggatcgtggcaatggcggccatcatggcttccggcaacgtctacatgccgcttgatttggataaccctgatgctcgcctcctggagctgctgaacgaggggcaggtcacgcaggtcgtctgtgatgcggaacaaacgcagaggctatcagggatcattgcccggttaggggcgccgatcaatctggtttgctatggtgattatcctgcgtcagagcaggcggcggaattacggctgccggccgcgcaggagttagcgtatgtgctgttcacatccggttcgacgggcaaacccaaaggtgcgttgctggagcatcgcggaatgttgaatcatatgctggctaagattcaggatctgggcatgaacgctgcggatgttttggctcagacagcgccggttactttcgatatctccgtctggcaagcgttaacggggctatatactcaggcgagtaccgtcgtgtacggcaaacagcagcagcttgaccccgccgttttctgtcaacggcttaagcaggacggcgtgaccattctggaggtcgttccctcttatttcgccattctgctggagtatctggagcaaactccgtgcgatttggcaccgttgcgcgtattgctgctgaccggtgaggctttgaagcacgaacttgtcatgcggtggtttgcgctgtacccggagatcaagctgatcaacgcctacgggccaaccgaagcctccgatgacattacccatcacgtttttactgcgccaccgggcgatgccattgtgccgattggcaaacctgttcagaacatgtggattcatatactgaataatcaggggcaggcggtaccctttggcagcgtgggagaaatctgtgtgacgggcatcggtattggccggggttacatcaacagccgggagaaaacggctcaggcctttgattttgcccatccgttaggcgcatggtcgactggcaggctgtaccgcaccggtgatatcgggaaatggcgcacggatggcaccctggcttatctggggcgtaaagacgagcaggttaaaattcgcggcatgcgcattgaaatcggcgaaatagaaaacgcgttacaatccgtggccggcgtgctcaatgccgccgttgtattggacgtgcgcgacaacagggaacgcttgatcggctttgttcagggcgatgacgatgtggccgccatcaggcgtcaggttgccgagttgctgccggcattcatgttgccggatcggttgttccactgtcatcaaataccgctgaatgccgcaggtaaagtggacaaaaatcagctgcgttttcttgcgtcgacgctgagcgtctctgacgccgaacagtggcaagcgccggcaggcgacgccgaaaacgcgttggcgtcactctgggctgatgtcctgaacgtgccggtagaaagcatcggtcggaacagcgatttctttgcgctcggcgggaattccctgctcgccatgtcggccgccatccgttcagcagggcgtttttctctggcggatatctttgccttgcgcaccttggataggttggcgaacgcacaggcaagcaccacggataatgtgctgcaggcgttaaccccggagaagcgcgaatcggttctggtttgcttcagttatgccggcggtaatgctgttaacttccaaaatgtggccaatgcattgtatcggctcacgcagactacggtatacggcgtagagcctccgggtaacgatctgtctcgccgtgaagggggcgttgcgttgtccgaactggtcagccgaagtctcaaggcgctgcagcaacgcggtattacgcgagtcagcgtatgggggcactgctcggggactggggccggcgcggaattcattcgccaggcgccgcagttcggaataggtgtcgatcagttggtggtgtccggcaagctattgcgccccatcgaggtactggagcggcagatggaagaaacgcggcagatgaccgatgctgagatcgtccattggctggagagtgtcacgggattggcgctggacatgaaagggcaagctgaagtcacgcctcgattggctgcagcctatcgtaacgatgcgattggcggcaatgtgtccttgaagaaagtgtggcaagagcgcgtgtccgacagcgacgcagcacctctcccagtgttgtgtctgttggcggatgacgatcctttaacgcaggattggcaaaatatcgttgaaaactggaagcaggtgagccctcagttgagcgtggagcggcttgcggaaggggggcattattttataaagacgcaggctgagcaggtcgccaatatccttgtggcgcgtttagccctgggaaaaagggtgcaggttgaggcataa

SEQ ID NO: 451752 - DNA, 453 bp, Serratia marcescens
atggctaatattctggacgctaagaaaaatatggattctttcaacgtggtgttattggatccgcaacggcttttaccgacagaagagtttattgaggagcgggtaatacagatcgagcaggatattattcgtgaggggcgttggcttaagcccattttagttgaacgaacctctttgattatcatggatgggcatcatcgccgagagtttgcgaggcgccattcgctgaggcgggtgccttgtcttttgctggactattcacaagtagagctgagttcatggcgcgacgaatttgatcttcaccctgaagaggtgatcgcccgggggttgcagcgccgtttatatccggcaaaaacgacgcgtcatgtggtgcatgccgcggcggatattctttgccactatccattatcggaactggagctgaaaaatgtcacctatcaaggtgtagaataa

SEQ ID NO: 451753 - DNA, 327 bp, Serratia marcescens; identical to SEQ ID NO: 111898

SEQ ID NO: 451754 - DNA, 729 bp, Serratia marcescens
atgatcccttcgtcccgttcccttgtcaccctgcagcctgcccggcaggctgcgctgcaggccatcatgaccgtggagaatgcccgccagcgcggtgctcgtctgtctgcagcgccacacgtgcgtactttcctgcgcctgctgaccgggaacagccgtatgaacacgaccgtggcgctgcgcattcccggcctgaactgggacccgaaacatcgtctgagcagtcttaaacaggtggaagaggcgctcgatgcactgattgccagtcacggggagtgctgcccgctgccgctgccggttgatgttcaggccgaactgttccccgaggtgcagcacagccggactgagcgccggaaacagcgcagcagcctcgcctttacccgtaagatgcgtcgggaagaacgcgcaatggtgcatcactggcgattacggcagaacctgctgggacaggccgtcacggagctgaatttccagtcaccggaaacggtcatcagctggtaccgccggtgggccggtgagtttgacgcgcgtgagcttgcccctgccttctggcactggcgatcgcgatatgcctcgctggcctctctggactggctgcgggatgccggggagccgctgtatggtgtcatgcatgaaatcagcttcattgtgagagagacgccggagtctgtgcgtcaggcagaacgctggcaggtcccgaacaagctgacacaccggagccacggatga

SEQ ID NO: 451755 - DNA, 432 bp, Serratia marcescens; identical to SEQ ID NO: 111896

SEQ ID NO: 451756 - DNA, 2001 bp, Serratia marcescens
atgtcagtgaccgagtctaaagcaaaagcgccggttaaaaccagcaaaaaatcggtgaaccctgccgaatccgccgccctgaaagccgcgcttgaggctgctcaggttgagatggtgccgctgtcggcgctggtcaaatccccgctgaacgttcgcacgatcccctatccggctgacagtgtccgggagatggctgactccatcatggcgatcggcctgatccagaatctggtggttcactcgctgccggacggtatgtcaggggtggctgcaggtggccgccgtcttgccgccctgcaacagttgctcagcgagcagcgcatcgatgccgggtatctcgttgtcgccaagcgtgtcagtgacgacctggcgatggttgcctcgatggtcgagaacaaccagcgggtggccatgcatccggcagagcaaatcagcgggttccgcaccctgtcagaagaggggaaaaccccggctcaaatcggggacctgctgggctacagtgcccgtcacgttcagcggatgctgaagctggcaaacctcgccccggaactgatcaccctgctggcagaggacaaactcgacgtggagcagtgtcaggccctgagtctggagagcgacccggcacgtcaggtgcaggtgtatgaccaggtgaaaacctcatacggcagcacacccgctcacctgctgaagcgggccatcacggatacggaaatcgccgtaacccactcccgcttcgtgtttatcggtcgtgaagcgtatgaggccgccgggggcgtggtgcgtgaggatctgttcagcgcccaggagggagacggaacggctgatggggtactggttgagcgtctggttcaggagaagctggcggcggctgcgctggccatcgaacaacaggaaggctggtcatggtcactggctcgtgagggctccgtcagaaactacggcgatgaccgcgagcattatctggtgctgccggcgccggagggggaattcagcgctgaggagctacagcgtcttgatgaactgtacgccacgctggaggcaacggaaacctttgaggatgaagccgcgattcaggtgctgattgatgagattgaaaatgcggcgtcagttcgggcgtggacaccggagcagaaagcggcctgtggcgtggtggtcagtctgtatgacggtgagctttgcgtccagcgtggtgtccagaagaagatccagacggcggtctctgacgtcggggaacacggtggcgatcaggctgccgtacatgtggtcacccgcagtatccctgatgcggcagaaggcatcagcatgccgttgctgaaaaaaatgtcttcagaaaggacactggcggttcaggccgaactggttaagcagccacagaaagccgtggccctgatggcctggcggctgtgcagttgcgtgtttgactactgcaccaccacccggcatccgttcgtcctgcgccttgaggtgcatcacagcggcctgaccagtgaagccccgaccggagaggaaggtcaggcatggcggtatctgatgcaggagaaagcccgtctggaagccctgctgccggaggggtggcagaaggatttcaccaccttctttaccctcgacgggcagaccctgatgtcgctgatggccttctgtgctgcctgttccgtcgacggtgttcagacccgtgaatgtggacataccggccgcagtgacctcgatggcgtggaggcggcgctgggatttcatctgcgcgactggtggcagccgacagcggataacttcctcgggttgctcagcaaggcccagattgtggcggcgctgaaggaggccgggctgaccggagccgcctcggatgccgaaaaaatgaagaagggtgatgctgccagccatgcggaacagtggctctccggctcccgctgggtaccgggctggatgcagtccccggatgccgcaaagccggacgatgcacatgctgcccctgacactgacgaaccgacttcacacgcagcctga

SEQ ID NO: 451757 - DNA, 255 bp, Serratia marcescens; identical to SEQ ID NO: 194238

SEQ ID NO: 451758 - DNA, 576 bp, Serratia marcescens
atgttcgccctggccgacgtcaactccttctacgccagttgcgagagggttttcaggccggatttgcgcggaaaaccggtcgtcgttctcagtaacaacgatggctgcgttattgcccggagtgctgaagccaaacggctgggtataaagatgggaaccccctggttccagctcaaagaggcgcagtttcctgaaaaactgtacgttttttccagcaattacgagctctacgctagcctgagtaaccgcgtggtcgccctgctggaggagctgtctccccgcgtcgaacaatactcgatagacgaatgtttcctggatgcccggggaattggccaatgtatggatctggaggattttggcaggcagttgcgtgggcacgttctcagtggaaccggactgacgatcggtgtcggctgcggcgccacaaaacactggccaaatcggcgcagtgggcgtcaaaggaatggccacaattcaggggggtgctggcgctgtcgcccgataatccacgcaggacggcaaaattactcagcctgcagccggtggaagaaatatggggcgtggggaaccggatag

SEQ ID NO: 451759 - DNA, 858 bp, Serratia marcescens; identical to SEQ ID NO: 185650

SEQ ID NO: 451760 - DNA, 810 bp, Serratia marcescens
atgaaagacatgatgattgatattgaagcggaacgatttaatgaatggcttgaggaaaattacccggatattgtccctgagtctgaagcatgggaggaggccgcgaacctgtattactgggagcaggaggcgcttgctgatcaggctcagtgggatcatgaacatggactgttcgtggtttccctgaacgatgttcatcagcgtcaccggcacgcaagacaggagctgcagaagctacatgccctgctcgacagagagcagccagaactggtgtacaggatgtctttcgtccatgcagtgactgtcatggaagcatacctgatgtactgcgccagggctctgctggaacatgactggcctcttaaacgcttcagggatgaatattacctgaattcagaacgcgtcaaaaaaaacaaaaagcagtctttgcgtgagatggaacttgatatgttcaggcccgccgcacgcaattatgtttcccgaatgacgtttcataacgttaaaaccattgagcgctatttcagcgccgtgctgcatactccgcccgtctggccggttaagccgctggacattattgcagactggcgaaacgaccttgtgcaccgtaacggggtggatgagcatgatgtgccaagaggtatatcagcgcagcagctacagaatgctcttcagagagtgtctgaccttatagaggcagcacaccgttccctgtgccaggaggtggactatttcggaaactggcgtagtgaggaaaaccgggaaatcattgcttcagcgctgaacatatcaacagacagagatgtatcctga

SEQ ID NO: 451761 - DNA, 363 bp, Serratia marcescens; identical to SEQ ID NO: 170104

SEQ ID NO: 451762 - DNA, 264 bp, Serratia marcescens
atgaagaagcgtttttccgacgaacagatcatcagtatcctccgcgaggctgaagccggggtttctgcccgtgagctctgccgtaagcacgctatttccgacgccaccttttatacctggcgtaagaagtatggcggtatggaggttcccgaggttaagcgcctgaagtcgcttgaggaagagaacgccagactcaagaagctgcttgccgaagccatgctggataaggaggcacttcaggtggcactggggcgaaagtactga

SEQ ID NO: 451763 - DNA, 216 bp, Serratia marcescens
atggggactatcagattcggtgcactggacaacctcaaatttttatcggccatactaatcatcagtatgcatgtacataaccttggaatggaaagcatttactcatattcgctcgttaatggtctctttagatatgctgttccattcttctttattgtcaatggttattttttaatcgcctctattgaaaaaatcaggattttacacttgggttaa

SEQ ID NO: 451764 - DNA, 231 bp, Serratia marcescens; identical to SEQ ID NO: 129443

SEQ ID NO: 451765 - DNA, 1119 bp, Serratia marcescens
atgtctgacaaaaccgtggcaaaaaccgtcatcgtgctgggtggcggcattctcggagtctcaaccgcctggcagctggcgcaggcgggcgcgcaagtcacactggtgacggaagcggcgctctgctcaggcgccaccggccgttccctctcctggctcaactcagctggtgagcgttcgcagccttatcatgcgctgcggatggcgggtattgaccgctatcgcacgctatttgcccgccatccacagcttgactggctgcgtttcgatggtgctatttactgggccgcagacgatgtcgcgggcaccaaagcgcgtcatgactatgaaaaagcgcagggctacgactcaaagctgatcaatcacgccacggtcggtgatgtcgatgcgcaggtgaatccggccagcctgagtcaggtcgcgattgcaaatccgggtgaaggctgggtcagtctgccgcatctggttgagcatctgatgcaggcatttcgtgcgctgggcggagaagtcgttgagcacgctggtaaagccagcgtgataaccaaagacggccgggccagcggcattcgcagtgaaaaattcggtgagctgcaggccgatcaggtactggtggcgtgtggcccgtggacgccggaagtggttgccccactcggtgtgaagatacccaatagctctccggtctcaatgctggtgaccagccaaccctgcgatcacgcactccaggtggtcttgaatacaccacgcgctgcggtccgccctaaccctggcaacactatcgccgtcgatcatgactggtatgaagagcatatcgtcgctcaggctgacgggcagtacagcattgatacatctgtcattaaccagttgatggcggaagcgggtagcctgataggtgacggcgagccgttaacagccaacagctggaaaattggtctgaagcccattccaggagatggcgaaccagtggtcggcgagttgcagaacgttcccggctgttttgtcgttttcacccattccggcgccacgctggcgttaatcctcggcgagatactgacgcaggagatactcaccggcgtcaaacacccgatgctggcgaccttccgcccggaaagatttagctaa

SEQ ID NO: 451766 - DNA, 1074 bp, Serratia marcescens
atgacacatcaacaggttagaggcccaatccgcacggctctggtgggttttggcgtcgccggcagtgtgtttcatgcgccgctgattgcccataacaccgactatcgtctcgatgtcatcgtcactggcgatgcccaacgcgtagcgacggcgcagcaatgttacccagaggcgagcgtgctgccggactggccggcgttgcttaaggcaattgatggaggcgagattggtatcgatctcatcgtgctggccacgccgccggcgcaacatggggagcaggctgtgcaggccagcctgcgcgctattcatctggtggtggataaaccgttcgcagcggatgtacaagcggccgaaatgatgatcgccgcagcgcagcaggccaataccttgctcaccgtgtttcataaccgacgctgggacggtgattttctgacattacagcgcctggtgcaacaggaagtctttggcaccgtaagaagttttgagtcgcgtttcgagtggtggcgaccgcaggggtttggcaactggcgtgacagcgtcactcttgcgcagggcggcggtttgctgctggatctcggtagccatttgattgaccaggccatgcagctatttggcccggtagtccacgccacggcggaactggcgcgccattccgggccgcagtcggacagtgatgaagacggtttcgtctcattgctgcatcacaacggcgtgcgttcccggctgtggatgaatggtcaggcggcattgaatgcgccgcgcttccacctgctgggcagcaaaggcgctttcacccactgggggctggataatcaggagccgcagctggcggctggcatgtcgcccaccgatagccagtacggcgtcacgccggcaggtaattttgcccgggccggcacggtcggggcaaccacaacggtgcccattgaacgtggccactaccccgctttctatcagctgttagcccacgcgctgttacacggcgggccgccgccggttgatgcacgtgaagcgctcagtgttttacagcttattgagcaactccatcggcagcatcgcgtacgtattgcctga

SEQ ID NO: 451767 - DNA, 747 bp, Serratia marcescens; identical to SEQ ID NO: 160399

SEQ ID NO: 451768 - DNA, 813 bp, Serratia marcescens
atggatctgatcactattctttcccgtacgttttttgatattccatcgatgatggacgtcctgcctcagctgctggcaaccggactggttaacaccatcattatctctgtagcagccaccgtgctgggcacgctattcggccttatactggcgctgatgggcatctcgccctcccgctggctgcgcgtgcccgcgcggctgtataccgatctgtttcggggcttgccatccatcctcaccattttgttgattggtcagggcctggcgcggtttagctatcagctgtttggccctactccttatccgctgggcatttttgccctgagcctgattgccagcgcttacatgggcgaaattttccgttccggtattcaaagcgtggaacaggggcagatggaagcgtgccgggcactgggaatgagctatggccgggcgatgcgcctggtgatcattccgcaaggcatccgccgcgtattacctgcgattgtcaatcagttcatcgccatcatcaaagactcgtcgctggtttatctgctgggcctgatgaccggtcagcgtgagctgttccgggtcggtcaggatgctgccgtgctgagcggcaacctgtctccactgatgctggccgggctgttctatctggtgatcaccgtgccgctcacccacgccgtgaactatatcgacatccgctaccgtaccggacggcgtcgcgccactgcgccacaaagcggcctgaaggagctcgatgaagtgcagcaaaagcgcaatgtggttccggcggtctcggtctcccttaccagcgagcaaggacattaa

SEQ ID NO: 451769 - DNA, 822 bp, Serratia marcescens
atgacatcgcacaaacgcttcaatcatctgaccgctgctctgttcggctcagctatgctggcttcagcctgctggagtgcatacgccgctaatgacagcaatccctggggtttgatcgaacccggtcatctacgtgtagccagcctgggagactcgaagccctacactttcaccgataaaaacggcaattttactggttttgatgtcgaattcttcaaaaacgtggcacatcgcatgggtattgaacaggtggactttatcggtcaggatttttccgccatcctgccggctgtggcaaatggtcagtatgatgccggtgtcgccgccattggaatcacgccgctacgtgaaaaaacagtcgacttctctactggctatctcgcgggctatctaactgtgctgacccgcagtgattcaggcgtgaagaacgttgaaaccctggcgcataaacgagttggggtgattcagggcacactgcaggagaactatgcgctgcagcatttcaaacagtccgatctggtgcgtttccccgataacaacgcagcggtgtccgcgctaaacaacggcacgctcgatgccatgttcctcgactacgaagcggccaaagattatgccacccgcttcaggctggtcacggcggcgaacatcccttcttttgacacgcctgcgggcgtcgccatcgccaaaggtaagcctgagttcaaagctgcgctggataaagccatcaaagcagcgatgcaggatggaacctggaaacagctgtaccagaaatggttccctggttcgccaatgccgcaacagtatctgcccggtggccaataa

SEQ ID NO: 451770 - DNA, 1077 bp, Serratia marcescens
atgaccaatgaaaatgctcgtttacgaagcccaaccgtcgccgacgtcgcccgcgaagccaatgtttccaaggctcaggcggcacgtgccttgggcggatatggttcagtgagtgatgacgtgcagacccgggtgaatcaggcagctgaagtgctgggatacaggccgaacgagttggcccgcagtatgaacaccggccgatctaataccattggggtaattgtcggcgacattgaaaacccgcattttggcctcgcgctgcgcggaatggcggacgttgcgcgacaggcgggatttcacttgctgctgagcaacagcgatgaaactctggacgaggagcgggaggccgtgcgcgtgatgctggataagcgcgtcgatggcatcatcgtcgcgccgtgcagctcactgtttgaggataacgaacatcttcgccaggtgctggcagaagggcgttcattaatgatgtttgaccgggcagttcaagggatggaggtggagaccgtccaggcgaactttgttacagtggctaaacaggccacggagctgttactggcggccgggcatcaacgtattgcttatatctccagcatgcgctgcgctacaccttattcgccgaccatcacgttgggcccaacgccggttgcgcaacgtgttagcggaatgattgacgcctaccgggccgcgggtagggagctggatccggcgctcattcggcttaatgcactcagcgaagccaccattgagcagatactgactgaactacttgcgctcgccgagccaccgagcgcgctgattgcctcggacaacctgattgcgataggcatcctgcgtggtctgaccaaacgtggcctgcgcgtacccgaagatatctcttttctgatgtacgatgattttccctggaccgagctgatgtcaccgccgctgactgtggtcgcccagccggtatatgaaatgggacgcgaagccgcgcgccgattgatttgccaaatccgcaagcaatccgccggcaccttacctacgtttgatagctggatggtagtgcgcggctcggtagggggaaattcatccgctgggtga

SEQ ID NO: 451771 - DNA, 891 bp, Serratia marcescens
atgatagcgcgaagcggcgcggccatgctgcctgcacgcaaaagcgagagcctgctgttgctggtaacgctctgtgccggggcaggctggatcttctctaaagaggcacttggcgcgctgcctccggtcttttttatcgccgtgcgctttctggcgggcggtctgctgctgggcctggcggtgcccgcagccgaccgacgcgaatggcggcgcagcctgtggccagccttcgccatcggcagcctgatttgcggctcgatgatgtgctggattgtggcgctgcatcttaccaccgcgctgggcgttggcgcgtttctcacctgcctcgggccgctgttggtgccgttcgcaggatggctgctgttccgccaggcgctgtcgaagcgcatcgggctcgccatgctgctcgccctacccggcattgcgctgctggtgggtaacagctttctccagtggcggttcgaggcgggccagttctggttttttggtgcggcggcgattttcgccttttacttcagcctgaataatcgcttcgccaccgaccatccggtggtgctattcgccgccatgcagatgatcgcggtgggcctgctggcgttgccggtgagcctgtggctggagccgtggcctggcgagctcaacgcggctggttggacatggcttgcgctcagcattctcattcccacctgcttgcgcttctttttgcaaaactatgcgcagcggctagcctatacgcccaacggagggctcatcatgctgatggagccagtgtgggcggccattttctcggcgctatggtatggcgaagcgatgactctgtcgcaggtgggcggcgcgctgcttatcctgctggcgctgacggtcaccagagaggggcacgtcagcgcctga

SEQ ID NO: 451772 - DNA, 828 bp, Serratia marcescens
atgcttaacgccagtcatatctgcgccaccaactttacctattcgcactaccggctgaaccattgcctggacgatgtcgccgcgctcggcgtgcagtggtttgaactatggggcgttgcgccgcacctgcatatcgacaccgtgcaggaagcggacctgcaggcgctcaggcgggaactggcggagcgcgagcttaagctcgcctgtttcacgccggagcagtgcgtctacccggttaatatcgccgccgaaaacccgctgcagcgggagtacagcattaactatttccgccgcagcctggagatatgcgaaagccttgagtcgcctctactgtttatgacgccaggctggggttatgaagaggataagcccgcggaggcgcgcagccgcgcggtggacgccctggcgcaactggcgcacctcgcggaaagccgtggcgtgacgctggtgctggaagtgttgcagccgcgcgaaagcaacctcgccagcaccgtgcatgagctggcgtctctggttaacgaagtcagttcgcctgcgctcgacgcggcgctggatatcgtcggcatggcggtgggcggcgacagcgtgaccgattacctcaacgcctttgggccaaaactgcgccactgccattttatcgacggaacccctgcgggccatctggcgctcggcgacggcaacctgccgctgaaaagctacctcagcgcccttcgtgaaggtggctataacggtctgctgtcgcttgagatagccggtgggcgctactggcaggagccgctagagccgatgcgccagagcattacgttcctgcgtgacgcgctcgcatga

SEQ ID NO: 451773 - DNA, 741 bp, Serratia marcescens
atgattgaatatcgcaatgtccataaaagttacggtgcggtacacgtgctgaacggcatcaacctgaccatcaaccgccaggaggtggtttgcatcatcggcccttcaggctccggcaagtcgaccctgttgcgctgcatcaacgggcttgagaactaccagagcggcgagattattttcgacggcgtgcaggtggacggcagcgagcgcgcgctaagtcaggtgcgcggcgaggtggcgatggtcttccagcgctttaacctcttcccgcaccgcacggtgctggagaacgtcaccgaagggccgatttacgtcaaaggcgagcgccccggccccgcgcgggaatatggcatggagctgcttaaacaggtggggatggaccacaaggcgcattcatacccgcaggatctttccggcggccagcagcaacgcgtggcgatagcccgcgcgctcgcgatgcgcccgcgagccattttgttcgacgaacccacctcggcgctcgacccggagctggtgggcgatgtgctgaaagtgatgcgcgagctggcgaatcagggcaggacgatggtggtggtgacccacgaaatcgccttcgcccgcgaagtggccgaccgcgtggtgtttatcgacggcggtgtggtgaccgaagaaggcccggcgcgccaggtgctgaccaacccttcccacccgcgcacccgcgagtttttacaacgtgtactcaaccccatcagcgaggaataa

SEQ ID NO: 451774 - DNA, 663 bp, Serratia marcescens
atgaacgacttttttaccttcagcgccaccgccctccccatcctggtggagggggtgaaatacacggtactggttaccttttgttcgcttatcctctcgaccctgctcgggctgacgtgggcgctgatgcgtctatcggcccaccgtccgctgcgcctggtgagcggtgcggtggttaacgtgctgcgcggcatcccgatgctggttcagcttttctatatctactttgtactgcccgatatcggtatcgaaatgtcggcgctgactgccgccattatcggcctcggcatcgcctattcagtttaccaggcggaggattttcgcgccggcattcaggctatcgacaaggggcagatcgaggcggcgcagacgcttggcatgtctaagcgcctgatgatgcgccgcgttatcctgccgcaggccatcaagattatctggccctcatacggcaacaccatggtgatgatgctcaaggacagttcgctcgcctccaccatcaccgtggcggaactttccctgcaagggaagctgctcgcctcggcgacatttcagaacaccaccgttttcacgctggtcgccctgctctatctggtaatgtgctggccgctgatgtggctgtgccgccgggtggaacacgccatgaacaagcgtcggagccactga

SEQ ID NO: 451775 - DNA, 756 bp, Serratia marcescens
atgaagatgaaaaccttagcctgttcagttgcgctgctggccgcaatctcgcttgccttacccgccggggccgccgaaaagctggtggtcggcaccgaagccaacggcattcccatctcctttctgaacccgaaaacccatgagctggacggctttatgctggatatcgcccgccaggccgcaaagcacgcgggttatgaggtggagtttaaagcgatggatttctcagcgcttattccggcgctgcgcaccggcaagatagaccttatcgccaccggcatgtatatcaccgagccgcgcaagaaagtgatcgatttcaccacgcctgtgtatagctacggcgaagggatgatcgtgcgtaaagaggacactaaagactacacctcctttaaagagttgcctggtgcggtagtgggcgcgcagatgggcacgatttttatcgagccccttaagcaggccaacatcttcaaggatgtgaaagcttacgacaccctcaccggcatcatgaaagacgtgaacgccgggcgcatcaaagcgggctttggcgataccccttccatggcctattacctctcgcttggcgaatatcccaacgtgcggctggtgaagagctacaagccggtactgccaggctcgctcgggcttggcgtgcgtaaggacgaagagcagcagttggcgaagcttaacgaagctatcgccaccatgcagagcaacggcgagattacggcgctgctggaaaagtggaagcttaattaa

SEQ ID NO: 451776 - DNA, 831 bp, Serratia marcescens
atgcgaatttgtggagtgggtgacaacgtgattgaccgctacctgcactgcgacctgatgttcgcgggcggcaacgcgcttaactttgcggtttttggccgccaggccggggcgcaggccgcctacctcggcatcaccggcaacgatattccggcgggcgtgattcgccacgcgctttgcgctgaaggagtagacatcagtcgcgtgcggatcaacgaaagctttaacgcgctttcgcaaatcgatatcgatgccgacggcaaccgctttttcgtcggttccgtgccgccgccttaccagctgcggctgagcgaggcggacctggcgtggcttgcggacttcgacctgctgcacaccagcgattacagcgggctggaagcacagcttccccagcttgccgcctgcgcgccgctctcgttcgacttcggttcgcgcgacgacgcctgggccgagccgctgctgcgctgggtgcaggtcgccaccttttcgcgcagtggcagcgcgccgcaggcgattgaaacgctgatcgccaacgcgcacgcggcgggtgtcgccaccgtgctggtcacgcagggcgcggacggcgcgattatcagccaccggggcgaacgccaccgccagcccgcgttgccgacgcagattgtcgacagcctcggcgcgggggatgcatttatcgccacgctgctggtgaagcttggtcagggatcaacgcttgccgacgcagcgcacgatgcggcccttgcctcggcgagggtttgcgaacgcctcggtgcattcggcagcggcgtgccgctaacgccgctaccgcaggaggcaaaacaacaaccgtag

SEQ ID NO: 451777 - DNA, 1038 bp, Serratia marcescens
atgacgcaaaacaccacagtttcactgccgctgcgcccgctggaagcggacttcatcccgacacttgagaaagtgctgggacagaaaaacgccatcgctggcatcgcagaggccgccgcctcccgcccgctgaaagatatctatttcgtcggctgcggcggctcgttctcttcttccgtgcatgcccactccctgctctgccgccacagcaaaaagctacaggcgtggaacctgaacgcggcggagtttatggcgcagccccctgcccgtctgggagcgtcgtcgctggtgatcctctcatcgcactccggcgccacgccggaaacggcgcaggcggcgctctttgcgaaatcttacgacgcgtatgtggtctcgctaagccaggagctgaacacgccgctcgccaataccgccgacaccgcgctggtttactacagcccgcgtaccgtgacgccgggcaaacagcttctgctgctgcaactggtgattgaactgctggagcacgtggataacctagacgtcagcgcctggcgcgacgccctgcccgccctgcctgcggcgctgcaacagtacctcgataaacaagaagccgtcggcgacgccattgcgaaatccatcgctcagggcggcgatatttacgtgaccgccgctggcgctaactacggcgcggcctacacgctttcctactgttatctgatggagatgcagtggcgcaacgccaccccggtgctggcgggtgatttctgccacggcccatttgagatgattttgccgggcgcacacctggtggtgttccacgccgatgacgacagccgcgccatgacgcagcgagccatcgactttgcccgccgctataccgaaaacgtccatgtgtttgacgccgctggctttagcctgccgggcgcagcgccagaagtgaaagcacgctttgccgccatcgcgctgggcctgatgggcacgcgtcttgcagatcacctggagcatcacaccggccactctctcgatgaccgccgttacatgtacaaagtggaatattga

SEQ ID NO: 451778 - DNA, 1098 bp, Serratia marcescens
atgaacaaaaaaaataaccgaatcaccgtgaaagacgtggcgcgcaaggcgggggtttccaccgcggcggctggccgggcgctgggaggttacggatatgtcagcgaggagctgcgtgaaaaaatcatacgcgctgctgaagagctgggctatgtggcaaaccaggtagcgcgggcgatgatcaccggcaaaagccagaccatcggcgtggtgggcgcggacatcagcaacccttttttcgccgaggcgttgcgcggcatcagcgatatcgcccgtcgccacgagttcggcgtgcttatcaccagcagcgacgaagacgtgccgcgcgagcaggaggcggtgcgcattctgctggagaaacaggtggacgggcttatcgtctcgcctgctgatataaacaattgccaccacctagaccaggctatcgcccaaggtattccggtggtgctgctcgaccgtaagctgccgacgctggccgccgacgcggtgcttatcgacaacgtacatgccagccgcgaagctacgcgctacctgctaagctgcggccatcgtcgcatcgccatcatcactgagttaagctcggactacgatacgcaactggcgctggagccggagaagttttcgacgatcaacgccgaccggcttaactcaagcggcgcgcgcctgctcggctacctgctagcgcaccatgaagcgggcgtggcggtggagaaaaccttaatccgccgcactggcaaatattgcgcccagcacgcgtttgaagagacactggctgtgctggacgccgccgcgcccacggcagttttcgcggtggataacgtcatgacccagggcgcctggcgcgcggtgcgtgagcgcggcatcgctgtgccgcaaaagctctctttcttcgccttcgacgaactcgactggctgacgctcaccaccccgcgcatttccaccgttgcgcagccgattcaccatatgggcgtacatgcagccgagctgcttttcaggcgcatacgtgagacagatttacctgtctcgtggcaaacgtatcaggtggagatgaagctgcgcgagtcggtggcgacgatcgcggagaacgtgaaaggataa

SEQ ID NO: 451779 - DNA, 267 bp, Serratia marcescens; identical to SEQ ID NO: 194206

SEQ ID NO: 451780 - DNA, 825 bp, Serratia marcescens
gtgaggccatctcaacgccgacagatggccagacacgccgtcagcacgcagcaaatcagtatccgcctggccagccagattttttctgtcagtgaaacgtgctatcgatatctgccacgtctttctgtagaaaatcagcgtattgctggctggctactgcgcattacaggcagccagcggaactggggttttggtttgtgctttttgtacctgcgtaatgtgaaaggttttcgctggaaccataaacgcgtttatcgaatttactgcgaattatcactgaatatgcggatcaaacctaaaaagaggctgaagcgtgataagccagagccgcttgcggtgccggaatacagcaacgaatgctggtcaatggacttcatgcatgatcagctttcagatggccgttcagttcggcttttgaacattattgatgacttcaaccgggaagccctggcaatagaagtggacttctcgctgccgtccagtcgggtaaaacgcacacttgagcagatcattgaatggcgaggtaaacccgccgcaatcagatgtgacaacggcccggaatacacgagccacgaattaataaactgggcggaggataacggaataaaactcaactttattcagccgggaaatccgcaacaaaacgcttatattgagcgctataaccggacagtgcgttatgactggctggggcagtatttattttgttcgctggatgaattacaacgctacgcgacagaatggcagtggttttataatcacgaaaggccgaatatggcactgggtggttatacgccaagacaacatgagctgcgcacagcctaa

SEQ ID NO: 451781 - DNA, 1734 bp, Serratia marcescens
atgccgatagccccttatcttgcagccgcaattcaattcgaacccttaatgtttgccaaagaagccaatttacgtcaattacttatattggttgaacaggcggcacagaaaggtgcacgcttgattacaaccccggaaatggcaacaacgggatactgttggtttgaccggcaggagattgcgccgatggtagaaaccgtccctggcgagagtacagcactttttgctgagttagcgcaacattatcaatgctatatcgttttgggaatgcctgaaatcgaccccaatacatcgctgtattacaacagcgccgtattaattgggcctgagggtgttatcggttgccatcgtaaaacccacccctatatttcagaacccaaatgggctgcggcgggcgattctggacatcaagtcttcgatactccgctaggacgcattggtatgttggtttgcatggatattcacttcccggaaacagcccgcttgctggccctggacggcgttgacgtcatttgtcacatcagcaactggttggcagaacgcacccccgcgccctactggattagccgggcaatggaaaacggttgttatctgctggagagtaaccgctggggactagaacgcggagttcagtttagcggcggtagttgtattattgagcctgatggcaacattgccgcagtggtcgataacggtaatgggatagcgtatgccgaaatagatatcaaccgtagccgccagcgccaggtattaggggagccggttttttatcaacgccgtcctgattattatcacttactattaagcgacagttttttatggaacccgcaggatttctttgggctgtatggacatcagccactccccccaggcaagcagagccgtatcaccgtggcgcagttatctcccggtgagcaagttgaagataatctggcggcgataatcgccatgacaaaagaagctgttttggagcaaggtagcgagctgatcgtcttccctgaattagccttgacaggtcattacgataatgcggctcatgctcaaacgttagaaagcccggcagtgcagacgctggctcgcctggctatacagctaagagtctaccttgtggtcggaatggcagaaaagcaacatgataaaaactacattacacagatgctgtttgggccagaagggataatcggcagttacaggcaaatccatctttcgcaggaaagccaaaaatgggccagcgcgggagaacactggcgagtgtttgataccgcgcttggcagaattggattgttgtcaggtcacgatgccctgtttcccgaatcagcacgaattctcgctttaatgggatgcgatattattgcgtgttctgctgcgctttcggcaggatttaccgccgcccacgcgggcagctctgtgacacagaatttccctatcccaacaggggccgatccgctgcattggcacttattcagaacccgtgcgggagaaaacaatctttatctggtttttgctaatgcacttgatggtatagatggggcaggaggatttagcggaattttcgggccagaaaccttcacttttccacggcaagaacggctgctttggcaggaaacgctggtcacaacacaaatcgtcgacacacgctctcttgctgacagcccttatccaaccaatgtggtacggcgtaaagatctggttgccatgcgccaaccccatcactataaaccgctgctgtattaa

SEQ ID NO: 451782 - DNA, 207 bp, Serratia marcescens; identical to SEQ ID NO: 146715

SEQ ID NO: 451783 - DNA, 1173 bp, Serratia marcescens; identical to SEQ ID NO: 146714

SEQ ID NO: 451784 - DNA, 987 bp, Serratia marcescens
atgaaatggttggaagaatccattatggccaaacgcggtgttggtgccgggcgtaaaccggtaacgcatcacctgacggaagaaatgcaaaaagagtttcattacaccattggcccttattccacacccgtcctgaccatcgaacccggtgaccggattattgtcgacactcgagatgcttttgaaggtgctatcaattcggaacaggatattccgagccagttgctaaaaatgccctttctcaacccacaaaacggaccgatcatggtcaatggcgcggagaaaggtgatgtgctcgctgtctatatcgaatccatgttgccccgcggcgttgatccctacggcatctgcgccatgattccgcattttggcggactgaccgggaccgaccttacggccatgctcaatgatccgctgccagaaaaggtgcgcatgattaaactcgacagtgaaaaggtctactggagcaaacgccatacgcttccctataaaccccatattggcaccttgagcgtatcgccagaaattgactcaatcaattcactgacgccagacaatcacggcgggaatatggatgtgccggatataggaccagggagtattacctatctgccggtacgtgcgcctggaggccgcctgtttattggtgatgcccatgcttgtcagggtgatggtgagatttgcgggaccgcagtagagtttgcctcaatcaccaccatcaaagtcgatttgatcaagaactggcagctttcctggccacgaatggagaatgccgaaaatattatgagtattggcagtgcacgtccgctggaggatgcgacgcgaattgcatatcgcgacttaatttactggctggtagaagactttggcttcgaacaatgggatgcctacatgcttctgagtcaatgcggcaaagtgcggctgggcaacatggtcgaccccaaatacaccgttggcgcgatgctgaacaaaaacctgttagtttag

SEQ ID NO: 451785 - DNA, 720 bp, Serratia marcescens; identical to SEQ ID NO: 189767

SEQ ID NO: 451786 - DNA, 735 bp, Serratia marcescens; identical to SEQ ID NO: 146711

SEQ ID NO: 451787 - DNA, 1062 bp, Serratia marcescens; identical to SEQ ID NO: 220734

SEQ ID NO: 451788 - DNA, 870 bp, Serratia marcescens; identical to SEQ ID NO: 146709

SEQ ID NO: 451789 - DNA, 1248 bp, Serratia marcescens
atgtccagaataaaatgtcattacagcatgctatcaatcgcaattgctactgtatttaccgtaaccacttcaggaatggcaaccgcggcagaacaaccaataaaaattggtttactggaagatgcttcaggtaattttgctttaccggttattcctaaaattcatgcgactgagcttgcaatagacgagattaatgccaaaggcggaatactcgggagaaaaattgatttaatacaatacgatacgcaatccgacaacacacgttttcaacaaatggcccgtcgcctgattaaaaacgataaagtggatgtgatttttggggcattttccagcgcctcgcgtgaggctatccggccgattatggatcgtgaaaaacagctttactggtataacaatcagtatgaaggtggcgtgtgtgactctaatgttttcgtcactggtgcggttcctgaacaacaattttctacattaattccatggatgatggcgaagtatggtaaaaaagtttataccattgctgccgattataatttcgggcaaatatcggctgaatgggtccgcaaaattgtgaaagaaaatggtggtaccatggtgggtgaagagtttatcccactgagcgtctcgcaatttggtcaaacgattcaaaatatccagaaagccaagcccgattttgtgatgacattattggttggggcgaaccaatcttcctattatgagcaacaagcggcggcaaaactaaatttaccaatggcgagctccgtcaacgttggccaggcttatgagcataaacgctttaaagccccggcgctgaaagacatgtatgtcacgactaattacatagaagaagtagacagcccggccagtaatgacttcaaacaacgcttccatgccaaattcccgaatgaaccctacatcaatcaggaagcggctaatgcttatgatgcggtttatctttacaaagcggcagtagagaaagccggcacgactaatatggatgctgttcgtaaatcgctggaaagtggtgatatctgtactgatggaccgtccggaaaagtatgtattgatcccaaaagtcaccatttgagccataccatctatctggcccatgtaaaagatgatcattctatcgagatacctaaggtatgggaaaatatcaaaccttactggctaggagacgctggctgtaatttgccggtaaaaccggaccacagccagtacaccccatcatcaccacctaaaaaatcgtaa

SEQ ID NO: 451790 - DNA, 303 bp, Serratia marcescens
atggcgataaataagaagaatgatatctgtgagtatgcgcttaattcattaaatgatgtcattagctttgcgaggttcgtcagctacgcagaagatttgcctcagctaaatgagctatttgaagatgagcacaatagagataattatcagaaaatatggtttgaactagaaattatcaacgcacttgccctgtctgaatgggagagtgaaggccgtcccgcagactggcaaacgcgttgggagtcagaatataaacacgatgcttctgaactactggatgagttattaaagacattgaagtaa

SEQ ID NO: 451791 - DNA, 1194 bp, Serratia marcescens
atgatgctgaatgctcggaaggttgaagccgcgaaaggaaaagagaagagttacaagctatctgatggcggtggtttgtatcttcaagtagaacccaatggatcgcgttactggaggatgaagtatcgttttgcaggtaaagagaaacgcttgtcctttggcgtctatccaacagtcacccttgctgatgccagacaacaacgcgaagatgcaaagaaactactcgcagcaggtgacgaccccggtgaagtaaagaaagcaaagaaattggctctaactgcgtccactgggatactcaattcgttcagagaggtcgcactagagtggcataggttgaagtctcccaaatggtctgagggttacgcttccgatattattgaagcattcgagaaagatatttttcctcatattggccaccgccctatcgctgatatcaagcctctagagctgcttgacgttctgagattgattgagggcagaggtgcaatggaaaaagcgaagaaagttcgccagcgatgcggagaagtgttccgctacgctatcgtaacgggacgggcgatttacaatccggccccagatcttgcaagtgcgatgcaaggccatgaatccgttcattatcctttcctaaaacccaatgaattaccagagtttttcaacgtcttgagtacttacagtggaagtccgatagttgtattggcggcacatttgctcatcctgactggcctgagaacgggagagttacgtgcggctgaatggcatgaagtagatttcaataatgcagtttgggaaatccccaaagaacgcatgaaaatgcgacgagcgcatattgtgccgctttcaaagcaagcattaggctatctagaagaactgaaagaatacactagtggctattcccgcatgttcccaggacgtaatgaccccaataaatgcatgagcgaagccagcatcaatcaagtgtttaaacgtattggctatgctggacgtgtcacggggcatggattccggcatacaatgagtacaattttacatgagcaggggtttaattctacgtggattgaaacgcaacttgcccacctagataagaatagtatacgtggtatatataatcatgctcagtacattgatagtagaaagaaaatgatgcaatggtatgcggactatctcagtaataagggaatgaaatatgttggttag

SEQ ID NO: 451792 - DNA, 774 bp, Serratia marcescens
atgttggttagggagtgctatgaagtttttgaaataaagagaaaattaggttgtactgaaacggatattctttatctggcatccaaaggtgatatagacatagggtttgactttactggaatagataatgaaagtttgttcattaacaaggtttatgtaagggatgagtctgtttttaatgactggttgttatctgcaaagacaaatagaaaaggatatcgccacgtttccggtggttcatacctagagattcattctgatttgttaagggtagatgattttggtgtttattttactgcctatttgaaaggctattgggtttttgatgatgattatgtttatgaactttatgataaacatttagaacctgaagattggccggctttcttcttaggtgacttatctattgggaatggttcttgtgtgattagagcagtgccaatttatgatgatgaaaaagattatatgattcccgaattcctacatgtatcaaaggaatcttacatatatctttctaaaattttctctaaaaacaatgataattataaagagcaatcagagtcacaaatagaaaggcattcaaaaccaagagtagatattcttatggccttgctttccttggtgaggaaagagcctaagttattaaatttaaatgctacaaagctagctgagaagttatatgaaaatgctgctatatattggccagcgacgaaagaactaccacttggttttgatgcggtcagagagttgatttccaattcattcaggaagtaa

SEQ ID NO: 451793 - DNA, 201 bp, Serratia marcescens
atgcaagcacaaagaccccctctcgattcgttaattgacatgaaattcattgtgtccgattgtcgttttaccgataaatggatctataagctaattgctgatggcaagtttccaaaaccaattaaactaggccgtatgtctagatggcgggctgaggactactataattggcgtgatagccataaagtacgggcacattaa

SEQ ID NO: 451794 - DNA, 126 bp, Serratia marcescens; identical to SEQ ID NO: 221893

SEQ ID NO: 451795 - DNA, 2889 bp, Serratia marcescens
atgaatacatacagcagttctgatgaatttaatatctccgttatgaaacattatcaggcgtctttctcaaacacctggcatcctgcaaagtttccggtaatgcctggttatcccgccgataatggggtctgtgaaaaaacactgtccgaagagacattggcgcgtttaatgaaaatcaccaatggcgacctggtgaatattagcgcggttatttccgttgccttaacgcatttagttcattattacaacccatcggattatcctttggccatcggctattctttacagcggcctgatgacgaaaaggcaaacgatttcgttttgctgtcgccgttatttgaggatgataaaagcggcgccgagctgattgtcagtcaaaggcaaaaaatgttggcggtcttggcgtgcggcgccacccgctttagcgcgattcaggctgcattaccagcagatagctcgcaaaacatgttcgcgctgcaacttagcgttcgtacccatgacggtcatgccgtcgagcggtttgaacgcgcgcttctgatcgacttttgccttaacgacaatgcgacggttcgtctgattgccgatacgcagctttatcctgccacttaccgtgaatctattctcaataatctgctcgcgttgcttgcggccataacggccagccccggcactgcccttgctcaaatcccgattgccgatgaacaagaattgcggcgcgtgatgcatttttcccaaggggacacggtgccctataccgctacggcgcgtttggaacattggctggagcactgggcaaaccgggatgcacaacgcgtggcgttgattgccgatggcgtccgctggaattaccggcagcttaatgagcaagccaacattattgccaacaacctcattcgccgtggcgtgtcggaaggggataagattgcgatcatgctgccgcgcagcgccgagatgatcgcggccatatatggcgtattgaaggccggcgccgtctacgtgcccgttgatcccaactatccggataatcgccgtcactatattattgaagacagccaggcgaagttcgttctggtgaatgagcgtcatgaggctcgggacaatgcgttatgcattgcggatttctctgtccttgagggtgacgccggcaatccggcagtgagcggtgatgccaaggcgttagcctatatgatctatacctccggttcgacaggtaaccctaaaggggtaatgattgagcattgctcggtctttaaccgaatagaatggatgcagaatcaatatccgctggggccaggggatgtgatcttgcagaagacacccatttcttttgacgtatcggtatgggaactcttttggtgggcgctgagcggcgcgacggtctctctgttggcgcccggcggagaaaaggatccttccgcgctgctggcgagcatcgctcgcgataaaatcacccatttgcatttcgtgccgtcaatgctggatgcttttctcaatgcaattgaagcgggagaaggcgaggcggaacttacccagtcgctgagaacggttttcaccagtggcgaggcgttgacgctacaccaatccgcacgattttttgccttggttgcgccgtggaatgactgccgtctgatcaacctttatggccccacggaagcgaccgtggacgtgacctattatgcgtgtcgggccgatgaatctcgcgcttccgtacccatcggtaaaccgatccagaataccggtattttaatattggataagaataatcagcctgtccctttgggggtggcgggagagctgtgcatcagcggtgttaacctggcgcgtggctattggaatcgtgaggagctaacaacggagaagttttgccagcttccagccccgctggggagacgcgtttatcgttccggcgatctggtgcgttggttggcggatggcgagattgaatatttggggcgcatagatttccaggtaaaaatccgcggttatcggattgaactgggcgaaatcgaaaccgctatactgcggtacaagcccgtgcgcgatgttcgtgtcatcgccctgatgcgtgaagacggcagtaaatatctcgctgcgtatctcttacccggcgaaggatatcgggaggctgagttgcgggagtatttaagcgccaatcttccggagtttatggtgccgccgtggttggtggtgatgagccacttcccgttgacgccgaatggaaagctggatcgtgcgcagttacctaatccgctcaaacgcgcctcggccgcagagcggatattgccgcaaacagaaagtgagcggcaactcgcgtcaatttggtgtcaggtgctggggctggacagcgttggcatccatgacagtttctttagtctggggggcgattcgatcacctctttgagcgtgatcagtcgggcgcgcaaaattggcatggaaatcagtttccaaaccatgttcagctacccgacgatcgccgcaatcatcccggaaatcagtgcggtgaagggtaaaagcactgaggaatatcagccgtttagtctgttgtctgaggaagagcggcagaggttaccggcaaatattgacgatgcttacccgttgtcgatgttgcaggcgggtttaattttccaaagcgaactgcaaaaaggcgcttcctggtaccatgacattcaggtttacccgttgtcgggcgcctttaatgccggggcattcacgcaggccgtgacgcagatgttgcaagaacacccgatattgcgcactagttatcatttgcaaggcttcagccaatttgtgcaaatggttcacgcggcggtgccgctgccgctgtttattaaagactggcggcagatggggcgccgggagcaagaggcggcgtttgagtggctttgttga

SEQ ID NO: 451796 - DNA, 1584 bp, Serratia marcescens
atggcggcgacagaatcggcattgcggtcattgttgactgaattatttcctcatgcggcggcggatgttgtgctgaaggagaacctcatccatctcgggggggattctattatggctgctgcattagcttcccgcctttatcagctttggtcgatgaaattttccgttaagtcgatccttcagttggagaatttcgctggcctgatggcgtacttgccggctcagacggttgaacgtgaagcagaaaaagaggtgataaatacacgagatgtgtaccgtcaaactgacggacagaagatggtctatcttgagacattccggcagccgaacacgacggcttataacattcctgttattgctgaactgcctatcgcgctctcaccgctggtggtgcaacaggcgttacaaaaggttgtgaaatgcttcccggcgatcttcactcattattatgatctcgatggtgaatttttatttcgctattacgaagcagaaacgattccgttgattgtctacgacaatcaacaacaggctgcacagcagtttgttcagcctttcgatttaagcaaggattgtctgcttagagcggctgtcgtaccgttcgatggcgatgtaactcaggtcatgctggatttcagtcatatcattgccgatgggctatcaataggacatttcattcgtcggctgaaagcggctctgtatcagaaatcgtttgaaggcaccgcgaaaaccatctttgattttagccgctggacggaaacggcaatttatcaggcgaagttctctgatgcggcggcattctggcatgactgcctgggtgagaaaaacctccgtccgcgctggccgggcatgcggcaagcgtctcatacgatgggctatgggattcagcaagcgccaatcgatgccttgctcgcggcggatattcgtcaaaaagcggagcaacatcaggttaccgcatttacgctgtttttattgggttggtctctgctgcaaagtgaagtgacgggcgcctggaacagctgtgttggcttagtggcgtccggccgtaccgagccggagtactacgacactttcggcatgttcgtcaatacgctgctgcttcccgtgaacttcaatgcagagacttcactgcaggaggcgttgagtggtttggcggagcggaccgcagccattttggaacatcagcattatccctttgcccggcaagtcggcgcattgcaaaagggtgacgactcaccgtcaccgttagatgcattatttgcctttcaaaatattgattatcaaaaaatagagatttttggcgggcgctttagatcctttcatcaggccaagaagatggcgcagttcggcacggtaatccagatatttgatttgggtgaacaaggatatgacattcaatgggagtacgcgccagagcgattctcgccaaaaatggtaagcggttttctctctcattatcaatccatcatgagcaatattgctcacgccgaaagctgtcatactttgcagcagcttcttgttatagatgtggctaatacgtctccctgtgtcgatttgaatgtggctgagtttaactttggtatctaa

SEQ ID NO: 451797 - DNA, 315 bp, Serratia marcescens
atgcaggttattttactcatgggtgtcacggtatttgccgtcaggagcgtcgcgtttattttcgcaaattatatttcgctaccgaatgtcgtcaaggatgcactcgagctgttgcctcccgcaattttaaccgtgattattgccagtggtgttttggttaacccgacaaccgctaagctggacatttcttttactaattatgcactggttgcgatattgattactttacttatatccagcaaagtgaagaatttttttgctgtgatcgcaagtggttatgcggtttatttcttactttctcaattcataggataa

SEQ ID NO: 451798 - DNA, 741 bp, Serratia marcescens
atggtgggttcgaaaaagaaagagtggcggctcgcctttaagcgatcgtcccctttcctgatatccgcgacgctttcggggattgtgtttggcgccttggtcattgccggggggcttacggtcattgatgggctggtcatgtccggctttatctactcaggcgcagcccagtttgtggggttgcagctgatcgtttcacataccagcctggctgttgcgctgctgaccacactgctgctcagcctacgtttcttcctctactccatttctttgatcgatgaagtgaggtcgatacccgtagcctatcgcatcatgttggcattcggtttgattgatgcggtatttgtgatggcgaaggagcgttttaatgagccgggaacgcagtcggaaaaaaacacgtattttatggcgtgtgtactgatcttttactttaactggatcatcggcacggcaattggactgtttctgggggataccttagcgcattacgcggcgcagtacggtctggagtttattacctatgccacctttgtggccatgctggcgccatacttgagagtgggcagaaatatttacgtttccctggttgccttggcgacttatatcttgacatatcaggcaccctataatcttgcgattctgatttcctgtgtggtggcggtcgttgtagttaaagtaagcgaaatgataatcagccaaaggaaggtaagacagcgtccttcagcggaggatgcaaagtga

SEQ ID NO: 451799 - DNA, 1020 bp, Serratia marcescens
atgcaaacaacaacatccatgcctgcattccatgtcattggcgcgaaacagatcgccgagtggctggagcagaaccctgagtccgtattcgacgcggtacaagatgcttatctgcaacatgccgatggccgcacggtgagccctgacagctattttctgcgtttccctgacagtacgcgtaatcgcattatcgctttacctgcttctatcgagagcgccgcgccgattgccggcatcaaatggatcgccagctttcccggcaatatcgaaaaagggctggatcgcgcttccgccgtattaatcgtcaatgatcgcgaaacgggttatccccgcgcgtgtttggaaggcagtttaatcagcgccgctcgcaccgctgcttcggccgcgttgggtgcgcactacctgcactcaacgccagggaaggtcaaacgcctcggcgtaatcggctgtggcccgatcgcttatcacaccttggccctgttggttaaattaggctggtgcattgatgagctgtatgtggctgatttatctgagcaacgcagccagctgtttcgtgataaatgcgccagcttcgtggggaaatcaacggccgcttctttggaggccacggtgactcagtcggatatggttctcatggcaacctctgcgacagagccttatatcacttcgccggaatggttcagccatgcgccgacggtattgcatatgtcattgcgggatttggcgcccgaagtgatcctgtctgcgcaaaactttgcggacgatatcagccacagtctgaaggcgcagacatcgacacatctggccagccaacaggtggggcatcatgaatttatggccggcggtatcgctgccgttattcgccggcaagtggctccggatagtcatcgcacacgcattttctctccgtttggcatgggcattcttgatttggcggtagcgcaacgcattctggattctattgatgagaaaaatatggtcaacgttgctgaattcttcccggtgccttatgcacaataa

SEQ ID NO: 451800 - DNA, 951 bp, Serratia marcescens
atggagttattgatttcaaacgtttttataaaactgtctgttgcgaagcatttccaggttaacctgaagttagaggggttgtccgcgacgggctctatcaaggtgaaatcaggtttgcgaatgatttcacagctggagcagcaaggcctgttgcgaaaaggcatgaaaatcattgaaagctcatccggaaatcttggattagcgctttcgatgatttgtgccgcgaaaggttactcctttacttgcgtcagcgatccgaacatttccccgcaaaccgcgcgtatcatccaggcttacggtgcgaaattaatcatcgtaaaagatcgtgatgcgaatggcggttatctggcgacacgcattaacctgatcaaatcgttgttgaaacaagacgctgatttgctgtgggttaaccagtacgaaaacgaagagaatgttcacgcgcattactgttcgaccgctccggagattttggcgcagtttcccgagcccgactatgtctttatcggggcggggacgacgggaacgctgggaggcgtgtcccgttaccttcgggagaaagcgccgaaaacaaaaatcatcgccgttgatagccaaggatccatcacgtttggtcaaccggcaggcaaacgtttaatcccgggattagggaccagtaatccacctgcgatccgtcaatattccagcttcgacgagctgttgatgatccctgaactcgatacggtgcggatgtgccgacagcttgcgcaacaaggcatgttactggggggatcctcgggaacggtgctatgtggtgtgcaacgttatgccagcgccattccgccaggagcctgtgtggtagcgatatcgcctgatatgggcgatcgttacgtcgatacgctttataaccccgattgggtcaacgagcattttcccgaaatgcagggttatgaaaaatgcgctatcgccatttaa

SEQ ID NO: 451801 - DNA, 1221 bp, Serratia marcescens
atgaaaaccagtattatcaacggctcggaagtgtctagattatccgtggcgattcatacgctgtcatttaccgtacccaaacggctacatgtcattgagcatgacggttctacagataaattcagcagaattgatgctgtagtcgagtatgatgcctcccacgcacgatacattcaggttgctaagcgagagaattacgggatacttgatgtattcagcgcaccatcaatcgatggtcaatatacgtatctcagttcgataacttcgcttcagtcgacaggggcggccagcggatacctgctcaaatcatcaatagaggcaccatcaatttaccaactcaagaatggctccacgtgggttatttcttttgatccgaatgatacatttgatgggataaaatatgttacgacaacagatttcatatcattctcagtacctcagcgattgaggatgcctaactttcgccacggttcagtcaagcgtggacatggtcatttatcccccggcgcattgaaagcgctgacagatgcaaaaaatgggattagcgggtactccccgattaaagagcgccccgtcaatttcatcaggattacggctgactgtagaatcattccgcagtctgacactgtgtattgggctgatgcatcgtactcagtttcattggtcacgccgtcagttgtaggaagccttgattaccctaggaatttttatttctgtgttcgtagtaactctcgattagttcgcttgcgggtgacgggggcggtttctggcggtaactgggacatcggctggggggtaagcaataaccgcattatcgagttcttttacgaatcattgaataatgtgtaccggagtgaagctattggcaacccttcctacacatcaaccagacttaaggtggatgctggttcaaccaatatcaacccatcaagtattgtttgggcaccgcaacatggtaggacatatacgatagttgacagcgatggaacgataacaatcaatgcgttgcctaacatgccagtaggcacatttttcaatgtggtgattcagtcaggcatagggacatttgcaggcctgattcttaaggcttcgaataatgttaaccatatggggatgcctagtgactggatttactatggtggcgcatctgggtttgatggtgttctaattaggattgaaaagggatccgacctttggttcgcctcgacaagacccaagtga

SEQ ID NO: 451802 - DNA, 393 bp, Serratia marcescens; identical to SEQ ID NO: 451695

SEQ ID NO: 451803 - DNA, 978 bp, Serratia marcescens
atggataagataacagatgcacatatggagtattggaggaatgaaatagttgccttccttgctcttacatctatcaagggggtcagttattggacactaagaaaaatagctgaatcaaaaattgggtttaaagaaatattaaaatcatctgatttagataggttgtcaaaatttctccgtgtatccttgtcaaaagaagataattgggaaagtgtacagcaagaactatggaataaaggtattgaaaaagctagggaactcaccaagaaaggtgtgaaactagttttttatgaacaagattcatttcctaaatctcttaaagaaattcctgaccctccatactggattttcgtagagggggctctggaaaacttgagtttggactcaattgctatagtgggaacaaggaagccaactgatgatggtatccttattacaaaattaatcattgcggcaatcgttgataagggattggtcaccgttagtggattagcttcaggcatagatcagattgctcatatggagtctttgagatatggaattcccactattgcagtattaggaaatggacttttccacgaatttcccaaaggctctaatgtattacgcgagcaaatagtaaatctaggtgggactatacttaccgagtatcttcctgagcaaagttatagtgcggagaattttgtaaggagaaatcggctacaagctgcgttatgtaaaacattaattccagcggaatggaaagtaaagagcggaactgctcatacagttgagttcgcttttaaatatggtaaaaaaatagttaatctatatttgcctaaaacatatttaattaggcccgagttaaacttctctcttaaaaatagaaatgcagtaaatttcgaaataccattgaatttgactgaagccttgaattatataacttcaacggctgatgaaaataatgtaaagcctacacagacgactttagatttatag

SEQ ID NO: 451804 - DNA, 1227 bp, Serratia marcescens
atgactagaataaagggtgttattctgagtgttgaggggactatttgcccgaatggaacattggatcaaggaatattccaagaagttgataatctaataaaatattttagaagtaaagatattgacttcgtaattcatacaaatagaccatggttttataataaaactaagaaattaggagatttccttaaggaacgatggggggagtttagctatgtgtgttatgccgatgatagtaacattcctccaaagcctagagccgaatcaatagagtatatacttaaattaaaaggatggcagtccaccgaaactctttatattggttcgacagatgatgatatgagaactgcagttaatggagggttacttttcctcagagctacatggtgggcaaacaaaacggattatggttttgagttttctactccaaaagatattgctaggtttattgatgtgttttgcttacgagcacacttatggtgccatgaaatccatgatggtgattttaatttttatgcattagcaccattcagcacaatgaaaagagagcatactttatattctgaggatgcacgagctgctgcaaaacatggcctagggcatcctgatttctgggttggtgcaatcgtatcaagtttatatttcagtggtgtacatcagaagatagactatgtgagtgtttaccctggtcataaagctggctatggtaataacgttatgaatgaggctatttctatttttggtaagtgtttccggaaaaactatttatttgatttggtaatcagacatacaacttcccttaagtcacaaacagccagaaacaatggtgtttctattgaccatttaaatcaattaaataccatccgtttaaatgaaaaccccacacgaagtgctaatagtaaatatgtacgcagtcctttaggacgagggaaaacggttttattaattgatgacattaccactcgagggtatagcttggaggctggtcgtgcttatattgagcagactggtgctcgagtcattttggcttcatggttaaaaactattaatacggacattgaagttcttgcacctcttggaaaattcaatccatatgttgcaaatcaatttgaacgtgcagcggtattaaaacgacactcttatcatgcgaatattgtcgatattttagccccagctgaactaactgagatgtttaggaactatactaattgggactggccattttaa

SEQ ID NO: 451805 - DNA, 279 bp, Serratia marcescens
atggctaataacttgttcgttacatatgacctgatcaaaactaaagattatgaggccgtatacaaagcaattaaatctttggggaattgggctaaggtcacagaatccaactggtatgtgaactcaaattatacagaatcacaagcttttgatattgttaagaaatcaattgattccgatgacaaattaatagttgttgatgcttctaataacagtgctgcatgggtaaatcttgctcctgaggtacccgaatatataaaggatcaatggtttaagtaa

SEQ ID NO: 451806 - DNA, 813 bp, Serratia marcescens
gtgaaaaccgtagtaaatacttcagataacaccaacagcaccaaaaacaccaacagtcctaatactcagcaattcctcatgatgccttatgaactcctcagcgttcacgaggtaaacggccagcgattcgacataaacatgaaagtggcttatcagtacattaaaggctttcaagataacggacagcaagcttatttctcccgcgccaagcttggcgaaatgttggatattaaagagctggcagtaaccagaatgatgaataaaatgatcgattgtggcctcgttaatagaatagagcgttctggatacaccaacctctacactgttaacccaatcgaacagaatgataccgctgctaaatccgttgctgaggaagtaaaaaatgaatcaggtcctactgttggaaataaagcacaaagcgttaagcatccaaatagcccaacagagagcacgcctgagaatacacacgacgctcgccctgttgggattgacgatagtcacagcgccgagcctgaacaacctgcacagccttcacagcttcctcctgtagtcgttgaggaacagccaactgaggcagaagagccagttgaggcagaggaagaagaggaagagccagacttcaactcatacgccgctatggcggcccctgtggccctctttggatgggtgacaacccacaacgccaccgtagaactgaaagccgcctacgaggcgcacaggaacacatacggcgaatcccacagcatcccgagctatgcacatcacaccccgagttactcaacagctgaatatgacgccggggaagcattctaa

SEQ ID NO: 451807 - DNA, 264 bp, Serratia marcescens; identical to SEQ ID NO: 451762

SEQ ID NO: 451808 - DNA, 876 bp, Serratia marcescens
atgatgaattgggacgacgcgcgcttctttttggccgttgcgcgctgcggcacgctacgcaaagccgccagccagctgcatgtcgatcaggcgaccgtcggtcgacggctgtccgctttcgaagacgcactcggctccaagctgtttatccgcacgccgaaatccttcgccctcagcccgctgggggaggaaatgctggcggacgtgatgaagatggaaaatgcggtgcaggcgatcaaccgtaaagccgccagcggtgacgaaagcctgtgtggcaacgtgcgcatcgccaccaccgacaccctggccgaagccttcgtgatgccggcactgcaagatctgcgggaacgctatccggccatcaccgtcacgctgctgacggcggtcaacatcgccgatatttcttaccacggcgcagatctggcgatccgcggtgcccgtcccgatgacgatgagctgatcatcaaacggttagccaccatcgaaatgggcctgtatgccacccagcactatttggcgcggcgcggcatgccggtcaggggcgagcagctgcgcggccacgatctgctgatgttcccgcgcgagctggtgccgcgacactggaacaatttctgcggcgaggccctgcacgagcccaacgtcgtgctgcaatgcaattcgcagctgctgctgcgctccgccacccgcagcggactgggcatcggtctgctctccgcgtttttggcggacaaagaccctgagctggtgcgcctgttccccgagaacaaagactgggtggatatctggctggtgctgcatcccgatttgcaacgtgccgcccgcgtgcgcgcggtggtgcaggcgctggaaacgtcgtttagcgcccattacggctga

SEQ ID NO: 451809 - DNA, 279 bp, Serratia marcescens
gtgatcgatgagatcggctacctgcctttcggacgcgaggaagcgaacctgttctttcaggtggtggcgaagcgctatgagaaaggggcgatgatcctgacctcgaacctgccgttcagccagtgggccgacgcgtttgccggcgataccaccctgacagccgcgatgctggatcggctgctgcaccatgcccatatcctgaccctgagcggcgaaagctaccgcttgaaggacaagaggaaggcgggagtggtcaggaaaaattccaaacccgaatga

SEQ ID NO: 451810 - DNA, 882 bp, Serratia marcescens; identical to SEQ ID NO: 94091

SEQ ID NO: 451811 - DNA, 1320 bp, Serratia marcescens; identical to SEQ ID NO: 22860

SEQ ID NO: 451812 - DNA, 2148 bp, Serratia marcescens; identical to SEQ ID NO: 94093

SEQ ID NO: 451813 - DNA, 483 bp, Serratia marcescens
atgggtttagttaagagtcaattagacgacatgcaggaagaaaggaaagatgattggatacgtgattacatggggcttgatgaagacgatgagctcgatgagttatccgccgattatcttgaggctgagtatcagtatcaagagcttcaagatcatctagctgatgaagcttggtatcaatttgaactggagcaagagcaagaacgagaaatcgcatggttgaagcgtaatccacatctaaccatttacaatcaatatttacgctccttgaactccgttctctctttaaactccatccaggggaatgaagcgcttttgaaaatgcaagtggcctactgcgtcactattttagaatcttgcctcagtgagatgcttaagtccgttgttttgtcatccagggaatttttagaaaatgccgttaccaacgtaaaggatttacagaactctactgtttctttgaaagaggtacttaaaggggtctga

SEQ ID NO: 451814 - DNA, 291 bp, Serratia marcescens
atgtttattaaaaaacacctgtctgcttttaacactgctgtcctgttagccctggtttccgtgagcgtcaatgcaaacgcggccaacggttttgaaaaagtaaaccagatgctgaatgcgatcattgcggggttacataccattgctatcgcgactgcaaccctggctggtctttgggttggttttaaagtgttctttgatggtcgttcactgatggaaatgaaaaacgtcatcattggtgccggtatcgtgattggtatctccgaattcgtggctttggtcatttcctaa

SEQ ID NO: 451815 - DNA, 651 bp, Serratia marcescens; identical to SEQ ID NO: 187019

SEQ ID NO: 451816 - DNA, 852 bp, Serratia marcescens
atgggcgagatttatcgacacaaggacagctggaaactccgagcacaggggcaggggtttaacggcggactggagccgctcgctgtcagctatggtgttgatgttgcacagccagttgataccccgccacaggcttcccgtatcagtctggagaagaagctggaagggaaagcccccgcgcttatcagcctggcaaaaaaagccagtgtttctcttgccaagcataagctggataccgttgcagcccgagtggcttttgttctcgatgcctcaggctctatgaccggccagtttaaaaagggacatgtgcagtccgttctcgaccgtatagctgtcctgtcagtccagttcgacgatgacggcacgatggatgtatggggctttgctgagcgtcacaagaaataccctgacgtcaccctggacaatcttgacggatatattgctgctatccagaacacgggtaaacgctctgcctgggaaattcttccgggcctgggcgggacgaacaacgagccgccggttatgaatgaggtgatcgacttcttcaaggacagcacactgccggtctatgttgtctgcattacggatggtgggattagtaaaacccgtgaaatcaaagaagccatacgccgctcggccaactaccccattttctggaaatttgtgggcctcggaggctcgaattacggtattctcgaaaaactggatacctttagcgatcggcgaatcgataacagcaacttctttgccatcgataacttcgcaacggtgaaggatgaggtactgtacgagcaactgctggaagagtttaaagactggctggagcaggcaaaaatagcgggtattctgtga

SEQ ID NO: 451817 - DNA, 576 bp, Serratia marcescens
atggcagtttctctcgtaaaaggcggtaatgtttctctgaccaaagaagccccttccatgaatgtggcgcttgtaggccttggctgggatgcacgagtcaccgatggtcaggcgtttgaccttgacgcctccgtttttctggtcggtgacgatggtaaagtattgtctgactctcatttcgttttctataacaacaccaccagcccggacggcgcggtccagcatcagggtgacaaccgtaccggcgaaggcgacggcgatgatgaacaggtcaaaatcgaactggctaaagtcggtgctgaagtcaaaaaactggtgtttgctgtcactattcatgaagctgaagcccgtaaacagaacttcggtatggtcagcaacagctacatgcgtgttgtgaacaacgataacggcgctgagattgcacgttttgacctgtctgaagacgcatcaacagagaccgcgatgatcttcggcgaactctatcgccacggtactgaatggaaattcaaagccgttggtcaggggtttgctggcggtctgggtgcgctggctaaacagcacggcatcaacatctga

SEQ ID NO: 451818 - DNA, 456 bp, Serratia marcescens
atgagcttttttgacaaagtaaaaggggcgctgacctcagggcgcgaggaactgacccgccaggttggccgttacaaaaacaagaaatttatgcagggtactgttgctgtatgcgcccgtatcgcggttgccagcgacggcgtcagcgcagaagaaaaacagaagatgattggatttctgcgggcgtcagaagaactgaaagtcttcgaaacgactgaggttatcgagtttttcaacaaactggtgaccagcttcgactttgatctggaaatcggcaaaggggagaccatgaagtatatcctcgccctgaaagaccagccagaagcggcgcaactggctctgcgtgtcgggattgcggttgccaagagtgacggtaactttgacgcagatgaacaaaatgccgttcgcgaaattgcacgtgctcttggcttcgacccggctgaattcggcctctga

SEQ ID NO: 451819 - DNA, 1158 bp, Serratia marcescens; identical to SEQ ID NO: 187025

SEQ ID NO: 451820 - DNA, 585 bp, Serratia marcescens; identical to SEQ ID NO: 187026

SEQ ID NO: 451821 - DNA, 1059 bp, Serratia marcescens; identical to SEQ ID NO: 187027

SEQ ID NO: 451822 - DNA, 1143 bp, Serratia marcescens; identical to SEQ ID NO: 187028

SEQ ID NO: 451823 - DNA, 774 bp, Serratia marcescens
atgaataagcccgtcgtattcagcgacctcgatgacaccctgttccagacccgccgaaaaatggtggatgaacttgcccttgaacccttccggaccggcgcactggatcgcagtctcacacctcgcagctttatgaccgaagagcaggccatgctggtggactggttgctggagcatgcggatctcattccggtgacggccagaggaacggaagaaatcagccgggtgcagatccccttccgttcctgggccgtaaccactcatggtgcggtgatccttcgtcctgatggtacgccagaccgcgactggaaagcccatatgctggagagcctgtcctcctacgccgaccgcttaacgtcaatgcaacatatcattaccgaactcatggaagcacggggcatcaatgcctgggcacggctcaactacgaatatgatggtacgccggtgtatctggtcatgaagcactgcgacagcacgaagcttgatgaactgaacgctatcggggatgagatcgagcgcgtcttttcgaccgaagggttttacatccaccgcaacagcaacaacattgcctggttaccctgcccggtagaaaaaggactggccgtttcctggttgctggaaaaactccgtcaggagcgcggggttttcccggtgatagggctgggtgacagcctgagtgaccatcggttcatgaaactgtgcagctggtttggtctcccatgccagagccagtttgctgaggctatttcacagcatatttttggagagcaataa

SEQ ID NO: 451824 - DNA, 1080 bp, Serratia marcescens; identical to SEQ ID NO: 246272

SEQ ID NO: 451825 - DNA, 957 bp, Serratia marcescens; identical to SEQ ID NO: 246273

SEQ ID NO: 451826 - DNA, 1224 bp, Serratia marcescens
atgggattcagattcaggaagtcgataagcattattcccggcgtcaggataaacctgagcaatggagcccccagcctgagtgttggaccccggggggcgtcactgtcttttgggaagcgcgggacctatgccaatctggggttgccgggcactggactgagttatcggacccgtattgaccggatagtacgggagcgacagaacaacagagctcaggctaatccgggactgagggaagagctggagcaggaagtggaaagtctgatgtccgctataacggccatttccagtattcatgagctttccccttcacctgtgggagggaacacatgggcatcgctcgaatcacattatcttgagctccaccagaggacgttcgaccggcccgcgcctgttcgtcctgccaaacctgaatacagtcctctcccgtccgcaccagacgaacgtagcggtcgtggttttctggggggatggttcgaaaccgatgcggctcgcaccgaacgacagaatgagaaccagcgacagtggcaacagcaagtagcggacgttgaacgcgaaaacacactgcttaaacaacggtatgagaaacaacgtgtcgcctgggctgaacagtatgcaaactggcagtatgaagctcaggaacatgaaaaaaactcttctctcactgctgacgttgcacgcgagcagttccgatcggatgcccgttactttgaagattgcctggcagaggtgctctcacaaacggaatggccgcgtgaaacgcttgtgacttttgaagtcaggcctgacgaatcaatggtctggcttgatgttgatttacctgagattgaggatatgcctgataaggtatatgtcgtcaatgcaaagggaacggatatcactgaaaaaacgatgacacagaaagcggtccgggagagttatgcaagacacgtccacggttgcctgatgcgattagctgccatcgtatttcagacgcttccgtttgaacacgccgtgctttccggctttactcagcggatcagcaaacaaacgggttaccttgaagatgagtacattctttcctgcaggatagaccgccatcatatggaaaaaataaactacacgaaccttaaagatgtggaccctatcacggtgctgagtgttcaggcgttggtccgaaaaatgagcgcaactttcctgtttcaggctattgaccctattatgataactgcaggcaccagctga

SEQ ID NO: 451827 - DNA, 471 bp, Serratia marcescens
atgcaactaaatacccgacaggaacgaatttatactctggcgagcttactgggtacgggaaaacccgtttctgcggcaaaaatcatcagcattcttgactgttctgaacctaccctcagtcgtgcgctgaaggagcttcgggagtcctatgcagctgaaataaaatacagtaaagccggtcattcctatcagttagttagtcccgggcagctcgataaaaaaactttgcgccgaatgaatgaagcactcactcaaaacgctgaacagaaagcgcaggatatttcgacgaaagtggtgctggataaagatctgaagacggcagtctctttatcaatccgacgccgggtactccggaaaatagacaaactggccgaacttaccggcacgtcccgaagtgaggcggtagagactctcgctgaaatgaaggtcgaggactttattaaggtagttcagttgggctttgttgaataa

SEQ ID NO: 451828 - DNA, 552 bp, Serratia marcescens; identical to SEQ ID NO: 189469

SEQ ID NO: 451829 - DNA, 216 bp, Serratia marcescens; identical to SEQ ID NO: 181393

SEQ ID NO: 451830 - DNA, 393 bp, Serratia marcescens; identical to SEQ ID NO: 451695

SEQ ID NO: 451831 - DNA, 198 bp, Serratia marcescens; identical to SEQ ID NO: 25167

SEQ ID NO: 451832 - DNA, 1554 bp, Serratia marcescens
atgcacgaatatttaatgtttgctctggcactctctcctttgctgctgatggtatttttaatactgaaattaaaaatgcccatccattattccgtactgatctctttggtattcaccgctgcactatcggcaatattctgggaaatgcccgtacaaaatctgaaagccgcgatagggtatggcgcactgaagggactatggccgatcgtgattgtgatcctcggcgctattttcagttataacgtcatgcaggcgaccaaagcgctggatattttgcgcgatattctcgccagcattagcgaagataagcgtattcaggtgctgctgatttcatggtgttttggtggatttcttgaagccgcagcgggctatggcacggcggtcgctattccgatcggcattctcattgcgctgggattcaacccgttgaaggcggcgatttcctctctcgtggcaaatacagttcctaccgcattcggcgcggtcgggatcccggtttctattctggctgaacaggttaatctgccggtttataccttaggcggaaccattattttgcagctcgcgttgtttaatatcctgctgccgtttgtgattgtctgcattattggcggtggcctgaaagccattcgcggcgtatttctgatcacgttgatttgcggcatttccacgctgattccgcaatattttgtcgccatccatcttggcgcggaattacccgcttttgccggtagcctggtcagcctgtttgccgtggcgatggtcagtcgcctgcgcaaagggaaaaccgatccagagtggcgcattgaggtcagccatacccgcgaaaccacgccgcgctcggcaaaagtgttgttccgcgtgggctctatctatctgtttatttttgtgtttatcctgctgtgttcgccgctgttcccgacaataaaaggcgcggcgtcccaactggcttcggtgctgcatttcacgttggctgacggcaaaacgatggcactgaaagttgaatgggtgaccacaccagggatgctgattatctttgcgaccattatcggcggttttattcagggagcgtccgcacgcgggatgctggaagtatttatcaaaacgattttccagcttaaaaactctatcgtggcaattatggcgatcgtcgcgctggccacggtgatggatctcagcgggattatctccacactggcgcagtcgattgtcgatctgaccggcagctcgtacgtcttcctcgccccggtgattggcgcgctgggcacgttcgttaccggcagcgataccaactcgaacattctgtttggcaagctgcaaaccatagctgccagcaagttacatatcgatcccaactggctggcggcggccaatacctctggcgctacggggggcaaaatgatttcgccgcaaagcatcgccatcgcggtttctgccaccaaaatggacggtcaggccaatcagatcatgtctggcaccatgaaatactgctgtgcctacattgtgatccttggcctgaaagtcggtctcttttattactggtttatggcgtaa

SEQ ID NO: 451833 - DNA, 1698 bp, Serratia marcescens
atgaaacatactgataataagacctttttgacgactcttacccaattggttggccctgctcatatcctcaccgaaccgtcaaaaactgcgcgttaccgtaagggattccgctcgggtcagggtgatgctctggcggtggttatccccggctctttgcttgaactctggaaagtcctcagcgcctgcgttgaggctgataaaataatcctgatgcaggcgtcgaacacaggcctgaccgagggttcgacgccaaatggtaatgactacgaccgcgagatcgtcattatcagcacgctgcggctggacagtctgcatgtgctggatgagggcaagcaggtgctggcttatccgggcaccacgctgtactcgctggaaagggcgctgaagccgtttggccgtgagccgcattcggtgatcggctcttcgtgcatcggcgcgtcggttatcggcggtatctgtaataactcgggcggttctctggtccagcgaggcccggcttacaccgagatgtcgctgtttgcccgcattgatgaacagggacgcttgcagctggtcaatcaccttggcattgagctaggtcagacgccagagcaaatccttgcccggctggataacaatgtgattgaagccgcgctcgtcaaccatgacgggcgtcacgcgcacgatcacgactatgttagccgcgtgcgggacatcaatgccgacacgccagcacgttacaacgctgacccggatcgcctgtttgaatcctctggctgcgcgggcaagttagcggtgtttgccgtacgtctggatacctttgaagccgagaagaaccagcaggtcttttatatcggtaccaatcagactgatgtcctgactgagattcgccgccacatcctggcgaattttacaaacctgccggttgctggggagtatatgcaccgcgatatctatgatattgcagagaaatacagcaaagataccttcctgatgatcgacaaacttggcacggacaaaatgccgttcttcttcaacctgaaggggcgtaccgaggccatacttgagaaggtgaagatctttcgcccgcactttactgaccgcgcgatgcaggcttttagccatctgttcccgagccatctcccggcgcggatgaagacctggcgcgataactatgaacaccatctgatgttgaaaatgtccggcgagggtgtggccgaagcccaggcatggttaacggactattttaaatcggccgagggcgcgttctttacctgtaccgcggaagagggcagtaaggcgtttctgcatcgttttgccgccgcgggtgctgccattcgttatcaggccgttcattctgacgaggttgaggatattctcgcgctggatattgcattacgccgcaatgataccgaatggtatgagcatttaccggcggaaattgacagtcagttggtgcataaactctattacggccattttatgtgccatgtattccatcaggattatatcgttaaaaaaggcgtagatgcccacgcgttaaaagaacagatgctggaattactgcgccaacgcggagcgcaatatccggcggaacacaatgtcggccatctgtataaagcgccggaaaatttggcacgtttttatcaggaaaatgatccgaccaacactatgaacccaggtattggtaaaaccagcaaacataaaaactgggcatga

SEQ ID NO: 451834 - DNA, 720 bp, Serratia marcescens; identical to SEQ ID NO: 221896

SEQ ID NO: 451835 - DNA, 1428 bp, Serratia marcescens; identical to SEQ ID NO: 221897

SEQ ID NO: 451836 - DNA, 696 bp, Serratia marcescens; identical to SEQ ID NO: 221898

SEQ ID NO: 451837 - DNA, 438 bp, Serratia marcescens; identical to SEQ ID NO: 221899

SEQ ID NO: 451838 - DNA, 312 bp, Serratia marcescens; identical to SEQ ID NO: 221900

SEQ ID NO: 451839 - DNA, 420 bp, Serratia marcescens
atgatgtacaccgatgctatccaggcggcaaacagcctggttagcattgtccccctcctggggggcaatgcctctcgcaaggactatgaagacgcgctgacgctggttgaatacctggttgaacacgagccagatcatccgctggtggacatgctggttgcgaaaattgcccagtatgaagatgaggcggaagagttcgcagagttcaacgaccgtattgcagcgttaccaagtggcgtggccctgctgcgtgtcctgatggatcagcacaaactgactcagagtgattttgaggaagagattggtaagaaatcgctggtgagccgcatccttaacgggactcgctcactaacactagatcacatgaaagcacttgcgcggcgcttcaacattccgcccagctcattcatggacgcgtaa

SEQ ID NO: 451840 - DNA, 1203 bp, Serratia marcescens
gtggctgattttccccgcgccagtaacgggcgataccagacagaaggcctaagcgcgcgcgagttcgaacgcctattcaaccagattgagaaggataagcgaagcaagcgccgcgccgctcgccgcactctgacgccgttttcactgaagaacaaaacagccgaagatatcatctcgctgggcaagaagaaaaaaggcggtacgttcttcaccgtcgaagatctaaaggcatttgaaggtcgccgcaaggatattcgacagacgttcaattcaggcatagccgggatcacctatgcccagctcatagccggaagtgaggcgatcgacgttaaacgtgctaacaacgccgtagacgacggttccggcattaagcgcgccgtgccttcatcattgaaacataacgtcgtcacagtcagcgtggaggcttcagatcgctcagaagaccagcatcaccgcgtaaaagtgcgctttgaggaatgggattcactgattgatgagctgggggatgaaactagcgcggtaaaagtgacgaaaaagctgtgtgccggtcgcgtatccttcgattgtgattgtggtcgtcatcaatactggtatcgctacatcgcgaccgccggtaactttgccctggcaccgccaaaagaatatgccttccccaaaatccgtaaccctaatctcaaagggatcgcctgtaagcacgtgatccacgcaatgacccgactccagtcggcaagctggcaattgcggatcggtcaggccatgctgcaggccgctaaacgtgtagggttcggtgacgacaaacgacgtactactaagcatttcactgaggaagaccggaaaagattcaacaagaaccgtaactcacagactaaccagggggcgatgcgtcaggagtgggataaataccagcgccgccagaaagcgctgggtaatcagattgcgcgagacagtacaaagctacgcaccctcagcgacaaactgttaaaagcccggaaaatgacgcaaaaacaacgggcaaaggcagaagaaagtcagcaaaagcttaaagccgagcaggataaaaacaaggtgctgctgcagcagctcgccgaccgtttcaaggtggaacgccaggcgtttattgatgcgatggtaatgactggtgtatcacgtcaggatgccgagaaacgcttcctggactacgtgaaaaacaaaggcaggggttaa

SEQ ID NO: 451841 - DNA, 330 bp, Serratia marcescens; identical to SEQ ID NO: 221903

SEQ ID NO: 451842 - DNA, 660 bp, Serratia marcescens; identical to SEQ ID NO: 26688

SEQ ID NO: 451843 - DNA, 141 bp, Serratia marcescens; identical to SEQ ID NO: 187619

SEQ ID NO: 451844 - DNA, 537 bp, Serratia marcescens
atgaaaaaggtaattttcggcttgttgttaagcagttttggaacagtattctcggctttggcttcagatgctacattaaaatctgaggtaacattcgttcatgccagctgtaatctgactgatgaaagtaaaacaatgaccgtgccattggggaatgttagtcggaaggatgttgtatatgctcagtcaacttcttattttagccttaaggctacggggtgtccaccagatgggagcgctcgtattggcattcgttttgatggttcgggattaaattctaattttgggaaatatttttatttggataaggaatctacggctaagggagttgttatcgccataggtggctacttcccagctattaatgagtatacgagcataggccctggggatgaaagagtatatgttacccctaactctttaggtgaggctacgctatatttttatgctaggtattataattcttctggatatattaaggatattgttcctggcagcgctaatactaccgtgcagatcagtcttatctatatgtga

SEQ ID NO: 451845 - DNA, 681 bp, Serratia marcescens
atgttcaaattcccatcaacaccacatttgcttggtagtgattttattgatatcagaaaagacaaaataatgccacctgcagaagttaaagatatgctttcgaaagaaatcatagtcgaggaaaaaatagatggtgctaatttaggtatttcgtttaacagttatggtgatttgattttacaaaatagaggtaagataatcacatcccctctaacgggacaatggattggagttcacaaatggataaatgaaaaaatagagtctttttttgatacattaagtgatcattacataatttttggcgagtggtgctttgcaacccattctatttactatgatagtcttcctgattggtttcttggttttgatgtatttgataaaaaagaaaatgtatttattgatatcaataggagaaacgaaatatttaaaaaatgcaacatcacccctgtccctcttgtgtccataggacagttcaccatttcagaaatatatgaaatgataaccatatcagccttttcaactaacaaaagcgaaggtgtttatcttaagcaagaaaatgataggcaagttattaaaagagcaaaaattgtaagagatgattttattcaaaatatcgatgagcactggtcaaaaaagacactagtgaaaaataaagtaacctacaacaaaaatcatcattga

SEQ ID NO: 451846 - DNA, 549 bp, Serratia marcescens
atgaaaataaaaaaaccaataaattttttaatagatacgaatgttccgaaaacagctaatctagcgattgacatgtctcaagttaccgaagagaactttcaatgcgtcagtgagtgtgttgaactaattgatcaaattgtcaagtcatccactcccggtctcgtccttgatgccaataacgaaatatttgatgagtatagaggtcaattaaacatgggaggtaacccaggcatgggggatagttttatgaaatggctacatgataacagatggtcattccctgaggaagatcgggttgtaataacaaaaatcggagatagttatgaacagttccccgatcatcaaggacttatgaatttcgacttatcagatagaaaatttattgctgtatcaaatgcacacccacgaaaaccatgtatttatgaagctacagatagtaagtggtgggggtggaaaaatgcattaatggaagttggtatagaggtgaaatttattgacccgacttatatagaaaaaatatataatagaaaaatgaatggagggaactaa

SEQ ID NO: 451847 - DNA, 1395 bp, Serratia marcescens
atgtttaaaagattaagaatagaaaaatttaaggcatggagcgacaccggagacattaaaatggctccgataactttattttttggctccaatagctcaggaaaatcaagcataggtcagcttcttatgatgttgaaacaaactattgaatcgccagatcgaaaaaacccactttattctggtggaggcccagagtctgcggtagatcttggttcttatcatgaaatggtttttcaaagaaaagttgataatagtataaagtttcaatatgattgggatctagcagatgattttaaaatcaaagatcccattactagtcaagtatacagcggggatttaatatccttttcatctacaatttctttcaataaaaatcagagattagttgagctatcaggttttcaatacaatatatttcaaggtgaaagtcttagtttatctattggtatggaaaaaccttcagctacaaagccaggattcaaagccacctgcgagaactacaccctcgtcaggcaaaaagggcgggtatggtcaatcaaaggagccgtgagattttatggttttccagatgaagtcgtagcttactatcaaaacgcagcatttgtgcaagaattgaacttaaaacatgagcaattatttaggtctttatattatttgggaccattgagaaataagccgacacgcctgtacccgtggtcaggggttgaacctgaaagcgtcgggtacaatggtgagcgaactatttccgcaatactagcctctaaaaacagaagaattgggttaggttataagaaaactacaaagccatttgttgaaattatagcaacaaaactaaaagaaatgggactaattgataattttcgagtaaacccaatatcagaaaataggcaagagtatgaagttaaggtctgtaccaaaggatccgaatcttgggtggatttacccgatgtagggtttggaatatctcaaatcctgccagtattagtccaatgtttctacgctccgaaagactcggttattctaatggaacaaccagaaatacacttgcatcctagagctcaagctattcttgccgatgtcatgatcgatgtaattcggtcaaaagagaatggcgaagatcgtaatatacaacttataattgagacccattcagagcattttttacgtagacttcagcgaagaattgcagaggatgaaattgacaaaacgaaagtgtctgcttatttttccgatttttcatccgaacaaccaaagttgacatcacttattatagattcatttggtaatatacaaaactggcctgaacatttctttggtgatgatatgggtgatatttcagctcaatcaaaagcagctttaaaaaagagaatggaacaattgggaataaaaaaatga

SEQ ID NO: 451848 - DNA, 648 bp, Serratia marcescens
gtggcgattcactttgattctaatcacttgtttcacgcctactcgtttttgagaacgcaatgcactgaagccaagcaactttttgtgctgactcacaacttcacttactttaagctagtgagagactggttcactggcaccaataggaatcgagtcaaaaaaggcaacgccgagaattgcttcttttatcgcctggatgcgccacctggctcccctcgtcactccctacttgtggatgccgacgactcactcaagaactacggttccgagtaccactatatcttcaagaagctctacgaatatagggcgcacacaacactcaatcgagatgaggcgttcttgaccgccaacctcgcccgaaagcttgttgaatcgtttttcaccttcaaatatccaaggcgtcgaagcgacattagtcaattgatggaggctggcctaaaagattgcaccatcacgacaccagagcttaaagaaaaaatctaccgctttatcaataagtattcacatagcgacgttattgagataacagaggaatccgcagaaaacttggcaggcgaaagccacagcgtcatcgggaacatcttccagtggctggaagaggtggacaagaaacattacgacgagatgattcaggttgcgacggcctga

SEQ ID NO: 451849 - DNA, 525 bp, Serratia marcescens
atgcaatcatcaactgaacagacactttatgatttcaaaactggttttcatgctttagaagctaaagcgacctttgataaggctcttttctctaaggttattaaaacgcttactgcaatggctaacactttacctggggctactggttattgtgtagttggcattgcggataccagagcgagtgcaacgcgccataagaaaatttatggtacggagagtatttcatactcaacattctatgttaatggtgttgatggtgaagctatcaaataccataaagatgtagatacttattttacaactctaacgaatctggttaagaacgagccaattagtgaaagagataaggattatatttctagaaatatttcaacggtcagatattttgataagacggttatcattttcaaaattgaatcagataataaaccttcaatttatggcaaccaatactttgtaagacatggtagcaatcttgcagagattacccctgagaatttcgcatcacttttcagccgtttttaa

SEQ ID NO: 451850 - DNA, 372 bp, Serratia marcescens
atggcgcgggaaggcaaaaagacactgccgttttgttgtaagctgatggctaaagccgaaggctttacctccacgtttgatttttcaattcatgtcgcctttgcccgctcactgggtaagcgtcggcgtatgcctcctctccttcgccggcgtgcgattgatgcgcttctccaggcaatgtgtttccattacgatccgctggccaatcgcgtgcagcgctcgattaccaatatggccattgagtgcgggctggccacggaatctgccagtggcaacctgtctatctcacgggcgacccgcgcgctgcggtttatgtctgagctgggtctgatcacggggtctgaggtccaaccatgcgaaaaaccacgttaa

SEQ ID NO: 451851 - DNA, 549 bp, Serratia marcescens; identical to SEQ ID NO: 181309

SEQ ID NO: 451852 - DNA, 2988 bp, Serratia marcescens
atggcaaggaggcagattctttctctgtcggaaagagaatcattactggcattgccagatgatgagttaacgctgacccgaatggcctatttcagtgagcatgatctggcacttatcagtgctcaccgtaaacctgccagccgttttggttttgccgtccttctttgctacctgaaaaatgtcggctttgctccggataaaaaaatcccaccctctgatgcgctgctgaagcatatcgccagcaggctaaagcttaccggggatctctggcctgcttacctttccggcagggatacgacccggcgtgagcatttaaccgaactgtaccgctatcttggcgtaaaggcgttcaccggcaaaatacagcaggacggtattacgcacctgttgtcgatggcgacgcgcaccgataaaggtattctcctggccgaagagttactggtctggctccggcagaacaacgtgataattcccgcgattgatgtcgtggagcggacctgtgcggaggccatggctggcggagataaaatcgtatttcagaccctgaatgccccgttaactccggcgcaccgggatgccctggatcgtttacttgagtcatcagataatcagccttccaggctgacatggcttctgcaaccgccgggtaaaatcaatggtaagaacgtactgcaacatcttgatcggctcagcagcattgaatcgctggcattacctgaaggtatagatcgtaccattcaccagaaccggttgctgaaactggcgcgggaaggccgaaagatgagtagccgggatttgacccgattttcagcagcccgccgtcatgcgatcctggtctgcgtgctggaagaagccagagccacactgacagacgaagtgattgagctgcatgaacgaatgctgaacagccttttcaacaaagccaaaagaacacaggctgagcgccttcagcagaccggaaagctgatccagtccaaactgaggcagtacatcgatgttggtcaggcgctgtctgatgcccgcgactccggtggcgatccatggctcgcaatagaaaacatactcccgtggcctgaatttgtcgccagtctggaggaaacacgccatctcgccagaaaaaataattttgacccgctgcatattattactgagaaatacagcacattacggaaatatgccccgcgcatgttgtccgctttacagttagtcgcaaccccggcagcacaacctctggctgatgcgctggttgtgatcaaggatatgtaccggaagcagtcacgtaaagttccggcgactgcgccgcttgagtttgtccctgaaagctggcgcaaggtggtgattacacctgcgggtattgaccggcagtattatgaattttgtgcgctcagcgagcttaagggagcgttgcgctccggggacatctgggttaaaggctcacgccgctacaaaaattttgatgattacctcattcccgaaaaggactttgacaaactcacaccggcgctgccactgcccgtatctgctgattatcatgagtacattgccagccgtatgactctgcttcagtccagacttgaagaggtcaatgccatggctgcccttggtgaactgcccgatgtggaaatatccgacaagggcgtaaaagtctctccgctggataactgcgttccggcacaggtttcaccgctggcagaactggtttacagcatgctaccgcgacctaaaatcacggaaattctcgacgaggtaaactgctggacgacgtttacccgtcatttttcgcatataaaaaatgacattacccgtcccgatacccgccagctcctcaccaccattcttgcggatggcatcaatcttggcctgaccaaaatggcagaagcctgccccgggagcaccaaatcatcactcgaagatattcaggcatggtatacccgcgacgaaacctattcagccgcgcttgctgagctggtaaatgcgcagggaaaaagaccactggcggcattctggggagacggaacaacgtcatcatcagatggacagaatttcagaacaggcagctcaggccgctacgcagggcaggttaacccgaaatatgggcaagaacctggacgtcagttttatacccatatttcggatcaatacagcccgttttacacctgcataataagtcgggtcagggattcaacccatgttctcgatggtttgctgtatcacgaaagcgacctggaaatcagggagcattacaccgatacagctggtttcaccgatcatgtctttgccctgatgcatctgctaggctttgcgttctgtccacgaatcagggatctccacgacaaaaagctgtttatcaaagggaaagcagaccaatacccggcgcttcagtcactgatatcaacaaccagcctgaatctgaaagagatcgaaattcactggcgtgaagtgctgcgcctggcaacctcgataaagcagggaaccgtgacggcatccctgatgcttaaaaagcttgccagctaccccaagcaaaacggacttgccaaagcactgagggaaattggccgtattgaacgaacgctgtttatgctcgactggttccgcgatccggcacttcgtcggcgggtacaggcgggactgaataaaggagaagcccgtaacgcgctggcgcgcgcggtattcctgcaccgtctgggtgaaatcagggatcgtaaaccggaaaatcagagctaccgcgccagcggactgacgctgctgacggcagctatctcgctgtggaataccatctatatggaaagagcggtcgatgccctgaagcgtaaagggatgaagatcaacgagcgactgctatcgcatttgtccccgctaggctgggaacacatcaatcttacaggcgattatatctggaaaagcaaccggataccggcttccggtaagtttcgtcggctgcggccagctaaagtaggaaggtcaaaaaacgaccttaacgtacaataa

SEQ ID NO: 451853 - DNA, 390 bp, Serratia marcescens; identical to SEQ ID NO: 121249

SEQ ID NO: 451854 - DNA, 1152 bp, Serratia marcescens
atggcctatctcgacccgtaccaacgccccgcgccggaccgcttcgtccggcgctggctcttcatcaccgcctgtattgccgcgctcatgctgctgtggcagtttctgcccgccatcgaggcctggttcagtccgcgcgaggcagcagaacgcaccgtgatggcgcgtggcgatctggcggcggacgagaaaaccaccatcgaactgttcgaaaaatcacgcgcctcggtggtctacatcaccaccgcgcaattagtacgcgatgtctggacgcgcaacgtgttctccgtgccgcgcggcactggctcgggcttcatctgggacgacgccggccacgtcgtcaccaacttccacgtcatccagggcgcgtccgaagccaccgtcaaactggccgacggccgcgactaccaggccgcgctggtggggacgagccccgcgcacgacatcgccgtgctcaagatcggcgtcggtttcaagcgcccgccggccgtgccggtcggcaccagtgccgacctcaaggtgggtcagaaggtgtttgctatcggcaaccccttcggcctggactggacgctcaccactggtatcgtctccgcgctcgaccgctcgttgccgggagaagcgggcggcccggccatcgatcacctgatccagaccgacgccgccatcaaccccggcaattccggtggcccgctgctcgattcggctgggcggctgatcggcatcaataccgccatctacagtccgtctggcgcctcggccggcataggctttgcggtgccggtcgataccgtcatgcgcgtggtgccgcaactcataaagaccggcaagtacatccgtccggcgctgggcatcgaggtggatgagcagctcaacacgcgtctgcaggcgctgaccggcagtaagggcgtattcgtattgcgcgtgacgccgggctcggcggcgcacagggccgggctcgtcggcgtcgaggtcaccgcaggcggcatcgtgcccggcgatcgcgttatcagcatcgacggtatcgccgttgacgacgtcaccacattacaggcccggctagacgacaagaacgttggagatgttgtggtcttgttagtggagcgggccggcaagactcgcgagatgcttgtggaactacaaccgggagtttga

SEQ ID NO: 451855 - DNA, 966 bp, Serratia marcescens
atgacccgtcatcatccgagtgatccgcgcactgtgctcttgcaacaccgctggctcaaccgcctgcagaccgggctgttggtcctgaccctggtcgggatcgcagccgcagcagggagactgccatttggggaaggctgcctgtggctcgcgctgtttgccgttgcaggtgcgttgctgctggacccggtagccgcgtcggcgctgagcttgcgcctgtaccgcgtacggaccttgcacccgcaacaagcccacgagatgtgggccctgttgcgcgagctgcccgcccgtgccggtttgcccgccacgccggtgccgcactatgtgcccagtgccgtcgtcaacgccttcgccaccggatcgaagcaggaggcatcgatcgccctcaccgatggcctgctgcgcagcctgagcccacgcgagctggcgggtgtgttcgcgcacgaggtcgcgcacatcgctaatgaggatctgcgtgtcatggggctggcggattccgtcagtcgcctcacgtgcctactggcccttatgggacagatcgcgatcctgctcagcctgcccgcgctgctggttggcgcggcggaggtctattggcctggtctattgttattggccgcatcgccccaactggccctgctcgcacagctcggcttgtctcgcgtgcgtgagttcgacgctgaccgccttgcggcggaactgactggcgacccgcaggggctggcgtccgcgctggcgaaaatcgagcgggtcagccgctcctggcgtgcctggctatggccgggatggggcaatcccgagccctcctgcttgcgcacgcgtccggcaacgcaagagcgcatcgcacgcctgctgacgttggcgcctgggccagcatcagcgttgccactccgcgcgccccattttttgccggaatccgctttggcgacgcgcccaccgcgctggcgcccgagcgggctgtggcgctga

SEQ ID NO: 451856 - DNA, 498 bp, Serratia marcescens; identical to SEQ ID NO: 101361

SEQ ID NO: 451857 - DNA, 1710 bp, Serratia marcescens
atgcagggcttgctcggcactacgctaatcctgctggcggcttgcagcctggcggcgatggccacggcggcgttcagagtgcccgccttgctggggtatctctctgtcggcgttgtactgggcccctcagtcatcggcgtgatcgcgccgggggagacgctgagctttctgtccgagctgggcgtggcgctgctgttgttcatggtcggactggaattctccctcggagacttctggctcgcccgcaggacggtgctgatggcgggcgctctgcagatgatcgccgtggccccgccgctgatcctgctattgatgtggctggggcagcccggccagagcgccgcgctgctcggcactgcggcggccatgtcgtccacggcgctggtcagccgacaactggccgaccaaggcgagctcaccacccgccacggacgcagtgccatcgccgtgctggtctttcaggacctggccagcgtgcccctgctggccttgctggcgatctgggcgcgcggcgagtcgccgaagatcgagcatgtgctgcttgaagtattcggtgtgctgctgctgttcgcggcagcggccctcgtctcgcgccgtctgttgcatggcctgctgggctgggtggcgcggcggggccacgaggaatcgttcgtgctcgtctccttgtgcgtggtggtggctgccgccgctgctgcgcacgcggtcggcgtatccgccgccctgggggccttcctcgccgggatggtgctgggcgagagcgacttccggcaccacatggaaagccacctcaggccgtttcgcgatgtgttgtcgggcgtgttcttcgtgaccatcggcctgcaactggacgcagcacagattctttcggcaccgctggcggtgctggcgtggctggtggtgctggtaccggtcaagatcctgctcaatacgctggccttgcgggcgacgcgcctgtccgccctcgatgcctggcgcacgggcatagcgttggggcacggcggcgagttcgccctgctgttgttgggcacggtcttgcagcagcatctgatccccgcgaccgtcgtccaacccatgctggtcgcgctggtgctcagcatggccctggcaccgctactgatccgccatcacgatgtacttgcccggttcttgagccgcaccggcggcgtcattcagccaccccaggctgaagaagtcgagatcgccgcgcagacgacgcgatatcgagaccatgtcatcgtttgcggcgcgggcgagcttggcctgacagtcagcgagattcttcgccacgccggcgtggcgcatctgctgctggaggcggacgcgcagaaggtagaggccgcgcgtgccgccggcgcgccggtgttccatggcgatgccagtcggcccgataccttgctggctgccggcttgacgcatgcgcacttggtggtgctaacgttcgcccatgcccagcaagcgttgcgcatcgcccaggcgattgccgagcgccgtccggcgctaaccttgtgggtgtcatgcagaagtacgaccgcggccgatgcatttcgcgccatgcctaacgtgcgcgtgtatcagcaatcctttgccgcagctattgggctggcggaacaggtgatgtcgacgcttggcatgtcgaccgagttgattgaaggacacatcagcgcaatgcgccgccgtctcgacagcagccgttttccagggagttcatag

SEQ ID NO: 451858 - DNA, 441 bp, Serratia marcescens
atgaagaatgatcttcacctcgtctgcccgcattgccagtccatcaaccgcgtaccgactgcgaagctatcggaacatcccaactgtggccgctgccagcagcccttgttcacgggcgagcccatcgagttgactacggcgacgttctcgcgccacgtggagcgcagcgatctgccgctgctggtcgatttctgggcgccatggtgcgggccgtgcaagatgatggcgccacagttccagcaagcggcgcaccagctcgaaccgaggatccggctggcgaaggtgaataccgaggctgagccccacctggccgcgcagttcggtatccgcagcatcccgacgctcgccctgttccagggtgggcgggagatcgcccgtcaggccggcgcgatgggcgcgcaggacatcgtgcgctggacgtcgacgcaagtggggcgctga

SEQ ID NO: 451859 - DNA, 1146 bp, Serratia marcescens
atgcagatacaatatagctatcgagctatcgacaaagagtttcatgaaccttggcagagagctttgggaaatgtgatcgagcacgccctcaagccattgctcgacaaacacactaaagattcagcgcgacttcaaatcgtccttgatcgcgacaagatcaagcggcaatttctggccagtggctatatgcacctgcccggcaaaaagattgtcagcgttactgcatcacatgacgagctgacgcccctcgcgcagatgctcgcacagtcgttgttccgtcaggccaagaagcattttgaccgactgcatgctcaggatcaaatcaagcgcaaagcacgacgcgagcgcttgcgcgagctcaaggtgcggattgccgcaaaacccgcatcagccgcccatgaggccgaggtgacccgaatgcctctactgtcgaaacttgaggctgtcgcaaggcgtgagctggcttatctgcgggccgtcggcgatttaccgcgcgattatccgacgctgcgcgacgtggtggatgaagcgattgtccgagctaaggtggaatggcaatccgtgccgggggaaaaagaggcttacaccggtcttttgaagcatctgttcgccgtcctggataacgaagtggcaagcagccggcaatttggcgaattcgtttctctggacgcgccggtcgaaccggatgcccaagacgtggccgaggccatggtggaagaggaaatcttcgaattttatcagcacgatgacacactcaagctggccgatattttcgctggcagtcagcatcccgatgtcgcaacgatcgcggaacaggaggagctgattgatcggtcgagcgagttcgcttttgcatttgacctgctgaaggacatgccgcgtttgtggcggcgcatttttctgcttatccgtgtggacgggctgaatgccagcagcgtctctgaaatcctgctgattcctagtaaggaagatgctgtccgaaggtggctcatgcaggccgaagcattcatcgctgctcatctggaagaggccggagtaagcaaaaacgggaacgattggatccaaggcgttgattggtcggcattgtctgtgacccgaagcgaggcagcctcactgtggtccaaggaggcgaaccatgaagaatga

SEQ ID NO: 451860 - DNA, 486 bp, Serratia marcescens
atgaccatcatgttcggcgcattttccttggtcaatggcgcgttcaacttgtttgcagcggtgcgccatatccagaaaaaagagcgctggggctggctgctgttcagcggcattgtcggcatacttacgggcgtcgtcgtcctggttgctccttgggtcgccacgatagtcttggcttcttttttatgggctagcgtgggcttctgggcgattttcaccggtgtgctggagatatccgccgccgttcggctgcgtcgggaaatcaagggtgaaatctggcttgccctcagtggactgctctcgattatccttggtgctatcgtcttgtggatattttttacccgtccggtcgagtcattcgtggccgcaggctggctgttgggtttccatgcggcagtctatggcgtcacgcttttgttcttgagttggagtcttcgcaaacgcgcctggggtaagagcgtgccaaaccaaaatctatggatatga

SEQ ID NO: 451861 - DNA, 1173 bp, Serratia marcescens
atgagcgatacaaataccgctgacttatctataaagggcgagagtattcagagcctatatagttattacctgtctaaaacattcttagttaatagaagatatcaaagaaaacttgtttggacgattgatgaaaaaaggtcttttattgattcaataatgaaaggctatccagttcctttggttctgcttgctgaaaaaaatgaagctgcgggcaggaagttggaaataattgatggcatgcaaaggttgaatgctttgatgtcgtttatcgaacaggaatttgatgttaatggttcctacttcgacttggatacaatggcagataccaaacttttaaaagatgaagagaaaatagaacaaaaagaacctttgttgagtcgagagttatgtgcccgtatcgttcgttatcaagtcccattatcagttttccttcaaactggtaatagccatgtggatgaggtttttagaaggcttaattccaatggtcgacatttatcgaagcaagagttgcgtcaggccggttcattaagtaattttgcttcaatcgtcaggaaattatcaagcaatattcgtggcgattctagtgcttcagatgttttaaatttaaatgctatgaaagaaattagcattactaataaatcattagactatggagtaaatgttgatgatattttttgggtcaaaaacaatataatcactaaagattatttgcgtgagtcacgcgatgaagaaattctcgcagatatagtggcatggatatctataggtaagggggttcgttctagttcagacatacttgaccaattgtatgggtttacagacgatactttatcgactaaagaaagctcattagcttctcagattgaactggaaattcagaagaaaggcgatgaagaaatcctcgctaatgtccaatttgtattggatgaattaattggcgttttaataaaagctaataaaacatttaacgctttgttatttgaacgtcagcaaccaaaaattgcacgttatttccagattgtattcctagcattctatcaattgcttattgaagaaaacaaagaaatatgtgaccttgtcgggttgatcaaaaaaatggataaggccggggataaagtgatcaacttatccgctgggggcggtaattggtcagctaaggagaggctttgttga

SEQ ID NO: 451862 - DNA, 141 bp, Serratia marcescens; identical to SEQ ID NO: 131154

SEQ ID NO: 451863 - DNA, 1524 bp, Serratia marcescens
atgaacgacaaaatcagccaggacacgatcaacaaagccctgtgggccgcgtgtgatacgttccgtggcaccatcagtgctgatacctataaagactttatccttaccatgctgtttctcaagtacatttcagatgtctggcaggatcactatgacgaatacaaagaacagtatggcgatgcgccggaactgattgaagcgatgatggccaacgagcgttttgtactgccaaaaagtgccagcttttatgcgctgtacgaacgccgccatgagccgggtaacggtgagcgtatcgatcaggctctgcatgcaatcgaagaagccaacggaaccaaactgaaagatgccgggaaaagcgtgttccaggatatttcgtttaacaccgatcgtcttggcgaagaaaaacagaaaaacaccatcctgcgtcagctactggaagacttcgccggtgaagatctcaacctgaagccgagtcgtgtcggtacgctggacgttatcggcaatgcttacgaatacctgatcaaaaactttgccgccagcggtgggcagaaagccggggagttctataccccgccggaagtttcggacctgattgcagaactgctcgatccgcaaccgggtgataccatctgcgatccagcctgtggttccggttcattattgatgaagtgtgggcgtaaaattgtctccgggcatgatagtcgtaactatgcattgttcggtcaggaagcgatcggttctacgtggtcgctggcgaaaatgaatatgttcctgcacggggaagacaaccataaaatcgagtggggcgataccattcgtaacccgaagctgctcgataaaaatggcgacctgatgctgtttgatatcgtgaccgctaacccaccgttcagcctcgataagtggggccatgacgaggccgagaacgataagtttggccgttttcgtcgcggtgtaccgccgaagactaaaggagattacgcttttatctcgcatatgatcgaaaccctgaaaccgggaactggccgtatgggcgtagttgtgccacacggtgtgcttttccgtggctccagcgaaggtaaaattcgccagaaactgatcgacgaaaatttgctggatgcggtaattggtctgccggaaaaactgttctacggtacggggattccggctgcgattctgattttcaaaaagcagaaagttgatgacaaggtgctgtttatcgatgccagccgtgaattcaaggcaggtaaaaaccagaaccagcttagcgaagaaaacattaagaaaatcgtcaagacctaccgtgatggcgataacgtcgagaaatacgcctatcttgccagcctgaaggaaattcaggacaacgattacaacctcaatattccgcgctatgtcgatacctttgaagaagaggatgagattgacctggtggcggtgcgagcagagcgtgagcaactgaaggtggaactggcaaagctggaagttgagatggcgggttatctgaaggagttgggttatggtgcctaa

SEQ ID NO: 451864 - DNA, 1242 bp, Serratia marcescens; identical to SEQ ID NO: 194223

SEQ ID NO: 451865 - DNA, 684 bp, Serratia marcescens
atgaaactgacgaaaagtggtccactgactgaccgggaaatcgactggctggaagaggtgttgatgaaatacggcaatgatgactctgtgctctgtttctctgagctggatggctttctgacggcgattgtctctggcccgaatacgatttcccctaatacctggctcagtgctatctgggggcgaggtgattaccaccctcgctggaccactgaaaaagagatgacgcgttttgtggggctgtgttttcagcatatgaacgatatcgctggctgcctgtatgaggcccctgaacagtttgaaccgattttcaatagacgtgaggtgaaggggaagacatatacaatcgtcgaagagtggtgtttcgggtatatgaaaggccggtctctggatgactggtcagccttgccagaggccttacgtccctcgctggaggcgatagcccttcatggtatcgaaaagaacttcccagtggttgagaaaatgtcacctgttcaatttgaacagagtattactctcattcagcctgcggcactggcgctttatcagcactggttgtcggtgagaatgtcagaggcatcatcccggcctgttcccgtgaagggggcagaaaaactgcccggtcgtaatgacccgtgtcagtgtggcagcggtaaaaaatttaaaaagtgctgcctgcactga

SEQ ID NO: 451866 - DNA, 357 bp, Serratia marcescens; identical to SEQ ID NO: 120046

SEQ ID NO: 451867 - DNA, 141 bp, Serratia marcescens; identical to SEQ ID NO: 36145

SEQ ID NO: 451868 - DNA, 1074 bp, Serratia marcescens; identical to SEQ ID NO: 101378

SEQ ID NO: 451869 - DNA, 510 bp, Serratia marcescens
atgactctgcatggaaggtttgtcatcaacgatgcgcatgactcgccgttatcgtttgctggggccggaacatttttagcgttttctggcgatggtatttatcgcaatcgaggggcttgtgacatgaagccgaccgcaggcccggttccggcgggtaaatactggattgttaatcgtcctgaaggtggactccgatcgcacgttaatgccggtgttcgggatcgttacaaccaggtcatgaatggtgcgacgttcaggcataggcgggatgattggggaatcgacgatgacacatggaatgagggggttaaacgcggtaacttccgtttgcatcctggcgcgctatcaaaagagggtatcactctgctacatgcttcagattttgccatgttgcacaatgcgttactaaaaacaccgcaggtggatgttccttgtatgagtaaactcaaggcatacggcacaattgaggtgatcttgaccctccatctccggacagcttttgtatcttaa

SEQ ID NO: 451870 - DNA, 132 bp, Serratia marcescens
atgatgatctcatatcaggaacttgttcgcaccttccctaacataagagacgatttctgctacggagaaaatcatctgacgggtgttgctctgctgacgtttttcaccattaacttccagccagatatctaa

SEQ ID NO: 451871 - DNA, 1182 bp, Serratia marcescens; identical to SEQ ID NO: 194226

SEQ ID NO: 451872 - DNA, 1128 bp, Serratia marcescens; identical to SEQ ID NO: 194225

SEQ ID NO: 451873 - DNA, 270 bp, Serratia marcescens
atgaaacttctcggtaaaagaaagagtaaatcaggagaagtatcaaatgttgtagccagggtgctcaatgatacaaatgtcgggctggaacgttttaatgaaggcatgcactggttcaagttaaaatatgaaagtgaccctgaaaaaagaaaaacacttaatgctttaattgaaagtatggaaaaagatatcaggattatagaatcccagaaagatgaaattaaaatggcgatagagatagatattgcccgcaagaggattaatgaataa

SEQ ID NO: 451874 - DNA, 732 bp, Serratia marcescens
atgaaaacgttacgcattgtttatggtgatgaggtcatcaccgtacagtgtgttccgcgtcaggtcgtaaagggcagggtgctcatcaaggtttatccggactgccgggttgtggcctctgtaccgcctgaaacaccggagcacgaggtattgtctgcgctgaaaaaacgtgggcgctggatctatcagcaactgcgtgatttcagggagcagcagacacacattgttccgcgtcagtatgtcagcggagaaagccattactatcttggcaagcaatatcagttgaaagtgacagaagacgctacggagccgcaacgagtgaaaatgttgcgtgggcgactggaagtgtcggtcaggcacaaatcggcagaaaaagttaaagcgttgctggccgaatggtatcgggaacgcgccagagatgtctttcaacgcaggcttgatttactgataccgcagaccctttggattaatgagcgtccgccgatacgtctgcgggcgatgcaaacgcaatggggtaactgctctgcaaaaggctgtctgactctgaatccatggctggtgaaagcgtcctcagaatgtatcgactatgtattgctacatgagttatgccatgtggctgagcacaaccacagcgaagagttttaccgtctgatggggcaggtcatgccggggtgggaaaaggtaaagaagcgactggatgggatggcggcgatgttgttgactgatatgtga

SEQ ID NO: 451875 - DNA, 384 bp, Serratia marcescens
ttgaaacagtatctcttgttccgtgaatttgcggaaaaagtggaagcccgtaaactcagcgatattccggaggcactggcggtaaacaagcatgctcaggcgtattacggtgtatttaaaaaagagctacctgaggtttttgcggtaaacgacgatcaggtgcaggagaagtggacgaagctggcctttgaagtggacagcattatcgtcaaagcggtggcagaaaactccctgaacccacaggatattgaaaaagccgttaagacaagtcttttgccgctgctgtttacggcctgccgggagatgggtgccggaatgaatcaggtaaaccgtatcgtggaaaccatcatccagatcctgcgtgttggtttgatgaaatcatga

SEQ ID NO: 451876 - DNA, 267 bp, Serratia marcescens
atgccggtcctcactgatgaagaagtgaacaccgaacgggaatcgtgccggcagcttggagctatcggccggaacctcaaccaggtggccagggccttgaacatcgagttcagggaaagtgacaagctcaagcaagaggccatcgaaaaactggccgaacggatcgaccagcatttggaccatgtgtctgagctgttcgataagacctggagccggtggcacgattgtcattttcagaagacgactgcaccagttgattgggcgtaa

SEQ ID NO: 451877 - DNA, 1092 bp, Serratia marcescens
atgaatggcggtattacatcgaataatagtattacactaacgaatgccagtactgatactgcatttactaccaatggtgctaaattcagagcaactccaagtggtgtcgcagttatatccacaacctcatcaattttcctacgtccaaaaggggatactgattcgactgtacaaatacagtataaatctgatggttcaataacctgtgaaggtagttcattgtcagtatctggtgtattaaatgccaattcattgaacttaacaaatgcattagcagtgaatcaaggcggtacaggagcaactacagcagcagcagcgagaactaacttaggtcttgcatatggtaatactgctggaacagtagcacaaggtgatgattggaggcttaattcaatatctcaaaaaaccggtggaatgatgaatggggcgttgggtgtttcgaatggttcaacaggaattactctcgcaactcaaggtacttggctactatggaatgaagaatctggtaaaggttctgggtcactcgtagttaacggtggtggtggtactgaaggtattttcagagtgcgtttagttaatgcggcaaataccgtggagtattcacgctttgagtttagacgtgacagtactttatttgcttcggaaggtttacgctgtgtagctggacgtgtaagagcatttgcctcagtagctccaacatatgtgactatagatgttgatggtcttaataaaggtattaatttctttgattctgaccaacgattaaaagaaaatattttacccgttcaagaaggaaaagcactttcacagcttaaattgataaatcctgtttcatataaatttaaagatacccattggacagatatgaatgatgttcaacatacaatgatgggtaaatcttactcatatggtgttattgcacaagaaattattgatgttattccagatgcagtcaacgtaatggaagatgaacgaggaagtatgtcattagatccattagcaatgattggattcttactgtcagtaaccaaagacctttcggctcaaattgatgccatgaaaacctctattgaagaactaatgaataaataa

SEQ ID NO: 451878 - DNA, 1287 bp, Serratia marcescens
atggagcttattgccggagccactcatgaacacttcaggatagtggtgccctattcggcaagacaggtttcagcctcactttctgtggcgggtttcagcgggcgtgagtttattgcaaagcggattcctgtaagttttcaggttcctcctcttatttcggcaggatggcaggaagcgttaaggcagtactggaaagaaacagtaaatgaggatgcagggatagcgtgccgggaagcaacggtgttgcttgagcgctggaaaccctctgagtatcctcgtatcacaccgcgattaatgaagaagtttgttaatgatattcatattctgaaccttaccgttcctgcaacagaagatcatcgccatattcttattgctctctacttactggtggtcagatacggggagcgagatattaaagtattacttcgcgatcccaaagctagtcagaccgaacccggtattgctccggatgattttgacgagatgctctcgctaacttatcaacaaatatcccgaatttttaataacgatacagaaagatggagcgaatttctgatgagcatccactatcagtccacggtggagcttgccaggagcgagttgcttgatacgcctcttaaagacgcgattggtgctataaatatcccacggcttgaagaactgacggccttgtggggtttcgctgaagcatggcagcgagtggcaccacatattcagatgcgagactggctggtttcttatagccggatggatgagaagtgtcaggctctcgccgaaccgcaactcaaagtcgcagtgcaaatgctgaatcagagttatgctgtttcactcagagaaaagaatgatgaaggtttcgtattgagtctgcagaaactgatggctgacgggcggataagcctagagcctttcgtcgaaaggcaaatatcgtttattgtgagtaaacttgatgaaattcaggattcagaaaaattggaggctgaatccacgaagacgttgctgcaggaagctgattcatactctgttctggccggtgaatcactactgaataaaatggagaattttgtagatggcgtattttatgtggaataccttgtcaataatgaagagaccttgtcaaacctgaaaattggcacactagatatcggaaatcacggtcgggaggagatgttacgctatggagctgagcaacctcagatagacctttttaatccgggaattatccggcatatcaatattgcatcgaaggcggtacagaacgtaattggaaagaatgatgggctttgttga

SEQ ID NO: 451879 - DNA, 264 bp, Serratia marcescens; identical to SEQ ID NO: 451762

SEQ ID NO: 451880 - DNA, 141 bp, Serratia marcescens; identical to SEQ ID NO: 131154

SEQ ID NO: 451881 - DNA, 282 bp, Serratia marcescens
atgtccaaacttgatctaattactgcatgtggactggtcaaactgctttttctcgagttaccagaacatctagtactggtaaatgagatactacgattcttgcaagacaacaatttagaacttaccgaagatattgatcaattcaatagtgtgttttggcttgcattattcacgctttatgatgtgaaaatactaaatacagatgatgaaagtacaattgcttttgtgttccaaaatgaaaggattggaattgcattaggtaacgtattttattcgatttaa

SEQ ID NO: 451882 - DNA, 510 bp, Serratia marcescens; identical to SEQ ID NO: 145444

SEQ ID NO: 451883 - DNA, 690 bp, Serratia marcescens
atgcgttttgtacagcccagaactgaatctcagcaggcaatgcgtgcgctgcatcgtgtccgtgaatccttggttcaggataaggtaaaaacaaccaatcagatgcatgcttttctgctggaatttggcatcagcgttccacgaggagctgccgttattagccgactgagtacccttcttgaggacaatagtttgcctctatacctcagccagttattgctgaaattacaacagcattatcactatcttgttgagcagattaaagatttggaatcccagttgaaacgaaagttggacgaagatgagattggacagcgcttgctgagcattccctgcgtcggaacactgacagcgagtactatttcaactgagattggcgacgggaagcagtacgccagcagtcgtgactttgcggcggcaacagggctagtgcctcgacagtacagcacgggaggtcggacgacattgctgggaattagtaagcgaggtaacaaaaagatccgaactttgttggttcaatgtgccagggtattcatacaaaaactggaacaccagtctggcaaattggccgattgggtcagggatctactgtgtaggaaaagcaactttgtcgtcacttgtgctctggcaaacaagctggccagaatagcctgggccctaacggcacgacagcaaacttatgtagcataa

SEQ ID NO: 451884 - DNA, 474 bp, Serratia marcescens
atgtataaccatctgctctacggtatcgccgtcacggagtttgtcgatggcaagaaggtcaaccccaccattgcgctgatcgactgggaacatccggaaaataaccagttccattttactgaagaatttacggtattgcggtcaggtggtgttgaaacccggaggccagatattgtctgctttgttaatggtatcccgctggctgttattgaagcgaaaagcccggctggtcatggcaagaaagggccaaccattgacgaggggatatcccagagtatccgcaaccagttcaacgatgaaatcccgcagctgtttgtctacagccagttattactttcgattaacggtcatgacgggcgctacggtacatgccatacgccaatgaaattctgggcggcatggcgcgaagaagatattaccgatccgcagatgtatgcgctgcgcaaccatcagttatcgactgaaggacgatga

SEQ ID NO: 451885 - DNA, 213 bp, Serratia marcescens
  misc_feature (198)..(207): n is a, c, g, or t
gtggataagcactaccaacctaaattccaggaagaatacagcgccaaaattccggcactgacgttactgaccagcctcggctggacgtttttatctccgaaacagattatggattaccggggctataaacaggatgaggtggtgctgcgtccggttctgcgtgaagagctgtcgaagcgttcctttatggcggggggnnnnnnnnnncaatga

SEQ ID NO: 451886 - DNA, 264 bp, Serratia marcescens; identical to SEQ ID NO: 451762

SEQ ID NO: 451887 - DNA, 294 bp, Serratia marcescens; identical to SEQ ID NO: 77242

SEQ ID NO: 451888 - DNA, 258 bp, Serratia marcescens
atggcgacgctggggcgtcttatgagcctgctgtcaccctttgacgtggtgatatggatgacggatggctggccgctgtatgaatcccgcctgaagggaaagctgcacgtaatcagcaagcgatatacgcagcgaattgagcggcataacctgaatctgaggcagcggctgggacggaagtcgctgtcgctcacaaaatcggtggagctgcatgacaaagtcatcgggcattatctgaacataaaacactatcaataa

SEQ ID NO: 451889 - DNA, 474 bp, Serratia marcescens; identical to SEQ ID NO: 451884

SEQ ID NO: 451890 - DNA, 1092 bp, Serratia marcescens
atgcggaagtattacagcatcattaccaatcggggggccgagcgaatagcgcaagccatcgccaccggcgaaaaggtcaatatcgccgcaatggccgtgggtgatggccatggggaactacccaccccatcaccggagcaatccgccttagtgggtgagcaataccgcgcaccactgaacaatctcaagatttaccctgggggcaacaataccgtcatggccgaaatggtgatcccggccgagattggtggtttttgggtgcgcgaggcggctctttactcagccgatggcgaaatactggcggtgggcaatgtgccggaaacctacaagccgcaattggctgagggctctggccgcgtgcaaaccattcgcatggtgctcaccgtatccagtacggaacacatcgaactcctgatcgacccatccatcgttctcgcgacagtgcagtacgttgatgaggctgtccagatcgcactgaacgcagccgccgatgcattggcgactgcaggggaaaaagtgactttcgatgaaatgcaccctattggcagcgtgagattctttgccaccgttctcgacccaaatgaaaaatggccaggaacacattgggtttataccggtgaaaataaatcgatccgcatcggaaaaaaagacggcaccgatgtgctgagtgaaggcggttcggacacggcaacgttgacagtagagaatatgccgaagcacagccacggcgtaagcggtaatgtgggggagtttgaccatggaaataaaggggtaagtgagtttgatcacggtacaaagataacatcagaaagcggtgatcacacacatcaaggcgggatgggcgcgccaggtgctgtatgggatggtgattatattgtcggttctgacaatgataatcatcgcacgaggaattggacaagtggcaacggaaatcacactcacacggttgatattggtgctcacagccacacggttgaaataggcaagcacggccacaccgttgatataacctctgccgaagtgggtggaggagaggccattagtattattgagaatcacatcaaacttatgtgctggtatcgtgccgcataa

SEQ ID NO: 451891 - DNA, 2109 bp, Serratia marcescens
atgactaatttaaacgagcgctctcagtgggagccggccattaaacaaattgacgacgctgaccgggtaaagggtgggccttcgggtgctgccaacgtccaggcaggccaattggcggcgcgcacccattttttgaagaacctgctggataccctgctgggaatgtcttctttgggggagggcccatacaaagatgtacatgccgcacagactgacattaacagcggcaagctgaaacccgacgaggtgtttagcgtacgctcggcagatccgggggtttgggttgaagagtataaaaacagtgacggtgttgcgacacccacagggaaagtgcttaaaagcggcgaagccattgatgcactggtcaacattatccgtaactcagaaacggacgatgacattattctaaaaattaaagacaagtataattttgtctttggttatctgactgaaaagctatttaaaacgccgggttttgaaatcgggacagaaatactgaaagcctgcggcatccagatcacccgaagcgagaacggcaagtttcagttgcgggataccaataatttcattctgttcgaatttggtgacggtggccttcgcctgcccaatatttcattttcattgaacggagacggatgtttccgggttaaggacaaatacgggtttgttttctttgagctggattcaaaagggaatttccgttttccgcagaccagtgacgaaaagaaaaaagccagcaccgatattgtgacccgcttaaacagcaagaacctgctggcatcaatcaacgctagcgccccctgcaatatcgctgtgcaacgtccgacggcggatatcaatctgatcgttgtactcggtcaatcatttagcaccggcacgcgctctcagattgccctgcctgccgagtttgattatgtgggcaatctgtcgctgggggcatcccctcgcggcggcaatctcagcggtacggcagaaacctatgaccctatcggtggcaacagcttcgtgccactgcgtgaagtctcgcagggaacggacggggtaattaacttgaccgggccgtatggtgagacaatttcctccggcctgctgaacacactgaaaatgctgcacaacgatgaccaatgggcggttaacgacgagggtaagcaatttgccatcgtctgcgccggtgtcggcggcaagaatctggcgcagttgtcaaagggggctactcctaacctgtatggtcgctttctaaccgccatacagggcgcgaaggcggctgcagacgcgatgggaaaaactatcgtatgctgcggcgttgtgtttatgcagggggagaatagcggcggtaccgcgtatgacgtgtattacggccagatggaaaaatatagcagtgatgtgaccggtgatattatggaaacctttgggccactccagcagttgccaccgagttggaccaactaccagatgggtggattttacgcgaccgacggccaaaatctggcgatcgggcgggtgcatgtcgactttgtggaaaaaacacccggtgccttatttggtggccccgtattcccttaccccgacccagaagaccacatgtacgccaattcttaccgctggtttggctgccagcttggcaaagtgatttaccgcggcttccgctacaagccgatggtgttccgtatgaccagcgccatatataacagcaaccgtatgttggtcagcattccctgcccggttccaccgctgcgcttcggtatgccttatgacaagtcagcggcgcaggattatcacgacaaaggctttctgattaaggatgaggtcggcgacctggtcggcgaagatcttaccgtgactatcgttgctgatacggtcatacagataacagccagccgtgattttgtcggcacggtacgcgtcaccctgggtgataagaaataccacaacgggaaccacagcattattgatagcgatccgcaattagcccgctattcgtggatatataccggccagaacggccaacccgccggggaaaatattcccgcactcaacaacaagccctacccgctctacaactgggcggcatcatattcactgatcgcagtaaaagaggattcactatga

SEQ ID NO: 451892 - DNA, 1143 bp, Serratia marcescens
atggataacaattttgcaaagtttttatcagagcaattatatcctgacttgaaaactttcatcccctttttggccaagaaactttcatcccctgtaaaaaaagcaaacgcaatgaggtttaaaacgccagaaagcttgattagcgcaataaaatcaggcgcgataaaaaatggcacttatatatcattagagtgtaaaccttcacaatttggctcttatttaagaaacctatttctttatccaataatcggtagagagtccactatgaggcttggaccaccattaacacaccctgaccctatcattaatatgatttcgaatacaacatcttactggaaacctgtaggactgtatccaccaataaactctgagatatctcaaatttcattatatccatcagacgcacaagtgtgtggagtaatggggatggttactggtgtgaatgagattataacgtcaataccggccatcgcgaaccaaaacaaactaggattatgcggagtcccatcagtagcactaggaattgttaggatggttacacaatctatgtttttggaaaaaggttttcctcttgagctgtatgaggaaaatagagcgtctggaaatatttggtatctagatctatacaccgaaggtacagaaataaaatcattattcgatgggaccattactgaaatgtgggccgggttatacgcttctggtcatttggagtatgaaggggatcttgatggtatgcagattatagagtcaatatcagcatgtttcgagagtaatggattcccccctgaacacacaataaaccaagccgggaggcatgagatactcatatactctcatggactcagagtggttttagatccggaaacatcgtcattctcaatccatatggacgctgaaataaacattgaatataaaaacagcagactaaggttcgataaaatatgtaaggagattcttgaattgatgcttgaagtggctaaaaacaaaggcattgaaataatgaaccctatggatttagactttagttacacagactctgcaaagtctttcaagatattatcctctatcgctgcagaaatgataagcgatcccgtagctatcgctatcagggactggcatagacttaagaataaaaacaaatag

SEQ ID NO: 451893 - DNA, 549 bp, Serratia marcescens
atggcagggtctataggtaggagagttaattcagcattaacagaattaattaggaaagattacgaatcatcactgattcattattttcccgctttagacaacacggcaagtaaacgatacccaaaccttggcgttggtgacagaataagagagttcataaagaaagaggaggcattaattagcttccttgcagtgggggaaataatatcaggaaatgttgtcaatggagtaacatttccacaagcaatgtataagtttggaaggacatatattatgcacgaaggtgaattaagtgaaagaataaaaataaacgaaaaaggatggttgtttattgggcatgatatctgggagttgccatatcagtatttatgggggatgtgttttgctgtaatcctcgcagaggaaaacaaagatgagaaagcggaaaacaatttaaccataacgatacactcacatgaatttgaacttaacagcctgtggggaaaaagaaatgaaacactggagtttctagccgataaacttaacttccacgcaataagaagcatataa

SEQ ID NO: 451894 - DNA, 234 bp, Serratia marcescens
atggcacgccgtggcgacgaggcttgggcttttggactggccagaaaaagagaaccaaccggcagatggattattacggttgcagattttttgagggagttgcaagaagtcggctttgattggtcaccgggtcaggcgaacgaatacataaaattttaccagcctacctggcgcctccaggttgaaggcgattatgggcttaacacctactacaaatacaatatgaaccagtga

SEQ ID NO: 451895 - DNA, 126 bp, Serratia marcescens
atgaaccagtgggaggtgcaaagctatacattcaaaatgaatggaaatgattgtgacaaatatggcgatctgaatgacggtgaaaatgataaatttttgaccgaacacatgagccagtacccatag

SEQ ID NO: 451896 - DNA, 237 bp, Serratia marcescens
atgagagatccacaatttaacgttcgcatgccgcaggagttgaaagataagattgcggcgttggcggaaaggaataagcgctcgatgaatgctgagattgttgcagccattgaggctgcaatagaagaaagccagcaagggatgggcgtcaagcgtccaggcattggtctccctccctacgaggagatcatgaagaagctggaaagcatagagaagaagatagacaagcccgcataa

SEQ ID NO: 451897 - DNA, 936 bp, Serratia marcescens
atgaacagtatatcaattcttgaggcagttaacacttcatccgtccagttccatgggcaacctatcatcacggccatggtcgccggggtggcttatgtggcgatgaagcctatcgtagaaaaccttgacctagattgggcgacacaacttagaaagctgaaatccaacgatggtcatatgacaacacttggttgcgaaagggatggtcatatgactacaccttctaagtttgggtgtggagatatatccatccctacaaaaggcggcatccagaagatgctctgcatcccactgaagaagctcaacggctggctgttcagcatcaacccatcaaaggtacgcgcagacatccgagacaagctgattgcctatcaggaggagtgcttcaccgttctgcacgattactggacgaaaggcgccgccgttcgtaggtcaggaacaactgtcgatgagagaacgccactgcgcgatgcagtaaacatgctcgtcagcaagaagcacctgatgtacccggaagcttacgccatcatccatcagcgcttcgccgtagagagcatagaggacttaacgccagagcagatcccgcaggctatcgagtacgttcaccgcgtcgtgcttgatggcgaatatctgggaaaacaaatagagctacagatgccagccagacaattcgacgatagcgaactctaccaactggtttgtctctggagcgtggctctattgataagacaggatacccagaagataactgaggcactggcacctcttggacttccaatagcagttaaggtgaatgcgaacgctaacgatctggatgggtttatacgcagcgccggcttgctgctactgcgtgagagcagtcatatagccaaacaggttagcccaccgctgaactggagacttgagataacgcgtatgcagtcagcacttcactga

SEQ ID NO: 451898 - DNA, 936 bp, Serratia marcescens
atgagcacaaatctttcttacgcgctgttgcccgaaatggccgttttcgttcaggtggtagagagcggcagcttttccgccgccgcccgcaagctggatacttcgccttccgccgtcagccgcagcgtggcaaggctcgaacaggcgctggcgctgcagctgttgcaccgcaccacccgcaaactgcggctgagcgaaagcggcgaagaggcgtatgcgcactgccgcaccctgttgtcagccgccgatgcggttatggcgatcggcgggcgcggcgccgcggagcccgaaggattggtcagcgtcagcgtgcccaaggcggtggggcgcttcgtgctgcatccgcacatgccggagttcctgcgccgctacccgaaggtggacgtgcggctgcggctggaagatcgctacatggatctgatcgacgatcgggtcgatctggcgctgcgcattaccgatcgcccatcgcccgggttgatcggccgccagttgatgagaatagaccatctgctgtgcgccacgccgcactacctggcgcagcacggcacgccgcagcacccgcacgatctggcggcgcacagctgcatctatctgggtgaaacgccgagcgacgcgcaatggaagttccgccgcagcggcaaaacggtgacggtcaacgtgcgcggccgctacgccgccaaccacaccggcgttcggctggacgcggtgaaacagcatatcggcatcggcagcctgccgtattttaccgcccgccaggcgctcgacgacggcgagatcgtgcaggtgttgccggaatgggatttcctcagcagctatcacggcggcctgtggttgctttacgcgcctaaccagtatctgccgcccaaactgcgggtgtttatcgactatctcgtcgcctgcctggcgcaggagccgcagctaaagcgccttgcgtag

SEQ ID NO: 451899 - DNA, 807 bp, Serratia marcescens
atggctattgatttagtaatgggtgattctattttttccaccggggtttccattgatgtaccggtcagtgatggattggtgtcatttggtctcggcggcgatatgttaggcattaaccttgttgaaggaggcgtgcagccaacaattgtcggaagccctctacgcatggatgctaaatcttctaagttgggtaattttggttaccttgaccttaatattaaggaaacagagaatttcacctatattagtgtgaataaaatttggactccaacaggcctgagcgcgtgcaatctgatcggtacattccagaccacatcggcaaccggtgtaactgtcgctggctcaggtctgatcatggaagctaatggctaccgcacagctgttgcatccgtttatgatggtacgccgaccggagcgacagttatctctgataatatctccgtaaccaacggcaccagcccgccgccggcaactgaagatgcagcaacgtggcgattccttgccgccatctatgacggtaacggggattttggctctggggagacagcgagcaaacgtcggtacatcatcgataagacagttggtatcaccctgaaccgacgcaatgcggatttgacaatggttcgagatttgcgcggaaaagatactatccgggtaggaaacatgggcagccggttaactcaaaccagtaccacgatcatgggtgcctatgctgtctacaaccgtgcgctaactgctgctgagtttgatttgatgtacaaacgaatgcatgaaatcgcggccgcgaacggctggaatgcgatctaa

SEQ ID NO: 451900 - DNA, 1029 bp, Serratia marcescens
atggctgaaatttcattccccacatcttgtgctcctgcggatattttttatttttgctcttcaattgaagggctatttaacgaggatgttataaatatagacttttctcgaatgggaagaatagaacctttctcgatgatatatgtagctaagcatattagagattttaacagaaaacgcattcgacatgatgagtcgtatagagtgacttgcactggccatactgagaaggactatgccgctaacatggcattctttagagcgtttggtttaaagcatggcagagagccagggtgtacagacggtaattctaattttgttccttttaccattttaagagtgcagactatattagatgaggcagcgagtgcgtatgttcaagaacaggaaattgttgagaaaagagctgctgttcttgcggccatactttctcggcaaaccgagggtgaccttgtggatgcactcaccttttcaatccgggaggtaatgagaaatgtaattgaacatagtgattctaaagcaatcgagtactgcgcacagtattggccttcctataacaaggttgaaataacaatttctgataatggtatgggtatgaggcagtcgctttcgcgaaaccccttcatttccgcaggaagtgacgccgaagctattcaattagctctaatgccatctatatctggtaaaaattttaaaggggcaagaattgacagggataatccttggcacaactctggatttggcctctatatgataagcagaatctgtaagttgggcggtagttttttaatttgttcgggagaccatgcgattcacctagatgattcggggaaacatcatatggaattgggtcattaccatgaaggaactgttgtcaggatggttttgaacacaagtaaacttggggcgctttcctcaatgctggctcaattcagagatgaaggatacaaaattgcggccgaaataaaaacacaaggtatttacacagcttcggcggcatcacaaatgttatctcgtgattttaagtaa

SEQ ID NO: 451901 - DNA, 189 bp, Serratia marcescens
atgcgtaaatattgcgaagaacaacagataagtattagcgaactagtaaagcttgccgcagacatcgttacagcggcagaaaatagtgtaagtcacctcggtttacccccggacaacgtgactttagtgttagaaattgcgtcaaatgctgcgcaggcaaaaatgcagcactgtatttatcgcaactag

SEQ ID NO: 451902 - DNA, 585 bp, Serratia marcescens
atgaattcatccaatgccaacttcccccagccttcgtccgtgcgtctgagtctgccggttgaaggcatgacctgcgcctcctgcgtcggtcgcgtcgagcgggccttgacggcggttcccggcgtgcaggcggcaacggtcaatctcgccaccgaacgcgccgatatcacgtttaccggccaggcgaatccgcaggcggcagcccgcgccatcgaaggcgccggctataccgtgcgagaagaaaccactgagctggcgatcgaaaatatgacctgcgcctcctgtgtcgggcgggtggagaaagcgttgagccaggtcgccggcgttaccgaagccaatgtcaatctggcgaccgaacgcgcgcgggtgcgctatctggccggcaccgtatccctggaagacctcgccgccgccgtcacccgcgccggttatacgcctcgccgcctgacggcggatagccccagcgcggacgaccaggccgccgaacggcgcgaaaatgagtcacgcgcgttgcggcgccgtcctgttcaccctgccggtattcctgttggaaatgggatcgcacctcattcccgccatacatga

SEQ ID NO: 451903 - DNA, 153 bp, Serratia marcescens
atgcgcccggttgacgctggcatgtgcacgtttgaggcgctcaaggatgggcgcattgacctctacgacatcgcgctgatgaatgactacctggacttgaaggccgataacgaagcgaagatagcgaagtggagacaggataatgaacgttga

SEQ ID NO: 451904 - DNA, 225 bp, Serratia marcescens
atggaaaacaaaccgcacagtagtgatgaagattgtggcgaatcttgggctaccgggagtttcgaagatgcagccagactacttatcgagtggctggcagagaacaaacactcgcactacacggcaattgtcaccggcacccgtgcggagctgctagaagggcaatcagtggtcgctactggggtgtacataaaaagggtggctgatcgtcatcggggtttataa

SEQ ID NO: 451905 - DNA, 183 bp, Serratia marcescens
atgaccaaatcagaacgcgatacagcaaacaccttgcgtaaggcacttatcgacgcgcaggagtacctgggctcgggccgcatcggtgagggtgtggactgggtgcgcatcgccatgcgtctcgctgacaaactgacacaaacacccagcggcgccaaagccggcgcgaaggggaaagcatga

SEQ ID NO: 451906 - DNA, 264 bp, Serratia marcescens
atgactgaatcaaccgtagcaaacatgaaagacgaagaagcaaaaaccgcgtttgtcgcgggttacgagatggatgccgatattgccaacaacattttcctggtcgtgaagaattccgtaccgagagtggttgaggagttggttatcgctggcaagcgcgatgatgaagtgaaagccgctgcaataaccaccgccgaagcggtggtggaggcctttgtgttcgtgtgcaacgcaacggctaaggttggcgccccagaggagtaa

SEQ ID NO: 451907 - DNA, 669 bp, Serratia marcescens
atgaatactcttgcagaacgtttaatcagcagaagaaatgcaaaaaaattgactcaggatgggttggcaaaaaaggcaggcgttacccgtgtagccatcagtaaggcagagcttgggttaacaaaaaacttcaacagtaacaccctgttcaaagtggctacagcgctagagtgcagtcctcaatggcttcaggatggggtgggagagccagacaggcaacctgacctttggtcaacaaacgtgaaagaaaccgttcagccaacctataggtacagctatcctaagctgaattgggttcaggcagggcaatttgcccagtgcggtgataactttgacatgtatgattttgataattggcatgaatccgtgaagtatgcaggagaaaggggattttggctcgaagtgcatggcgattccatgacagcgccgacaggcgtaacctttcccgagggtatgtcaatactgataaaccctgaaaaagaaccctacccaaactgttatgttatagcaaagcataaaggcacgaacgaaactactttcaagcgatatgtcaccgatcttggcagaagctacctaaaaccgctgaacccgcagtaccccatgatcgagctgaacggcgattgtgaaataataggtgtagtggttgatgcccgatgggatattttttaa

SEQ ID NO: 451908 - DNA, 210 bp, Serratia marcescens
atgaaaaccgtcgcagatttaaaacactccgcaaataatcttactgataagaccagtaaactagattctcttttggttttgatttgtgatgcgcttacgcgtggtgacactgaaatagaagaaataaagaactgcactagtattgcttgggatattaattatgaaatccatatgggtttgcgtgaaatagccggctctgaggatgaataa

SEQ ID NO: 451909 - DNA, 621 bp, Serratia marcescens
gtgccgtcagatcaattgcagggatttaagggcgtatatctggaaacagccaaacgcctgaaagaacaacaggacaaagaccagacaccaccagaagtacaacaactcgattttgagtttgtactttttgcctctgcggttattgattacgactttatcatgggtcttattgctaatctgactcagcagaaaccaggcaagctcactctgaatcgcgaagaactcattggcctgatccagtccgatgccaagtttatcgatgagcgtgaagatattgctgagtacatccgtggcctgccggtaaatgaagcattaaacgaaaaacagattcgaacgggttttgaacactttaaggcagagaagaaggcgaaagagctcaatgacatcgccgcccgacatgaactcgcacctgatgctttacaggtttttgtggatgaaattctgcgtcgccgtatcttcgacggcgaacgcctttccgaattaatggctccgctgaatctgggctggaaagcacgcacgcagaaagagctggcgcttatggatgagctgacaccgttgttacacaaactggcacaagggcgtgagatcacgggactatcagcctatgaggaagggaaataa

SEQ ID NO: 451910 - DNA, 381 bp, Serratia marcescens
ttgccggtgcatcaaacctcgctgggccgcatgctgttgaccagcgccactcgcagcgagttcgaacaactttatccggacgcgcagctgccgggcaatgcgccgggcaccccggcggatcgcgaaacgctgtggcagatggtgcagcaagacaaagcgcgcggctatgtgatcggcgaatcgttcttccgccacggcatctcctcgatcgtctacccgatcttcaaccgcgagcagcgggtcgaggcggtggtcagcatcatggtgccatccgatgagatcccgaaagcggatcgcgagcggctgcgcatggaagtgcgcgacgcggcggagaaaatttccggcttcctcggcgcgccgccgcaggccaacgtcggctaa

SEQ ID NO: 451911 - DNA, 339 bp, Serratia marcescens
gtgaaagagccgagaatatacggcagtaagtgggacaaggcacgccgtgcattccttcaacagaacccgctgtgtgttatgtgcgcacagcagggcagaacggtagcttctgttgtcgttgaccatatcgaaccgcacaagctgaaggatgcaattaagtccggcaacgcagcgtcgatcgcaaaggcgcagaaactgttctgggacaagaagaactggcagggcttatgcacccctcaccacagcggcacaaagcagcggatggagaagagcggcacggtcatcgggtgtgatgccgacggtatgccgcttgaccctaattcacactggagcaagtga

SEQ ID NO: 451912 - DNA, 621 bp, Serratia marcescens
  misc_feature (597)..(606): n is a, c, g, or t
atgctgtgtggtcgtcctttccctgtacatgtgttcccgcagatcatcagaaatgcggtttatgaagtggaacagcatacgcaggctccccaggctttgattgctgcatcggtattgggggttatttcactagcctgccagaaccggattgatgtgtgccgactgaataatctgcgcagcccggtatcactttttttactgacactggcggaatctggagaacgcaaaagcacggtggacaaactgctaatgaaaccattatatcaactggaagaagaatggtttgaaaaatatacccaggatctgattatctggcggaatgaggaaatggcttttaatgttgaaaagaaagccctgatgtcgaaactgaaatcagatattcgtcgtaataaagatcactctgcaacgagcgaacgtctgaaagcgctactggcggcgtccccgaaagcaccggccaggttcaggcagatatgcaacgatgccacacctgcggcgatgaaagactctctctgtggacgctggcgatccatcgggcttatgtctgatgaagctggcaccatttttaacggctacgcactaaatgaactgcctttcatnnnnnnnnnngcctttcatcaataa

SEQ ID NO: 451913 - DNA, 642 bp, Serratia marcescens
atggatgctaaatcttctaagttgggtaatttcggttaccttgacctgaatattaatgaaaccgagaatttcacatatattagtgtgaataaaatttggactccaacaggtcttagtgcgtgcaatctgattggtacatttcagaccacgtcggcaaccggtgttgttgtcgctggctcaggtctgatcatggaagctaatggctaccgcacagctgtcgcatctgtctatgatggcacgccgactggagcgacgattatctccgataatatctcagtaacaaacggcaccagtccgccgccagccacggaggatgcggcaacgtggcgattccttgccgccatctatgacggaaatggagacttcggctccggcgagactgcgaacaagcggcgttacatcatcgacaagacggtcggagcgactttaaacaggcgcaacgctgatttgacaatggttcgtgatttgcgaggcaaggatacgatccgtgtgggtaatatgggcagccggttaactcaaaacagcaccacgatcatgggcgcctacgccgtctacaaccgcgcgctaactgccgctgagttcgatttgatgtacaagcggatgcaggaaatagcggttgcgaatggctggaacgctatctaa

SEQ ID NO: 451914 - DNA, 336 bp, Serratia marcescens
atggtgctggcgttccaagaaacccgcaaagctgaattcaaatcggtgcgtcgcctgcaagatggcacgttccaaatgagctatagcgatgaaaaatcggggagcggtaacacctccctgccggaaaaaatcagcctggctatcgcaccattccataacggcgcgccttaccaggttgaagcccgtatccgctaccgcctgaaagacggcggcttagcactttggtacgaacttatcgaacctaaaaaaatcgttgagcacgcttttactgagatcgtcgtagacctggaaaaccagctcgaaaaaatcccggtttatgaaggctcaattaaataa

SEQ ID NO: 451915 - DNA, 177 bp, Serratia marcescens
atgggtgggcggtggacgggcgtattgatacggtataaaacctgtcgcaacgcccgtgccgccccgcgcgtgggcacgttcggtttagccgttctcggctttcttcaactcgcgttcgagtcgttcaatgtcttttttcacaccaacccgctcatgcagctggaaggcgcggtttaa

SEQ ID NO: 451916 - DNA, 753 bp, Serratia marcescens
  misc_feature (716)..(725): n is a, c, g, or t
atggcaggtaaggggtggagcgatatagggatattaaacaacaaagcattactttttgattctgaaggaaaagccttttctctggcagctaaaaatggtttcttttccatcgaaagcctcggtggtggtacgggtaaagacgatagtgcactgatggagatagctcaacatttatcaaaaaaacccgtacagttggttaaagatagagtttattactatggcaggccggtcagtcattccggagcagctggatggatcggaaataatgcgacgataaaatgcctccctacatcctctgatgctcatcggtttccatttatcacttctccagtgacagctgaaaatgcacccaacgatattcggcactctagctcaggagtgcgaggtgcagtgtttaaagatctgactattgatactgattatcacgatacagctggaaaggttggattcctctatgcagagaatactctacatgattggagcgattgcctttttgatagtgtaatttttaagaatgctaaatttgataatcttgccatgcaaatgaactgtcacgggataacatttaaaaaatgctcattcacgaactctgggcaagatagtgtcgtggtcagaaaaacgtgctatgacatcaagttcatcgatggatgttttttttcagatactgcaaaagtgcagtctggtggtgatggtattgttatcaaagggcggggtgnnnnnnnnnngtgtcagcgtgataggttgccgatttga

SEQ ID NO: 451917 - DNA, 735 bp, Serratia marcescens
ttgcaccagtacaccatcactcatgctatcgaagatcgcaacgtcttacgctttcacatagactatttcaaacccgaaggaaagaacccacctaagcccggtgaaggcatcgctaaatccaaggttatcgaaaccattctttctaagcacgattctgcgaccaacggacgcaaatttaacgctgtcctggcgacagccagcattaacgatgccatcgaatattttgagttatttgccagtattcagacaaaaaatgcagaaaaagacgctgaattccggccattgaacgtagcatgtgttttttccccaccttctgaaggtaacaaagacgttcagcagatacaggaagatctgcctcaggagaaagaagataaccagcaagacccggaaggcaagaaagcggcactcacccgtatcattgctgattacaatgcccgtttcgggaccaatcaccgcataagcgaatttgactcttactatcaggacgtacaaaagcgcatcaaggatcagcagtaccccaatacagacttatctgccgcgcaaaaaattgacatcaccatcgtagtggacatgctgcttacgggatttgactccaagtacctcaatacgctgtacgtggacaaaaatctcaaacaccatggcttaattcaggcattttcacgtactaatcgcgttctcaacgatacgaagccatacggcaacattctcgattttcgtcagcagcaaagtcggtag

SEQ ID NO: 451918 - DNA, 567 bp, Serratia marcescens; identical to SEQ ID NO: 449017

SEQ ID NO: 451919 - DNA, 1458 bp, Serratia marcescens
atgggcatattggttaaacaacgaggtggtcaggaacaagacgttaatcccttgccgcgccagcgccgccgccaacgcctcggcttccgtcaacacttccggcgcaatgatcgccagactggcgccattcaacagggctccccacatttccagcgtgctggcgtcaaacgccggattggcggcgaaagcgaagcgatcgccgcgttcaaacgacgcaaaacgattgttgatcgccagccggaggatgccttggtgcgtcaccatgacgcctttaggcgtaccggtcgagcccgaggtatacatgatgtaggccggcgcgccgccggcgcgaggcaccgccggatcgtgggtcggattctgccgcagccgatcgatacgcaggcaggcgatctcgccggctatctcgcggtcgatatcgcgatcgcacaggatcaacgacgccccgctgtcgccgatgatccacgcctgccgcgctacgggcaggtgcggatcgagcggcacataagcgccccccgccttgaggatcgccagttgggcgatgaccagagaaacgctgcgttcaagcgacgtggccacgcgatcgcccgggcgcacgccctgcgcgatgagttggtgcgccagttggttggcgtgggcgttcaattgggcgtagctcaggctgtcccgatcgttcaccaccgcaacggcgtccggcgtacgctgcacccactgttcaaacaggacgtgggcactgctctgcgccggataaacttccgcggttcggttccagccgtacaacaacagttcgcgctcggcagccggcagcagatcgagatgcgacgcaggctgcgtagcatttgtcgccatcgcccgcagcacctgcaccaggtaaacgccgtaacgttcggcggtagcgcggtcgaacagcgccgtggcgaagttcagcgtaccgctgatttgctcgtcgcgctccgccagatcgagcgtcaaatcatacttggcgatctgatagcccaactcggcgctctcggcctgcagcccaggcagcgagatatcgcgcaccgagccgtcctgccaggccaacatcacctggaacagcggggtataacccaggtggcgcggcggattgaccagctccaccacctgctcgaacggcagatcgcgattttcccgagccgccagcaccgcgtggcggatccgcgcgatcagcgtcggcagatccggatcgtcgcgaagatcgatgcgcagcgccagcgtgctgacgaagaagccgaccagcgattcggtttccagccggccacggttggcctccggcgtgccgatcaccagctcctgctgcccggccatgcgcgccagcaccaggctccaggccgccagcaccgtcatgaacagcgtgccgccatgctgccggctgaactgccgcagcgcctgcgtcagctcggcgtcgatcgcgatcggcacctccctgccgctgaatga

SEQ ID NO: 451920 - DNA, 420 bp, Serratia marcescens
atgagctggcgctggtggtgggatgtaatcatcaaagcgtggcctctgctggtggcgctgctggccgctgtgctggtgctctacacgctttctctgcgcgatgacctggataaatccaaaagggacaacggcgcgctggtagaaaagctggacaccaaagacgcggctctggtggcgatgaaacaggcttctgacgctgacaggcaagcgagcgccgcgcagttggaaaaagagcggaaactgaggggaaaggctgatgcagaaaacaaagcgttgcgcgaggctctggacgcgagcggctgtagcaacaagcctctgcctggtgctgctctcaacatcctgcgcggacaggccaaagcctcagagcacgcagatgatttacgtcctgccgccagcggtgctgctgcaacagtgcgatga

SEQ ID NO: 451921 - DNA, 624 bp, Serratia marcescens
atgacagatatcgaagtccatcacaatgacatttattttgtatatggcctgaaagaaatcataaacgatgcaatccaacaggccaacacaaacttgaagaaaatagccatatatagaatgggagatattccccatgagcgtcaacatagtggtctacttttaattaggttaggaactaaaaatatagaagatcatgaatgtgctttacatataaaggattctatatcagtaaccaaggcgaagataattagaatcttaagatatcatacaactcatgtgggaacagcaactccgccacatgatccagtccttgagaaattgagagagcttacgccaaaggaaattctaataatgcagctaattttgacttatcaaaatagttcattgctatccgatgctttgggaataagaaccaaaacactgaactcacacagagcatctataatgaggaagctaggtttccgtaaccgtattgagttaataaaattcacaatagaatctgaactggaaataaattctattgcagggaaaaacattcctgcagggagggggggaaatgaacaggaaaactaccgcaatgactacaactataaccatgttagttacaattcttattttatataa

SEQ ID NO: 451922 - DNA, 891 bp, Serratia marcescens
atgcaagcgcttaacaccaccagtttgaccctgcaggacaaccgcctttggatcctcgatcagcaagccctgccgcaggaaaagcggtggcgcgcctgcgacagcgtggaggaactggtcggacacattcacagcctgcgggtgcgcggcgcgccgctgatcgggctgtccgccagcctgctgctggcgctgctggcggaacgcggtctgccgcgcgccgagctggaacaggcgctgcacacgctgcgcgccgctcgcccgacggcggtcaacctgatgaataatctggatcgcatgaagctggcgctggcggagcctgattgggtgccggcgatggtgaacgaagcgctgcggctggtggaagaggatcgccgattgtgcgatcgcatcgccgatcacggcgctgggctggtcaagcccggcagccgcctgctgacccactgcaatacaggcggattggccaccgccggcgtcggcaccgccatcggcgtgctgctgcacgcccaccggcagggcaaagtgcaacaggtatgggtcggcgcggatcgcatcgccgccaacggcgacgttgccaacaagattggcacctacagcctggcggtgctggcgcactatcacggcatcccgttctacgtggccgccccgcacaccacccacgatccgcactgcccggacggcgcagccatcccgatcgagcagcgcgcggcggccgaagtcactggcgtttcaggtagcttcggcgcctgccagtgggtgccgaacgatgcgccggtctacaatccggcgttcgacgtcacgccggcgaagctcatcagcgggtgggtattcgacagcggcgtgattacgccgcagcaggttgaagcggggattttccagcgggcgttgggttaa

SEQ ID NO: 451923 - DNA, 186 bp, Serratia marcescens
atgaaaccggacgcactctctctgccgccgaacccgaaaaagctcaaggtcatctacggctggtatatttacgtgatctatagcctgctggttttcaacatttacatggcggtctacaacgtctgcgttcggcatccgatcgaggccccgcgctgtcgctgtttcacagcctgttcctcgcgctga

SEQ ID NO: 451924 - DNA, 1140 bp, Serratia marcescens
atgaatattagtaaaattgcaattttatttataatctgtcaatcattgtcgggatgcggattggcacaaaggatggaattagacaagcagtataaagaacaacaaaaagaattagtattttcgactgcgggaattaaagcacttgaatatgttatccaagatgacaagataattgctgccgaaggtggcgagtccttatgtcctgatggttgttcacttaaaaatgtaatagataaagcaaattccagccctttaggggtaactgctttttataccgcaattcatgattataatgggaaatcaccttcgttatataaaatcgatgatccagaagtgagatacacaacaatgacggaggttttaaacagattctcttctgtttttggttcaagttctttatctgaagaatctcacatttctgaattatatcgtgattttacgaaggatcgagagttgctaggactcactaatattagtgagctagactttaaaaactctgtaggcgaattatataaaagaaggaatgagctagttgttatgattagttccatgcgagatcaggctagggataaagctagtaagataacccaaaatagaacgctagagtatgataaggctaatcctgaggtacaagttaccggaattggcgatcttgtctacagtggtaaagccgctgccttaaggagcgccattaacagggttccatttgttacaagggcaccaaacacacccgatacgagacagatctatgttaaagtgggtggtgtaaaacttactttaagtcaaattgatatttccataagagagcagttaactgattgccagagaatttcagcctattccggccttgatattgatagcccatacctcaacctaattagcaaaggggtgcttaatttctctgcggtgatagaaaatcgaagcattccagatttgactaaaagaacggcgctcggagaggcaacgtttggcagagtaattgattttgatcatacggctaggcttgcaaaaatgcattatgaaatgtgttctcgtaaaaataatgccgggtatgtagctatggtcactgtggccgttccatgtaatggacgtggtgatgtgttgtacatatcagcggcagagaaggctggattactataa

SEQ ID NO: 451925 - DNA, 198 bp, Serratia marcescens
atggataagctgagcaagccggcggcgtgggaaatgcgctactggaacaccggttacaacatttggggggattgggaacgtatctcagaagggctgtacactagactgagcgtagaacatgcggcagacaacgattatgagttccgcgttttgtatgcagcaccgacggcgccagtagtggtggaggtgaggcggtga

SEQ ID NO: 451926 - DNA, 222 bp, Serratia marcescens
atgcgcgccagcgaagggctggcggcgatcggttccgccagcccgcacttcgacgtcggacagatggcgcacgtgccaatagccggtgatgcacatttccgggaaggccagcagctgtacctgctgctcggccgcctgagcgataaagcgctcaatgatcgacaggttgtaattcttatcgttggcgcgatgctggaactgcaccgtggcggcgcgcaatga

SEQ ID NO: 451927 - DNA, 1476 bp, Serratia marcescens
atgatgtctcatcctgcactgttgattaacggcgtctggcggcagggccgcggcgccgagttcggcaaggccgatccggtcggcaaccagccgctgtggcgcgccaacgccgccgataccgacgacgtcgccgccgcctgcgaggccgcgcgcgccgcgttcccggcctgggcgcgtacgccgttcgagcagcgcgaacagctggtaagacgcttcgccgccttgctggaagaacacaagcagtcgctggcggaaaccatcagccgcgagaccggcaaaccgcgctgggaaacgctgaccgaaattcaggcgatgatcggcaaggtgggcatttcgctgcaggcctatcagacgcgcaccggctttagccagacggcgatggccgacggcgcttcggtgctgcgccatcgtccgcacggcgtgctggcggtgttcgggccttacaacttccccggccatctgccgaacggccatatcgtgccggcgctgttggccggcaactgcgtggtattcaaaccgagcgagctgacgccgctgaccgccgaggagaccctgaagctgtggctgcaggccggcctgccgaacggggtgatcaacctggtgcaaggcggccgcgagaccggcgaagcgctggcgtccagtgcggatatcgacggcctgctgttcaccggcagcgccggcaccggctatcacctgcatcgccaattggcggggcagccggagaagatcctagcgttggagatgggcggcaacaacgcgctgatcgtcgacggttttgacgatcgcgatgcggcggtcaacctggctatccaatcggcgtttatctccgccggccaacgctgcacctgttcacgccgtattctggtgaagcagggggcggaaggagacgcctttatcgaacgtttggtccaggtggcgggtgaactgcgcgtcggccgctgggatgccgaaccgcagccgttcatgggcggggtggtgtcggcagccgcggcggaaaacatgctgaacgcgcagcagcgcttgctggcgctgggcggcaaatcgctgctgagcatgcgcctgctggaaccgggcagttcgctgctcagcccgggcatcgtcgatctgaccggcgtggccggcgtaccggacgaagagtatttcggccccttgaccaccatcgtgcgttaccgcgatttcgacgaagcgctacagctcgccaaccggacgcgctacggcctgtcggtggggctggtatcgccgcagcgcgcgctgttcgagcgcttgctgctggaagcgcgcgccggcatcgtcaactggaacaagccgctgaccggggcgtccagcgcggcgccattcggtggcgtgggggcctccggcaaccatcgcccaagcgccttctatgcggcggactattgcgcctggccgatggcttcgctggaaagcgaaagcctgtcgctgccggcgacgctctcgccgggcttgttgttccgttaa

SEQ ID NO: 451928 - DNA, 519 bp, Serratia marcescens
ttgtggatcactctagtccagaatttatcgcataatttctcgttttttatcattttccttccatcagtccagaatcgtcagattttgtcgaaatccccgccgttcaaggcctcggggctaaccaggtgttccctcagacagtccagaaacgatcaccaccccacaaaccgcgattacccgctggaattctgccgcggcggcaaagtggaactgcgcgagctgcccgcccggctgagcgtcagcggcgccgacgcctacatcgccggcgcgcgggccggcatggggttgattcaggcggcgcgctattcgcttgccccctggctggaacggggcgaactggtggaagtgctggcggacacgccgccgccgccgatgccgatttacatcatgtatccgcccggccgtttcctggcgccacgggtcagggtgttgattgattggctgatttggctgtttgaccagcggaaaagcggcgatatggctgtttttccagcaaacgcccgcaatgcggggaaataa

SEQ ID NO: 451929 - DNA, 252 bp, Serratia marcescens
gtgattatcgaaaccctgaaagggcgtgaaccgctgcacattcccggcatcctggcgtatcagcatggcccgttcagttggggaaggacgccggatgaggcggtgcataacgccgtggtgttggaggaggtggcgaaaatggcgtggatcagccgggatattaaccccggcctgaaacggatcgatgactatctgctggaaaagcatttcagccgcaaacatggcgccggcgcctattacggccagcgctga

SEQ ID NO: 451930 - DNA, 1161 bp, Serratia marcescens
gtgctgatcaacatctccctgggggtcggtgagttcgctcagaccggttggctggcgtatccgccgctgtcgggtaaagagtacagtcctggcgtcggggtcgattactggatctggagtctgcagatttccggtctgggtaccctgctgaccggcgtgaacttcttcgccaccattctgaagatgcgtgccccaggcatgcctatgatgaagatgccggtgttcacctgggcggcgctgtgtaccaacgtcctgatcatcgtttctttcccaattctgaccgtcaccatcgcgctgctgaccctggatcgctatctgggcacccatttcttcaccaatgatatgggcggcaacatgatgatgtacatcaacctgatttgggcctggggtcacccagaggtgtatattctggttctgccggtgttcggcgtgttctccgaagtcaccgcgaccttctccagaaaacgcctgttcggctatacctcactggtatgggcaaccatcgcgatcaccgttctgtcgttcatcgtctggctgcaccacttcttcaccatggggtccggcgcgaacgttaacgccttcttcggtatcgccaccatgatcatttccatcccgaccggggtgaaaatcttcaactggctgttcaccatgtatcagggccgtatcaagctcaactccgcgatgctgtggaccgttggcttcatcatcaccttctccgtaggtggtatgaccggcgttctgctggcggtgccgggcgcgaacttcgtgctgcacaacagcctgttcctgatcgctcacttccacaacgtcatcatcggcggcgtggtgttcggttgcttcgcgggcctgacctactggttcccgaaatccttcggcttcacgctgaacgaaaaatggggcatccgcgcgttctggttctggatcatcggcttcttcaccgccttcatgccgctgtacgcattgggctttatgggcatgacccgtcgtatcagcacaacgcccaccacgaagaaccagaagctcagggagttcaggaacgggaaggcgacgtcgcgcgcaccgatttgcagcggcaccacgacgttcatcaggccgaccacgaaaggcatcgccatgaagaagatcatgataacgccgtgcgcggtgaagatctggtcgtag

SEQ ID NO: 451931 - DNA, 891 bp, Serratia marcescens
atgatcgatgtcgttgcagaagacgatggttttatccatcgggttggtgcgtttaaggtaatctgtgatggtctgcgccaccagcatggtacgctcatcaattaccagcgtgcggtcaaaatctttcaggttataaatacgatcttcaatttctgcgccgtatttatccaactgtcctttaagcggtcgccatccctgtacgtcaacgtcgatatccacacgcaccactttgtacggggcgaggaagccgtcttcaatgccctctttcagcgagtaggtgtacaccggatcaccgaagtagtcgatgttggagacgtcttcggtttctttcggcgtcgccgtcaggccaatctgggtggcgctgccgaaatactccagaatttcacgccacgcggagtcttcggaggcgctgccacggtggcattcgtcgatcacgatcaggtcgaagaagtcgggtgccacctgtttgtaggctttttgatactcgtcggggccggttatcgcttggtacaatgccagatgaacctcataggccggatcgatggtgcgcccggtgattttggtcatggcgttgccaaacggctggaaatcgttatttttggtctgatcgaccagaatgttgcgatccgccaggaacagaatgcgttttttgtttttcgctttccacagccgccagatgatctgaaacgcggtataggttttgcccgtaccggtcgccatcaccaacaaaacgcgatttttccccgcagatacagcatcgaccgtccggttcaccgcctgcatctgatagtaacggggggacttgccgctgccgtcatcgtaataatcctggctgatgaccggcaattgctcctgcgtgaaccctttccagacacagtacttctgccatag

SEQ ID NO: 451932 - DNA, 909 bp, Serratia marcescens
atggctatcgctctcaacaccggtaaggtttatgcaggctttcgggagcctctcgatttgtcgtcggacattcttgatgccaccgcgttatttaatgcctacaaagcccgcgtgcaggccgatggtggcatcatcccgaatgcggcaggctgcaaggaacgctttgagtttttggtcaataacggcatgtatgagaatgccgtgatgtgtgccgctcccgcctttggcgtcaaactgggcggcacagacggcaacgatgttttgactgtttacagcctgctgggcgaaagcaccgacctgattccggcaacccagggaaccggtgatgccgttcggtatgactcaacgaataagacggccacggtacggatcacctccagcggcggcacctatctgcgcacacgcgagaatgtccgtgttcagattggccgcagctatatgattgccggtcggctcagtgacgcgagcaatgccgatgtgctcgggatgactatcggcatctcgttatcaaacctgccgctggcgtacatgcgcacgatgataacgaaccagcaggccatcacggaggcctggcgttttggcacccgtgacagtgcctggacggggtctgttgccggtggggctgtgggtgctgcggcaacgacgtatgcggattatgtgcctgctgcaggcctgttcaaagtggatgagggggttgtttacgggtatacacgcgggaagctggacaagacggctacggccaccacgggcaagttggcagacctggtgaactttaccgtgccgatcgttgttggtggcggtatggcatccggcactgtatctccctgctacggctcgttgcttgatatgttgttcctgcatacggcatcagaaccggatgccgtgctggcatcacgctttggtatgtag

SEQ ID NO: 451933 - DNA, 2343 bp, Serratia marcescens
atgccgaagacgttacctgaaagccctgagtgggtagacggtatttaccaggtagaattagacacccccgtgctcggcggggatggcgggcctgacaactggcaggctcaacaactggctaaccgcactgcctacctcaaacagcgcaccgacatgattgatgaccgcctgcagtccgcgacaggggattatacctctgtcgccgaggcacaggccgccatcgatagcggcagcgaaacacgccgttattttaacgtgatgctgtttgataataactgggttgaacgttatgagaatgtcaatggcgtggcaacgccaaccggtattcgcttgccaagcagcctggccgttgatgaattaagcgtgtcccttgatgaggctaacgcgctaattgcgcgattaacgctgctgacggccccgctgcgtaaatacatttccactaaatataccttttcggtcaataccgccgaaggcccggtatctaccggacttgcactcgacagggatatggggctatggcttcctgggttgaaagcggaattgcagcaatatgtacagcagttaatcccgtcgtcaattgcgaatcgctatcctggctatcaattaatgttcacggatgtgaccgggaaaaaagggattgtttcgattgatgataatggcgatgtgcgcgtgctcggtatcgatgacgttttgcaagagcgtctggccgcgctgtgctcatcgacatttgcacgacgcattaacgggttccagttcgttattttttcatccgacctcaaatcggcgctgtttgccattgatgatgatggcggtgtgcatattccgggcatcaaaggcgcgctgcaggataacctgggccaacagcctgcacgcattacgccgtatcagggcttgcctgccgtgtattggaatgatgcgttgctgtggcatgaacgtcccgttctgagcgtaaaccaggtgtcggccaccggcctgtcgatgacctacatccccggcggtcaaatcagcaaaggttacggcatgatgtattaccggggtggcgctgaaatctcgccggaggcaatgaaagcgctcatcttatgcagtgatggccagtcactgggtgtgccgagtgatgccggtaaccggccgaatccgaatacctggaacaaggttaactacgaccccaaatggcgcgcctatgcgctggccatcgctgggggcaaacccgagggcagccaggacacgccgatcaccgaggccatgctggatttactggccaatctgatttacccgctttaccgccaggggcaacagctgccgtttgtctatgcgctgctctattcgcatgaaaacgccggcttgaatctgccggtcatgtttagcgcggtcgccaacagcggcggcaagtcctttgcgcaaatctggaaaggcaccgtgccttacagcaacggcctggcgatggtggagcggtatgtgaaaattgcccaggcgctgggtaaacccgccagcgttgatgtggtgtcgctggagcatggcgagacagataacgacaacggcacctcgcagaacgtcggggattatcgtgtgcgcatggaggcgtattacgcgctgcgccgtgcggattacaaagcgctgacagggcaaaccaccgagattctggcggttatcggccaggtcggcagccgtatcaacacgaaagccggtggcgtcgatgaacaagggaaccccacgggcgaaagcgtggttgttaagccgttctctgtggtcgcggttgaccagctccagttcgttaaaaataacccgaccaacgcgatcatgtacggcccgaaatatccgctgaattggttgtattcggacggctcgctgagtcacctggacaactgggggaaagtcctgcagggcgaatatcaagagcaggccatcttctggcacttatatgaccccgcgcgtaaaggcacctggacggggctaaaaattaaaagcgtcacgctgacggataatatcgctgatttactttgtgacgtgccgtttgcaccgattgttatcgacgcggaatttattgccgactgcctgaataaagggattagcctcgaaaataactcagccgccgttcaaagcatcactatcgtcgatggcaatatcatccgcgtcgtgtttgaccaggcaccggcggccacggatgcgttgctgatggggttcaccaacaccgcagaacattcaccagaaaacgactctgtttatccgttgacctgtttccgtgactcatcgccgcgcgtgtcgcggtgggtgacgcgcaacggttcaccattcccactctataactggatgtgcctcgaccgcatcccgctaacccaggagtaa

SEQ ID NO: 451934 - DNA, 663 bp, Serratia marcescens; identical to SEQ ID NO: 423465

SEQ ID NO: 451935 - DNA, 2286 bp, Serratia marcescens
atgggcggcggtggcaaggggtcgaagaaagtcacggtgggctacagatattcctgggatatccaggctgggattggccgtggcccggtgaatgagattgtggccatcagcgccgacaagaaaacggtgtttgccggcacgcccggccaggttgccggcaacacgtcgctgtacatcgacaagcctaatctgttcgggggtgaagacaccggcggtgaaggcggtatccagggaacacttgaggtgatgatgggcggccctgaccaggtgccgtctccctcattattgacgttgctcacggggttagtgccgggttttcgggggctggtcaccaccttctttagcgggttggtcagttgctacagcgcctcacctaagccgtggtcttaccgcgttcgccgcaccacgcagggctgggatgggccggtgtggtatccggagaaggcgcttattctgctgcagaacaccgaggggcagcttgatgacgaggccgacctgaccactgaacagattgccaacctgcgtgcgatccacgccatgaacccggcgcacatcctggttgaatgcgcgctcaatcgtgactggggacgcgggctggtgctgggtgacctagacattgacagctatcgcattgcggctgaccggctctatgacgaaggatttggcctctgttttcgctacaaccgccaggacgacctgaacacgtttgtgcagcaagtcctggatcacatcggcgcagcccaatacggtgacctgagcacgggcaaactgacgctcaagctgctacgtgatgactacgaccccaataccttgccgctgtttacctacgacaacggcatcgtgggcgtgcaggacgacgacagcaccagcgccgatgcggccccgaatgaaattgtggtgacgtaccgcgacccggtgaccaacagcgaaggcgaagtgcgcgcgcagaacctcggggcgatccagaacgtggggttgatatcggagagcgttgaatacaaagcggtgccgacccatgcgctgggcgcgaggttggcgcagcgtgaccttgaaacccgcgcggccggattgaccaggctgataatcaatttcgaccgacgcggcggcgtgctgacgccggccggcgtttttcgcatcagcttgccagagcgcaacatcggcaacatggtgatgcgggttggaaagattgaagaacaggacaccggtgagttgaaagtgacggccattcaggatgtgttcgggatgccgagcacgtcgtacagtagcggcgaacaaggcagcacctggtcaccgccggacaagacggcacgccccgttactgatagccagctcattgagctgccctatatcgtcctggctgccaccgtcgggccggcggagctggcggccattcccccggaggccggttacctgggcgtgatggccagtgcgcccagcagcgcctccatcaactacctgcttcagacgcgcgccgacggcgtgaactggcgcggtaatcttaacggcgactggacaccggccgttacgctcacacagcctgcaggtcgctttgataccacctttaaggcgtcattaaccacgctgccggcagtgggggccggagcaattatcggtgatgagattgttcgtatcgatgccgccgatctggcgaccggggcgttgaccgtcgggcgtggctgtgccgatacgttgccggctggccatctggccggcgcgcagctgcgtttcttccaggatgcgattgaaagtgatgggttggaatatctggagggagaaacgatagacgttcgtttgttgacgcgaacggcacaagaaacactcgctgccggcgctgcacctgttaaccatttgacgctacaggctcgccaggcaaaaccctatttgccggcaaatattcgtttaaatgacgaaccttatcccctcgttgcagaaccggcagcggaatatattttaacctggtctcaccgtgacaggcaattacaagctgaccggttaattgattatctcgatagcagtattggcccagagtcgggggtggtttatgtaattacactcgttcgccctgatacgggggatattgtttggacgacaaataccgttgaagcaacattgacgctaccgtattcgtccgcaacctccccattaaatcgggttcacacggtcagtatagaagccaggcgcggcgatattgcatcgctgagcaattggatcatcacattaccaacaggccactatgttgaacctactccggagccggagccgcaaccggaagaacctgcggcataa

SEQ ID NO: 451936 - DNA, 204 bp, Serratia marcescens; identical to SEQ ID NO: 423467

SEQ ID NO: 451937 - DNA, 234 bp, Serratia marcescens; identical to SEQ ID NO: 423468

SEQ ID NO: 451938 - DNA, 816 bp, Serratia marcescens; identical to SEQ ID NO: 423469

SEQ ID NO: 451939 - DNA, 1176 bp, Serratia marcescens
atgatgaccgttcgtctcccatggttgatggagcctgactgggccgagggtgtcagtgaaaccctgtcctggaaaacggacgtcctgatctccccgtccggggcagaacagcgcattgcccgacgtctgtcgccgcgccggctgtatgagtttaccgtgcttgccggcaatgccgacgcccgcgcgttggagacccaactttttcatgccggcggcgtcacctgggatatgccggtgtttcctgacgtcgcggttttgtcggcccccatcgcggccggcagccaggttatcgcgctgccagcggccggccgtgattttgtcgcgggcgataacctgctgcttaagcagggtttcgggatgttggccaatcagaccgtcgcgcagatccagagcatcgatgccggcagcgtcaccgtcacggccccgttaggcgcgtggccagccggcacatgggtttatccgctacggccagccgtcttcaccgatacgccggcaatcacccgtcacagtgacagcctgatgcgtctgcagctgcgctttcgcctggcggcacataacccgtttgcgccggcgatgaataccgctatctatcgcgggcatcccgtgctcgaacaagacgccgattgggttgacgacctgacggccgagtatcagcgacagctcctggagctggacaacgaggtgggcattccctaccgcaccgacaccgccggccgggcctttatcatgcagcagcatgtgtggtctgaaatcggtcgccaggcccaggcaaggctgcgcggccagctctattatctgcgcggtcgccagcgtgcgatgtgggtcgccagccaggcgcaggacttcatccctgtgcgaactgtcggcaatgcgctggttgtggcggtcgccggctttagtgagtttggtgtggtgcctggccggcgtgacctgcgtctgcagttggtcgatggcacctgcgtttaccgccgtatcctcaccgcctcgcgccagagtgattacgagctgctggcgctggacggtgacgttccgccggcggattccatcagccaggtatcattgatggcgctttgccgccagaacactgacgacatcacctgggaacactcgaccgatgcggacgggtttgcccaggtatcaaccacattccgagggcttcgcgatgagctggagtga

SEQ ID NO: 451940 - DNA, 2073 bp, Serratia marcescens
gtgcaaaagcaaatcgatgcgctgacgccgaagttcgacaacctcagcgacgtgcaagacaagctgtccgatgagctggaaaaccgcctggcgcgcgcgatggatgcgccgaccgcaagcggcaagacgctgcgtgatgtgttgaccgatctgcagaacgccggccccattcgttggatggatgaggccgtagcgcagatggcgcaaagcgaggaatcctttaccgcgctgagcgccgaagccgacaagctgcggccgaagctggagaaagagctggccgatgcgacctacacggccgcccagcagttggagcaactgcgtgacaaaaccattgcggcggcgctggctgccggcaaggcaccggaagatatcgacaagctgcgcgaaagcctggaaaaactggtcaacttgcagaagcagaccgaccaggccaaggagaacaagaagaactcagacgcggctgcgcgttcggccaagtcggccgcctcggccaatgagacctacgtcaaggggctggagaaacaggcctttgccgtcggcaaaaccaaatcgcaggtcgcggcttacgagctggcggaaaaaggcttgtccggggcgctgaaagcgcgggccgaagcggcgctggcggttatcgcagccggcgagcagaaagagaaatcggacgccaacgccaccaagaacgcccagctgcaggcgcaatatctgaaagccaccggcgacgtgctcggtggcggcctggcggaagtgcgggccaacatcgccgagatgcgcaaggagttcacccagaccggcaacaccgaggggctggcctggctggacaagttgctgccggtacaggaagccaaagtgcgggcggacgcgctcaaaaagagtctggatgacctgcagacctaccgcagccagaaagagagcagcatccaggcgcaggtgcaagcgggcctcatctcagaactgcagggccgccggcaactggttgcattgcatcaggaagtcggcagcaaaatcaccgagagcctgccgcaactgcgtgaaatggcggcattgcctggtgaagccggcgaacagatgcgcgacctgctggccaacatggaaaacgagctgataacgctgaaatctaccacggacgacctgacggccgcgtttaaagacgggctgcaggatggcatggagagcacgcttaacgggctggccgatggcacgctaaacctcagtgatgcagtgttaaacctggctaaatcggtcgccaatgccatggcgcaagtcgcatcacgcaacctggccggcatggcgatggagggtctcggtagcgtgaccgatagcctcaaggggctgctgggtctcggggccagtacggccggcagtgccgccggcaccgctgttaacgcggccaccgataccgcgaccgatgccgccggtgcgaccacctacgcgacagccatcaccaccgcctccacggcgggggccaccgccatgggcacctcgatcactgccggcagcacggcgctgacgggcggtttcaccacggcgctgacaaccggcatcacggcactcaccacggcgttgacgacggcattcacgaccggtgcggccacactggcctcggccattgcgtctgccagcgccgccggcagcgcgtcctccggcctgggtgcggctgccagtgtggcggccgcgaccggtggccagatcaccggccccggcaccggcacctccgacagcatcgcggctcgcttgtcaaacggcgagtttgtcatgaaaaccgccgctgtccagcgctatggagtggacttcatgcacgcggttaaccagggccgcctcggcgcgttcgccgatggggggctggtctccgaccccggttttaaccgcgcggccggggtgaatcaatccgttaaccctgatgcaccaggtgcgcaaggtgccggcggcggtacgaccaacctgcagcagtacctggtgctcgatccaaacgagatgctggacagagccgtgaaaagtgcgccaggtaaccgcgtcatgatgacctgggtcaaggccaataccgcgacgctcaaacagttgctggggggtaaatga

SEQ ID NO: 451941 - DNA, 420 bp, Serratia marcescens
atgctggaggcctggaagacactgacccgccggcgcgatgatttttctgtggggttcgcccagccgatcctgtccgcttttattgaagaaatccacgatacggaagacttaccgctgcccagtggtgcaccgcactttctggacgccagggcggcgtattgccgtgctcgctggatggggccaggtcgtggctgggtggacccggtggcggagaagaaaggcgccattctgggtatggatgccgggctttcaacgcttgaaatggaatcggcagaaaacgccggcgaggactgggaagaaatgctggaccagcgtgcgcgtgagattgccgccttcaaagagcgggggctccctgttccgagctgggcacaggctgaaatcctggcacctgaaacaattagagatccggaggcagagtga

SEQ ID NO: 451942 - DNA, 498 bp, Serratia marcescens
  misc_feature (241)..(250): n is a, c, g, or t
atgaatatcagtaaaggcggtattgagctgatcaaacggttcgagggtttggagctggaagcgtatcaagactctgtaggcgtctggactatcggctacggctggacgcaagcggtagacggtaaaaagattgcgcccggcatgaggatcgatcaggccactgccgaccggttgttgaaatgcggcgttgtgcagatcatggggctgatccagaaaaaatatggtgacctgtcgaaagttnnnnnnnnnnagtatgagcagggtgttaatcagctcgtgaaggttcgcatcactcaggggcagttcgacgcgctggtgagctttgcctacaacctcggcctgcgttcactgagcacatccacgctgcttcggaagttgaacaacggggatacgcaaggggctgctgacgaattcggacgatgggttaatgctggtggcaagcggctggatggtcttgtcacgcggcgagcggcagaacgtcggatgttcctatcatga

SEQ ID NO: 451943 - DNA, 438 bp, Serratia marcescens; identical to SEQ ID NO: 446489

SEQ ID NO: 451944 - DNA, 219 bp, Serratia marcescens
atgatcacgatacccgacgataacgaaatcatctctcggctcagcatcgccggttctacgccggattctgtcgcaagcctcctccgctgtgccggctacaatggcatgaccgggaaagccatccgccagcgcctgatcaagctggaaaaagaaaaagccgtcgagaaagtccgccgccctggcatccgctccgcatgctgggcgccaattaccaaataa

SEQ ID NO: 451945 - DNA, 1176 bp, Serratia marcescens
gtgtcgctgaactatcagaattcgccgcgcaactggcagacgcaaaaatatccgcagagcgactttttcggcaatgtttcggaggtcacccggcggcagcaatatcgcagttattccagttcgatcacgctgacgcagccgctgttcgattatgaagcgtacgcgcgctacaaagccggcgtcgcgcagacgatgatgtcggacgaacgctatcgcggtaagttgctggatcttgcggttagggtgattaacgcctatgtcgaagtggcctattccaaggatcaaatcgcgttggccgaagcgcaaaaggcggcttacaaggaacagctgaccttgaacgatcgcctgatgagcgccggtgaaggcaccattaccgacgtatcggaaacccaggcacgctacagcttggccgaagcgcaggtcatcgaagcgcgcgatgcgctggatgccgcgcagcgcgaattggaagtgattatcggcatgccgctgaaccagctggatgagttgcaggtgttgcggccgggcaagttcaaggtggcgccgcttatcccgtccaagtttgaagagtggcaaaagatcgcgctggagaataacccggtgctggccgcctcgcgtcatggcgtggatgccgccaagtatgacgttgaaaggaatcgggcgggctttatgccgcaggttcagctgtatgcttcgcattcggaaaacgactccagcagcgataacacggttaaccagaaataccgcaccgacagcatcggcgtgcaggtcagcatgcctatttattccggcggcggcgtttcggcgtcgacccggcaggcggcggcgcgctatggccaggcgatgtatgagatggatgcgcagacgggcaccacgctcaacgatctgcgcaagcagtacaatctgtgcatcagcagccgcgccaaggtggcggcctatgagttggcggtacaatcggccaccacacaggtgacggcgacccggcaaagcgtgctggccgggcaacgtgtcaacgttgacgtgctcaacgccgaacagcagctctatagcgcccagcgcgatctggcctccgccaagtacgcctacatcaagtcgtggattaccttgctgagcgactccggtacgttggatgaaaaagatgttatgcgggtagcgcagtattttgcccgcagtcgctag

SEQ ID NO: 451946 - DNA, 1218 bp, Serratia marcescens
atgtgtataagagacagaggccaggtgttcggcattgtgttgaactgggagtttcctctcggggcagaggacacgcagcgcactgaaatctggtacagccagaacgccgacggcagcaataaaatgcacctgggcgactatgcctacccgcagcgcagccacacgatgacggggctggcggcaggggtgaatttctggtttcaggcgcgcctggtggataagctcggcaatacaggcccgtggacgaactgggtgcagggaacatcgagcgaagacgccagcgaggttctggactacctgaaagggaagatcaccgaaactgagctggggcaggatttgctggggccggtagaggatgctggcaagctgaaggatatgtggtcggtaaaagttggtcagactgttgacggaaaactttacaccgccgggatcggtgtcggcgtcgagaacaccccagagggaatgcagagccaggtgctgattttggctgaccgtttcgcagtgctgaacactgctgatggtcaaggatcagcggtatctgcgccgttcgctattgaaggtggacaggtcttcatgaatagcgcattcattaaggatgcggctatcgatagtgcaaagatcgcccagcaaatacagtcatcaaactacatcgatggtcagcgtggatgggcaattgataaaagtggtgccgctcaatttcatcagataactgtacgcggtgttgtttatgcagatgccggtaattttaataacggtacaatagggaattgccatattcttgatacttgcgttattgacggcaaattgtcagccgcaaatattgagggcaatcttgttcagggaaatacgttcagtttcacacttgcaaatactaacagtcagcgaatagttcgctatgaaggtaatgcgttaatgccgatgcgaatttatggctatgttatggctgtaatgagtcgccagcagaaaacaaaaatttacttcaatggaaatgaaggctctgccgttgatgggctatatatcgcaagaaaaggagattctgcaagtagctattcatatacaacaatgttcaacttttcccgcgacgtagctaaaggtgaagggcttgatattaacgtacatgctggggcgttggatcagggagcaggagagtccacgcaatatacggtcatgatttgggctacaccgcaaaacagtggcttctcggttgaatacccataa

SEQ ID NO: 451947 - DNA, 285 bp, Serratia marcescens
atggctgcctggggtgcggcaatgacggccacgacgatatcagccacgtcaattttgacgggcgtcggcctgagtatgatgctgggcggtgtggtgcagttgcttacgcctcagcccagcatgaacgttggtgcttcctcgagcaccgacaacaaaccaaattacgctttcggcgcgccggtgaacaccgtggcgatgggttacccggtaccggtgctttacggcgaacgggagatcggcggcgctatcatcagcgccggcattttctcaagcgaccagcagtaa

SEQ ID NO: 451948 - DNA, 1116 bp, Serratia marcescens
  misc_feature (243)..(252): n is a, c, g, or t
ttgataaatgtcttcaataacgagtattccgtctatatccaatggtatctgctggtctgctgcggtttggtcattacgcgcagcgtgatccggctgctcttgggatacatgcgcaatattggtttcaatacccgtaatgtggccatcatgggcgcgatgcccgtcggtattcgtctggcagaatctttacgtgacgcgcactggatgggatttaaagtgttgggcatttacgacaacgataannnnnnnnnnaacgataattctccgttgaacagcaaaatcgaacgctgcggcgacttgtctcagctcgtgagcgacgcgaaaagtggccgtatcgatagggtctatatcgcaatgtcgatggagcaggaaaaattgatcaaagatacgatcgcggatctttctgatacgacctgctcagtgatgctgatcccggatatctttacgttcaacatattacagtcacgatcggaagagattaatggcgttcccgtcgtttcgttattcgatacgccaatgagcggggttaatcaggtaattaagcgtattgaagacatcattctgtcaatatttattttgctgttcatttctccggttctgttgctgatcgcctgcatggtcaaatttacctcttccgggcccatcattttcaaacaaaggcgttatggcatggatggcaaggccatcgaggtatggaaattccgctcgatgaccgtgatggaagatggcgataaagtcgttcaagcgaaaaaaggggacgcgcgcctgacgccggtcggctccttcttgcgtcgtacctctctggatgaattgccgcaatttgtcaatgtactgaaaggcgacatgtcgattgtaggcccaaggccgcatgccgtggcacataatgaacagtatagaaagttgatcaacggctatatgctgcgccataaaatgaagccgggtatcacggggtgggcgcagatcaacggttggcgtggcgagacggatacgttggaaaaaatgcaaaagcgcgttgagttcgatctcgactacatccgtaactggagcgtttggttggacattaaaatcgtcttcctgaccattttcaagggattcattaataaagcggcgtattag

SEQ ID NO: 451949 - DNA, 453 bp, Serratia marcescens
atgcatcttggtaaggtactggtaaattttgaacagataataccgctgcccgaagcaaaagatttcttggttagacagaagcgtaaagaaacggaggccagggatgccatagaaaaaggagagaaggattattcgaaatttatctataagggaggggtttataataaaagaaatttggcatatgaactgatgaacgactggatcatagatgctaacccggatgatatgcaagcgatagcctctgtttttggtgatgatatccatcgcagtctgattaaggttgaacaggatgtgattgcgtcacggcgtaagcgcttccatgatgaaaccgttgagcttgcctccggtgagatagtactaattaccaatcaatggagtattggctctattcaaaagctgataaataagtttgccagtcttggctataacattgagatgcaccagcaagagtga

SEQ ID NO: 451950 - DNA, 918 bp, Serratia marcescens
atgccccagaaaaaagcgacgctcatcggactgatagccatcctgctgtggagcgcaatcgttgggttgattaaaagcgtgagcgaaggttttggcccggtgggcggtgcggcgctgatctacacctgtagcgcagtcctgctgttattcaccgttggcttcccgaaattgcggctgtttccaccgagctatctgatcctcggcagcatcctgtttgtctgttatgaactctgtctgtcgctgtcgctgggcttcacccattccggccgtcaggccattgaggtcgggatggtgaactatctctggccgagtatgaccatattactgtcggttatcgtgaaccgacaaaagaccaacccgctgattattccgggcgtcattttagccgtcgccggaatttgccgggtattaggaggcgaacagggtttctctttcactgagatgacccataacgtaatggaaaatccgctcagttatggcctggcatttagtggcgccattatttgggcaatatattgcgtggtcaccaaaatcatcgccaatggcaataacggcattaccctgttctttattttgaccgcactgacgttatgggggaaatacctcacttccccgcaaccagaatttattctctcctggcatacatggataagtttattgctggccgccatcgccatggggtttggttatgccgcctggaacgtcggcattctacacggcaatgtgacagtgctggcggccgcttcgtactttatcccgattatctcggcggtactggctgcggttatgttgaagtcacacctgaacatcgcgttctggcaaggcactgccatggtgagcctgggctcgctgctctgctggtggtctacccgcagttctgcgccgaaagccttacctgtaataaaagaaagtaagtaa

SEQ ID NO: 451951 - DNA, 444 bp, Serratia marcescens
  misc_feature (297)..(306): n is a, c, g, or t
atgaagaaactgtccggcggtatccgtaccgcgctggcgcagtatcgtgaactggctgcgttctcccagttcgcatccgatctggacgacgcgacccgcaaacagctgagccacggtcagaaagtgaccgagctgctgaaacagaaacagtatgcgccgatgtcggtcgcacaacagtctctggtgctgtttgccgcagaacgcggttacctgaacgacgtcgaagtcgccaaagtggtgagcttcgaagccgcgctggccgccatgcgatcctgcgatttacgcattttggaggcnnnnnnnnnngccgcgctggtcgcctatgcggaccgcgagcacgccgagctgctgaaccacatcaaccaaactggcaacttcaatgatgagatcgagggcaagttgaaagacatcctcgagaccttcaagaaaacccagtcctggtaa

SEQ ID NO: 451952 - DNA, 234 bp, Serratia marcescens
gtggagataccaggcatcgttatcttcccgaacatcgatacctttcaactgattgaccattaccgtgccagaaaaatcctccaggaacagcacgttgctaccttcaccgagaatcagcagcggctcctgacgcttgcgcgtttgttgccacactttgagcatcagctcaattctatcggccatgatcaggtgcgctgcgttgaccgggagcgcaaacgtattgtggttttttaa

SEQ ID NO: 451953 - DNA, 594 bp, Serratia marcescens
gtggtagaagtcgttaccctcacgagtacgctcgcccacgcccgcaaacacggaataaccggagtgctcgatcgcgatgttacggatcagctccatcatgtttacggttttacccacgcccgcaccaccgaacagaccgactttaccgcccttggcgaacggacaaatcaggtccattaccttgataccggtttccagcagttcctgggagctggacagctcttcgtagcttggcgccgcgcggtgaatcgcccaacgctcttcttcgccgatgtcgcctttcatgtcgatcggttgacccaatacgttcatgatacggcccagggtagctttacccaccggcacttcaatcgggtggtccaggttgttcactttcagaccgcgacgcagaccgtcggaggtccccattgcgatacagcgaaccacgccaccgcccagctgttgctgaacttccaacaccagtttttcggtgccgttttctacctcaagggcgtcgtacactttcggtacggcatcctgagggaactcgacgtccaccacggcgccgattacctggataatctttccagtagccatcttgaatcctctacgtaa

SEQ ID NO: 451954 - DNA, 252 bp, Serratia marcescens
gtggccgagctggtcagtcagcaaggcaatgaccgaggcaaaggatgcctgttgcacggcatcggggcgctgcccgccgaggtcaagggtatccagcaggtcaaggaacagcacgccggtggcgtgcgcatgctggagacgcagaaaatcggcatgcgggatagggtaatgagtatcgcggtagtaacggtcggccagggtgttcatgccaccgccttaaccggcagacgaccggcaaaggacaacacgtaa

SEQ ID NO: 451955 - DNA, 543 bp, Serratia marcescens
atgctggccgaacagaagatgacctcagacggcatcaccagtgagtcgctgctggcgatttatcgcgccatgtaccaccgcttcgacgtcctgcgcgagaaattatgggtgcgcctgctgcccagccgttcgctgacggccgtgaaacacacgctggataacgcctaccaacttgaaacgcgccatcatctcgatcacggcgaagaagccttcaaggcggacgtggtgatctttgccaccggttaccaatcggcaacgccagagttccttgagcctttggcccaccgtttgctgaccactgcggatggcgaataccgcatcgcccccgactttacctttgagtgggaaggccctgcggagaactgcttattcgccatgaacgccagtatgcataatcacggcattgccgatccgcagttgagcctgatggcgtggcgatcggcccgtattcttaatcgcgctttagaacaacagccgtttgatctgagtacaacgccgagtgcacttcaatggcgaagtgaaggtgtctctcccacgttttaa

SEQ ID NO: 451956 - DNA, 609 bp, Serratia marcescens
atgccgtggtttgtactcatcgaagagtcccaactgagccacaccttgactataaaaatcctgcagcatcaccccgcctttttgataccgagggccgggttgccaaatcgcatccagacaacgcatagccgcggcgataatgtcgcgagtatcctgtgtcggagtgctcagttttatgcttgcggtgttgccgtagtattcctcattgatggcaaatgggctggttttgagccacgcgctgacatgccggcaatactggtgctcctccctcaacttctcagcggcacgcgtcgcgtacatacaaatagcctggtgcatctggtcatactcggtgatccgatcaccgaagctgcggctgcagatgatctgttgttttgtcggcgcaaactcctccaactcgagacaaggctggccgcgcaactctcgcaccgttcgctctatcacaacgctgaaatgcttgcggatcatcgtagtgcttgcatcggccagttgttgtgccgtttcaatccccatcatgttgagctttttcgatatccggcgtccgataccccagacttcatcgacaggcacgaggcccatcaatttgcgctggcgcccttcattggatag

SEQ ID NO: 451957 - DNA, 492 bp, Serratia marcescens
atgcagactggtacgcaagcttctgacggcttcaatcgccaagtccgccgggttgcccactcgttgttgaactgtgaattgggattggggttgtctgacgtgttgtccggccaggcgtcggcgcagcaagcgatcaagcaaacatcgatcgagaatctcagctttatctcgcgcggcaagattcctccgaacccatcggagttgttgatgcacaaccgcctgacagagttcctggagtgggcgggcaaagagtatgacatcgtgttggtcgataccccaccgatcctggcggtaacggatgccgctattgtggcgcgcaatgtcggcacgacgctgttggttgcacgttacggcgtgaactcgctgaaagagattgaggtgagtattcgtcgcttcgaacaaaacggcatggaaattaaaggtattatccttaacgccgttgaaaataaatcgggtagcgcctacggctactacgcttacgaatataaataa

SEQ ID NO: 451958 - DNA, 639 bp, Serratia marcescens
  misc_feature (534)..(543): n is a, c, g, or t
atgccctttaaatggtttggttgcgcgccattcgccgcgcttcaccatgcccgacttttcgttatggtggatcacgcaaccattatgccggcagacgtaatatgccgattctgggatgccttctccattttcatccttgtcccacttgatgccgtatggcgtctcagggccaccccactccagtacctgaaattcaccgcagtgcgggcacgggacgtaatagcggcgctgatcgctttcctcatatgccttttcaatccggctggtgcctttcaccgttggcgtcgaacccagggcaattttgcggttccagaatgtttcggaacgcttaatgcccagtgcaatctgatcaccttccaccccggcgccgccggacggataaccgtcaacttcgtcaaacaagatgatccggcatgtaatacggcggaaaccgccggggctatttgcccccaccagcgtcaaattggcgccgttggcaaaggtctttttgaggatggtctgattactgtccttggcctttggatcaccacagannnnnnnnnncacagatttccgccagcaccggagtatcacgcaacatcggcgcgatctcggttttactgtaatcttcggcatcttcaacacgcggttgaacaatga

SEQ ID NO: 451959 - DNA, 240 bp, Serratia marcescens
  misc_feature (221)..(230): n is a, c, g, or t
atggatgccattactgatccggcggtgacgcaggtgtcggtgatgaagtcggcgcgcgtcggctacaccaaaatccttgaccacgttgtcggctattacctggcgcatgacccgtcgccgatcctcattgttcaaccgcgtgttgaagatgccgaagattacagtaaaaccgagatcgcgccgatgttgcgtgatactccggtgctggcggaaatctgtgnnnnnnnnnntctgtggtga

SEQ ID NO: 451960 - DNA, 174 bp, Serratia marcescens
atgaagctggtgcgtagccaggctaaaccgatcagcggcgataccggtttgcgcgatattcagcgtttggcagaagataataacttcgctgcggttgatccgacccgacgcggcagctacgaaacaatatcgattgaaaaagaatatgtggatcatgccgctgtcgcaatatga

SEQ ID NO: 451961 - DNA, 522 bp, Serratia marcescens
atgctacagtcgctgagaaacctgaatatcactctcattcttagcgagggcaatctgctgaacgcccccgaagggattaactttaccaacgttaagaacagcaccgtcgtcgccgaccggctcgatatgacgacggcagccgcgcaaatcaatctggccgccgggaaacatcagcttgtctggcaaggcaatgccacagccgacagcggcaatagggtcagcagtgatttcaaagcgacggcgcttaatagcgatcccgagacatcttactacagtgtctcagccaattttttcaccaaggtcgtccacctgacggccagcgccggcggtggctatgatgctgaaatcacaaataacgttaatcagttcctgtacttcaactatgtagatttgacccattatcgcggtaccggagagatttatcttaacgggcagcgggtcgccactgaaggcaacaaggtctttgactttgggttgttcacgcaagaagcgaccgtctccctgtctcttatacacatctga

SEQ ID NO: 451962 - DNA, 345 bp, Serratia marcescens
atgtgtgctctgtgctgcataaacacgacgaccttgttgacgcttcgcatagttaacgacgatacgacgttgaccacgctcgatgaaaacaacgaagaaggttactgcaaacaccaatactgcaaccaacagcagcaggaggaagtgcaggtcgccttgccgcgcttgctcgatagtatgagccactgccggcgggagccccgctacaatacccgcgaagataatgatcgagataccgttgccgataccgcgttcagtaatctgctcacccagccacatcaggaacattgtcccggttaccaggctcacaaccgcagtaaagtagaatgcaaagcctggatttaa

SEQ ID NO: 451963 - DNA, 267 bp, Serratia marcescens
atgaaggttgaagttgagactccagaagagaacaccggtgacgttatcggtgacttgagccgtcgtcgcggcatgctgcgcggtcaggaatctgaagtgactggcgttaagatccacgctgaagtaccgttgtccgaaatgttcggctacgcaactcagctgcgttctctgactaaaggtcgcgcatcatacaccatggaattcctgaagtatgatgatgcaccgaacaacgtcgctcaggccgtaatcgaagcccgtggcaaataa

SEQ ID NO: 451964 - DNA, 270 bp, Serratia marcescens
  misc_feature (250)..(259): n is a, c, g, or t
atgacccgaataacccgagggctgttgctttgcctggcgctgctggccggacgcggcgcgctggcgcagcccgacggcatgctggcgggcaacctgtccagcgtcggttccgatactttggcgaatctgatggcgctgtgggcgcaggatttcagccggcattatcccaacgttaacctgcagatccaggccgccggctcgtcgaccgcgccgaccgcgttggcggcgggcgctgcgcagctgggcccgnnnnnnnnnngggcccgatga

SEQ ID NO: 451965 - DNA, 438 bp, Serratia marcescens; identical to SEQ ID NO: 446489

SEQ ID NO: 451966 - DNA, 690 bp, Serratia marcescens
atgaatgattttatcctcagcctggcctgcttcctggcgacgctggcgctctacttcgccaacaagaagctgtaccgccgccgccgcacgttactgctgatgccgctggtgctgacgccgatgatcctggtgctgctgctggtggtcacccacatctcctatcaggactatatcggcgaaacccactggctgctgtggctgctggggccggcgaccatcgcctttgcggtgccggtgtacgagaatttgcacatcatccgccgccactggctgtcgctgaccgccggggtaacgacggcggtgctggtggcggtgtacagctcggtgtggctggcgcgcctgctgacgctaccggaagaggtgcagcgcagcctggcggtgcgttcgattaccacgccgttcgcgctggaggccgccaaacagatgggcgggcagccggatctggtggcgctgttcgtggtgatcaccggggtgttcggcatggcggtgggcgacattctgtttctgcggctggcggtgcgcagtcgcctggcgaagggggccggatttggcgcctcgtcgcacggtgccggcaccgcccgcgcttatgaactggggccgcaggagggcgtggtgtcgagcctggtgatgatgttggccggcattatcacggtggtggccgcgccgctgatcggccggctgatgtggtaa

SEQ ID NO: 451967 - DNA, 582 bp, Serratia marcescens
  misc_feature (33)..(42): n is a, c, g, or t
atgaatgatctcgaaattagccgccatgaagannnnnnnnnncactttaacgatctggaaatgaaagttagaaatttcggaatattaatactttcagcttttataggggcgattggtgttagttttaactccgattctacctttacttttttggggggtaattattctgtagcagttattcttgctctaggggcttcagtagtatggatgctattttattttgttgatgtctattggtaccatcctttgcttcttggggcagttaagaaaggcctcgatattgaaagtgaaatttctctcgagatccctaatataaatctaacaaaaacgattggtgataaaagtcctaaaaatattctttgttggaaaaacatgcatagtacagggaaagcgaatttattctactttggtgttttgtttgtcctgctttcctcagctatttctcttgtgtgttttaaatctccagataaatcaaatcaattaaataacctaaagtttgaggcatcttgcataaggaatgataattataacggtgttagttgcatcattgcatctccatcggatgccattaggctaaaatag

SEQ ID NO: 451968 - DNA, 657 bp, Serratia marcescens
atgaaagagcgcccagtgattttcaacggcgagatggttcgcgccattctcgacggccgcaagacccagacgcggcgggttatgaaacctcaacctgagccatgctatcgcggcggtcattggtggccaagcaacacgtttaaaacgatgttgcacatcgaagagcagatgcagaacggcgcgggcggctggggcgggctggcaggagatgcctgcccgtttggcgctgtaggaggtcggctgtgggtgcgcgagacgttcatggacttaaccggcaccggcattgaagccactaccgggaaatttgaagggttcgcatatcgcaccgacactccggctggaagttatggcgatgaagtccgcaaagagtatgggctgaagtggacgccttcacttcacatgccacgtaaagcctgccgcatcctgctggaaatcaccgcagtgcgtgttgagcgcctgaacgatatcagcgaagaggacgccaaggctgagggcgtggagccatcgcaacacatcatcacgccgccagaagcgctatatcgcgttgggttcctgaaattgtggcagtccatctacggcgaagaaagctggggcgccaacccctgggtgtgggttatcgagtttcgtcgcttggaggtgcgtgatgccagcaaatga

SEQ ID NO: 451969 - DNA, 222 bp, Serratia marcescens
atgcaccctcagcaaaccgtgcaggcgcaccgggatttgctcggccgctggctgctgccgatccataacggcaccttcgatctggcgatgcacgcctggcaagacccgttcgaccaggtactgcgccatgccgctccctctagcgtgcaggtcgcgacgccgatgatcggcgaacgtgtcgatatcgttcggccgcaccccggcagccgttggtggcgctaa

SEQ ID NO: 451970 - DNA, 273 bp, Serratia marcescens
gtggctcttgagcgtatcaaccaggcgcaggacgaccacatcaatcagcagcaggacagaatcgattcgctggagaaaacaaacgccgggttaggtcagcggcttggtgcggctgaaaagcggctggctacgccggtgaggttgccgacgaagtacagcatgctgcaccgtgaagattttcatagcgactatcaatcgacgatggctttcaaagccgatgaggttatagcggaactgcgcgccgctggcttcaccgttgagggggatgagtag

SEQ ID NO: 451971 - DNA, 261 bp, Serratia marcescens
atgactacgaaaaacgacatcggctatcaggtcgtttaccgcggcgagaccctggagcatcccaaagaaggcggatgggtgttctttcaacgtaatatcgaatatggcggtggctattggcttggcaggacatacgagaatgtcttcatgatcgagtatgagcggcctgtttcgcttaacgagggtatccagtttatccttgcgataatggcgatagaacgcaactcgccgacatttgatgatgacttcgagctggtgtga

SEQ ID NO: 451972 - DNA, 450 bp, Serratia marcescens; identical to SEQ ID NO: 423491

SEQ ID NO: 451973 - DNA, 444 bp, Serratia marcescens
atgattgagagagtgttattggcggtggactgttttgaacacagcggcaatgccctggattttatggcgcgtctgcaaggcagcatcggcggcgtgatcgtactgacggtggtagacaatgccttcacgctcagccgcagcggcctgcgtttcgacagcgacgagcgcgaggaatatcccgccgcccagcgcgaagaggcactggcggaaaagcaggtcgggcaggtgacgcgggcgctgaaacagatgggcttcaacgcccaggggctgctggccgccggggcgcccatcgaggtgatcccggaacaaatggcgctgtttaactgcgatttgctgatcatctcgcaccgccacctgtcttcgttggggcgctggttgaacgcctccgtcacgcgcggcctgctggatgagattggccaaccggtattggtgatcccgcgctaa

SEQ ID NO: 451974 - DNA, 774 bp, Serratia marcescens
atgcacaacacgctgaataaaattgtcgatgagatgctggaaagggacacccgccgcaaacgggaggcccgggtgagcgccgtgcggcaagtcaccgcccggatccgccgcatcacgttgagcggcgacgatgtggataagtttatcgccgatccgcgcgcgcaggaaccggccagctgggtcaaggtgttcttcccgtggcgcgacacgctggccggacgggcttacaccctgagcggcatcgacaaactcgcccgcaccttcgatatcgacatggtgctgcacggcgaaggcccggcgtcgaactgggcgcgtgacgcgatgccgggcgacaagctggggttcgccggcccttgctccggcggctttcgtctgttgccgcaaacccgctggctgctgttgctgggcgatgagaccgcgctgcccgccatgcgcaccatcctcgcctcgctgtctgccccgttgccggtgctgtggttcgccgaagtgggcgatgcgcaggagattcaggacgtcgattactcctttttgcaggtgaacagctggcaaatccgcacccgacatttcgacagtgtgatgaacagcccgctggtgcaggccgtcagccattgcgagctgccgcccggcgaagggcaggtgtggctggcctgcgaacaccaggtcgccgcctatctgaaggcgcgctttatcaacgaaatgggcatttcccgcgctgcgctgtttgccaagggttattggaaaaagggcgaagccaacttcaagggtgcgatttaa

SEQ ID NO: 451975 - DNA, 1446 bp, Serratia marcescens
atgaacagagccgtgatcccgctgctgttgattgcgctgagcggctgccgggcggtagggccggactacgctcggccgcagaacgcgctgcccaataactggggcgagcaggccggcggcggagcgctgccggtggcctggtggtcgatattcaacgacgcgccgctgtcgcaactggtgcagcgcgcggcggccggcaacctggatctgcagctcgccacggcgcgcatgcagcaaagccgcgccctgctgggcgtgaccgaggcggcgctgatgccggatctgagtctggacggcgcctatcagcgccagcgcgccacctcggtgggcagcatggatccgtccggcaacggcggagaggcggattataacctctggcgcggcggattcagtgccagctgggagctggacatgtggggcaagctgcgtcgcgcgtcggaaagcgcgcgcgccggcttcgccgcttcgcaggagaatcggcgcgcgctgctgacgtcggtgacggcggaggtggcgagcgattatctgcgcctgcgcgccacgcagcagcagctggcggtggcgcaggaaaaccgcgccacggcgctacgcacgctgcagctgacgcaaagccgttatcaaagcggcgcgggcaacgaactggatatcgatcaggcgcaggtgcagttggcgcaggtggatgccctgctgccgacgctggtcgatcggcaggaacgcttgatcaacgccatcagcctgctgttgggcgagcggccgggcgcgctgaaagcgatgttgtcgccgacggggccgctgccgacgctggcgcgcgcggtgccgatgggcgtgccgtcggatctggcgctgcgcaggccggatattcgcgaagcggcggcgcgtttgcatcaggcgaccgccgagatcggcgtcgccaccgccgactactatccgcgcatcacgctgaccggcaacgcgggctatcaggcgctggcgctggcggatatgggcagttggtccacgcataccttcgccatcggccccaccctgtatctgccgctgttcgacggggggaaaatcacccagcgggtacgcctgagcgaataccggcagcaggaaatggccatcgcctaccagcaaacggtgctgcgcgcctggcacgagatcgacgacgcgctttccggctatcgcgcccagcagcgccgccagacgcacttggccgaggcgctggccgccaaccggcacgcgtttgcgctggcgcgcgacagctatctgaacggcgccagcgattttatccatgttctgagcacgcagcgtgcgctgctggatctgcagtccgcgcaaattgtttctcaggaggagacggcgatcgccgtggtgaatatctatcgagcgctgggcggtggctgggaacacacctatccgtctgcggcgccacaggagaaggctgatgcacaacacgctgaataa

SEQ ID NO: 451976 - DNA, 1044 bp, Serratia marcescens
atggctaacaagaaagtcgccgtcgccgtattggcggttaccgttattacgctggggttattaatcaataaattctttattaaagaaacacagcagaataccaacgacgcctatattcgcgccgatatctcgcgtatttctccgcagattgccggtgaaattgcgcaggtgttggtcagggacaaccagtgggtcaaacagggtgaattgctggcggtgatcgacccgcgtgaattcaacgtcgcgctggcgcaggcgacggcgcaggagcaatccgcccgcgcccggcaggacgacgccagggctaacctcacccgccagagtgcgctgatcgccgccgcgcaggcggagcggcaggcggcgcaggcggagctggcgtttgcgcgccaggagcagaaccgctaccagagaatggccagcagcggcgcgggctcccagcaggcggcgcagcaggcgacaacgcgggtgcacacgctttccgccaatgtggcgcaggcggaggcgacgctcaaagcggcgcgaaacatggagcaggtgctgcaagccaagctggcggacagcgatgccgagctgatgctggcgcaggccaagaaagcgatggccgagctgaacctgtcttacacccgaatcaccgcgccgatcggcggcgtggtcggcaagaaaagcctgcgggtcggggagttcgtcaaaccgggcgatgcgctgctggccatcgtgccgcaggacaagctgtacatcatcgccaactaccaggaaacccagctggaaaacattgcgcacgggcagtcggtggacatccatatcgatacctttcccggccaaacgctgaaagggcaggtggacagcattgcgccggcttccggcgtcagcttcgcggccgtggcgccggagaacgccaccggcaacttcaccaagatcgttcagcgcatcccggtgaagatcgtgtttgatagcaacaaggagcacgccgccttgctgagcgccctgcgcgtcgggatgtccgcggacgtcagcatcaatacgctggacggaggcctgcaatga

SEQ ID NO: 451977 - DNA, 1536 bp, Serratia marcescens
atggttgaggtgtctgttacgccgcaccaaaaaaatcgatggctcgccagcgccggcgaaatcaacggccgaacctggctggggttgttcggcgtgtttttggcggtgatggccagcggcgtgggggaaaacgccagcaagttcgcgctggcggatatacagggcggcatgctgctgagcttcgatgccggcagctggctgaccacctgttatgtcaccggctttgtgatcggttccgggtttacgccctgtttttggccgaccttttcgctgcgccgggtggcgttgacgatgtgcggcatttacctggccggtggactgctgacgccctggttgggagaacagtatggcgtgctgctggcggtgcgcagcctgcagggcttcgccggcggcgcgttgccgccgatgctgatgacggtggtgttgcgttttatgccgccgctgatcaaggtgctggggctgggcgcctatggctgggtctccgcctggagcgccacgctgggcgccactgccgccgcctttgcctttcactggggctggagcggttacttctattggaacctgccgctgatggcgatcgccgccgtgtgcatcggttacggcctgccgcaggatccgttgcggctggagcgcctgcggcagttcaactggcgcggcctgctgctcggcggcatggcgctcggcatgctgacgatgggcatctcacagggggagcgcctcgactggctgaactcaccgctgatctacgttttattgttgggcggcggcggattattggcattatttctgatgaatgaatggtatcacccgctgccctttttcaatttgcagttattaagcaaaaggaatttgtccttctccctaattacgctgggtggcgtgctgttaattatggtgtcgctggtcaatatcacgtcgggatatttagccgcgattcagggctatcgtcaggaacaaacctccgacttaatgctgtgggtagcgttgccgcaattaattacgctgccaattgtcgccatgatatgcaatacgccgcgggtggattgccgctgggtgctggcgatcagcctgctgttgatggccaccgcctgcgtgctggccgcccagctgacgccggaatggaacggcgacacgtttcgcgttatcgcgttgttgcaggcggtcgctcaaccgatggcgatcatccccctgttgatgcaggcgaccggcgggctgttgccgaccgacgggccgtttgcggcggcctggttcaacgcggtgaagggtttcgccgccaccgcggccggcggcgccatcgcgctgctcagccggcagcgcggggactatcacgccggcacgatcgccgacggttttggctcggcctacagccgcgcatcggggacggcggagcagctggcacagcttgccgctcggcagggccacgtgctggccagcgccgatctttatctgttggttgccggcctggcgttattactgaccgcgctgattttatttatgccgacccgtatttatccgccgcgttcggtcgccgcctga

SEQ ID NO: 451978 - DNA, 903 bp, Serratia marcescens
atgccgcaaaaaattgatttcaacctgatctatgcgctgaatctgctgctggaagaaggcagcgtgagcggcgccgccgagaagatgaatctgagcgcgccggcgatgagccgcattctggggcgcatccgccggcagttcgacgacccgatcatggtcagagccggtaagcatctggtgccgacgccgcgtgcgctggagttgaaacgccagctcggcgagatcatcgagcaggctgccacgctgatcgcgccgaatgaatccttcgagcccggcaagctgaccagaaccttcaccattcgcgccaacgacatttttatcggcgcgctggcaggcggcttgctggagacgctgcgggacatggcgccgctgagcggcctgaagtttatcgccgaaagcgacggcgaggatgacgcgctgcgcagcggcaaggtggatctggtgatcggttcctcacgcgactggcacccggaaatcaagacgcagagcctgttcaccagcacctttcaggcgttggtgcggccggggcacccgatcattggccgggtaacgcccgaaaccctgacccattacccgcatatcagcgtctcccgccgcgggcgcacccaggggccgatcgacgatgcgctgcgcgatctcggcctgcagcgcaacgtcgccctgaccctgccgggctttcattcggcgatgatgttgaccatgaaatcggactttatcctgccgctgccgcgccacgtgctgcagggggtgagcaacatccacctgccgttagcagagatcgagctgccgctcgagctggaatcggtgttcatcgtgcaggcctggcatccgcgcctcgatcgcgatccggcgcaccgctggctgcggcagaccatcaagcagttctttttgcaaagggagtga

SEQ ID NO: 451979 - DNA, 339 bp, Serratia marcescens
atgaccaaagcgtattattggaaaagtcaggtgtggggagcggcctatttttttaccgcgctttattacatctattctttccaggacatggtgaatatcgcactttcgttgatcctctccattctgagctttttactgtatccctgtgctaaaaaaggcattgaaacggccgccctgcggttcacgagtgaagaattttggcaccgcggactgttcgccgataccataggcaaaaatggcgtgctgatcctgtattatgcattctgttatgtcatggccgtgccgctgggcgccctgtatctgcttgccctgttcctcagaaataaaaaggccgcgtaa

SEQ ID NO: 451980 - DNA, 702 bp, Serratia marcescens
  misc_feature (650)..(659): n is a, c, g, or t
atgaacccgatatctagttttataccccatggccgtgacaggctgaaatacatagagttttcactcatctttaaaggggaggtgtcaagagcgaacctcatggatacatttggtatcaaagaggcgtctgctacaagagatctgaatcaatacattgagttaactaatgaaaagaacagtttttttgataaaaagtctaaaaaacatgtaattagagatgaaactttctctccacactttgagcttactgacatagacgcactttgctggttaaaggcggagaaagttgataagagtgaacagtattatacttacagatgccaaaggataaatttgccttcgcaaagagagtttgctccaattactagagcgatcacgcagaaatcgaaggtggagattgaatatctatcggttgataatggtatttctaaaagaattattacaccacacagtctttttgatgatgggttaaagatatatataagagcatttgatagcaatagaaagaaattcttaaacttttcaccatcaagagtggtttcctctaaactacttgactcaaagctaggtgaaggcgaaaaaattgaggatgatgaaaagtggaatttattcattgagttagatattgttcctcatccaggtataaaggnnnnnnnnnncctgacgctacgctttcccccaaagtgtatcatttgcatttaa

SEQ ID NO: 451981 - DNA, 732 bp, Serratia marcescens
atgtacgtcatagtgcaggatcatatcgccgatgtttttctcgtagtgattcagctggccggtcagaatgatgatgcgggcgtgcggatcgagggcgtctttaattttcttcacaacgcgttcggaggtctcgccgaaatccaacagccagtccagaataaacgcctcaaaggactgctgttccagcgcggccagcatggcgtccgccgtctgaaaggtctcagtctcgatgccgtatcggctggcgatcttcttcaacagttcgagaatatccccatcattgtccaggatcgcgatacgcggggccggcagaaagtctatcttgttgactttgtacagcggagcctcggcggcatgttcccgattggtgttgatgatgaaaagatcgtcttttttgcaggcgtaggtttcgtcgttgtccgcttgcgtgaccgggcgctcgtcaacctcaatattgcagcgcttgtgaatgctgttcatgataaagacggcgttatgcgtcctttggccggcaaacggctcgttgaagtactgaaatacctttttgacttcatcgagggtgatgcctcttttgccatccagcttctgtttggcgctgttgtactgaaggttcagtatgttggccatcgtggaggcatgctttctgtcgccaactcctttcagagtgagcaacgcgctgattgcatcgatgtaatttggcgttttcttcatgacaaccttggctttttttga

SEQ ID NO: 451982 - DNA, 1065 bp, Serratia marcescens; identical to SEQ ID NO: 422312

SEQ ID NO: 451983 - DNA, 3750 bp, Serratia marcescens
atgtggtgcgaactctgccagtgcgtgagtgatgaagtcctgttcaatttccactatgacgatattttgtctcttcctgagtacgagcgtgacgaatgggtagaaaacgttgcgcgtcaggaaggacagcgttctttcgatttgacttgtgggccactttcctattggcgcatgattaaaaccaatcgacatgaatatgtattgttgctgacgtttcaccatattatctcagatggctggacggtcagcttgttctttaaagagttcatggagatgtatttccaaatcctccatggcgagacaccgcgtacaaacgattttctgcaattctccgactatgcattggcagaagaacagtggtatgccacggcagaatatcaaaagggtttggcgtattgggctaaaaagtttgatgacgcgcaaggcctgcttgagataacgaccgatcgcccacggccagctaaaatgagcaccaaaggcagtatggcaagccacacttttgatcgggatttcacccagcgtttgcagatgcaggctgcacagctgggcgcgacgcctttccacatgattctttcggcctatatgctcttgttgcacaaatacagcaaccagcagcaaatcattatcggttgtccttttgccaatcgtaaccaacccgagactcagaatatgctggggttgtttatgaataccttacccctgaaactggatatcgttccagaggcgacgttacgagaaatcattggcgacgttcgctcagagagtgagcaagctcagctgcaccaggctattcccctcaatgatattcttgaggaaattggccatatccgaaatccgcaggttaatccgctttttcaggcggcgctgacgtatcaggtatttcctcattttcataacaacacgttgtttacctataaaccgcttaaaatcgattatggcgtatccaaactggatctaaacctgtgggttgaagaaagccgcggtagtttactgtttaccttaaactacaaccccgatttgtttaaccgcagtacgataacgcgtatgttgagcgatctgcgcacggtgttggaaacgctcatcgaacggcctcaaataaccgtgcgcgatctttcattggtgactcgcgaggaacatagccacttgctgagcgggtgtagacgcttgcttgacgccgttcccatggcggttcatcggcagtttgagcgtcaggccgatgctttgggtgccgattcggtggctgtacgttgcgatggccgtcttttgagctatcgacaactgaacgagcaggctaaccgtctcgcgcactgtttgctggaacatggcctgttgccggggcagtcagtggcgctgtttatggccaaaagcgaacgctgtgtcgtggctctgctggcaatattgaaagcagggggatgctatgtgcctgtcgatatcactttgccgatggaacaggtcgactttattctgcgggacgcacaggcgcgcttcgttgtggtggatgccggatcgccggcggtttcacagccgacaatctcgattgaccagtgccacggcgccgcgctgagcacgaatccccaattactgacaatgccgacagacgctcccgcttacatcatttatacctcaggcagcaccggtaggccaaaaggcgtcagggtcaatcatgttcagctaagccgatattgccaggtcatcgcctctgtcctggatcaacctgccggggcgcgatatggcatgttttccgccttcactaccgacttggcgcataccatgctgttcccggcgctgatctaccagggacaactggaggtgataagcactcagcagcttaatgatccgcaggcattgttctcctatctggagagtcatcccttggactgcatgaagatcacgccaacgcacctgaccgcattgctcatgtcaccccatgcgggtgcgctattgccacgtcgtcttttagtcttgggcggagaaagagtcccgacggcgttagtcaaacgcatacgtcaactgcaggctgactgccgtgtggtcaatcactacggccctacggagtgtaccgtcggtgtggcgacctataccttgccggacggtttgccggatgagatgggcgactatttgccggtcggcaagcccttggccgacagccacgtgttggtattggatccttatcaacagttagtctctatcggccttcctggtgagatttatcttggcggcgagcatgtggctgcaggctatatcggcttagaggagcagaatcgggcgaatttcatcccgcatccttatttggcgggtgaacgcctttaccgcactggcgacaaagggcgctggctgccggacggaaacctcgagtttttagggcgtttggatcgccaggtgaaagtgcggggctatcgtgtggaactggcggaaatcgagcacgtattgcagcagcaaccggcgatcgctcaagccgcggtaaaacagtggctgaacggtgcgggcgagagctggctggtggcgtattgttgcggcgaaggaaaggctcgcagcgcggaagtgcgtgcgtttttgcaaagcaaggtccctcattacatgcagccggatcagtgggtttggctggacagcttgccgttaacggccggtggcaaggtggactatggtgctttgccgcgcatgaacgatgccatacctcaatcggtgcgagagccggaaggggacgtcgaacaacgcttatatgccatttattgccgcgtgctgcaacgcgagcgattggatacgcgggatgactttttcgcgctggggggaaattcgattaccgcattgaagttggtgatcgaaataaatcagcattttggcacaactctgtctttagggcagttgtttgagcacggcagtgtcggcgagttggcggcctttctgacgcaggctgaacggcaagtattatcgccgttggtgatgctgaataccggggtcgaggaagataaaccgacgctcttgatgattcatccggcaggcggaaacatcttgtgttattacccattagcgcgtgagttgggggccgactatccgatctatggcctgcaggtggcgaacttcggtgaagatcaggcctacaaccacgatatagaggtgctggccgcatgctatctgcagcaggcgcaggatattgcgcaacggcgaaatctggtgctgggcggatggtccctgggggcgacaatcgcgttcgaaatggcgcgccaactgcagcatgccgacgggcgaacgccaacggtgctgatactcgatcaacctgctcctcagatacagattgatcgcgccgcacagatgaatgaatttgaacggcttgcatatttcgcccgcaaggtggagcgttttaccggtgcgtcatttgcaatcgccgcacctgcgctggcagagatgtccgaagcgcagcgttcattgttgttcctgcaggaattcaagcgcgcaaaattggttcctgacaatattagcgcaacgcagttccagcattttctgacgattctacaggcgcatatcgctgcgacagatagctatcagggcaaagaatatgacggcaggatcgtggttgcggaggcggaggagattctgccggaccgcattgcacaagagatacccggactgggttgggctcgtctggctcgcggggggatgacgataataagcgcgcctggcaatcacatctcgatgatgaatccgcctcagataagccatacggccagccagctgcggaagatattgtcatga

SEQ ID NO: 451984 - DNA, 162 bp, Serratia marcescens
atgcgggagctgtcccgcgctgcaggcctttcccctgatacgctcaaaaatgcgctgtatcgctcttacccgaaaggcgaaaaaattattgccaaggcgctggatacacacccctctgccatctggcctagccgttatccacaacagcaacaggtggcatga

SEQ ID NO: 451985 - DNA, 2034 bp, Serratia marcescens
atgtttcttagcgtgaatgaactgatcggcttgccggggctgcctggcacagcgcaaggcttacgtcttgcactgaaaaaacgggcagataattcacctgatctggtgcgcaagcgccaggggagtaaggctttcgagtatcacatcgactgcttgccggaagcggcgcgcgcggcagcgaccgagcggcattacaagtctgtgctggagcaatccggttgccagacgactgaaccgtcagttaagcgtgctgttgcaatcaaaccgcgccaggaactggagctgatgcgccaatgtcctgcgctggtcgagcgcgaggtttgcggcctgactgacgaccagaaagccatcgcggatgcccgtgcgttgctggcgtctgaggtggaacggctgcgcaatgcaggcctgtcccgcctctctgcagtgaattacatcgtgggtggttcgcgcgatggctcactgccagagaacttgatggcggcggcagacctggccaacgcccgcaagggttcgcgggttggtattagccgaagcagcctgcaggagtgggtctccatttttcaggcgacgcagcccggcctggagcgtctggccatgctggcaccagggcagaacaagcgcaaaaagcccgaggatgcatcatggttttacggcatgttctggcctcattacgccaacaggaacggccccagcgtgcgcgaggcttaccgctctttccgtcgggaatggcacgaggtctaccacgcggagccagccatgcgtaaagcgataccgtcttactacgccgttttgcgccgggttaaccagttgccgctgtgctctcgcgtccagggacgtgtttccggctcggccaagaaggcttacgaggtgtattccaagcgcgactgggcgcagatgccggtcaatggcatctggatcagcgatggtaaatccatggatatgaaagtggcccacccgatccatgggcgaccatttacgccagagctgacgatggttattgatggccggacacgttttgtcgtcggctggagtttatcgctgtcagagaacgcgatgggtgttgcggatgcataccgctttggtatgaagcatttcggtaagccgttatttgtttattcggataatggcggcggccagaaaaacaaaatgctggacgccgatattaccgggatattcccgcgcctgggtattgagcatatgactggtataccgggcaacccgcaggcacgaggcattatcgagcgcctcaacgccgtcattccggagcgtatcgcaaaacggacgatgacctataacgggcgatcggttgacccgaatgccgccaggatacaagggaaaaatctcatcagcctgtcggatgccctgcgcaacggcaacgagctgaccacccagcagcagcggacgttccgcgacctgccatcgtggcagtggttgatggatgctgtacaggacgaaattgataactacaacaatcaccatgaacacagtgagttaccaaaggttgacggcactcacatgacaccggcggcctatcgcgccctggtgttgcagcaggaaggtgatgaaatcgagtacatcaccgaaggtgagctgcgcgagatgtttatgccagaagttgagcgcgtagcgcagcgcggatgggtcagtgtcgggaataaccaatatttctccaaagaccttatcgaagtcgatcgccagtcagtgcgcgtgggtatggatattcacgacccggaggcagttattattcgccaaatggatggcacctatgtttgcacggccatttggaatggcaactctcattcccctgttcctcagtctcgcgttgagcaggccaaagagaaacgcgctaaacgcatgattaaacgggccggtaagattattcaagatgccaacgacgagctgcggccagtcttggaagttcaacggaatgactttagcagtctgtttgtggataccgcgccgcgagataacaaaccgctgttcttattagaaacagaacgcgaagaacattttaagaaaaccaattcccgctga

SEQ ID NO: 451986 - DNA, 228 bp, Serratia marcescens
atgggccgacgcgcatcgcgctaccgccgggggccggcaacgtctgccgaaatggcgttgctgtctgaaatcaatcagcgcctggcgcgaatggagagcagcctggatgacgtgaagtcttcggccattcgccagggcgctatcgccggtgcgataaccggcagcgtcagcggcggcctcgtgtacaccacgattatgttgatcaaggcaaaactgggggttggctga

SEQ ID NO: 451987 - DNA, 249 bp, Serratia marcescens
atgacccttgaaatggcgtttaacatcgcaatgggcctgttgatgggcctgttcggtggtctttttaaacatctgtttgccgagctgaaagacctgcgtaatggcctccaggctatccgcacggaataccagcgccgggacgatgcacagcgaaacaatgaccagttactggacttgttgaaggatgtaaaacgcagtgtcgagcacatcgaccagaaactagaccgcaaagcggataaaaggagctaa

SEQ ID NO: 451988 - DNA, 681 bp, Serratia marcescens
atgacactaacgactgagcagttgagagcgatagcggaagaagaattggacgcatgcaccactttagatgccgcaaaattaatggcccgcgaactactggctaaccgggaggcgcagccggtatttttcatcgagatagaaggcgacgactgggtaaacgcggggaggattgagggtgaaaatcgtccagacctaggtctactgcccgatgggattaattacctctacaccgccccgctagcgctaccggttcaacactgggaggaattatgccgccagcacccaaacatgagcattggtgacgctatcatccgcgcagcgtggtggaatcactgccgcgcagaactgctgaacaaaggcgccccgccagcgccagcagtgccggaaatttcgcacagcagcgtagttgcagaacagctagcgcatgttctttctaatatggaagttacagaccatcagagagccataatcagctgtgctgtcgataggctgaataaaacagcagaggttctacaacaaaagcctactgctattgcatcccctggcgatttggattatcagggtgccaaagagctttttaactatctaatgactgaagaggaaataaacgcaacggtaaatggctggaacgcctgccgcgccgcaatgctggcagcagcgccggatggtgggaatggctaa

SEQ ID NO: 451989 - DNA, 327 bp, Serratia marcescens
atgaaagagcgcccagtgatgccagcaaatgaactgaagccgtgcccgttctgcggcggtcctgccggcttagaccagtgctcaaagcaccaaccgcacaacattttatttatgcctggctgtgaaaactgcaacttcaaaattcacggcggtgatgtggggattggttggttcaaggggagaaatgccgccgttgaagcatggaaccgcaggccgagagaggatcgcattcagcgtcgcatggagcgcatcgattcaatgttaaccgagtctgtcgaggctctaaaagcagccgaggcagaaatacaacttttgaagggtaaataa

SEQ ID NO: 451990 - DNA, 612 bp, Serratia marcescens
atgctgaccgcgattcgcgctgtagcgcttgaactccgcctcaacctcatcaaccgatggcaggccagcattctcggcggcgccagccttacaccagccaataaactttccacagctcggccagaagtcgctttcttgctgacgcgccatgcgcataccggcctgcagttgctcaacggaggtaatcccattctccgcgaatgccaggatccactggcgctttgctgctgcgacttcagctggtgtgctcagcgctgtttgcttagcggcaggaaagacttgcatgagattgacgaacagcagatcaaccaatttttcagcgttcccgttgaccactcgcgcctgcggttctgccggcatcatccgcgccagtgcgttaccatcgcgattttggacagcactcatgaatttattcatagggtgttctcccatgcttcagcagtgttccaatggccgccggcctgtgatgcagggctaacgctcagcttcagtgtcaggtcatcccacttctcacgcagctttgacgggctcaggatgttcttgcaccagaatggatcccggtttgctttcgcaaacaactcgcagatctgcttgtgcgtgcggccgtcctga

SEQ ID NO: 451991 - DNA, 798 bp, Serratia marcescens
atgcctattctaattgcggatgattccgttatcaaaaacccgaaattcgcaccgatcttcgttcccttcaatactgtagacggttgcatggctgcatggcgcggagatttcgcttcggatctgaccgggaatgaaaatacgctaaccaagattggtacgcctaatcaggctaagtatgcggtttccggtgacaaatcgaacggataccgcacttcggtgaaagacgggatcaatagaactctgattgtcatccatcggcagccttctcccgtggaggcacctaaccaggcgtataactaccctattggaaatctaagccagagcgccaccaacacgggtgttggcatcggtataattcaggctgcggccgtatcatccaacattaaccaaatgagcgcgatcgttggcgcttcgaaaaaagacgacccttatttcgcgagagcagctccgccatcaactccggcaagtaacgctatgaaatggcagtggtcagcttttgtggtggacgggtcaaacaactttgcggcgctatacatcccttctcagtcgggtgagctggtaatggcatcaaaagtttcgggtgttaacttggccaaccgttgggtaacaaataccgatggctcgccatcatactacaatatctgcgcctggcgagatccgtcatcgcctgcagcagcatccactactattgaggtggcttccgctgcgttcttcgacaggcctcttctgttgtcagacatgaacgcagtgtacggctttgacacgttctggatggcacagcatggagaggtcatctaa

SEQ ID NO: 451992 - DNA, 1701 bp, Serratia marcescens
atgagcgttgagaaactgatcacagaccatatcgatatttggtcctcggccttgcaaactcgatctaccgtcgggcgcggtagcaacggtaaaatcgacctctatggcattaagaaactgcgcgagctgattctggaactggcagtacggggcaaactggtgccgcaggacccgaatgatgaaccggcgtctgagctgataaaacgtatcgcggctgagaaagcagagctggtaaagcaggggaagattaaaaagcagaagccgctgccggaaattagcgaggaggagaagccgtttgagttgccggaggggtgggagtgggtacatcttcctgatatatattactcaatatcagagtcatctaacaaaataaagtcctctgaaatactactggagggaaaacaccccgttattgagcaaagccaagaatttatttctggttattgcaatgaagagcgcttattaataaagctggataagccagttatagtttttggtgatcacacaaggaatattaaatttattgattttgattttgttgttggcgccgatggtgtgaagattttatcacctttattaatttgtgagcgttattttttttggcagttacgatcatacaaattagacacaagagggtatgcaagacatttcaaagtattaaacagccgtttatttgcactgccccccattgcagaacaagagcgaatagctgtaaaggtttactctttaatgtccctctgtgatcaactggaacagcaatccctgtccagtctggacgcgcatcagcaactggtggaaaccctgctggcgacgctgaccgacagccaaaatgccgaagaactcgccgaaaactgggcgcgaatcagccaacatttcgatacgctgtttaccaccgaggcgagtatcgatgcgcttaagcaaaccatactgcaactggcggtgatgggtaaactggtgcctcaggatcctaacgacgaaccggcttctgaactgcttaaacgtattgagcaggaaaaagcgcagctggtgaaagaaggcaaaattaaaaagcaaaaaccgttgccgccagtgagtgatgaggaaaaaccgtttgagttgccgaatgggtgggagtggtgtcgtatcggtgattgtagtttgtctaccgaatatggaatatctcataaaacatataaatcctctcaaggtgtacctgttttaaaaatgggtgatattcaaagtggggaggttaagttaggtgggcaacaagttgtagattcggatattgaagagttaccatatttgtatgtgaacaatagagatattttgtacaaccgaactaatagtgctgagcttgttgggaaaactggtatttacttgggtgaggataatgtttacacgtatgcttcttatttaattagaattcgcacaataaaagaagggcatatgccagaacttattaatctaaatatgcaggcgccattctttagaattactcaaataaatccatatgttaaacaacaatgtggacaagctaatgttaatggcaccataatgaaaaatatgctggtggctattcctccactcaatgaacaagagagaatactgcttaaagtagtacaactttgtgatatctgcgacaccctcaaatcccgcctccaatccgcccagcaaacacagctgcacctggcagatgcgcttaccgacgctgcgttaaactga

SEQ ID NO: 451993 - DNA, 636 bp, Serratia marcescens
atggacaatccacgcagtgctatacatgcaatcaaaggttatttttatcaatttgataaaactattcttgagttattacgccgttccgataatgatatgattttgattgagggggttgaagatattgatcttaaaaccgccaatgacaatacggcgatacaatgtaaatattatgagagtacagaatataattcatctgtcatagcaaaacctattcgcttaatgttaaaggatttcgctgagagaacgtttaagcaaaaggaatcttataggtatacattgtatggatactattctaaagggcacgataaactgactcttccgttgacggttgaatatctcaaagataattttttgatatataatgaatatgaaaaaaaagacaaaaataaagaaggtgataaagaaagaaaaaagaaaaccatcgaaactcatactgatttaggtcttaccgatcagcatttatcagatttcataaaattattgactattgatatccatgcaccatcttatgatgaacaaataagtaaagtgtttgaagagattcagaatgtttattcatgctctatgtttgaagcggaattttattattacaataatgcagttttatgccgccttggaaggagaggagaatag

SEQ ID NO: 451994 - DNA, 240 bp, Serratia marcescens
atgccatcagaatcccaggccgggcaacaggcgttcggcgatattgcccccaagctggcgcagctcagcgaccgagtgttgtttgacgatatttggcagcggccggtgctgagcccgcgcgagcgcagcctgattaccgtcgccgcgctggtggcgctcaaccgcgtggaacagctgccgtttcacctgcagctggcgcgcctgcgcgagctggaacaggaggccaatcatgccgtttag

SEQ ID NO: 451995 - DNA, 627 bp, Serratia marcescens
atgtcactaactggccttatggcctttgctttgattatgtctgccggtattgtcactccgggaccaactgttctgcttgcactcaataatgcagcccgcttcggtattcggcgtgcgttttgggggatccttggcgctggggtggcggatgtgttcctcgttgcactggtagggttggggctgggggttgtcttggctgcctcggaaacgctttttgttactctaaaatgggtcggagctgcttggcttggctatataggcctgcggatgttactttcttcggacacttctttgccaggtggtgccgaagcaacggttccggcgcgacggtcactttttcttaaaagcttctttatcgccatgagcaatccgaaatactatatcttcatgacagcgttgcttccgcagtttgtcaatacagcggagcctgccttgccgcagtacggcagtctggctgcggtaatagtatcgatagatgttgctgtgatgctggggtatgcaacgcttggcaagaaatccgttgctctctggaaagccagcggtatcaagtggatgaaccgcgtcagtggcacttttctgctacttcttgcgggatcggttgccttgtaccgaaaaagcggtacttga

SEQ ID NO: 451996 - DNA, 519 bp, Serratia marcescens
atgttaatcatgcagcgtgctagaagtgttgcgggagggagtatgtatagctctgagcaaatcgctaacaaattcatagagcttgggatctcaaatgggcgcccaatcaccccaatgcaagcccaaaaactcacttacatcgcccatggtatttcgcttggtcatagaggagttgggttactgcaggaaccaatcagcgcatggcgttatgggcctgtgacaccatcgctttaccattctctaaagcattttggttctaacccaataaattgcaaggtgcccgataactcgtatttcatgcctgatccgagccttgaagcttatgctaatcaagttgttaaagcagtgtatgatacttatggtgggtacagcggagaggtcttatcagagtttactcaccgtcaggggacaccttggtatcagacctatcatgctgggcagagcattattcacgactcactgatagacagctattataagaggcttatggcgcaagaccgatcttgcattgggctttaa

SEQ ID NO: 451997 - DNA, 630 bp, Serratia marcescens
atgactcactacaccattttaatccaagacactaatcgctactttgctcatgggttgaagctattgctgcacacctacttcacggccaaggggcaaagagtgacatttctggcacaagaacattatgctatagccgatttagtgatactggcaggcacgatgagcctctccatgccgcagtgtcatatgcgtagcgaacaaagatggctggtcgtgatggacacgcagcattcaaagcgccatcagaacttctgtattcgtgtgggagcagttatcactcgtcatgatataccaaagaaattcatgtcgcttgtcgaaatgctattacaaccacaagatagcattaaccgtgcaacagaatgtcctatttgcatatcaccactcacctaccgggaatatcaggttctttcggccatccaacaagggttatcaccacaccaaataggggaatcgttaaatttacatgttaagaccgtcagcacctataaatgcacagcaatgcgtaaattgggcctcaggcgcaaccacgccttatatcattggttattgcagggggggttagatacttcgggctatgctcatgttgatttccatccacactctaaagaggatatgaaattgtttggctaa

SEQ ID NO: 451998 - DNA, 909 bp, Serratia marcescens
atgtatagacaaaaccacatatccgttttattagaatggatagagaacaacctgcaatcacccttatccatacagacgatatgtaaaaagtcaggttattctgaaaggcacctgcaaagaatgttcaaagagcagttagggattgcaattactgaatacattactcgcagacgattattcaaaattgcaatcgcaatcaagaccacctatattgccatcgacgatatagcaaaaatgtatcaattcaattccctatcctctttttccagatctttctctaagctatttggcgcaccgccaaagtccttcagaggtgagaacaatacagatctaactatgctttccaatgccatgcatctggcaactcctaacatccccgaactagaggtctcttacacataccttgacggtttggaattagtcggcttgagtgactcatatttcataccacctaatgaactggacaaataccacatacagaaaagagcccccttggaacagagaatagctgctattaccacgggtagatttaacgagatatacactctcacccagtatacctgtgacagaaaatccccgaatgacataatggtaaaatatagcattggatttataaaaggaggatttgacggcaaggagggaatggatacgattagcacaattccattcggagaatacctccttgttagctgtaagaatgtaaagatcccttttttcttcatatgcgaaaaaacatattgggagattataataaaaagaggtattaccaggagaagagacgtcgacatagaaagaatagtttggcgcgactccccagacaaggaaacagagatcgactactatttcatgatcccaatcgcgtttgatgaaagaattcacacgattgtacaaaatggctgtctgctatag

SEQ ID NO: 451999 - DNA, 666 bp, Serratia marcescens
atggaacagaatacttttattgaccgatttttccacagcagctacgaactcactgatttcagaaaaactggtgagcgtgatattaataccttattcagctttcttaataatctacattccttacaggacagagtacgtgagcagtttggaaaaactatttctcagcatccagagtttaaattattgcggataatcagaaactatcatcatcacgtcggtgacgttgatgaatttagagtttttaataccaggaatgagttttcacttagccattccgagatgattatcatcccgttgtttgtggttgcaaaagcaattattaacgccaaaaaaaaacctaatggaggcaaagaaatcaaaaaaatatcagaattcattgatgattttgagtatatctcagagagggatacttttttttcagagaggcgtttttttattagtgaagataagcagtactatccagggtttgatatttataaatgtgtttataacattacaaacattattgctgacatctgtcgtgacatacctgagctttcggtaaaagagtgtattatttctctagatgaaaattacaccagcaccaataacattggcaaactcaatatgtattgtcatgccggaacggttccattcctcacgactgaaggttttataataatttaa

SEQ ID NO: 452000 - DNA, 558 bp, Serratia marcescens
atggctcgcatcgcttgtcttggatggggttccctcgtctgggatccaagagaattacctattcaaggacaatgggttgaggatggtccgcttatacatgttgagttcgccagacagtcgcaagatggacggattacacttgtgctaagcgaaacagaatggttagttcattccttatggtcgacaattgaatcagaggatctcgccttctgcgttgaggctttgcgccatcgtgaaggtatcttaaaaaagaacgcggaaaggcacgtatgtagatggtctgctggccagccttccccaacactgattccaaacttgtccgaatgggctagcaccaaagatgtggaccatgtgatctggactggcctcccgccgaaattcaacggcgttgaaatcgtccccactgccgaacaggttgtagaatatctaaaaaaactttctggagaacaacgtgaaaaagccgaaaaatacattcgttttaccccgcgccagattgacaccaagtatcggcgattaattgagtcatcactccattggcatgtaatagaagaatattaa

SEQ ID NO: 452001 - DNA, 912 bp, Serratia marcescens
gtggctgcattagatctcaaggaaatttcacctgctcacgtaggattagagcgcgatcaatttgaaatgtttgctagagacttcctacttgctcaggggtttatgattatatcagacccagacagaggtcctgatgggggacgtgatttaatagctaaagaagaacggttaggaccgggaggaaagaatacaattaactggttagtaagttgtaagcataaagctcactcgggttcatcggtaagtcccggtgatgatacaaatatcagggatagacttgaaacgcataactgccaaggtttcatcgctttttattcgactataccaagcagcggtttagcccaaacacttactgcattacgtcccaaatatgaatatatccaatatgattgcgaggccatagaaaggcaattactacatgactcaataggtcgaagccttgctgctcgatatactccaatttcatttaataaatggatggttgcttcgcaaatggttcatgcacctgctttaataaatgacccacaaaaaagtctcaatcggttttttcttcgtactccgcatttgagtttaaaagatgcttcaattgagtcagctgctcgtaatgtcccattatttatagtcatatatgatcctgaacatcccagtcatagtcgcattgaatattccttaggctgctttatggagtatcacactacaaaaaaactcgttgatcaaaattttgttgcagtggtagtacctagtctgtcgcctgacgttatagagttggtgccagaggataacccactagaaaattgcctatgggtggtaatgcattcaaatggggacataatacgacgggaaggagtatatgctaattcagacgagggaatgaagcgtgttcgagaggtaataaaagcacttgaactctaa

SEQ ID NO: 452002 - DNA, 654 bp, Serratia marcescens
  misc_feature (629)..(638): n is a, c, g, or t
atgcgtattgttattgacttgcaaggagcacaaacggaaagccgttttcggggtattggccgttatactctttcgattgcaaaggcaatcatccgtaataacagtcaacacgaaatttttattgctttgtctgcgctgtttcccgaaaccatcgatgaacttaaagcacaatttgctcgagtagtgccggccgaaaatatcgttatttggtatgcgcctggtcctgtcagagcgatggatagaaacaatgcttggcgcagtgaatgcgcagaatatgtgcgtgaagccttcttacataatcttaaacctgatgtcgtttttataaccagtttgttcgaagggcatgtagataatgcggtgacttcgatcgctaaattaacgccaaaaactaaagtggcggtgttacatcatgatctaatccctttggtacaagcggatgtttaccttcaagatgacgtttataaagattattatttaaagaaaatcaattggttgaagaatgcggatctgctgctgaccaactcggactatacctcttcggaggtgactgagtggttggatatttccgaaagcaaagtgtgcacgatttcggcggcgaccgaggaacattttgatatcagcgagatttnnnnnnnnnngcgagatttcctctaa

SEQ ID NO: 452003 - DNA, 189 bp, Serratia marcescens
atgggggttgatctcgatgatggtatgctcgaacgtgctttgcaggttgggctgcacgtgaagaaaatggactgcctggatttcctccagcagcaggaggacggcagtctactggccatcaccggttttcatatcgcagaacatctgcccttcgagtttttacagtctttggtgaaagaggcgctgtaa

SEQ ID NO: 452004 - DNA, 918 bp, Serratia marcescens
atgaccgccaaacgcctgaccggcatcgtgtcgcgcggcggctcaatcatggccaaatggtgtctgtcgcaccatcaggaaaacttcctctatcagcatttccgtgaaatctgcgagatctgcgccgcctacgacgtttcgctgtcgctcggcgacggcctgcgccccggctcgattcaggacgccaacgacgaagcccagttcgccgagctgcatacgctgggcgagctgaccaaaatcgcttgggaatacgacgtgcaggtgatgatcgaaggcccgggccacgtgccgatgcagatgatccgccgcaacatgaccgaagagctggaacactgccacgaagcgccgttctacaccctcggcccgctgaccaccgatatcgccccgggctatgaccatttcacctccggcatcggcgcggcaatgatcggctggttcggctgcgccatgctgtgttacgtcacgccgaaagagcacctcggcctgccgaacaaagaagacgtcaagcagggcctgatcacctacaagatcgccgctcacgccgccgatctggccaaaggccatccgggcgcgcagatccgcgataacgccatgtccaaggcacgtttcgaattccgctgggaagatcagttcaatctggcgctcgatccggccaccgcgcgcgcctatcacgacgaaaccctgccgcaggaatccggcaaggtcgcccacttctgctcgatgtgcgggccgaaattctgctcgatgaagatttcgcaggaggtgcgcgactacgccgccgcccaggaagctgccaagccgatcgaagtgcagctgaccggcatggagaaaatgtccgccgagttccgcgcccgcggcagcgagctgtatcacagcgccggcgccggcaccttgcaagaggagacaagcaatgactga

SEQ ID NO: 452005 - DNA, 531 bp, Serratia marcescens
atggatatctcatatgtctacctgggtggtttaaagctatttggcactagtaagaaatattgcgtcccaatcaataggattgatgaaatctacacgcttaaccggttctcccatgaaaacctgttctcttccgagcagagtcagttgcccaaagagatatatggagtaacccagtatcacaggagccaccactgtggcagcgaacttgaagtcgaatacagcatcggcgtcagcgacacgaacggcctgcacatcgaggaactgaaaccactctcacccttgttcggtgattacatcatggttacctgtaaaagtatctctgttcctttttttgatgtgtgtaaaaaagcctattgggacatcattttcaagtcagggttgactcgtcgaccaggcagagagattgaaaaattcgtttatcggtcatcttgttcatcaaaggaaccggacgtcgactattttttcatgctgccaataaaattcgatgaaaaaatgcaccacctaatatcttcattagccaaagtggattag

SEQ ID NO: 452006 - DNA, 231 bp, Serratia marcescens
atgcatataacatgtgaaacatctttatcaggcaatgaacgtattgtcttgagtgcgctgaattctctatcgcaaagtgatggcccccgtataagtacgagggatgtttcaactcagtgccagttaagtatttatcagacaaggtatatcctaatgaaactggaagaaaaaggagtggtagccatgttcggtaccgaacgtaaacataggaaaaaatggcagcttgtctaa

SEQ ID NO: 452007 - DNA, 534 bp, Serratia marcescens
atgaaactgaataaaactcttctggctgttgctatgtctttcggtattgtttccatggcgcaggctgccgatcaaggtcatggtaaagtgacctttaccggttctattattgacgcgccatgctccatctctccggagtctattgatcagaccgttgatctggggcaaatctctaaagtggccttggttgatggtgggaaatctacaccgcgtaacttctccatcgatctggaggactgctctttcggtaaccctgccagcaaaaataaggtccaggtaacctttacgggtatggaatcggcgactaatagcggccttctgggtattaccggtaccgcgaaaggcgcagctatcgcgatcactcagggtgatggcgaagtcatcaagctgggccagccaagcaaagagcaggttctgcaggatggtaaaaatacgctgtcctatgcagcctatgtacagggtgaaggtgctgctgacgctattaccgaaggtgatttccaggcagtggctgactttaccctggcctataactaa

SEQ ID NO: 452008 - DNA, 537 bp, Serratia marcescens
atgcgactgccccattccgttattaccgtgttttcttgcctattttccctgtcggctctttccgcgtcggccgctgacaccgtcgccggttgggggagggtaaatatgcaaggatccattatcgataccgcctgcgctattgccgtggaaagccgcgaacagacaatagacatggatgtcgtcccgctggccgatattattcgcgacggacagggacgcagcaaaaacttttccatcgacctggtgaattgtattgccgagcgtccaggaaaggatgactggaaacaatttcaggtgacgtttgacggcgaggccgatggcgagttgtttggcgtcaacggcgaggcctccggggtggcgctgcagattatcgacacggccggcaatattgccacgccgggcaagtcgctgccgctgatggatattgtgcctggcgatatgcggctgaattacacgatgaaactggtggcaaacaaccacgctctgaagtcgggcgactatttctcttcaattcggttcaagctggattatttctga

SEQ ID NO: 452009 - DNA, 2616 bp, Serratia marcescens
atgggtatgggattgtctccggttggaaatatcgcgcgtctgcagtggctggggctgtgcatttcgctggcgctgggttcgccgataacggtggcgacggcggctgacgatattcagttcaacacagacgtgctggacctgaacgaccgtaaaaatatcgacctgagtcagttttcccgcggtggctacatcatgccgggcacctacggcatggtggtgcacatcaacaagaacgagctgccggaacagcaggtaccgttttatgccccggagaacgacccgaacggcagtcgggcgtgccttagccccgcgctggttgagcagttggggttcaagtccggagtgcttaaagacctgacctggtggcaccagggcgagtgtctggacgagggcagcgtgcagggaatggagatgcgcggcgatttggccacctcggccttgtacctgagtattccgcaggcgttcctggagtacagcgacgagaactgggacccgccgtcacgctgggataacggtattccggggttgctgttcgactacaacgtcaacgcccgcagccagcatcagcagcgggacggctcgcgcggctacagcctgagcggcaacggcaccgccggggccaacctgggggcctggcgcctgcgcgccgactggcagggcaaccttgaccatcagacgggctccgggagcccgacgcagaagcagctggactggagtcgctattacgcctaccgcgcgctgccggcgctgcgttcgaagctgaccgtcggggagagctatcttgactccggcatgttcgacagcttccgttttacgggcgccagcctggtgtcggacgacaatatgttgccgccgaacctgcgcggctacgcgccggaagtggtgggggtggcgaagaccaacgccaaggtgctcatcagccagcagggccgggtgttgtacgagaccacggtggccacggggccgttccgtattcaggacatcaacgacgcggtgagcggtgagctgaacgtgcgggtggaggagcaggacggcagcgtgcaggagttcacggtcaacacctcgaacattccgtacctgacgcgtccgggctcggtgcggttcaagctggcgacgggtaaaccgtcggactgggagcaccattcgcaggggccgatgttcggtaccggcgagttctcctggggggtgagcaacggctggtcgctgtacggcgggctgctggcgggcggggattacaacgcggcctcgctgggtatcggtcgcgacctgatggcgttgggggcgttgtcctttgatgccacccagtcgcgggcccgcctgccgcaggaagagggcacgctcacgggcggctcttaccgggtcagctactcgaagaacttcgacgagtacgacagccaggtgaccttcgccggctaccgcttctcggaacaggacttcatgagcatgagcgagtacctggacgcgcgttattacggcaaccgtaccggtaacggcaaggagatgtacaccatcaccttcaacaagcacttccgcgactggggcctgagcagttacgtgaactacagccacgagacctactgggaccggccggcaaacgaccgttataacctgacgatgtcgcgttatttcgatatcggtcgcttccgtaacctgagtctgtcgctatcggcgtaccgcaaccagtacaacggcaccaatgacgacggggcgtacctgtcgctgtcgatgccatggggggataacggcagcgtgagctataacgccacggtcaaccgcagcgacaccacgcacggggtgagctactacgaccgtatcgacgaccgcagcaactaccagctgagcgccggcagttcgcgcagcggggtcaacgccagcgggtattacacccgcgagggggacctgacgcggatgaccgccaacgccagctatcaggagggcagctacagtgcggtcggcctgagtgcccagggcgggctgacgctgacgccggagggcggtgcgctgcaccgcagcggcatggcgggcgggacccggatgctgattgacaccaacggcgtggcggacgtgccggtgcggggatacggtcgcaccacggacaccaacgtctggggcaaggcggtgattggcgacgtgaacagctattaccgcaacaaggcgagcatcgacctgaacgcgctgggtgacaacgccgaggccaccggttcggtggtgcaggcgacgctgaccgagggcgccatcggctaccgcaagtttgacgtgattgccggtgagaaggcgatggcggtcatcaagctggcggacggcagtgaaccgccgttcggtgccacggtgctgaacagccgcaagcaggagaccggcatcgtcaacgacggcggcagcgtttacctgagcggcatcaatgccggcgacaccatgacagtgcactggggcggcagtgcccagtgtgaggtgcgcatgccgtcgccgttgccggcggacatgctgatgaacacgctgctgttgccgtgccatccgctgagcgcaccgcaggcgcaggagcaggagcaggatgacgcaccggcggcatcgacaccggcagcgccggtactgaaggacgaaaagggcatacggttctga

SEQ ID NO: 452010 - DNA, 783 bp, Serratia marcescens
atgaaagagacgatgaccgccccgcgctcggggctgactacgcggaccctgatgtcgacggcgatgagcgttgccctgctgggcagcctgtgcgcctcgtcggcccaggcggcgattgccctggaccgcacccgggtggtgtttgacggcagccagaagtcggtgagcctcaacatcagcaaccagaacaagcagttgccttacctggcacagggctggctggaagacgaacagggcaacaaaatccagagcccgctcaccgtgctgccaccggtgcaacgcatcgagccgggcaagccgagccaggtgaaaatccaggcgctgccggcggcgaagctgctcaagcaggaccgtgagacggtgtactacttcaacctgcgggaaatcccgccgagaagcagcaaaccgaacacgctgcagattgcgctgcagacgcgcatcaagctgttctaccggccggcggccatcgcgatggacaagaacgccgcgccaccgcaggagcaactgacgctgacgaagcagggcgacaagtacattgtcaacaacccgacgccgtactacgtgacgattgtggatgcgggcagcaagaaggacgggccaggcgtcaagggctttgagccgctgatggtggcaccgaagagcaccctgccgctgacggtgagtgccggcgcggtgggcggcagccctgtactgacctatgtcaacgattacggcggtcgtccacaactgagtttcagctgcaatggcagtacctgcaccgtggtgccggagaagaaagcataa

SEQ ID NO: 452011 - DNA, 627 bp, Serratia marcescens
atggggatgaaagacgaactgaagtactacggcacgctgggcgggctggcgctgatggtgccgctgacgctgggtacgatgctgttgctgctgccgtcggcgcaggcgaaggtggacaactgggatgttgagggggccaacggcacgctgtatgtgtacggggcactgacggagagtgcctgccggctggagatgggcagcgcacggcaggaggtggtgctgggcgaggtgggtaccggccggttgcagaaggtaggtgaccgtggcacgccggtgcagttcgagctgcgtctggaagattgcctgcgcagcccggcgggaagccgtgatgtgcgcaccggtggcctgacctgggccggcgaccagccggcggtgagcgtgagcttccgggcgacgcgcgacgcagacaccccggcgctggtgaaggcgcagggcgtctcggggctggggctgcggatggaagatgcgcgcggtaccgacgtgcggctgggcagccgcggtgcgccgctgttgctgacgccggggcggaacacgctgagctataccgtcaccccggaaaggacgccggcgaacctgacggcggggagctaccgtgcggtggtggattttcatctgagttatgactga

SEQ ID NO: 452012 - DNA, 507 bp, Serratia marcescens
atgaacggaacgacgcgataccggcggatggtgcgaggtctggccggtctgctgagtgcgatgccgctgctggcgctggcggccaacactgccacggtgacggtgaaggtgacggtggtggcgccgccgcagtgcaccatcaacgacaacaagccgatacaggtggagtttggtgatgtgatgacgagcaaggtggatggcagcaactacagcatgccggtgaactataccttgacgtgcaagagcgggggaagcaatgcgatgaagctgcaggtcaaggggactggggccagcttcaacagtgcggtgttgaaaaccaacaaaaccggcctggggatcaagttgctgcagggtagtagtaagagcgcgttggcgatcaacacctggctgaacttcagttaccccagcaaaccggcgctatgggccgtaccggtgaagcaaagcggtgcgaccctgacggcgggggagtttagtgcggcctcaacaatgatggtggattaccagtaa

SEQ ID NO: 452013 - DNA, 498 bp, Serratia marcescens
atgagcataacgacgaaagccctgttgctggccggcggcctgatgggaggtgtcatggccgtgcaggcagcgaacggtgaggcggacatgacgttccatggcacgttatttgacccgccgccttgttccgttaacaacgaccgggccattgaagtcgacttcggcgatgtcatgaccacccggatagacggcactgcttaccagatgccggtcgcttacaccctgtcctgctctgcgggggtacctaacacgatgaaattgcaggtgcagggcacgggggccagttttgatagcaacgtattgaaaaccaacaagaccggcttgggggtaaagttgcaacagggcaccaataagagcgcgctggccattaatacctggttgaactttacctaccctaacaagccggcgttgtgggcggtgccggtaaaacaaagcggagccaccctgaaaggtggcgagtttacggcgacggccacgctgagagtcgattaccagtaa

SEQ ID NO: 452014 - DNA, 504 bp, Serratia marcescens
atgaccaagcagatgatgataaacgttctgttgctggccgggctgtgtggctggcaggggggagcgctggcaagcggtgatgcggacgccaattttcgcggcacgctgatagagccgccgccgtgcaccatcaacgacggtaatcaggttgatgtggattttggtaatcgcgtggggatcaacaaggtcgacggcgtgaattaccgtattccggtgaactatcagctcagctgtgagggcggtggtggtggtggtggctgggcgctgacgctgagcctgaccggcggcgcgacgggatttgatacggatgcgctggctaccaacaagcaggacttggggatccgaatttatcagggtagcaagtcgtttgtgccgaatacgaagttaaacatcgacctggctaacccgccgcggctggaagccgtgccggtgaagcgcgccggcgccacgttgacggagggggcattcgaggcctgggccacgttgcgtgccgattaccaataa

SEQ ID NO: 452015 - DNA, 519 bp, Serratia marcescens
atgttgttgttgacacaactgctgggtgttgtcccgtctggcgccacggcggcagaagtaaacaacgtgcatctgtatggggcgttggtggcggagccgtgtgtcattccgccgggtgaagaagagattacgctggattttgggacggttatcgacaagtacctgtacctgaacacccgcacgctagggcagtcgttcgagatacacctgacggagtgcgacctgagcctggggaagacggtgaaggcgaccttcacgggcaccgagaatctggcgctggccggtttattggcgattgcccccggcagcgaggcgaccggcattgccattgggttggagactccagacgccaaaccgctgccgctcaacacggcgagcgatgcctggtcgctgcaggcggggagtaacaccctggtgttgaaggcgtatgtccagggtgagccggaagccatcgccaaagaaagtattgggcgcggtgcattccgggcggtggcgacctttagcctggagtatgaatag

SEQ ID NO: 452016 - DNA, 831 bp, Serratia marcescens
atgtataagtttattgccatgttgttggtatccctggccatatgggggcaatgggggggaatatttcctcttgctcatgcatcctcgtggctcgctgtgaccaagacaggtatttcacctgatgggatgcaccagtttacctatgagtttggtgtgatgcctgagcctgacaataaatcccctgtggattgcggtagtttgagtacgaaatgcctgatcgcgcctttctatgaagggagcacgttgtctagtcgttacacaggaccttttatccgtgtggataatatccattccgtcggttatatcgaagacgcgtgggtcaaggcctatggcagtgccggtaccgcctccatgcagacgacacaaacaggggccacgatggcatgttgggggtttatgtactttggcggcgacctcggtcagacgtctccaggtcgccgtttatccggttcgacgtgtgtcaaacccaaccccgagccgaatgtctgctcgctcacacccaccgcgttggttatcgactttggggtgaaagcaagtgttgatatacccgatgcgactgaagaggccgatgtccgtattgactgcaagtacgatgcgactgtacggctgctgctcgggagtgctgatgtgattaggcttaattcttcctctgaaggggaggcccccattgaggcggccctgacgattggggggaaacctctgcgtaataaccctatccagattagtggcgggaaagtgaagtcagtcagtttacgtaccacgctgcgcaacaccggggagttggtaagcggggagtacacggggagtgatgtgttgttgttgactaattga

SEQ ID NO: 452017 - DNA, 1035 bp, Serratia marcescens
ttgaatagggtgagcgtttgcgaaagcgacgcggttatcacccgggactgggaaacggcctggcgctggctgtgtcaacgccgccggcatgcaccgccgaatgccgacgtgtgggatgtgcggttcaaatggccacagcatcacgggcgacggttgaaccgcgttctggcagggcagtaccggttgtcacccatgcgggtgtggcgtcgcccaggcaacagcggggtgcaatggtcggcgctggatgcgctggttctcaagtgggtgacgctgcaggttgaacgggtgctgccccgccatcccaactgccatcacctgagaggacacggtggtgtcagcgggtcagtggctatggtgagtgcagcctggcgtagcgggcagtggcgttatgtctatcgcacggatattcgtgggtattatcgccatattttgaaacctcaggtggatgcgctgctgtgtcggtacatcgacgatgcggcctgccgggatttatgtcgccagtggctgtattacagcattgatgacggaggggaaatcacgacgccggaaaaaggcatttgccgcggtagtgcgttaagtccgctcattggtggcagcctgctctggcatatagaccgttattttgcggcgcgggcggagcttttttacgctcgctatatggatgactttattttattggcgaaaacacgctggcatttacgcaaggcggttaaatcgctgcatcagtattttgacttgggagggtttgaaacccacccggataaaacgcaactcgggaaaattgaacagggctttgactggttggggatagcgtattcccccctcgggccccggatatccccgagggcattagagaaccaccgggaacgactcgcgcggctttacgagcaggccaggtatcgtcgactgtccaaaacagagacggatgcgctggtgcgggagtatgaggcccggtgggttaaatgggctatgcataatctctcggatgaccataactttccggaggtgtctgctgatcaaaaccttgagggataa

SEQ ID NO: 452018 - DNA, 822 bp, Serratia marcescens
atgattcgtacccttctactcctcttaaccgtggtcctcgtccaccccggtccctgcgcggccgagtctgtcaagtggccatacctctcgtacgtaaacgttttttgcacctccggtgattgctctaatccggccagcgctgggaaactcaccattcaagtcggtgctgctgtcatgtccgacgctactgtccttgtttctggccagggccccgaaactaccgctgttcgcccctacctcctccgggccgtccgggacattcatgggaaggtcgtttggcaaaccattgacttgtccacatatgcaagtcgcgggccctgcgagacgctgtcctcgtggggggataaccagtggactctttctccagactccacatgctcattccctggtgttctcctcaccaacttgtccaccgtcggtggctgggtatgcgtggggtttgctaaacaacggaatagtctcccgacctcgcccgggggggctttcgattattatggtcaaggcgacaattgtcttaaagctgtgccgccctcggtcgaatgtaacctcaccgtcgggaacggtggcgttatcgaccatgggtctgtcgggcctgactcaacatcgatcgcacggctgggtggaaccgtatcctgcgggaccaagcccgttgtgtctattcttgggggggggggcgtgaccatggggccatctgtggatagccggctcgttgcttccctcgatggggacacctctctttcgatcacttccaccctcaccgtggggaaagcggaccctggggcatactctggctccgctgttattgtcgtgaatccccagtaa

SEQ ID NO: 452019 - DNA, 1407 bp, Serratia marcescens
atgacagaagtacaaaacttagaggttaaaaagccaactgctgattttagtccgtctaagaggttttttgtgagtatgctcacacgcgatattgaactaaatgacgcaatacttgatttgttagacaactgtgtcgatggagcacttcggagtaaaaaaacatcagaagatccccttaagccttatagaggttataaagctgtacttaatataaacgaaaatgaattttccattaccgataactgtggcggcattccgaaacgttttagagaatatgcattcaaaatgggacggccacataaccctgatgaagaaagtgaaggaactgttggggtttatggtataggaatgaaaagggctattttcaagatgggaacaagatgtgacataatatcaaaccatcccgaaggagcatttgatatatcgatcactccagaatggatttctggagagggatgggaaataccaatgaacgaaagtgcttatgatcagagtgagcattctggaactaaaataataataacatcacttcaagaaaatgtttccaaaaaatttggcgagaagagctatctaagcgatctttacaatcaaataaagcattcaatgtcctttattatacagaaaggtttttgcatagaactaaacggaaaggtagttgagccaaatccaatcaacataattaccgataacacctctatagaaccatatatttataaggccaaaattgatgatgttgacatcgatcttgttgtcggtttttataaaaacctagaagatgagtctgaagatgttgaatctaagagaagctcggaagatgctggctggactataatttgcaatgatcgagttgttctatattgtgataagtcacatatgacaggatggggatttggtaatgttcctcgttttcacactcaatttattgccatatctggagtcgtgagatttagcagtaaaaatccagaaaagttgccaataacaacaacaaagagaggtgtcgatttaggttctgctctatataatgatgtgaggaataaaatgatagaagggatgcttctatttattaaattcacaaatcaatggaaaggtgaccatttagaggaaggtaagaacttattgtctcaagcaagacctcatgaggctcaggagctatttagcgttgatcctgaaaatagccctgagagtaaaaaaaataattggtcaaatccaaatagaaataaaaacgaatggaggtatacgccttcattgccggctccgaaaactaaaaacaccaagtctaaaataatttttagtcgtgaaaaagatgatgtaaaaactcttgctaaatatttcttcggcgatgaggatgtagcagcatctgaggttgggatgaaatgttttgatactgttttgagtggggtgaaataa

SEQ ID NO: 452020 - DNA, 855 bp, Serratia marcescens
atgcttgaagactttaggttaatgcatagcagggtctctctaaataacttaatctcattagaggaagaatcaccagttcatactcgacaattatataacctcccttataattgcatcgattgtaagttgacaactagccatgactttattatagaacatgatttttcaaagccgacaattacatggcttgactacgcatctcccaaaaagctcaaagaagatttggatgatattcaaacgttatgtaagaaaatcagccaaaatgatatcctcaaggtgacctttcctataaatccggcttcttattatcaaaggcgcattggtgagtcactggagatatataaggaaagttttatcaatgcccttaaatcgaaattaagtaaaatgtatttggattttgatttggaaatacaagacgctgaactctcggattctaaaataagtttattattgacaaatataataaccaatgcatttaaactggctttagagcgagggttgactgataggcgtgataatttgaagttcttaccaatttcaattaataaatataatgatggcgcacatacaatgctaaccattcttggtatttatcagcaagaggagaattttcaagaacttctagatgaatgtaatattcgtcagtggcaatacatctcaaaaagttgggaagatgtacaattaatctccataccaacattgacgataaaagaaaaaattaatcttgacagtaagttacctaataaggacgattatttggctgcggctgcagagttttctcttaatgaaactgaaagggaaaattattataaatattatagattatatcccaattttcaaagagtcatggtgtga

SEQ ID NO: 452021 - DNA, 1203 bp, Serratia marcescens
atgatagaatgggagatcgttagttggcatgtatggcatggttattcgaatatgaatgtagttgatttattttcaggggttggtggtttaagcttaggggcaacacgtgcaggtttcaacttagctgctgccgttgaattagataagcatgctatttattctcattccttgaactttccagaatcacgacatttacaaaatgatgtgagtgaactcacagcccaagatattctaacagcctgcaatctgccccaaatcgactgcatcattggtggcccaccttgccaagggtttagctcaattggtaaagggaatgctgatgacaaaaggaatgagttatatatccacttttttaggctagtaagcgaactacatcctgtttgttttttagctgaaaatgttccaggtattatgaatgaaaaatacaactcagtaagagagaaagccttttcgcttgtcaatgatgaatatatattactacaccctataaaagccaacgcgtctaattatggagctcctacgacaaggacgcgaatatttttcattggatttaggagaaatttagttaatcaactaaaggaatctgacttttttccaaaaaaaatcatagagccaacttttgtgaaagatgctttatatggaatacctcgtataataaaaaaagaatggcaagaagaaaaacaaggttggcgtaacgtaaaaatggataaggtaggatattttttcaataggctttggggtcatgttcctgataaagttggagatactgagtcattaattaatttagaaaaaggcttaatatctggttttcttggtaccgttcataatgatgaaataattaatagatacaaaaaactttcattcggtgaaactgataaaatttctcgttctcaacgattaaatcctaacggattctgcccgactttaagagcagggactggcagcgacaagggaagttatcaagcagttagacctattcacccaactcaaaacagagtcataacacctcgcgaagctgctagattacaaggattcccagactggtttagattccacccaacaaagtggcatagttttaggcagattggtaacagtgttagccctctagtcgctgaagctatgttattgccactatataatttatgcgttgattctaaaaaagaaatgttgaacgcccaggagttgctcttaaatgctcaatag

SEQ ID NO: 452022 - DNA, 195 bp, Serratia marcescens
atgcgggggaggttattcccccgcatatttaaatttgtgagcggcatcatcctctctaagttattccatttcgttatcttccatccccgcctttgttttcccatatcactctgttttatcatgctttttaaaagcatggtggccggttttttttttataacctaccttgccggttttcactttctctacctatag

SEQ ID NO: 452023 - DNA, 1281 bp, Serratia marcescens
atggcgaacattcactctgaattgaaaaaaacgaaagatggactttttaatttttgcataaaatccagtaatggtgaaattatatttagtagtgaaagttatactagtaagcacacagcgatcacatgccttgaaacactccttgcggctattataaaagacgagtatgaggagggttatgaattcgatagcttcagaaagccttatatatcagtgaagacggattataatgttgtcgtgaatagcactacttatgacagctatgccgaggctaagttggcatttctcaattttaaaaattcgttgataggtaaagatgcttcaactatagataaaataaataaagacaaagcaatacaaaaagataatagagtcagtagtgtcgtggattttgttggtagagtttcaaggcttgaaagaaaacccggtactatttattattttagagggcactctgattatagttatgaactggttccgggaatatatagaaaagaaaaaagatggatcaatcatgagcacaaactgttcagggagataatgctgaaatgcccatccgaattcaaggggaacaatactacctttcagaacctcgtcaagatgcaacattatgcactaccgactagattgcttgatataacttctaacgctcttattgctttgtattttgcttgtataggagatcatgaaaaagaaaaagacggagaggtcataatatttagcattgatgactctgaagtaaaatattttgatgatgcaagtgtctcgttgctatctaatctaagtaaacaggagtatttgtttagtatgaaaaggatggttgatgctgaagaaattaaaagattctctgtaaattctaatgaatcgagacttgttaatgagcaagtaagtacatatcaaagtcgtagcttgatatgggctggtaaatcatctgccgctatagttttacttgatgcagtaaatagagatggatgttttattgattctcatgtttatgcagaagagctgaataaggttttttgtgtgaaacctgagatggataacccacgaatcattagacaggatggcgcatttcttttgtttggtatgaatgtggagaaaaagatgcctgcatctattcctagtggttatttatacaagggtaataaagaaagaataatagtaaaggctagtgagaaattaaaaataataaatgagttggagtcgctagggattaccgcaagtaatgtatatcctgaaatagaaaatgttgcaggccatatcaaaaatagatactcgtaa

SEQ ID NO: 452024 - DNA, 516 bp, Serratia marcescens
atgttacctgcgtgtagagcaaatgatagtatttttaaagcactaataggttcagaaatcaaatctggaaatacgaggaatgtctatgaagtaaatgggtatccttatttagtaattaaagaggatactaagagtgacaacggttcaaatgaaactgaagcgacgttatatttcactgctgttataaaaaaccttcaaaatgttcttgaatgcattgccgacattataagtatcagccagtcgggcaagtatcttattatggaaaaattagataccaacatcccaaataatttaagatccacgagtaagatgcctgctgaagtatctgataataagttaagtaatttcggggtaacccttaatggcaaaatagtaaaatgccttgattacgcgctgcttaataatgacaataaaccagaagcaatatcaggaaatgtgcgtcaaacgggcctcccctcggttgaggttgttggtcaaatggcggaatatattaaaataacaactggtaactcctaa

SEQ ID NO: 452025 - DNA, 225 bp, Serratia marcescens
atggccgacctcatggatttgtcacaagagcgtcaggctctgctattggatgcacagattgctaacgctcgtaaattctcggttatgccttctgctttcaaatgtgaagactgcgacgaaccgatccccgaagcacgccgcattgccctttctggggtagacacctgtgtctcctgccaacagctgcgtgaggccaagagtcgttcttacgtggtgcagtcatga

SEQ ID NO: 452026 - DNA, 237 bp, Serratia marcescens
atgaataaatgcattttcgggtttgatcctgccagcggcaaagatgttagtaccgtgactgttttacttaacgatgctcgcatggatgagcgcaggaatcaggctgaggttgctgcggctcgcttggtgcgtttagcagcacacatcacgtgcgacggcctaaatgtaactgaagctgtagaactgctacgccaagaagctgaagccatcgagagtcaagcgcaggagttgcactga

SEQ ID NO: 452027 - DNA, 573 bp, Serratia marcescens
atggaatttaatcagggtgctaaagcagctatcgaaaggatggttgaggcctacggggtcaagacaaaacttgccttgtgtgatgcgttaggtgtaactgctagcgctctttctaaccgacaagtccgtgattcgttcccagcggagtatgttctgaaatgcgcccttgataccggagcatcattacggtggctgacatatggacaaggtgaaatgcatgagaaaaacgttgttacagcaccatcgacacttgctgtaccaagtaaaaaactgttaggtcgccagcttcatgatagcgatactctattgctagataaaaaattccttcccgaaggaatcaagagtccactgattataattgatggtgaagttcaatacatcgcaactcagatttatgaagagatttatgatggcacttggcttattgatattgatggaaacataagcatccgggatttagttcgcataccgggaaacaagttaaatgtttccgataacaaacactcatttgactgtcaaattgaagatataaatgcaattgccaaaatactatccatttgcacagcagtataa

SEQ ID NO: 452028 - DNA, 1092 bp, Serratia marcescens
atgagcaaagaaaaaagagagttctcggagctgtccggttcaatgaacaaagtcattagtagattaggaagtgaaataaacaactccccaacactcggaggaaataaaaatggcgaattaagcatcgcagcaacaacaagatcaattcttcagcacatacacaaaaacgaatcagcctggaacaataaaacaagttattgcaaaaaatggcactggcttaacttaaagaatgaaatagaaaagaacgtcaataacgaggagatattatcctcattataccctttcattttagaacacagattaacatcagaagatactattaatagcgaacttaaaagcatcatctatgaattagatgagaattacgaaacacttccagataaactcaaaaacacaattgaaacattaaatagaaacctaatgtttgatatatacagagaaaggctatccgatgaaaaatacgccattacagagagaatcatagactcatgcaattcgattaaagaattcgatgaaacttgggaaaagaagataaaaaaaacaacagaagagataaaatcctttgacaaaaaacttgaaaaaataaaacaaaacgagaacttaaatgcattaaaggaagctctatcagaaataaaaaaagacaaagagttagagaaaagaaacacattcgccacactgtgctttataggcctttccttgatgcttgcaataagccttgaaataacctcccgcataaaaaactggataccaattgccgacacaaaagataccttactaatacttattccatttacatccctcatcatcctaattctctatttcttccgaattacattacacaactatcagtcacttaaaacccaaataattcaaatagaatggagggagaaactttgttcgttcatccaaatatatgtcgaatttaaaaaagaaaaacacactgcagctcctgaggccttcgactcattcgaaagattaatattctccaacatgacggcacatagtaaaaccccatcaccatacgatgggatagagcctttaattgcattaatgaaagaagtaagaaagttaaatgaaaatcaaaagccataa

SEQ ID NO: 452029 - DNA, 285 bp, Serratia marcescens
atgatgttggaggtggtttccgccgcgtctttgccggtggcaacgcgaacaaccaccgtgaccggtttcgcctgttcggcgatcgcccgcagcgacgccgccagcgtgccttttttaccggccttgccggaagcggccagcacgtcggtgatcagtaccggggtatcgagcgggaaaaccgacgcgtcggcatcctccgccgtgcagaccatgccgacgattgccgtcgatacggtggaaataacgcgggtgccgtcgttgatttcgacgacgcgcacgccgtga

SEQ ID NO: 452030 - DNA, 315 bp, Serratia marcescens
atgcagcgccaacagcgcttcgcgcgtctgctgggtcactttctgctcatcggcccgcttctgctcactcgcctccagcgcggtacgcagagcgtgcagttcctcctggtgctcgcgctggcgttgtacaagcgtctgtaccgatgcctgcgcagcggactccagctcggtgacgcgccgttcggcctgcatcgccgtcgctttggttttggcggtttcctgcgtcgcctgccgcagcagcgcctcggcgcgctgcgcatcgggcgagccgcgccaggcggcgcccagcccggagatccactgctgcagcgttga

SEQ ID NO: 452031 - DNA, 1248 bp, Serratia marcescens
atgcgcctgcaccagccgattgtcggcgtcgtagcggtagtgctgttcgtacaggccgttgcgccggctgatcaggttgccccaggcgtcgtaacggtaaaacagtttttgccagtgcgtcagccggttgtcggcgatcggcgccagcggcaggtgcgcgtcgatgtcgctctgcgggctgcgttcgcccagcaggttatccgccagatcgtacaccagccgcgcgcccggtttgccctgattaggttcgcggtgttgcagcaggcggccttcggcgtcgtaaccgtagtgcacttcgccgcgcagcgcgtcgctcaccccggccagctcgccgcggccggtatagcgataagcgcgccacagcacgccgtcttccggccgggtcagtttgtcgtggccgaaggcgctgctctgccagctgcggcggcccatggcgtcgtaacgccgctgctgctgcagcgccccctggctgcggccggtttcccggtgcaggcgatcgcgggtgaattcgcttaccacctgctggttgaatttaatggcgctggcgtggccggagccgtaatacagccactgcaggcgatcgccctgcggcagcgtcagcgcctgcaggttggccagcgcatcccactggtattgcagctcgccgttcacgccctgttcgccgagcagccgcccggcggcgtcatagcgcatctgcacgctgtccggctcgatgcccagcgccgcgccgctcgcggtcggcaggcggttcagctcgcgcagccgccccatggcgtcgaagcggtaatgccattccgcgctggcgttgccgcgccagaccagctgccccgcctcgtcgaagcggaagcgctgttcgcgctgcgtcagctcgcccgcgctgcccggcaggccgacctcgcggtgctcctccagcagcccggccgcgccgtagcgataatagtggcgggtgtcgtccgggcgctcttcggccagcacgcggcccaccgcatcgtagctgaagcggtattcgccgccgttgccgttctccagccgcgtcagccagccctgcgggctgtagtgatagcgccgggtgcggttgatgcggtcggtgatgctgaccggcagccccaaggcgttgtactgccagcgggtcaggctgcccagcgcgtcctgatgctcggccagctggccgtgtgcattccagttaaagcgctcttcgccgccgtccgggtggatcagggtgtgcaggcgcccaccgttatcccatag

SEQ ID NO: 452032 - DNA, 237 bp, Serratia marcescens
atgatgggtaatttatctgtaagcgataagaaggttatgtcgaagttgaattatctggcgcgtgtagggttaaaggttgttgagtgccacgttaattttcgccgcccggttattgaagttgaagcaccgctgcaagattgggtaaagggtgccgtggaaatcacggaaacgcgaaacggaattaagcgcactgtcaaaatgacgatatggcatggcgcacacatcatctggtgttaa

SEQ ID NO: 452033 - DNA, 249 bp, Serratia marcescens
atgaccaccccgataatttcccttaccgccgctcgcgcgctgcaccttgccgcccaggggctgctttctccgcttaaacgccaggctcggcccgacgacgtcgtaaacgcgatccagcgcatggggctgttacaaatcgataccattagcgtcgtcgcccgcagcccgtatctggtgctgttcagccgtttgggggcctatcaaccggaatggctggagcaggcgctcgccggccgcaagctgttctag

SEQ ID NO: 452034 - DNA, 243 bp, Serratia marcescens
atggcaatgcgctgtcctcgctgccgtgcaatagcaaaaaccagaaccagcgttgagctgagtttgcttgtacggcgcagctatcaccagtgtcaaaatatgttgtgcgggtactgtttcaccagcatgacggaaatagacggttcacttaatcagacccagccagcgcccggcgcgatggtgccacaagaggctttcccgcgaagtcaccacggcgacgatcagttatcgctggcactgtaa

SEQ ID NO: 452035 - DNA, 846 bp, Serratia marcescens
atgccaatgacaaattttttccgcgccgcagtagagggcgcaacctgtgacggccgcgtgctggaacgtcagcacatcaccgaaatggccgaacagtacgatccccaggtctatggcgcccgcgtcaatctggagcacattttaggctggtcgccgacaagcgatttccgcgcgtatggtgatgtggtcgagactaaaaccgaagagattgccgaaggtccgttaaagggcaagctggcgcttctggtgaaggtggacgccacggatgaactggtcgaactgaagaagaaacgccagaaaatctaccatagcgttgaggtgcatccgtcctttgcagacaccggcaaagcctaccttatggggctggcctgtactgataacccggcgagcctgggcaccgaaatgatgaagttttgcacccagaacgccagcgctaacccactggccgcgcgtcactatgcacctgaatgcttcttcactgaaaccctggaatcgtctcttgaatttgcgcaggaagagccgccagcgtccgacaccgggaagaatttcttttcccgtatcaaggaaatgctgaccggaacccgccagcacttcgatcgtgaaaatggcgatattcgccaggcggttgaactggtagcggaaagccagggtgaattgctggacaagatggaaaaactgagcgcagggcagcttaagaacaagcaaaccgccgaagcggtggagaagttgcgctctgagttcgacgagatgaaagcgcagctttctacccaggacgccagcaaattccgccgcccggaagcgaccggcgcaactgaaaaatctaacgcccagcttgctgactgctga

SEQ ID NO: 452036 - DNA, 243 bp, Serratia marcescens
atgagctatctgggaagcaaagcggcgagcggggtttatcagaagattattgctgaaatgcccccgcatgatacctacattgaaacccatctgggaggtggggcggtgatgctgcgtaagccactggcgatgtgcaatatcgggatcgatgttgacccagaaatggtaggggctgttgtcgatttttgtgtgatccaaatgggtattttggaaaaaggaattgacgacgccgcgccgcgttga

SEQ ID NO: 452037 - DNA, 207 bp, Serratia marcescens
atgttgaaaacatgcccattttgtggcggaaagccaagcagagagcgtattgagccgcacacacacccgatcagttttatgccggactacccaggcgcatggatcatcaactgcgatgcctgtgaattccgaatgttcagtcatgaatcgattgctgatgtagagcgcaaatggaaccaaagagtcatcactacggaggccaaataa

SEQ ID NO: 452038 - DNA, 870 bp, Serratia marcescens
atgacaccacaacagcaagcgcagaaatggttgcacgaaaactgcctgattctggataccgagaccaccgggcttggtgaggatgccgagatcgtggaaatcgccctgatcgacactaccggcgaagccctgctcaacacgctggtaaaaccgcgaagcgtgattccagcctccgcgacagccattcacggcattacaaacgaaatggtagcgactgcgccatcctggccgcatgtgtgccgcagtctttacgacatcatcagcgggcgcaaagtcgtgatttacaacagtgacttcgacacccggattcttgatcagaccaatgatgattgggggatcactattcactttaaaatcgagcgaccaacgtttgaatgcgccatgctggcctatgccgaattctacggccagatcagcaagcgcggcgggtataaatggcaaaggctgaccgccgccgctgagcagcaaggcgtcattatcgaaggaacgccgcatcgcgccctttctgactgcctgaccaccctcggcgtgattaaagccatggccgccggtggttcccgttacgcaccgcaggggctgagtgcgcaagcggccgttgacatccttcaccggctgtttgttgctgatcctgatgccatcactgcattggtggatcatcgcgtcgagtgtactgaatattttgctgggatgacggttgcgactgtaggacggcgtgccgacgatgcttatgtcgtaggtatgattggcattatcaacgcactgatttttcccgaagtaattgcagctatttacgatggtaatgagctaacgggatttgctgttgctgacatttccgcagaaggggcgctgtatgaacaagcccgcccttaa

SEQ ID NO: 452039 - DNA, 285 bp, Serratia marcescens
atgtctgatcatcaagttacctgtatcaaaaaatctattcgacaaagtgcgcatgagcgtatcacctcgatcggtggtaccaatgccaacggtagtcgctggtctctgtctcaggaagaagccattgcaggaattgaatccggaaaatggcgattttgggtcaccgcaaatggccattccgtctgggttattgtctcaaccagcgcggcgggaaataaatacctcaaaacacaaaatgacggcgaacaccccaataacctgctcaacctgccggaatgcccctga

SEQ ID NO: 452040 - DNA, 1371 bp, Serratia marcescens
atgactttgtggaggctggcctaccgcatcttgatcgtctcgctgggcagcatctgcatgatgctatctcccatattatctgcgacttcgcgcagtaatcatgacgatatcccggccttgttacagtttgccgaaaaatacaacgaacaggcccagtcatctggccgctccacatactcctaccccgcaaaaaacagcgtaaaaaggcccccctcgggcaaacaagctccatcacgaagtgaacagtggcgcatgaaggataaagagatcttgcgccaagacgtagaaatcagcgcattaaaagcgcaaattgcttatctaaaacaaagcggtacaacacccatgacgatgccgaatttaaccactctcagtaaattcgcgcagggattacgccaggctttgggtatcagcccgacggaaagacaggcaaaggccggcattttacagttgcagcaaatatgggaaaaagaccgggaggcattgcaacaacagttatccaaagcaaaatcggataaccaaatcttatctacgacagtcagcaacaaaaaagatctgctgatcgaagccgaaagtcgcacggcggttttgcaagaacggctggaagaactgcacactcagcgccaactgatgcaaaccgagttggatgatacggtacaacaattagcaaatgcacgagctgaatcgatatctctgcacgccaaaattccacggaaaatttccgaagatgagttaaaagactctcagtcacgagagaattatgccgccggggtctctttaggtgaggaaatcctgcaaatgcagcaagaacgacagctatggggggtaaacgcggataaacagatgatacttgccggcattacagacaccttcgcaaataagcgggtgttatccgatgatgaactgagtaaggcattgactgccggtgaagccaaagtgaccaacgcaagagcaaaagtcagctcagctcagcgacaaaagggcactgactatataaacgcattcaagaaagataaacgcgtttatcaagcctcttcgggattttggtaccgtatcgactatgcaggtgacagcaagctcccagagacagcctccgttgatgtggtcgttaaagaatcactggttgacggtacggtgatacaagatatggaagccagcggtgctaccctctcgcaaccagttgacaattttcctcctttattccaggaagcccttgttaagttgaagaaccatggctcgatgactttggtagtccctcctgaactggcatatggggaaaacggctacgcccctaaaataccgccgaacgccaccatgatctacacattgcgtattgcagagacatatccagagcctcgtagggaaagtcactga

SEQ ID NO: 452041 - DNA, 396 bp, Serratia marcescens
atgagacattcccccctccacatctcactcgcgatggtaggtctactgttactgaatggatgtcagtccaccaaaatatctcgggctaaaaccaccgtcgcggtgggaacccatgacgaaaaaacgctgcgtgagatccaagacttaaagcagtgccagcagaatttgaacgcgctcggcgcacttaaaaccgtgagctacccagctaaaaagcgcatgttcgacgagctaatgtccggcgcatcacaatatgccggtatacgtgcacaggttaatgaactcacgcaggataccgtcgacgcgctttatcgctatcaggtgaactatcaatgcgcagagattaatcagatattgcttgccgaactggccaaacgcggcggggtaccatcacgatga

SEQ ID NO: 452042 - DNA, 633 bp, Serratia marcescens
atgaaaaattcacaaaataaaaacataaatgacagattgattatagccattatagatgaagataaattctacaccgccggattagtgatagccttgtccctccacttaaaaaccagagggatcaatgctaattttcacttcgatggtaaatatgagaggaatgctgacattgtttttcaggcagtacgcagcggcacttgcctgcttaccgactgtcacatacctaaggccagtggcaagccgatttatttttttatcacggaaagaaaagacacgcatcttcagcatttatatcgcgatataaaaaaatgcactattttatatcgacatcaatcggtaggtaccctcttgcagtatattggcaccattctcttttcccaacaacggtcgtatgaaaaagagcgaccggagcctaataagaaacttacagtgcgcgaacaagaggttttacatcatctcggacaaggtaaaacgcctgctggtgcggcgagttgcatggggatcaaggagaaaactatcagttcccacaaacgtgcggcaatgaagaagctgaatttcaaacgctccaacgagctattccattggatgctacagggcggtttactccgccacccaccaagaaaaggaagctaa

SEQ ID NO: 452043 - DNA, 795 bp, Serratia marcescens
atgaaatatataataaatctaactgtcgttttcgatccggaaagccgtgtactgatgcttaggaataaccatgacttaaacgtggtcttatcaaacccggcaacgcggttgctatccgagctgatcaaaaacaataaaaccgaattacctcgagaaacgttaatcaaaaacgtttgggaagattatggtttctctccatccagtgcaacgttgagcaaccatatcagtgagctgagaaaatccttcgaatcgctgggaatgagtaaagacattctggtcacggtaccgcggataggttttaaaatggacgcggaaattcatcccgagactaaacagccacaagatcagtcagaggttgaagaaaccaatttacctctcctcacaaaccaggcatctgagcagcacaatatcgcgcccaagcagatcgctgtgagcgataaaaaaccatcgcgtagcataaagataccggcattttctctcactattaccctgctcatcattgcagtaacggcagttttcaccttcaacagaggcgaaaaactggcgcttatggggatccaggataattgtaatctttatgctgtggatgaggagatacatgataccgaacagtctgagcgggcgagaaagatgcttgctgatgaaggcatagattgtcagcaggcagatcgcgacatctactatatagagacacgccaagacaacgaactgcttaaggttgctttcatggccgtctgcactaggaatggcaacatgaactataaaaactgcaacaattacaaacaggttgagtaa

SEQ ID NO: 452044 - DNA, 537 bp, Serratia marcescens
atgaaacagcgaaaaaatcgttatgcggcgctttgcctgttaatgctgtttcccttggagaatagcctggcaacggcttcaggttggggacgggttaacatgcaaggtgctgttattgagactgcctgtgctattgacaccgatagtcgcgatcaaactattgatatgtccgtgcttccgctgggccaaattattcgtgatgggcagggtgttgcgcgtcccttcagcattcatctggttaattgtgtgttagaccgaattgatgaaaatttgccgaaatggcgacgttttcaggttacgttcgatggcaggattgataatggcctattcggtatcgatggtcaagcacgtggggttgcgctacagcttgccgacagaaacggaaatatcgttgcgccggggagcccaacgccttttattgatattaccgagggtaacagagagctaaattactctctgcggttagtcagtaatcggcaagtactacgcagtggggaatatacctcaactattagatttaaaatggattattactga

SEQ ID NO: 452045 - DNA, 651 bp, Serratia marcescens
atgcagcagcgaaaacagagacgtggcctcctgtcttgcccagagcggcaatacctattggctaaggttgctgcggcgctgatggtacccattgtcgtgagtagtgtgatggtgctgatgcctgaggcctgtgcggtggataactggaacgtcgacggtgccaacggcgtattgcatgtgcatggtgcgctgagtgagagcgcttgtcgcctggatatggcatcggcttatcaggatgtttggctgggcgataccggcacggcgcggttgacgcaaagtggggcgcagggcacgccggtcacggtggaactgcgtttgcgggattgcttacgcagcccggcaaacagtcgcgatcagcgcagcggcaacctgttgtggaccccgcatcaacctgtggtttccgttagcttcgtcgcaccggcggatgcggataatccgcaactgatcggggtgcggggggcttccggtatcgggttacggatgcttgatgcacaggggcgggatattcgtctgggtagccgtggggcgccgctgatgctggcggtggggcaagatagcctggcctataccctgatgccggaacggacgcgggcaccgttgcgggctggcgcttattcggcccatatcgacttcaggcttaactatgactag

SEQ ID NO: 452046 - DNA, 819 bp, Serratia marcescens
atgctacgcgcctgtctgattctcctcgccctcattccagccgccgaatcgctggctattaccactgaccccttcgtacggaagaccgatatatggcccccttcagtgtctatgatcgacgacggagccgacaactggacatatagtaggacgtttctcactggtgggctctttaacgcgatcgaggttcggatccaccccgcctcaacattggcgggatacggccacaagaggtatttctacttcgaccgtacctgcaacaggacagttcccgtcacatgcagcggattcgtacttgaatctactgcacatgggaaaccgtccgtcgcggacgtacaggggtacctgaggcacatctctggagttcctatgacacaaaagactgactccgaaggtgcaatgggtgacctatgcttcgcacaggtcttcgtacacgtaaagggagtggtgacgaattactatagttggtgcgcccgggacccgatcgaacctgtctcatgtgtggcggccgcggggggggtaattgaccatggacgacatccagcgggcgtaatagaatccaacgcacacggacaatggagggttacctgcaccgcgccatcgcgtgtaaccatcgaaattcaacgcaccgtggacacttacaacgacgctggtgtgaaactacccacgcagctacatttagggactcgtggagtgtctgagatcaacgaaacggtgaccgataccgcttcaggggttatactgtcttccgtgacttccgtgggaacagatgccggagtgttcacagggtctggtatcttacgtgtctcatgggattag

SEQ ID NO: 452047 - DNA, 237 bp, Serratia marcescens
atgagtttaagttttattgcaagagtcttgcgccaattggcaattatgtttgtcctctccgtgcttattgtggccggatatatctactatgccggtaaacagcatcagcaggcagcaatcaacttttggggtgagcaataccagcctgatgccatctcgacgcaaattgattgggggtttatcggtaactgggttattcctcgcggggggccaattatttctccgggcattgggtaa

SEQ ID NO: 452048 - DNA, 162 bp, Serratia marcescens
atgacaattccaaccccacttttaaccacccctgaaaaattcataacagcccagaacggcagcctgatcaccacatcattagcagttgctgaagccttcacccgcgaacacaaaaatgttatgcaaagcattgaggcgttagaaggggtcggttccggctga

SEQ ID NO: 452049 - DNA, 264 bp, Serratia marcescens
atgaaatctaatcacgcggcacgccggcagctgggcatgtcgtacaaattcagccggcgccagcgttacccgtgggtgttcctatacatcccgactcaaatagcacagcaattcttgctcccggagcgcgttaaggggctggatgagatggctgtgaagtacgagccgacaccgttccacaatttcattatcgacgcatacggatattacccggtatcggcattttatccggcccatgtggccaacgtgagggcaaaggaatga

SEQ ID NO: 452050 - DNA, 756 bp, Serratia marcescens
gtgagtgtaaaactttcagaggtgatcagcttgctggaggagcgggggccgtcgtcgctggacacgctggcgcacgtcctggacgagagcgaaaccacgttacgcgcgctgttaactggggcctatcgccggggaacgcttggctttgataatgggctgtattcagtcctgagcgcctcagagcaagaggctgtaaggctaaccatgtctccgccggccgcgccggcatcaaaaccaacggcgccggctaagccaaaggtgacggccgcccagctgcgtgaactgttggcgcaacgagggaaaatgaccgctgcggagttggcctccgcaacggggataggttcggggaatattgggccgctattggcccatgatcgcatcgccggccgcgtacggctgatcaagttggatcgagtgaattactacaagctggaagagaagcgcgatagcgtgccgcctgccgcgcctgccgcgcctgccgcgcctgccgcgcctgccgcgcctgccgcaacggatgatagcccgccggcgccgccggtagctcctgcagctggtggatcaggcacaaatgatgtgacgcagaccagcgcgccggcaatagcaaacatggaaacgatcacggttccgactgtggagtttatgacgtcagagattcaccgcctgatcggcgaactgcgccacgcaaaagagttgcgcgcggcgctgataaacctgaaccgtttaacaaaaggcgagctggtggaggatgtgaactga

SEQ ID NO: 452051 - DNA, 252 bp, Serratia marcescens
atgaaaaccatgaattacagtgaagctcggcagaatttcgccagcatcatgaatgaaaccattgatgatcgggcgcccattctcatcactcgccaaaaaggtacaccttgcgttttgatgtcgcttgaagagtatgaagccctggaagaaacggcttacctgttgcgttcgccggctaacgcccgtcatttgatggattccatcgcacagctcaaagcagataaaggcgttgagcgagatctggcggaatga

SEQ ID NO: 452052 - DNA, 306 bp, Serratia marcescens
atggcggaattttctggggttcccgcttacccccccgcgctgctggattcgttgcgggcaatgacggtgcaggaaacgctagaccggctgggcctgtactggaaacgtgaacctggctttgtgccggtgaaggacaaggctacggtgcggctgaatgtgtccattggtggcggcggtgttgagctactggcgaccgggccgaagtggtacgacacgcggaaagagcagggcggcggtgccatcgacctgaccatgcacctgttcagattgtcatttgtggatgcggtcaaacggctgtcgccttga

SEQ ID NO: 452053 - DNA, 1377 bp, Serratia marcescens
atggggcaagcacagctacgacttttcagcccagccgatgaggcgggttgctatcacgacacagcccggcagggctttttctcgttgctcatggcgacgggcgagggcagcggcaagaagcaggacagttaccggctgtcacagatgcccgtggtgctctccatgctcgaccacagccgggatacgtggctgtctcaggccgagttcatcaagccaaaccgccgtgtcgtcaatctggcccgtatcgggctgctgttcgctgacttggacacctaccgcgagccgtgggcgcaggggcgcagccccgagcaactggccgccgctgtcatgttccgctgctacgacgaaggcgtgccgccgccgtcgatcctcgttttctctggccgtggcgtgcaagcaaagtggctgctggatggcaccttgccgcgtcaggcgctgccacgctggaatgcctgccagcgttacctgatcgaccgtctggccgggctgggcgctgatccagcggccaaggatgcaagccgcgtgctgcggctggtcaatacggtgaacagcaagagcggcgaggtttgccgcgtcatccacgttgagcaaggcccggacggcgagccgatccggtacaacttcgagtatctggccgaggcgctactgccggtggcccgctgggacatcgaggccgaccgcaaggcccgcgccgaccgtcgccagttcaagctgctgccgggcggccaaaccggcaacctgcgcacgctcaacgggcggcaactggcgtgggatcgtctggaggacttgcgcacgctggccgcgctgcgcggcggcgtggccgagggcgagcggatgcagcacctgttttggcggctgaatttcctgctgctgtcaggtgcgacgcacaccggccagatgtaccacgaggccgccgcgctggcccgtgagcttgacccacggtggaactaccgcagcgccgagcttatgacgctgtacgccaaggccaaggctcacgaagccggggaaaaggtggagttcggcggcaagcagtttgcgccgctctacacgcccaagaacgacacgcttatcagcctgtttcacatcaccgacgacgagcagcgcaagctgcgcacgctcatcagccgggacatggccgcagagcgccacagcgagcgcgagaaagcccgcagacgtgccgctggggctgtcgatcgtgcttcctatctggaagcagccagcgccaagcaggcgcaggctttggccctcaaggcgcagggtctgagcgtgcgggccattgctgcacagatgggcattagcaagaccgctgccgggcgctacatcgcagagccgggagagtgtcccaagtccatgcgtattacaggcggggagggctga

SEQ ID NO: 452054 - DNA, 387 bp, Serratia marcescens; identical to SEQ ID NO: 269191

SEQ ID NO: 452055 - DNA, 222 bp, Serratia marcescens; identical to SEQ ID NO: 269192

SEQ ID NO: 452056 - DNA, 639 bp, Serratia marcescens
atgcaagtcattgctgtactgaaccagaagggcggggcgggtaaaaccaccatcgccacccaccttgcccgcgccctgcaactcgacggcgcagacgtgttgctggttgattctgacccgcagggcagcgcccgcgattgggccgccgtccgcgaggatcaacccgtgcccgtggttggcatcgaccggcccaccatcgagcgcgatctaaagagcgtggcccggaaagactttgttgtgatcgacggagcgccgcaggctcatgacttggccgtgtcggcaatgaaggccgccgattgcgtgctgatcccggtgcagccgtcgccctacgacatttgggcaacctctgacctcgtggatttggtcaagcagcgcatcgagctgaccgacggcaagctgaaagcggctttcgtggtgtcccgtgcgatcaagggcaccaagattggtgcggaagtctccgaggcgctggccgggtacggcctgccgatcctgcaaacgcgcatcacgcagcgcgtcatctacccgagcagcgcggccagcggcaccacggccattgaccaagagccgacgagcgaggccgccgaggaaatccgggcgctcgctgaggaagtgcgccgtttcctcaattgcaccatttga

SEQ ID NO: 452057 - DNA, 168 bp, Serratia marcescens
atggacgtgcaagactggcagcgcatcgcccggcaggagcttgagcgccgggctaccagcatcgtgcaggcgctggatgatgcgacccttgaggccatcgcagcgggcacgctcgacatgctggccatgtgccgacaggtggccgacgagatccaccaggccgcctaa

SEQ ID NO: 452058 - DNA, 444 bp, Serratia marcescens; identical to SEQ ID NO: 127110

SEQ ID NO: 452059 - DNA, 540 bp, Serratia marcescens; identical to SEQ ID NO: 127111

SEQ ID NO: 452060 - DNA, 705 bp, Serratia marcescens; identical to SEQ ID NO: 127112

SEQ ID NO: 452061 - DNA, 969 bp, Serratia marcescens
atgaccattatcgccgcatattattacaacgaaggtaagcgagtccgtgaaatcaggctcgatgagcacgtcgaactaaacgagaatcgctcgggcttctgctggatcgcgcttagcgagcccaccgcagacgaactcagcgcgatccagacgacgtataacctccatcctttggcgatcgacaacgccatgcacccgctgtgcccgcccaagctcgaggtctacaacgatgagttgtacgtcgtcgcccagaccgccgagctggtcggcgaccggatcagctacggcaagatggcgatcttcaccggtcacaatcaccttatcaccgtgcggcacggcaatgccggagcgctgggcaaacttcgggagcaactcgaggcatcgccgacgcagttcggcaagggtgtcgactatgtgctgcacgcgatcttgcaccgagtggtcgaccagtatctgcccatcttcgaaatgatcgaggacgacgtcctggcgatggagcgacggtcgctgcacgatttcctcgggccagaagaggtggcgcgaatcttcgaactaaggtccgaactcacgcggttccagcgcacgctcggggctatggccgagctggtgcgaaagctcgttcgcggccactttccctgcatcagcgccgaaatgacaccatatttccacgacgtcgcggaccatgtccaccgcgtgcagtccatggtcgacggcctcctgcttatcctgtccacggtcttcgaggccagcagccttctggaagcgcaaaggatcggtgtggtcactcgccagctcgcggcctgggcggcgatcttggcggtcccgacggcgatcgccggaatatatggcatgaacttcaagcacatgccggaactggacacgccatatggctacttcgtcgtgctcggagtgatagcggtgttctgccttctcctattcatgcgcttcaagaaggccaagtggctatga

SEQ ID NO: 452062 - DNA, 405 bp, Serratia marcescens
atgacctcccaggtgaccgacgttctagaagcagtccagtcattcatcgccaaaggctatgaccgcgaataccgcgtcaaggacggcaatctcgtcgatctcgaactagggtcaaccctcgatgcatgcagcattcgcgtcgatgcggcgttgcgcctcgagagcggggacgacggcgaagatgcctccaacatctacgcgatcaccgatccggcgacagagcataaaggcctgttgatcgacgccttcgacgtgttccacgaaatctgcccccgcgacttgtccgagcgccttgtggcgcatcgggaaacagcaccggcaggtgaccaggacgcgccgagcaagcacggactacggaaagtctacaaggggagcccgcagaattcggaaaaaatcgtacgctaa

SEQ ID NO: 452063 - DNA, 1269 bp, Serratia marcescens; identical to SEQ ID NO: 200679

SEQ ID NO: 452064 - DNA, 372 bp, Serratia marcescens; identical to SEQ ID NO: 200680

SEQ ID NO: 452065 - DNA, 846 bp, Serratia marcescens; identical to SEQ ID NO: 307302

SEQ ID NO: 452066 - DNA, 765 bp, Serratia marcescens; identical to SEQ ID NO: 6031

SEQ ID NO: 452067 - DNA, 258 bp, Serratia marcescens; identical to SEQ ID NO: 231742

SEQ ID NO: 452068 - DNA, 705 bp, Serratia marcescens; identical to SEQ ID NO: 45284

SEQ ID NO: 452069 - DNA, 573 bp, Serratia marcescens; identical to SEQ ID NO: 49122

SEQ ID NO: 452070 - DNA, 912 bp, Serratia marcescens
atggcacgtcagggcatcacttttgagcaggtcgccgccgtcgctgatgcgctggcaggcgagggtcagcagccgaccatccgggcggtgcgggagaagctgggcgacaccggcagcccgaacactattcacaagcacttgaccgcgtggcgcgaggcccgcccggtggccgcagccgctgcgccggaactgccgcaggcgctgaccgctgccattgccgccgagatcgagcgggccgcatcgcgggcacgcggcgagatcgagggccgtctggtgcaggcgcaggcggaggccgccgaactggccgccgctggcgaggtgctggaaggcgaacgcgacgagctggccgagcaggtggccgtgctgaccactgagcgcgacacgctggcaggcaaagccgcccagcaggccgccgacttggccgaggcgcagcagcgcatcgagcgcgagcagcaggcggcagagtctgcccggctggaggtggcaaccgcccggcacaagatcgaggcgcaggccgagcgcgtgagcgagcaggccgccgagcttgagctcctacgcgccgcactggccgaggcacagcagggccgcaccgccgccgaacaacaggccgccgtgctggccgccaagctggaggcgtgcgccgaccgtgtgagccgcgcagaggcccgcgccgagcagatcgagcagcaggccgccaaggctgcacaggcccacgacaccgcccgcgccgcagcagcgcaggaaacccggcagacgcaggccgagcgtgacgaggctcgcaaggtggcagcagaggcccgcgagcaggccgcacgacttaccgggcagcttgaggcgctgcaacggcagcaggacaaagccgaggccgccgagaaggccacgaaggcaccgaaagggaaggggggcgagtga

SEQ ID NO: 452071 - DNA, 192 bp, Serratia marcescens
atgccaagcgccgcagaatttcaggcgctgtccgatgagttgcggcagcttggggcggtgatcgtgcaggctgcgaacctgggcgatcaggagcttgcattgtgggccgtgggggcgctgtcatccgcagccgcccgtcctgcatggtgggcgagagaggccgcagacagcgaagctgtgggatgcaaataa

SEQ ID NO: 452072 - DNA, 828 bp, Serratia marcescens
atgtccaaaacccgaaaacacctcaccccgaccgaagcagaggccaaggggcttctatgccgtaagcacctcaaggaacgcctccgcctcatgccgggactaaacaccaagcccgctggcagtgtctggcaaggtcagggggcttatgatgtgtacaacccagccgagtgcgtgccgtggcgctggatgcctgggcgtgcccaagtccgtcgccagcacgtcgcagcgcaggcaaaagacctgatcgccgcaggctgcattgtgctcgacaccgaaaccaccggcctcggtgatgacgccgagatttgcgagataaccatactcgacgtgaccggcgcaccgatcctcgacacgctggtacgcccgacccggccaatcccggtcgaggcgacagcgattcacaaaatcaccgacgccatggtggccagtgcgccgagctggcccgaggtggccgagcagtacgccgccgccgttgctggccgaaccgtcgttgcctacaacgtcgcttttgatgcgcgcttgctgcggcagacctatcagatacacggaatcaccgcgccagtgttgacgaccgcttgcgcgatgctgatgtatgccgagtggcatggagagtacgaccggagccgcgaccgctggcgatggttgaagctgatcgaggctgcgaccgactgcggcgtggcagaagacggcgcacaccgcgcccttgccgacgcccgcatgacgctgggtgtgctgcgatacttgcagcgccgcacgaacggacggcgaccggcagggccgaaagtggccaccgtcccgcaggaggctttgccctctgttttaggatga

SEQ ID NO: 452073 - DNA, 279 bp, Serratia marcescens; identical to SEQ ID NO: 269202

SEQ ID NO: 452074 - DNA, 321 bp, Serratia marcescens; identical to SEQ ID NO: 269201

SEQ ID NO: 452075 - DNA, 423 bp, Serratia marcescens; identical to SEQ ID NO: 269200

SEQ ID NO: 452076 - DNA, 549 bp, Serratia marcescens
atggccaatgaagaaattatttgttgggataaagtcttcgattttcatgatggcaacctgatttggagagcaagggacgagacttcattcgcatcaaaagcagcgtcaacaagatggcataacagatattgcgggaaggtggccggatatgtagttaggccgccaaatgcaaaaactagctatatatcattaaaatacggaaataaaaagcgttctgcgcatcgagttatttatgaaatgcatcacggaaagctgccggatggatacgtaattgatcatattgatggtaacgggctaaataaccaaattgacaacctgcgagcagtgcctcaatcagtgaacttaaagaatatgccagcaaggaaagataattcagctggctgcacgggtgtgttttggtgcgcaagaattaaacgatggcaatctcatatatgcattgaaggcatgcaactccatcttggttgttttttgactctgctggacgccgttagcgcaagaaagtcagcagagataactctaggataccacccaaaccacggcaggcattaa

SEQ ID NO: 452077 - DNA, 606 bp, Serratia marcescens; identical to SEQ ID NO: 107131

SEQ ID NO: 452078 - DNA, 969 bp, Serratia marcescens
atgctgtttctcgacgggatttacaccgaagacggccatggtaaacagcgcttccatcgggtcaaagcgccgacccacgatgagctgaataccctcgtccacacgcttagccatcgcattgctcgctgtctggaaaagcgaggcgtattagagcgcgatgccgagaatacctggttgactctggaagaggaggaaggcgatgtgctgacgcaactgcagggcgcatcagtgacctatcgcatcgccaccggtcctcagcaggggcgcaaggtcttcaccctacaaaccttaccggggcgagagaatcaggccgacaccaacagccgagtggcgaactatgccggcttctcgctacacgccggtgtcatggccgaagcgcatcagcgagataagcttgagcgcctgtgtcgctatatcagtcggccagcgatctcggaaaagcgtctggcattgaccgccaatggacaaatccgctacgagctcaaaaccccttaccgcaatggcactacgcatgtgatcttcgaaccactggatttcattgccaagctagcggctttggtacccaagcctagggtcaaccttactcgattccacgggctttttgcaccgaacagcaaacaccgcgttcaagtaacacccgctaagcggggcaaaaagcccgatcaatcggaaggtctcgatactggctggtgtgacaagagccccgcagagcgccaccgcgctatgacctggatgcaacgactcaagcgtgttttcaacatcgacatcgaggtctgtgaacactgcggtggccaagtcaaagtgattgcaagcattgaagacccgaaggtgattgagctgattcttaattacctcaggcagaaagccgctaaggttgacgctgccaaacagcacgaattgccgccagagcgagccccgccactgactcccagcctgttcgacccatcgcagacttgcctatttaattga

SEQ ID NO: 452079 - DNA, 291 bp, Serratia marcescens
atgacgcagagcaatggagaggaagttaacaaccgcctcaccggggccgaacacatccttcagtgccgcattctccacagccagcgcatcggctcgtttctgctgcgcatcgcgctcagcctccaacgcgctcaccgcccgctggtgggcatcaaacttgacgtattcaccgtgctcagcttcacgcgcgaaagcctcaaaccgaacagcgtgcattttgtaatcaggggtaaagcgctttatggttgtcattcgtcgtctcccagcacccagcggagcgccttagcgtaa

SEQ ID NO: 452080 - DNA, 780 bp, Serratia marcescens
atggcgttactgctagtagatcagaatgcatcgttagtggacaatgattttattatttccccggttatgaatggactgatggggcataatatccttggtggaacgattgcgcagtcaaagaaaaacggattacgtggagctggtgatctttcggtgattggtagcccagtcgttagtcctaattacgtatcgtttactgggacaaccgcatatatgcagtcatcgctgatgcagcaggcgcaacacacgcttatttgcgtagctcggtcatcagcaacattttcagactcagcacatcagccaatgttcatatctacatttagcggacaaaatgcagactacccagctttcacaacgcagggtctatcaatatatgttgtcaattcaggcttcccggcaccaaagggcaagttgacagccgtttccggcgcatacccaacagcctctccagtaaacgccacggcaaaaacacaacaaatcgatcaggtagatttttcagcattcagactgtttattttggagcaatcaacaaccggcataacgattaacgatataactggggccacagctaacaccgaagcaccttacgcaactggttatgcatccgcacgctcaacacgaccatttgctatcggtggccctgctaaccccacggcttatatggggcaatgtgatattgcatattgggctatttacaaccgcgtgctgagttccgaggaaaaatcagctatcgtcacctggctgcgatcgtactacagcagcgttagcatcagcatttaa

SEQ ID NO: 452081 - DNA, 2184 bp, Serratia marcescens
atggcacttacagaatctcaatccgccaaattgtctgcaacgatagcagagaactccgcagcggaggctaagtcatatgcagatttagccagcaaggcaaaagacttttcagacgaagcagccgaatcagcaagcatggccgcatcttcaaaagcggatgcagaaatagcatcaagtaatgcacaaaactcagctgcagaggcgctaatatctgcaaattctgcagcctcttctgctagtgaagctgccgttgcttccaatatctacttatcattatctgatgctcaaaatgcaataacatctggtttaattcctcttaacggattgtttagttataacagtagcgatacgaataactatatagaccaggggcagaacgtagatggcattgccacaccaactggtaaaagctacccgtcgacagaagcagttaataatgcagtaaaagaagtaactaatttggtaaagagcaatactgcaaatgttgattttgcggtagttaatagcaaggggcaaccatctgttgacataacagatggcgagcttaccacttctgcgttcaggattattcgttataacagcggggagttatatgtttctgataagttcggcagaagtatagagatagcacgaaagaacaatggattaaacattgaaagcaatggtgatatttcaacatcttctttcggtgtttcatcttataatgcagatatcgatggggtattttatgccgataagtttgggagatgtaaagaaatcgcggcagagagtaacccagaccagcagacatggattaccgagcaaactgcagcaatggaacttatcggagcgcaaagcaggaattcagtggctactggaagtagcaatgtagtaacgttacttgctaatttgatccatttcattttatacgggcagtctctacaaaatggaacggaaggctggccagcaattagcatttttcaacccttcgataacctgatgtttggtcaatctgtcatgcctgcatcaccgacagaggcaactttcacgccgcgcgggggagcaacacttaactcattagttgccacatgctgcgatgcaagtggtaattcgctaaccccagaacaggtttcagctcttgctcctggtactattgcgtatggtgagacgccgggggagtctgcgataaatgcattgcgacgcagattcattgactatttagttcaatcaacagatcagaacagaaaatttgttgcaagtgccgccggtgtcggtggtagaacagctgctcagctaagcaaaggcgcatcaccaaatctttatcagcgctaccttgatgcgatgtctggtgtaagtactattgcgtcaacagatagcaagtcatatcaggttggcggtttcatctacattcaaggggaaaatgattaccctagtaatacgaaggacgtttataaggggaccacaaacaccattctatcaaatatgcaggcagatcgtattatgccttcaggtgaaacgcggaaatctggtattttcatggttcaaacgggggcatcatttacggtcgatacgcatgacatggcgatcggcatggctcaaatagaaatatccaacgaacgtgatgacgtttatctagtcggcggctattacccttacacggacaaaaatgggcatcttgattctaacggatatcgctggcttggcgaaaagattgcggaaataatgtttaaagtgattgtgctccgcgaggactggaagccaatacagccattgaaagctgtttatcgtaatactgacgtcctcattgcaaagcacgttccagtccctccattacaatcggctgaaccttatgtaataaataccgccacaaattatacagatttgggattcactgcaattgatcgggtgtctggggtggataccccaatcagcattaacagcgttcaagttagtggcttatcaacgattcatatctcgctagcaagatcgcctgtaggtgaattaattatcagatatgcggacaaaacctaccacaatggtaatgggatgatctgcgactcaagcaacggcttgagtttaaataaatacacgtacatgccaggtagtggcatgtatgcatcagcgaacattcccgcccttgtagataaaaactacgacttgcgtaattggtctgtcgcttatcaaataactgcggaagaggtatga

SEQ ID NO: 452082 - DNA, 1053 bp, Serratia marcescens
atgcaatctagctctgctccaaagaagctatctatcccctttgcaaattcaggcgacaagcaagacataccaaatgcatcacagatcggcatcaatgatggtcgcgcatcctactatgatggctttcctccagtaacaagaattcctttatctgcaggagggaagccgccatttggtacagacatgaacggtgtcttatttgatataacagggaatgcaagatggagtgcagccggggcatcatataaatacgatgctgatttttcttcagctattggcggctaccccaaaggtgcaattatttccaatgcatcagcagatgggttttggcaaagcattgttgaaaataacacaactaatccagatgcaggcggggctggctggattgatgccatgggagggagattactcaatgtgcgctatttcacgtcatctggagtatatacacctaccgctggaactaaatctgtattggttgagggtgttggcggcggcggtggggctggcggggcagcatttactagtgcaggaagttacaccggaacaggtggcggtggcgcagggggctatttcaaaacgtttataaggaatatcccatcatcaatttcctatgtagtaggcactggcgggaatggcggctctggagggtcatccccaacatcggggcaggatggaaccattacgacatttggcgtttatgcacaagcgtctggcggaaaaggttcagtggtatcacagccagcaattagcactggggtatcgtatcaatttggttctgggttcggcggtttcgccactaacgggaatatccttaactcaaatggcggagacggagcggcatcggtgatcgtggcggttgggagtggattgagtggcgccggtggtgccagttgttttagcgcaggaggctcgccaaccccatttaacgcatcaggaaccgatgggaaatacggtagcggtggtggcggcgtcgtcagcatgagcaattcctctgttgtatgcaacggaggccgcggaggtaatggactcataatcgtttgggaatactcataa

SEQ ID NO: 452083 - DNA, 588 bp, Serratia marcescens
atggaaaattatgcagatacaatactttcacaatacgcagatagccctaagctacgcggaataatagacacgtttaaccaatccatggacaccgcgtcatttctagatgatttctatgacatgatttggaacatagaaacagcaggaacttatggcttggatgtatgggggaaaatagttgtagttagtagattgctaaaagtcactccaagtgaaaaatattttgggtttgaagaggcattaagcactccaccagaaataggcgatccgcagccattcgatcaggcaccattttacaccggagattcagccacaaacacagtcaggctaacaaacgatgtttatcgacgcctgataatgttaaaggcaatggcaaacataacagactgcaccattccaagcatgaataaaatgcttacatatatgtttggagataaagggcgatcttatgtgagaaatgatggaggcatggtaatgagttacgtatttgaatttgaattatcaccatcagatttagctatagttcaaagctctggcgcactaccatccccagctggcgtaacagtgaatatcgtacaactggtgtaa

SEQ ID NO: 452084 - DNA, 1239 bp, Serratia marcescens
atggctgattccgtaacagtaaccactgccgtccctgccgtgactatcactgcggccggtttggcaatccctgacgagctggacatcctcaacggacggctgagcgatttagacactgccatgggcggtggaatgagtactagcttgactacgccacaaggccagatcgccatgagcgatacagcgattattgcggcaaagaatgatgagttggcagagcttacaaatctcattaacccagattacagctccgggcgctatcaggatggcattgctcgaatttactttatagaccgcattgctgcgactggaaccatcgtcacggctacttgtacaggacttgttggaacggtgataccagccaacagcgtggcagtggatgtcagtgggtacatttattattcattagctgcggccactatacccgctacaggatctattgatgttgtattccagaaccagacgacgggaccaatagcatgtccaatcggaagtctgaattcgatttataaagcagtaactggctggtcaagcgtttataacgccaccgctggcgtggtaggtaatgacgtggaggggcgggcgaacttcgagtacagacgcaagcaatcggtagcaaaaaatgcggttaatacgctaggcgctatctatgcagctgtactcgccgttgatggtgtaactgatgcatatgttacagacaataagaccggatctgcagtaaacaagggcattacaaactatagcgtactcgcccattcaatttacgttgcagcatacggcggacttgtagcagacatagggaatgccatctatcgctcagcccctcctggtgtcgatatgaatggcacaacaaccgtagtaattcaggacacagaaaactatgtattcccttatccagaatataccatcaagtttgttacaccgactgcagtaagcgttcatttcaaggtccagctccaagagaatgatctgctaccatcggatattacctctcaagtacagcaggcaatcataaactcatttaatggagaggatggcggaacaagagctagaatcgggtcacgtatttttgcaggaagatattattctgggattcagaatatagaccaggacaacgtgaatatattggatgttacaatttcaaaggatggaacaacatactcttcatctgttgagtttggcatcgaccagataccaacgatagatacaacaaacattacggttgaactggtggcataa

SEQ ID NO: 452085 - DNA, 360 bp, Serratia marcescens
atgatcacgaagtcgatgcttctgaacactgacacctgggacctgcagcttgatgatttcggcaacatagcccagacagaaaacccctacgcagtcgcacaggatgttgccactgcctgcagtacatttgctggtgagtgttggtatgacactactttagggcttccttactacgagaagatcctcggtcactggccgggaacgcaatacgtgaatacaaagcttcagaccgaagcgaaaaagctcccatacgtccaatcagcaacctgctcaatcatcatcggccagtcagaccgtaaggcatctggcgtcatggtcatcaccgacacgaacaacgtagaaagcaccattcaactctga

SEQ ID NO: 452086 - DNA, 582 bp, Serratia marcescens
atgcgtataaagttcggaattgcctccttgctgttagtgtgctcatcaagttatgcgtctgaatttgtgaacacgacgctttcagatggagtgaaggtcagcatagcttgctccaagaatgttattgatagcaaatcggtaaaattatcaccatgtataaagattgttgaaaacgatcctgacgatgaatcaccctatgttgctgtgacatttggcacggaagattataggtcggtggaaaaggcaatcgggaaatcgtttctgatagtctatgatcgtggcgatataaaggttccagtagataagataatctcggcatataacggcggaatggtagccatgtatggcaaggaagttaccaaaaaaatcatagactctagatatgtttaccttatcttgccaaccggggaaagagtgagcattaaaactgatgactcaccaaaaaataaggccagtaaatgcaaggaagaggcagacaggtttatgtcatcaaatgcccatttcatgtacccagacccatcatggtcggcaaatagcgccaatattcactccaagtattacctagagtgtctgaacagatag

SEQ ID NO: 452087 - DNA, 627 bp, Serratia marcescens
gtgaccaccaatttattcacggcgcgtccacaagacacgacttcagatgcgaacgtgcaagaattcctaatgcatcaattccttatgcgggcctcctttataaatctagtggtagtggttggcgtatccgacgatggtaaatttgttgatttgaggcagatagttcatgggtttagtggaacaggagaaaagatagttaaggggattgtgtttggcgtgccagtatggagacttcaaagaggaaatagcgcagttaagatgactccagttgtgggagacataggcttggctgccagctgcgaccgcgacatcacaaacgtcaagtctaacggcaagccaggccttccgggttcgaatcggacccatagcccagcagatgcaatctacctagggggggttcttaatcaagagcctacgcaatatatcaacttcgcaaatgacgaaataacgattgtttcaccatcgaaagtacggattcaagctccagtatcatcgtttgagggtagtatagaggtcacagggagcataacttcgcagggtgatgttataggttccggaatttcgctatcgacacatgtgcatggaggggtagaatcggggggatcaaccacttcagggccagaatga

SEQ ID NO: 452088 - DNA, 1737 bp, Serratia marcescens
ttgttccgcttcggccgccaactgggcgcgccgttcacgcgcctgcgctttacgcgcttcgcgggcggcgatcatctcgctgttgtccggctgctggccgtcgaccggcgtaaccgccgcttcggcattcttgctgcgtacgcgcgccagtgcggcctgtaccgccccctgatcgtcgtcggtcagtttgacggcggcctttttgtgccgctcttcgcgcgccagtttctcgcgctccagacgcgccagcttggcctcgtaacgcgccttggcctcggcggtgcgcgccgcttccaaatcgatagccttgatttcggccttttcctgccggtagtactgcaccagcggaatgttgctggggcagacgaacgcgcaggcgccgcattcgatgcaatcgaacaggttgtggttgcgcgccttgtcgtgctcctgcccgcggctgaaccagtacagctgttgcggcaacagcccggcagggcaagcgtccacgcacaggccgcagcggatgcaggattgctcgggttcctgcggcgtcatttcatccaccgtcggcgccagaatgcagttgctgatcttgacgatcggcacgttcagcgcgggcagggtaaagcccatcagcgggccgcccatcaccaccatctgctgcgcctgcggacggaaaccgacgaaatcaagcaggtgctgcaccggcgtgccgatgcgcgcccacaggttgccagggcgctcgaccgcctcgccggtcagggtcaccacgcgctcaatcaacggttcgccgtcgacgatcgcccgcttgatggcgaaggcggtgccgacgttttgcatcagcacgccgatagcggaggagtgcttgccgtgcggcacttccttgccggtcaaaatcttggtcagctgcttggcgccgccggacgggtatttggtggggatgacgcgcagggcaatgccggattggccgcgcaacgcctgtttcagcgccgcgatcgcctctggcttgttgtcttcgatcccgatcagcgtgaccttgggctgcagaatgtgttgcaggatctgcgtgccttcaacgatctgatcggcatgttcctgcatcaggcgatcgtcggcggtgatgtaaggctcgcactcggcggcgttgaggatcagcgtttccacgccgctcatgccgccttgcagtttactggcggtcgggaaacctgcgccgcccagaccggcgatgccggcctgatgaatacgttgaatcagatctgcggcgggcgattggcggtaatccgctaccggctcgcgctcgcaccagcggtcttcgccgtctgcctcgataatcacgcacagctccgacagcccggaagggtgagcggtgatgtgcggcgtgatggcgctaacggtgcccgaggtcggggcgtgcaccggcacggtgcgcccgcggccgacggtcagcggctggcctttcaacacccgatcgccggcgttgacgcacagttcgccttccggccccagatgctgctgcagcggaatgataaaggtcttgggcagaggggcgacacgcagcggcgcgccgctcgactgagtcttcatttccggtggatggatcccgccgtcgaaatcccagatccggtcttttttaaaggcggcgaacagattaagcatgttgctccacgtggatcacttgcaccgggatcgtcttcatgtcccacttccagttggcggtggtggtggcgaccggtctcatttcaatacagtcggtag

SEQ ID NO: 452089 - DNA, 855 bp, Serratia marcescens
atgcatgggttgttttcaaaggcttgtgacgcaaagcaaatagatgcatctgaagagtctgtgtgttgtgacatcgtcgatggtaccaatttaataacacaagacggttataataattatgtgtacatacatcgttctattcaggagtatttctctgcgaaatgcgtttcattatttaatgatgaacaaaaaaacaaatttttcaaaacgtatgtaacttctgatataaacggagggaacgctaattttctgtcattagttaggtttgtagatcctatgggattttacaagcactttatgctaccttttttgtgcttgcacgggatattggttggtgatgacttagctcccctcacgaaaggtaacgttagtgaagtcattgatgagtggatggttggagcaactatagatgatagtcctaatcgtataggtagcattcaatcatttacgatgctaaagagtggtaagagtgagttctataactatattattcaattgaatgatgtatgtgagttattggggttgaaaaataatgattcaggcgatgggaaagtagctaggtatttgcatatgcactgtagaaatatcattgttgatttcttcgctaatggaggagagaataaggttaatttggtagattatgaagaaaattcaatacataaaaatatggcgtgggcagcgctagctgattataaacaccttatccctaactacgatgaaaaaatcgttgatgtctattacaattactatctttctaccttggcggaaattagagatcttatagataacgaatacacaaaaaaaataaagagcaaaatggtggtgtccaccatattgagagagatggggttctga

SEQ ID NO: 452090 - DNA, 396 bp, Serratia marcescens
gtgccggattcgccgcaggcgctgacgcaacatcactgggtcacctttacgccgctcggcaatccgcagtttgttcgcctgatccatcgcgacggcggcgagcaccgcatgcgcatgaccgggcgactgttcaccaacagcggcatggcgatgaaggagctggcgctgaccggcaaaggcatcattcgcaatttcttcgccaacgtcgagcgagagttgcgcagcggcgagctgattgaaatattgcccgactggcgattaccggaaattaattgctatgccattatgccgcgacgggagatccagccattaaaagtccggcgattgctggagcatatgaagctctatttaaaggagaaaggattaaacgacctagaacagattcgacaagaataa

SEQ ID NO: 452091 - DNA, 810 bp, Serratia marcescens
atggcattttcccttaatgaaacgacgctgattaatgcaattaatggcggtggcttactatcgattttaaatagcaccatttcacctggttatggcatctatacatcaggcggtgtgctcaaggcgttaaggccaacctctttcctgggtattgaatatggagctgatgcatcagttgtatcggctcccatagagcagggttcttataactcgtacaacaaagttaagcgtccgcccattataagagtccttttcaccttggaaggatggtctggattcagcggtgggctgcctaacctgacaaatttctcgctgacaagcaggtcagatatgttagcggcgcttgatgaaatggtaggtagcgcgctggtatatgacatagaaacaccagatacgacttatgaaagctatgatctaattcgatacaactaccgtacatcagatagagaagtaacacttctaactgttgaggcgatatttcaggcggtattgcaagaggctgaggtaaaaataaccagcaatacaggcaatgatccaggtgatgtaccgacctttgatgttcgtggggctaatggaagaaccatgtttggtaattccacaacatctggggcgacacttgtagatgttaagggggcgctaagcggactaaaaggctcgctatcaagcgcggctacacaggtagcatcatcagttagttcagcgattgatggtgcaacaagtggtgccacaggtgccataaatggcgcggccacatcatccattaataagctatcagatgcggtaaaagagctagttaaggggctatcataa

SEQ ID NO: 452092 - DNA, 1827 bp, Serratia marcescens
atggcgactgttattgatgctttggtggtcactcttggcctggatgcatctggattcaaaaaagggcagcaagagaccaaagagagtctcgataagacccgtaaaaactcagagcaaacagcaaaggatatggaggccgcaggtaaaagagcggcctctttctttggttcaatccgtactgaattgctggcgttagttggcgtaacgctttctgccaacggcattaaaaacttcatcactagcacagctaacagcctgcagcagctaggcattaattcaaaagctctcgatatgtcggcgaaatccctggacggatggagccgcgcagcggaggctgcaggttctagtgcggagaagatgcagggaaccttggcgggattccaggacgtgctaacacaggttcgtactggtggcgcttcagatagcccactatttgccgcgcttgcatcatttgggggggcgactggagctaacttcgattatcagaaagacaactctgaatccattatgcgcaagatcgcgcagaactggaacaaattaaactccgatgctaagcgccgctttggagggatgtttggttttgataacgctactcagcaggcgttaagcagtgggcaattagtaactgatgctggaaggtttgaaaaaacctcaaaagcaacagaggacgcaactaagaaagcagcagaattaaatcgacaacttgttgcgatgaagcagaatttttccgcagctgcccaagtgcttctaacagcgctaattccatatattgagaagctgattcctattatcgaacagtttggcgtatggatatcaacgcacggcccagagatagaaagtttcttccgagagacagcagacaccataaataaagcggtagatgcagttggcggatggcagaacgtcatggagggtctgttgatcttcattggcggtaagtggctgcttggtatgatatcagcaatcggtggcgtgaaaggcgctcttgtggccctgtcaagagttagcctcattgctgggctggttgagctgcaaaaatacgcagaagctcttgagaaaaaatatgcttggcttaccgataatccggtggcaaatacactgaatgacctgccaggagtgggtgatgtagacagttatgggaaaatgttccacgactgggtcaaagaaaagacaggaataaatctacctagagctgatggctatgggcaggatgaacctgtagagcagcgaactaagtcatcaggatctccacgagggattaggaacaacaaccctggaaatcttaattttgctggtcaagctggcgcatcaaaggaaggtggtgaaaaaggaagatttgccgtctttagttccatgacagatggaattgccgcattgtataagcagattcagctttactttaagcgcggtacagacaccataacagagattgtcaataaatatgccccagccagtgacaataacaatgttatggcctatataaactcacttgtaaaagcgactggaaagggggctcacgaatcgctggggtctgccgacatgtctacgatattcaacttgttgaagggaattatcaaccatgaaaatggaaagggatatgtcagtgatgaagagattatgcggggtatacaggttggatctagagccgccatgcagcggaactcaggtagctatggcggacagtctggtagtaagaccgagattaatatagggaaggctgagtttgtaacaacggcgaacaaccagcaagccctatctaatgacattgtgcggggcgcaagcaggtcaagcatgctgactccttcgctttcaggtcagggtggctaa

SEQ ID NO: 452093 - DNA, 201 bp, Serratia marcescens
atgccagagggcggcgacacgctagttgaaagcgtgaacatacccaagaccatattcacggttatatcaagtgatcttgggctggcgaaactctatgagctggacacgatttatgggcttgaagacctatggaaatttctagaggtgatcactgtccataactacaaccaatacctcatgaataagcggagtgagcgctaa

SEQ ID NO: 452094 - DNA, 408 bp, Serratia marcescens
atggcccgtaaagaaatatattacaccgtctctggaacaaaggggcgcgatgaagggaagatgtatcacatcgtcgagatgtcagcctcacaggctgagtggtgggctattcgtgccgggctggcaatggctcgaaatggcgtagagcttccagaaaacttctctgatatgggcatggcagcaatggcaacaaccgggctaagcctggttgcaaaaattccgccagaagaagcaaagccattgctggaagagcttatggcttgcgttcaatcagtaccaaatccagcagacaagaaagttgaacgcccacttatcgagacagacacagaagaggtgatgactcgactgaagctaagggctgaagtgttcaaactgcatgtggattttttgcaaaacgtcgcccgttag

SEQ ID NO: 452095 - DNA, 1482 bp, Serratia marcescens
atggcaattccaattaccaaagatgttcgtatcaatccgggcgtgcttgctgcaggcggcacggcgcttgatttgaacgggctgattttgaccgacagcgcttatgcaccggttggatcggttttaaccttttcctctgatgaagatgtggctgattatttcggtagcacctctcaggaagcctcaatggcgaccatctacttttcgggttacaagaactcgacaaagcaacctggttcgcttctgttctcgcaatttaataccgaagatgtttctgcattcctgcgctctggctcgatggctcaggtaacattggaaactatcaaggctcttccagctggcaccatcattcttaccgtggatggcactccggtaacttcttccagcatcaacctgagcacggcaaccagcttcagcagcgccgcaagcatcatcgaaacaggtattggcgcaagcgtggatgtggcatgggataccacactgaaggctttcatcatcaaatcagctacaaccggcgactcgagcaccatcacgttcgcgaccgggaccttggctacagggctgaagctaactagcgccaccggcgcagtgttgtcgcaaggcgcagataccgcagtagtagcagatgcattccaaaagattctgaacattagccaagactttgccctgttcactacgtcattcgtttgcgacatgtctcagcatttggcatttgcagcgtgggtaagtgcccaaaactaccgttttggttatgtggctcacgattccagcgcggaagccattgtgcagaacagcacggcctgtctcgcttatcagcttattaacgtgtacagctacgggcaggttgttccggtatatggcgcgcaaacgcatgcggcttctgtgcttggttacgcggctgcactggacttcgatcgcgctgaaggccgagtacctttcaagttccgctctcttgatggcctgcttgctcaggtgagtgactcgagcacgtatgacgtgctgatcgccaatggctataacttctacggcgcatacagctcaaacaactacagcacgcgctattgggctgatggcaccatcacaggtgacttcaaatggttggattccttctgcttccagatttggctgaatgcaaacctgatgcaagatgcgatcgagatgttccaatccaaccgttcttatccatacaacaacgcgatgaaggctgcggttgaggcttcctttgccgacaccatcgcgcaaggtgttgcatttggcggcattcgtaccggaatcacgttgtcagggtcgcaaaagtcgcaaattcaaaatgctgtcggcgtggatatctctgcaactctgcaagcaaaaggttggtatctgtttatcgcggatgcaaccccggagcagcgtgcagcaagaacatctccatcaatgaccttttactactgcgatggcggcagcctgcagaaactcacccttgcatcaattgaagtgcagtag

SEQ ID NO: 452096 - DNA, 369 bp, Serratia marcescens
atgaacctgcatcaaatagtccgcggggcgatcacaacggttaaccctgacgttcctggcgtgctgaaagtgaacagcggattcacaaccgcgccaggtggtaagcgcgttcagtcctacaccgatgtggatgtgattgtgcagatgcagtctctgtcatccaccgacctgaagcaagttgatgcgatcaacgttcaggggattctgcaaagcgcctatctgaatggaaacttcaatggcattaaccggccagagcaacagggcggcgacatgctgatagttgatggaaagacatggctagttgtgaaagtggccgagctttatccggactggtgtcatctgattattaatttacagaggtcgtcatga

SEQ ID NO: 452097 - DNA, 447 bp, Serratia marcescens
atgtctgatggccttgagaagtacttgaagggaatggaggagcggcttaaggctactgaggtaagagccggcttcctgggcggctcaacctaccctgatggaaccagcgtcgcgatggttgctacccgtaacgagtacggcgatccggcaaataatcagccgcctcgcccattcttccgcaatgcaattgccgatcatcaggaagagtggaagaagacgattgaacgtggtcttgcttctggccatgactctagaacggtgcttgaggtggttggtgctcagattaagggtgatattcaggagtcgattgcaatgctaatggagccggaattatcgccagcaaccattagggccaggcgcaccagaaaggaaaataaaaacaaatccacaaaacctctagtggatacaaaggagatgtttttagacgtcaaatatgaggtgacctga

SEQ ID NO: 452098 - DNA, 405 bp, Serratia marcescens
atggctgtcgtgactctggatattgccagcttccgcgccatgtaccctgaattctccaacgttccagatgaaatccttccattcctgtttgaccagtcaactgactatctgaataacactgattactcactcgtcgatgacgtcgtgaagcgagagcgtttgctctacatgctcatggcgcatctggcgtatgtgcgttacggggacaatcggaagcgtggcggttcagggatggttgggcgcattgcatcggctacagagggcagtgtgtcagtttcatctgacctcggccctattgagttcaggtatgcgtggtatacacagagcccatatggcatggacttctggcaggcgacgaaagtctaccggatggctaattactatcctggagataactatgtctga

SEQ ID NO: 452099 - DNA, 1026 bp, Serratia marcescens
atgcctcaactgactcaggctgatttcgctgcctttaaagcggaagccgaatctcgcggcatttacctgcctgcatcggtaactaaatttgcaatggacgccgaccctcagccgggtcttggcgcaaacggcggtattcctgctgtagtttcaaccttcatcgaccctgaaatcgttcgcaccatcttcgccaagcagaaagcgaccgagattctgggcgagaagaaaaaaggctcatgggctcaagacactatgatgatccagcgcgttgagcaatccggtgatgttgtggcgtatgacgactacagcgagcagggtgctaaccaggtaacttcccgttgggaaaaccgtcaggtgttccgctatcagaccatggttacctatggcgaactggagcaggaacgttatggactggctatgctgccatacgtcgcagagaaacaacgtgctgcagcgtggactctgaaccaggcgcagaacaagttctacttctacggcgtttccggcctgctgaactacggcatcctgaacgacccatcactgccgaccccgatcaccccggcaactgatggcggagtgactctgtggaaagacaagcaggttatcgacatctacaacgatatcctggcgctgtacgaagaccttatcacccgtacaaatggtgcagtgggcgatggtgttgatatggcctcccctctggttctggcgatgtctcctaagacctccgtttggttcaaaaaatcaaacgaaatcttcggtaactccgttgagaagatggtcaaagacaccttcaccaatatccgcatcgaagttgcgcctcagtacagcactgatgccggagaactggtgcagatgttcgttgagaccgcccagggtcaggatgctggttactgcgcatatagcgaaaaactgcgtgctcacccagtcatcactatgacttcaagctggaagcagaaacactccggcaccacctacggagcggttattactcagccgttcctgtttgctcagctcctgggggtttaa

SEQ ID NO: 452100 - DNA, 1113 bp, Serratia marcescens
atggcaagggactctgcattcgcatttgacagggcaagcgtgcgcacttatgacgcggacggaaagcttcacgtggagctaaccccaatcagcaaggctaacgtctgcgtgtattacggccgagagattccaggctgcgatgagttaggactcattcctgataaagcatatcgtctcctgcgagaccctgaagaactgcgcaaggccgcagacacatttaacaatcaaccgctgctgaacacgcacatcgccgtatcagtgcttgaccctccgaaagaggcgatcatcggctcaaccggtgaaagcgctgaattcgacggaacctacctgaaaaactctctcgtcatctgggatgttaattccatcatcggcgtggagaacaagcagcagcgcgaaatttcatcctcataccgctaccggctcgatatgaccccgggcgagtacgagggagaggcatacgatggcgtcatgcgtgacatcgtttgtaaccacgtggcaatcgtgccatcgggtcgtgcaggcccggatgtatttgtttacgactcacaaccgacaggactcaaactgatgtcaaaaatcaaatcactcatgaccctcatccggccattgctggctaatgatgagaaggccgaagaggtagaaaagaaagtcgaagccatcatcaaagatgaagacgaagacaagaagaaagcagaagacgaaatgtccgaggaagagaagaaaaaactcgccgaagacgaagagtcggagaaagacaaaaaggctgaagacgaagccgaagaagagaaaaaagagaaagaaaaaatggcaaacgacagcaagttagcgatggacgcagcggttaaggctgttgagcagcgcttcatcgacctgcgtaaagctgagcgtgatgtgcgtccggtagttggcgagctggcctgtgacagcgcagaagaagtgtatcgcaccgctctgaagcaacttggctgtgatgagcacgcttcaatccctgccgctgcactgagctctgtattcaaagcctatgcacgccagccgtcatccatggctcaggactccgcagttatcaccacgtcttctcgcgaaaacgttaaaaacttctttgagggcaaataa

SEQ ID NO: 452101 - DNA, 771 bp, Serratia marcescens
gtgaactacaacgcgggaaacatcaggtggtaccagaaagagctgctcagaacgattcgtaagatgaatgatgacgttaaggcagagatagttaccatcatgcgcgacaacccgctggcgatggatatagcgatggatgctaacccggttgaccttgtgaagcgcgcaatatcatcactggctaagaagtggatagacagcttcatcaggaaggcgattccggtttccgatgaggtggcggataagacgcttgaggctgtcgatcgtggcatcctggcttctgctcgtaaagactcgctggttatcaacctgcaatggactgacgccatgctgcaaaagcgtgacgccatcattgctgagaacgtggcgctgattcgctcaatacctgagaaatacttcaccgaggtggagtcaatggtgttcaggtctatcgccaagggtggcgatcgcaaacaactggctgatgagattgaacgtgaatttggcaagcgtcatggcatcaccagacgccgcgcagagttcatcgctcgtgaccaggtacgcaaggctaccagtgcgctttcaaatgcaagacagcaggcggcgggcatcaggaaaggcatctggctacatagtggtggtggcaatcaaccacgacacaagcatgtgctggcgaacggcaaagagtttgacctcgacagggggcttcctgttggcgacaagggccagtacgtgttgccgggagaggaacccaactgcggttgcacgtggaagccagttctgccgttttaa

SEQ ID NO: 452102 - DNA, 1476 bp, Serratia marcescens
atgacaagacgcaagcagcctgcgcaatcccctcggcgggaactggcaaaaataacgcagatgcacatcgatagtgcctctgtggctaatgatgataagccatttgctgaattcaaacgatatgaaccgcttcccggggtaattcccgaggcgaagaaagaagccactctggcgatggatgcaactccatatgatgtgctcaatagcatgtctattggtacggagtattcaggattccgtggttacccgattttggccgccatgtctcagcaggtcgagtatgcgaacatgcacaccgtcatggcagacgagatgacgcgcaactggattgaggttaaaagccgcaaagacggcgataaagatatcgacctgatggagcaggcgctcattaagtacgacgtgaagcgcttaattcatgaagctgtgaagcaggactccatgtttggcgtagctcacatctacgttgacaccggagcgagcgagacagagctcgagaagcctctattcctcgatcatcgaaagattccaaagggctctctgaagggactgcgttgcgtcgacccgacatggatttacccggcgatgtacaacacgcgctggcctctgtctgataactactacaagccgcaagcttggtttgtcatgggacagacggttcatgagtctcgcttcatcgacattatcagccgcccagtgccagacatcctcaagccgtcatactcgttcggcggcctgtcactgacgcagctgatggaggattacgttactgactggcgtgacgccaagaagaacgttatcaagattctccgcactctgcgcatgcgggcgctgaaaaccgacatggatgctcgccttgctgagccaggtcaattcgataagcgcatcaagctgtttactcagttgcaggacaatcagggaatttgggcgattgataatgatgaagacctgcttcacatgcagacctctctcagcgaattgtctaacctgctgtccaactatcaggaccagatgtgcatcccggctcgcatcacaaatctgaagctgctgggtaacgcaccggcgggacttaacgcatcaggtgactccgagcttgagacatggcacgaaactatctcagggatgcaggagcgagatattcgacgtgctctggaaaatatcttcaagattatccaactctcagagtttggcgaaatcaaagaggacatctatttcgagttccgtccactagatgagctgagcgaaaaagagaaggctgagattgccaagctgcgcgtagagacggtcactacagctgcagattcgcaactggtcgactctgaggaggctcgtgatgcactgaaatgcatcgagggcgctggcttcgaaaatctggatggtgattatgaaccggaagaagacgaagagtctgaagccagtgaactacaacgcgggaaacatcaggtggtaccagaaagagctgctcagaacgattcgtaa

SEQ ID NO: 452103 - DNA, 1521 bp, Serratia marcescens
atggcagacacagatcacagctcgctgagaaacaggcagactcttgaggcatataagcggcgggcaatagcagaagccagagagtccctgatgggattcacgctttacaccaacccgctctatgagacgggctggtttaacgaattgctttctgctgagctcgatcatttcctggaagaagttgaagcaggaaatatgcctcgcttgatgatatttgctccgcctcgctccggaaaaagtgaaaaggcatctcgccgattccctgcttacgtactgggaaagcatcctgattggaatgttatcgcctgctcatactcttcagacctcgccaaccgcatgtcacgagatacccagcgcgtagttggctcaaagaaatacgcagacgtgtttcctgataccgcgctcccatccggccgcactggagcgggtggcgccatacgtaccgcagagttatgggaagtggtaaatgccaatggcgaacttcatggtggctcataccgtgcggcaggcgtgaatggtggcatcaccggccagggtatgaacatcggcatcatcgacgaccctgccaaagactacaaaacagcgtcatctccgacataccaggaagccgttattgactggtatgacacaacattctttacacgtgccgacccgaaaataaacggcatcatcattattcttacccgctggcataaagatgaccttgcgggtcagttgctgaaaaaagcagaagaaggtggtgagcaatggcgcgtggttagcttcccaatggaggctgagaaagaagagattcatgagctgaatggcaagacctacttgttacgcaagcccggtgaaatcctgttccccgagcgcatgcctcaggagtttgtcgacaaggccaagcagcgcggctcgctggtatggaatgccctgtatcagcagcgaccaacagcgaaaggcggcggcctaatcaagtctgaatggtttggtgagtaccgtgaacttccagtgatgaagttcagggccgtgtatggcgatacagcgcagaagaccaaagaggtcaatgacttctcggtattcgagcactggggacttggtgttgacggctacatgtacctgattgacatgatccgtgggaagtgggaggcagatgagctgaagcgtcgcgcggttgcgttctggtctaagtgcaaaatgctccgtaacggccctctacgccacatggcaatcgaagacaaggcatctggaaccggactaattcaaagcatccgtaaagacgctttatgccccgttaaagccattcagcgagacaaggataaatacactcgcttgatggatacgcagggctatatcgagtccggctacataaagcttccagccaatgcagacttcattaacgatttcctggtggaaatggaagcgataaaccctgacttcaatactcatgatgaccagcttgacccgatgatggacgccatcactgagatgaagggcaaagcaggcatcctgttccatattcctgacgagatattgcaatga

SEQ ID NO: 452104 - DNA, 567 bp, Serratia marcescens
atgctcaccgagccaaaagtggaatattccaatatggcaaagctcaccgacaaacaagagctgtttgcccgtgagttcataaaagacctcaacgccacgcaggcggccattagggcgggatacagcgagaagtcatcccgcaatcaaggcgcgaggatgatggcaaatgatgacattttgcaccgcatcgcagaattgaatcaggaacgcctagagcgtgttcaagtagatgctgattacgttctccggcaggccgtcaagcttcatgagcgatgcatgcaggaggtcgagcctcttactgataggcgcggagaggaaatcaaagatgagaagggcagaacgatatacggcttcgacgcaaaaggagctgctgctgccctgaaacttgttggcgagcacattactgtgcaggccttcaagaccaacatcaaggctgagcactcaggtccaggtggcggcccgattcagtacgccgacataaccgaagaagaattagaagaacgcttgaaggagcttggtcatggcagacacagatcacagctcgctgagaaacaggcagactcttga

SEQ ID NO: 452105 - DNA, 411 bp, Serratia marcescens
atgagcatcctcttgcttatccgcaattattggaagcagtttgcattggcagcgcttgttatggttttcctcggcgcatgctggctggcaagtcactatcacgccacagcaacacagctcgccaaagaaaagaatgacctgcaggcacaaataaccagccagcaagccatcatcacaaagcagattcaacaagcgcagcaattcaactcgatcgccgcaggagtcgaaagtgaaaagcaacagacaactgacgccggagagaaggtccggatcgtttacaagaccgtgctggaccgctctccctgcgctcggaacattgttgatcgggatgtcgctgatgggctgctcaaccacgcaagtaaagtacgtagcggcaccggtgacgccaatcccggaaagtctgaccgctaa

SEQ ID NO: 452106 - DNA, 213 bp, Serratia marcescens
atgaaactcgtagatgactggcataaagcctggaaatacttctccgtacaatgtctgacacttgccggtgcaatcagcatcagctgggccacatacggagatatcatcaagcaatacattcccgctcagtacatgccgtggattatcggcgtcgtatccgtggctggccttgttggccgattcgttgaccagcaaaaaccggacaagccgtaa

SEQ ID NO: 452107 - DNA, 441 bp, Serratia marcescens
atggaaatcagtaaaaccggaatcgacctgataaagaaatttgagggttgcgagttaaaagcctaccaagactcagtaggagtttggacgatcggctacggctggacgcacccatttaacggacggaaagttgaagccggaatggtcatcactcaggacacagcagagagtcttttgcgggaaggtgtaaaaccattcgctgacggcgtatcaaaactagtcaccgtcccaatcactcagaatcagttcgatgcgcttgttagcttcgcttataaccttggcctgaagtccctgagggattccacgcttttgaaactgctcaatgctggaaacaaaaacggcgccgcaaatgagttcctcaaatggtgtcgtgcaggcggtaaaatcctcaatggtttggtaaggcgccgcacagcggagcgggagttatttctccaatga

SEQ ID NO: 452108 - DNA, 1182 bp, Serratia marcescens
atgggcgtcgttagaaaattatccgactaccgcaaacctcatcaagaggtcatggagcaacgcgtggccgataccgatgatgggtatacccgcatagcaaatgatttgctcgattccattatgtctaacaacttcaccgttcggcagatgaaactgctgctggctgtaatccgtaaaacatacggatttaacaagaagtttgactggattagcggagagcaattctcagaaatgacggggatgccaagaacaaggtgcagctcgacgaaaaccgagttattgaacatgaaggtattgataaccgatggaaggaaggtcggtatcaacaaagttatttctgactggtgcatcgagcgcccagagcgccgcagggagtatggttcaacgaagcataaggctggttacatttacgtgtttgctgaagatgaaaatggcccggttaaagtgggatttacctcgcgagatgcagaggaaaggcttaaagaggtgaagtactacttcgaaggcggcaaccctaaagtcttttatgtttccccatttaacctccatgcaggcgccgtggagccattggttcatcaagccatgaaaggacagatgatccgcggagagatgtttgaagcaacagtaactcaggcagtaaatgagattaatgccgtgattgaaagttttacaccgtatgtaacagatattgtcacaccgtcggtaaatcatgatttacaccatgagggacacacaaaagacaatattcaaaagaaagaaagaaacattacccaaacccacgctgtgggattgccgttggaagaaaaattaaccccacggcagaagggaaccaatccgcgagctaagggaacaaatcctcgctctgcaatgccagctttcgatcgtgaaagactgcgcgatacctggaactgcaaagccgataaatatgggctaccaaaaattcgcaatgtatcgaccacagtcgagagcggattgaagcgcctctggcagtcctacctgaagcagtgcaaggagcttggcaaccagccaacagagatcaacacgttcctgaatggctatctcgcccatggctacacgccaacgaaatgggcttgcggagataatccagaaggcaagcgatacggcattgagaccgcgcttcgccaagagaagattgacgaaattctttcccgggaggactga

SEQ ID NO: 452109 - DNA, 699 bp, Serratia marcescens
atggcggctcagaacctgacacaatctgcactagctgaaaaggttggtgtgtcacaggccgcaattcaaaaaattgcttctggaaaagcaaaaacatctactaaaattgtggagatagccagggcattaagcgttcgtccggagtggctcagtgaacagaatgggccaatgaaggacggaatggatggtatttcttccttccatcaccctgactcaacaatcccaccggagagcgaatgggaaacagttgacgcatgggatcgcgacactcctttgcacagggatgaagtagaggtgccttttttgcgagatatatctctcgccgctggggacggaagttacaacgaagaagactataacgggttcaaattgagattctccaaagccacgctgcgccgggttggtgcaagtactgatggcaaaggagtgctatgcttccctgctcgcggaaacagcatggagccaaatataccagatggtactacggttgcggtcaatactgatgacaagcagatcgttgatggcaaaatctatgctataagccaggatggctggaacaggatcaagattctctatcgagttggaccagatagaataagcatcagaagctataactcggcggagcatgagccggaggagaaagatattaacgaagtgcaaattatcggacgcgtcttctggtactcagtcttgctttaa

SEQ ID NO: 452110 - DNA, 312 bp, Serratia marcescens
atgccacttgaccacggaattctgaatctgccgcttaataagcgtggcaacttccacaaagagctggatgaccatttggcggcggaaataaaacgaaaaaagaaagcaacacaggatgcgattgctatgaccgaagaggctcgtaaagaggcgtggcgactgtttgcgaacatatctaatgacatgcttaagcaacaagccgaaaagcgtggtatgcggaccaatgagctgaggtcagtgcttcggtctatgtgtaacgacaggccgaaaaacgcactgaaggttatcaccgaattattcacagccaaatag

SEQ ID NO: 452111 - DNA, 585 bp, Serratia marcescens
atgtctggggaaagcgcaaatacaaagcctcttcggaggcttttcttttacatcaagctgcctctcggcggcttttttattgaggtcaatatgaacgccactgagttacgcgatgcgattaagtatgaccctatctcgggggttttcacttggttaagaagtcaaggaacagcaatggctggcgcagttgctggcagtgtaaatcatcatggatatagggagattagcttccgtggcgtaaagcatcaggcgaataggctcgcgtggttcatgagtaaaggcgcatggcctgatggagttgttgaccacaaaaacaggaacagggatgacaaccgaattgagaatctacgagatacgacggttgcactgaacaacctgagcaaaggggtccgctcggacagtaaatcgggcataaccggggttagctgggattcatccagagggaaatggagggctaccgggcaaataaacggaaaacaaaagcatcttggatattttaatttcgctgatgacgcggcaagtgcaagacatgagttctgtaaagcagagtttggtgatttctatgccttctctgataccgaatag

SEQ ID NO: 452112 - DNA, 525 bp, Serratia marcescens
atgacaaatgccatgcgccacaaaccctgcaatgagtgcggggtttcgttttttgagggtaagtcagactcaaatttacaatgggagaagcgctcattttgttcaagttcctgcgccaaccatttttcttcgaaacttcgcagaacagatatcttcatgcgactagaggcgaagcaggtgaaaacaggggattcctcatgctggggatggagtggcggtacagatagtaagggatatgcagtgctatcaaaccgaagggcaggatttaaatcacctgagaaagcccatcgtgttagctatgaattacacaaaggagaaatccccgaagggatggtgattaggtacatctgtgataatccgatttgcacaaacccaaatcatttagaggtagggacgcaaaaagaaaacatgcgtgactgctcaatgagaaataggttgaaccccaaatcattggaaaatctaatcagcggcgcgccaggatatttaggtgcggctgtctcacgaaataaggtaaaaaatggctaa

SEQ ID NO: 452113 - DNA, 204 bp, Serratia marcescens
atgatgagatttccaaaaggtagcatcgtcaagcataaatctggcggcatcaagggtgtcgtcgatattcacttcggagaaaaagataacgatccgtggatattcgtaatgtgggatgacggaacggctacaagtcacagagaaagtgagctttcatgggcgactgtagacgaaccaaagttctacaagaatattcacgattaa

SEQ ID NO: 452114 - DNA, 162 bp, Serratia marcescens
atgacagacacatttgaaaggtggctggatgagatgattaaaaatccagccacaggagagtttgaggcgaggcgcagagtgctaagtatcccacgcaccgagttcgctcgcgaagtatggaatgaatgcctcaaagccaagaaagggaagtcatctaagtaa

SEQ ID NO: 452115 - DNA, 168 bp, Serratia marcescens
atgacaatccacaaccgtcctactgagaggagattcccagtagagcgggagcttgggctgcgtatagctgagcttattcgcgaatataacggtcagctttcattagttgccaccgttgggattctagaagtagtcaaaaacgatttgctgaataaaggcggaaaataa

SEQ ID NO: 452116 - DNA, 216 bp, Serratia marcescens
atgtgcgatgaattcgaagctgcgagcgagctggaaacgtttttgcgtgatgtggcgctggctaacagaaagccgccaatggcttttactggattttgcgccagtgaatggtgtggagagaggattgagaaagggatgttctgtgatgacggttgcagagaggatcaccgcctgcaacagcttgagaagaacaacaaacggagggaggcggcatga

SEQ ID NO: 452117 - DNA, 162 bp, Serratia marcescens
atgaaggccagcaaacatttcccactgtggggtgtggtcggattatttctcatcctgatcggtttctatgggatggatatcggtttcgctctcaatgccctatgggctatcgcttgcgggtgcgcttttgtgttcatcggacttgtggtgtcgatattatga

SEQ ID NO: 452118 - DNA, 249 bp, Serratia marcescens
atgagcgaagtaatcaatctaatgccaaacaaatgggtgtctgaatcagttcttatggctgttaccgggctgaaacataacactataaaaacagcaagagaaacctcatggatggagggtaaagagtatcggcacgtcgcaccagacagccagccacgcgacaacagtccctgcttctataacagagaagaagtagatcgctggatagagaggcagccgccggcgaccaagagacgcaaatctgcttaa

SEQ ID NO: 452119 - DNA, 804 bp, Serratia marcescens
  misc_feature (753)..(762): n is a, c, g, or t
atgtcggttaatctgaacacactggtgttgcctgaagaacctgtcgcattctatgcgccggaagatgagggcaagggaagcgtggcctgtatttcgccaacactggttgaaaaactcgggcttaagtcagatgccttagcgaaattacgttggtggcatgacgggcagtgtttggatctcggcagccttaatggtctggaagccaaaggcgatctggcgtcatctaccttgtatttgaatattccgcaggcctacctggaatattcatcgccggattgggatcctccatctcgatgggatgaaggtattccagggttgttgctggattataatctaaattcacaggtgcagcgcacccagcagaatagccaacaatcctataatctaagcgggaacggaacagcgggggccaatctgggggcttggcgtttacgtgctgactggcagatgaatatcaatcatcaaaccggcacaggcttaccaacgcagcaagattttgactggagtcgatattatgctttccgcgcgctgcctaagtggggtgctcgcttgactatgggtgaggattatctggcgacggatattttcgacagtttccgctataccggttttagcgtgacttcggatgacaatatgttgccgcccaatcttcgcggttatgcgccagaagtgacggggatagccaaaagcaatgccaaggtcgttattagtcagatgggccgtgtgttgtatgaaacccgggttgcggcgggnnnnnnnnnnatattaatgattccatcaacgggcagctggatgttcgggtag

SEQ ID NO: 452120 - DNA, 846 bp, Serratia marcescens
atgtcagatcttactctcaccgaacccgaagtattagccgaccacaccgacatgatttgctctaccagcatcgagcgcatcgtcaccggtcgtaatgcggcgctggtgcagattgaaatgctgatacagcaacttgatgatatttcgacactgacccgtagtatcggcggcaaaactgcgctggactgggccatgaagcaggatttccgctgcggttgctggctgatggagaaaccagaagcggcaatgaaagctattacccgcagtctcgatcgcagtatatggcgggatttaatgaagcgctcaggaatgctgtcgattatggacgcccaggcccgtgaccagtggtacaacagcctggaaaaggacgatattcctgccgtcagtgaagccaatatcctgagcacgttcgagcaattacatctgaataaaggtgaggtgtttgaacgcggcgtcattaacatattcaaagggctgtcctggaattataagaccaactcgccctgcaagtttggcgcgaaaatcatcgtcacagggctggtcaaatgtgaccgatggggatttgggctgaactggggctggcagcgtgatcggttagcggaccttgagcgcatgctgatgcttctggatggcaagcctgttcctgacaaccgcgctgacgttacccgtcgactgggcgaccatatccatgagaacaggcacagcaatcgttacgaggatgagatgtttgcgattaaatattttcagaagggaacggcgcacataaactttaagcggcccgaactggtcgataaactgaacgacatcatcgcccggcactatcctggggctctggcagcgagataa

SEQ ID NO: 452121 - DNA, 492 bp, Serratia marcescens
atgaagttatccctgacggtagaagccgacgccatcaacgttctggccctgaatgcgggccggatcgccgtcgatattgacggcattgaactggctgcgctgatcgatgtggtctgtgacaacgggtattcacttcgcgttgctgacgagccaggcaagctggtagtggaagatccactaccgtccgtcgcccacgtaaactgcatccagtgtagcaccgcgcatatcaccggagctgataacagcctgctgtataccctttcgcaccagcatgaagactttggcgaccaggaatggatttcgtacaccggatcgggttatctgctctacctgggcgcgtggtcatttccggtcttacggctcaaacgtctcggcctgtcgaaagcctgccgtcggttagtggtgacgcttatccgtcgctacgccgctggtattgttcatcttgatgcctttggcgaagtgctgccgggcttcgctacctttgactggtaa

SEQ ID NO: 452122 - DNA, 378 bp, Serratia marcescens
atgcaaacccaatcgagatcctccacgcaggaggcaccgacacgcctgttacccgtggatgtctggcagaaactactgagccacctgctggaccgtcactacggtctgacgctcaacgacacacctttcggcaacgatggcgtgattcaggagcatattgacgccggtatatcactgtgcgatgccgtgaattttattgtggaaaaatacgatttggttcgcaccgatcgtcacggcttcagtgccgaaacacagtcgccgcttctcacccgtatcgatattctccgcgcccgcaaagccaccgggctgatgacccgcaacggctacagggccgttaccgatatcgccgcaggcaaataccgcgaggtgcagcaatga

SEQ ID NO: 452123 - DNA, 375 bp, Serratia marcescens
atgaaaatttatcctgtatccgcaaaacaggccgctgagattgagcggttaactaacgtgtcaccgattgatgtgtggctgcgcctcctgacatatctgctggatcgtcactacggcctgatgctcaacgacacgccgtttggcgatgacggcaccattcaggaatgcattgacgccggtgattcgctggttgacgccctgaatgagatggttgaagacaacaatctggaacgcgttgataatcggggaaaatcacttctgttcagctcgttgctgctcacacccgcagatatcctgagtgcccaaaacgctgtgggactggcaggcaacagcgccaccctggttatcaacggtcagtcatcatccggcagctaa

SEQ ID NO: 452124 - DNA, 471 bp, Serratia marcescens
atgaaaaacaatacgctgccactgttcacacccgacgccaccgttcctgttgcggctcaacatcagattgccgccacactcgtcccggacgaacagcgtgtcggtttctggccgcagcacttcggctgcataccgcagtggataatccttgagccgactgtcttcgcgtggatggaccgcttctgcgcggactacagcggcggcatctggcacttttacacgctgagcaacggcggtgcgtttatggccccggaagtggagaacaatgaaccgtggtcgctgttcaacacgatgaacggcaacggcggtgaactcagcgccgaagctgccggaattgccgtctgtctgatgacttacagccaccacgccatgcgcaccgactgcgacgccatgacggagcactactaccgcctgcgggactacgcgctcagtcacccggaatgcaacaccatcatgcacatcatcgactga

SEQ ID NO: 452125 - DNA, 234 bp, Serratia marcescens
atgccagacgctgacaatctgctgccgtccgatggtccctttacccgcaggcaggccgatgtcgtggtggtggcgtatgagaacgtcgctattgaagatgacctgggtacgcattttcggctggtcattcgcgaccatgagggtacgttaatctggcgggcatggaattttgaagccaacgccggggaatggcttaaccgctatctggtgatccacggggtcagaaaatcataa

SEQ ID NO: 452126 - DNA, 945 bp, Serratia marcescens
atgaaaagggtaaaatattcctcctgtgcgaaatggctggcactcggcctgcttgttgtggtcaacagtagtttcgctgcttcccgtgtgaaaacagcggctcaggccgttcagtgtcagcctgataccctggaaaatggtcacaacgggacctgcccgtacccttccgacctttacatcgcggaccccgtctggaaaaaggatatggagtcagctttacagcaggcgggtatccgcaacgtactggggccagatggcagtctgcacgggccggaaaatacgctggagcccgtcatcgtcggcggcaggcactggcttcagggctcgctgtgtgaacagggaaactgtggcgaccattacctgcgctttttgtattcgccgggtacgcatcaggttcttggcttctacgttgatggtcaggcacgctgggtcgggaatcctccggcagaagaggcgaagctgttgcgcggtaatgccgatgccatcgcggagaaaacaccgttaccgtctgccttgccagcagtaaccacggcgcctgcggacggagccccggcagacactatctggacctttaaaggggatggcggaaaatcgttatggcaggtctgtggtggtaagaacagcagttgtaccattatcgccaacactaagtattacgttgctgtgctgaaccgtaaatccgcgacgggctgtgctttcggtgatttttatgttgctgcccgcgataccgcatcttggcagcagtacgataccggcacctgcagcccggatgcgtatatccgcaagggcagcatcaacaacggtcagtatctgtccgttgatatcggtatcaacggggggctggtgaagcagttcccgattggttactggtcaatgcgcaaggaattttccggtagccgacgcccttcgtggtcaaaggttaaggaaaaaaatcagcagcactga

SEQ ID NO: 452127 - DNA, 216 bp, Serratia marcescens
atgggattctggaaggctgccggaaaactcgcggctgaagtggcaaaagacgccctcagtagtgaacgtgaagtaaaggcgacacatgaccgcatggaagacaaaagcagcgctgaactgagaaagataaccactgacgatggttttttcagcagcgccaccaccacggaaaagcgcctggcccgcagcattctgcgtaaccgggacgaccgttaa

SEQ ID NO: 452128 - DNA, 708 bp, Serratia marcescens
atgaatcaggctgaacgtcgccatgaccggcttgccgtccgactgtcgatgattattggccgtctggtggcaggcgaaacgctggatatgcgcaaactggccgacgagtttggcgtctcggttcgcaccctgcgccgggattttcgtgaacgactgatgtatctggacctggagtaccgtcaggggcggtgccgtttactgtcgggtagtcgtcagcgggaactggcagtaatgacctttgcccgccagtcaggtgttgaggcgctctttccggggttggacgggcatctggtcagctcgcttctgggcgggccaggagagtcaccctgtcttatctggcaggggcactccgtacaggccgtcaccgattgcggggtctttacccaactggttaatgccgtccaggaataccggaaggtgaccctgcgcggaaacggatgctgccatacggatatcgccccctaccggctggttctgcacgtcggtaactggtatctgacgggggcgctccagacccgcatcatcgcgcttcctctgacggatatccgcgccgtcacgcttcatcccgacagttttacccctgatgccaccgtgcacgacatcctgtcccgtcaggattttttacaggcgttacctcatttccggttcatcggtgaagtgctgtccggcttcgtccctgaaccacatcaacccgcaacagaaggataa

SEQ ID NO: 452129 - DNA, 876 bp, Serratia marcescens
atgaataaacctcatggccttcaggcctttgaacaaccgctggcattgcttccgcatacgcttcgccagcttatccttgaacgtattcagaatctgacccactacgagccggtgatcggcattatgggaaagagtggggctggtaagtcctcactctgtaatgaactcttccgaggcgaagtctctcctgtcagcgatgtgaacgcctgtacccgtgacgtactgcgtttccggttacgcagcgggcgtcacagcctggtgattatcgatttaccgggtgtgggcgaaaacgggcggcgggaccatgaataccgtgccctgtaccggcgtatgctgccggagctggacctggtgctgtgggtcatcaaggccgatgaccgggcgatgtcggtggacgagcagttctggcgcggtgtgatgcagccttatcaacagcaggtgctgtttgtgctgaaccaggccgacaaaatcgaaccctgccacgaatgggataccgtaaccagcacgccttcagcacagcaacgggcaaatcttcaggaaaaacaggccgctattaccgcgatgtttaaaccgcatcacccggtatgtgtcgtctccgcctgtagcggctggggcgttgaggagatggtggcaaccatgatgcgctgtctgccggaccgcgccaccagcccggtggcgacacaactgcacgggaggctctgcacggagccggtaaagtcgcaggcccgtgacggcttcagtgaggccgtgggccgggtgttcgatacgccagaatcatcgtcgttcctgcctgccccgcttaaaacggtgattcgcaccgtgcgtgatgcggtggtgtcggttgcgcgggctgtatgggactggattttcttctga

SEQ ID NO: 452130 - DNA, 2163 bp, Serratia marcescens
atgtccaggctgactgatttaattgctaaagcaaaggccagagacccacaactgggggctgatctggatcgagaaatcaagatcctgtcgtcacgccttccctttgggctgaatttcgaacgacatagccctgaagtcgtagaattgcccttacgaccagttcgcaagggagacaaggttcgcattctgccagagcgaggctcccccaagaaaggcgatcagcggctgtggcaggtgaaagccatccacaagacaaataagactgcagatcttgaattgatgggagcagctcatattgagactcagactgtagcgctgtgtaatctggtagttatagctgagtttcgtgacacaatctggccgggtctggtcagcacaggaaaaatacagcgtggtggtgacaagcctttccactctgtcatcaatggcgaaaactatcacgcactaaaagcattgacctacacgcacaggggcaaggtagacgccatctatatcgacccgccatataattcgggagcgaaggactggaaatataataacgattatgttgaaggtgacgatatatatcgacacagcaaatggctagctatgatggaacgtcgtttgctggtggctaaggaattactgaatccttcagactcagtgctcattgccacaattgatgaaaaagaatacttgcgtctcggcttattgttagaacaagtgttcccggaggcccgcattcagatggttacttcccttatcaatccgaaaggagttgcaagagggcaggagttctatcgcgtagatgaatacatcttttttgtatgtttcggctcggcttccgtaacaaagacgaatgaccctatgattctcacagggaagagaaatgaaacggatcaaaatgacgaaaaaaatgaaattaaaagtgtccggtggggaaatttgttgcgcagcgggactgatgccaaacggacagaccgtaagcaccaattttacccaatattcttgaatgctagaactggaaagctacacagtgttggtgagcctcttcttcctgaaacagcattacgagatgaagtcattccaccggaaggaacactggctatttggcctattagaaaagatggttcagaaggtagatggcaggttggcaataaacggcttcgttatttatttgatagtgggtttgcatctattggccggtttaatggtagcaaccgtgtatcgtttagttatgttactgacaatgtattcgacttaattgagtccggtaagatagttattacggggcgtgatggaaacggggttgttactcttgcgtattcagagaatatggagatgtctgacaatccaaaaacaatgtggaacaaaacctcgcatagtgcaagcgaatatggctctactatgctaaggcatataattcccgctcgaaaattccccttccctaaatcgctttatgctgtcgaagacactcttcgcttctttgtcgctaacaagcccgaagcaataattcttgatttcttcagtggttcaggaacaaccgcccacgctgtcatgcgactgaacaagcaggatggtggtcgccgtcagtgtatttcagtcactaacaacgaagtcgccgctgatgaacagaaaaagctgcgcgaacaaggtttacgccccggagatctggaatgggagaaatggggtatctgcgactatattacaaagccgcgagtgcaagcagccatcacaggcaagacccctgatggtgaaccgattaaaggcgattacaagtttaccgatgaattcccgatgtctgaaggctttgaggaaaacgccgaatttttcaccttgacttatgaagcagagaagtcggttagccataacttggcttatgcgcgtattgcgcccttgctgtggttgcgagcaggggctcgtggcaaacggattgacaaactgcctgctgatggatgggcggtgactgatgcttatggcctgctgacggcggtggatcaagccacacctttcattaaagccattagccacgccagtaacatacgagtagcctttatcgtcaccgacgatgatcgtcatttccagtctgtcaccaagcgtctgccaaaaggtgttgagccagtacgtttatacgaatcgtacctgaccaatttcagcttcaccagtggggaattaacagaatga

SEQ ID NO: 452131 - DNA, 627 bp, Serratia marcescens
atgaaaacgtataaaggctcacatggggatcatgttctgcagtattgggtcaagattaaccatttaatctgtcacttgactgacctatatcccagactaacggcggtacgagtggatctccattatccgaagatagtcgataacggagacaatatctgctgtttccctaatcttgaaccaggtgtgatatcccgaatgcgtgagtcccttaaagctaagctggatgctgatcgcatccgtaagaagcgtgaaggtaagcgtatttaccgttgtccattatttattatgtgggctaaagagtattccgaatcgggtaaatgccactaccacatttgcctgttgttcaacaaagacgcttactaccacctcggggactacgaacgggaagacaacctgagagggatgatcacgggagcctggtacagcgccctggcgttgcaacgggatgattgccctgacctggtgacattccctgataactgtcgctacgtactgaataacgaagacgctgactttgaggatcattaccaggcgttgctaactcggttggactacctcaccaaagttgagtctaaagtgtttggtgaaggggatcgtaacttcggctgtagccaaatcgatctgtaa

SEQ ID NO: 452132 - DNA, 681 bp, Serratia marcescens
atggctaaagggataggtttttttgcccgcaccctgatctgtcagccagactcaacccagggttacaggaaaattaccagcccagtgacttcaaccgaacatttgccagtattccatcaacgattgatggagatcatcactgaaaatatgatccgacatgatgaaaatgaacgggagtgcctcattttttgtcctgaagcggaacaacgaatgattgagttttataataatgttgaatctgagatggggatgcttggttttctttctgacttcaaagactatgcttctaaggtcacagagaatatggcgagagtggctgctttactgcactacttcgaggggagtggcggagatatttcactcatcgccgtagaagcggccatacagataatttcatggtacgtggacgagtatgtaaggcttttctcaaaacagcaggaattgacacttgtaggctcagaggctcacgatctttactgttggataaaagaatattgcgttagaaatacgatcccctacctcaggaaaaacacgatattgcagtatggtcctaatcggttcagaaacagagcgacagtgaacgaattactaagcaccctttattcacagcgtaagataatggctgcgaagcgaggtaaaaatatatttatccagcctgtggagaccactgatttggtgtga

SEQ ID NO: 452133 - DNA, 210 bp, Serratia marcescens
atggagcgcatcacctcatttttagcctatgcggtagcgatgttcctcgcgtggattggcaagtattcgccgcaggatatcgcctttatggtcggcgccgccgtgggcgtcggaacgttcctcgttaactggtactaccgccgcaaaagctaccagctgttgaacaagttgggcatcagccggagggtttacgatgaactcaatcgctaa

SEQ ID NO: 452134 - DNA, 282 bp, Serratia marcescens
atgaaagacgtaaacgaaaataccgttaccctcgacaccccgatccagcgcggtgaaacaaccatcaccaatgtgcaggtgattaaaccgaacgcgggcgcgctgcgcggcgtcgggctggcggcgatcgccaacgccgacgttgacgcgctgctggttgtgctgccgcgtgtgaccgtgccgaacctgacaaaagaagaatgcgcgcgccttgagctgccggatttggtggcgctggccgggaaagtggtcggttttttgtcgccgaactcggcagcgtaa

SEQ ID NO: 452135 - DNA, 165 bp, Serratia marcescens
gtggggacggtgtggggcgtggtgaccggggtgatcatctttaccgtcatcaactacggcctgacctatatcggcatcaacccgtactggcagtacatcatcaagggcagcatcatcatcttcgctgtggcgctggactcgttgaaatacgccaagaagaagtag

SEQ ID NO: 452136 - DNA, 147 bp, Serratia marcescens; identical to SEQ ID NO: 431842

SEQ ID NO: 452137 - DNA, 213 bp, Serratia marcescens
atggtcagcccgttgagcgccgcgcggtatttctcgttgaccagcttggtctgggccgggttgggcgtcggcagcgtgccgttcccgtcgccgacggccatagagacgattttcaactgcgtgccgcccgcgctggcggcggcaatcttggccgccccggcggtggtaataatcgctttatatttattcatgattttctcttatccggggtaa

SEQ ID NO: 452138 - DNA, 222 bp, Serratia marcescens
atgaccgtggccgagcagttgcaggaagcggacacccgctttaccgagacaatcgctgcactgagcgagcaggttgccgaccttaaacagcaggttgaaatcggcagcaacgcgttcagcgcgctgaaagcccagctttccacctcggaagatttcagccagcaggtgcgcccggaggccaccggcggcaacagcgcgcaagacgtgctgaccgactgctaa

SEQ ID NO: 452139 - DNA, 615 bp, Serratia marcescens
  misc_feature (600)..(609): n is a, c, g, or t
atggaaaggtttcttcttaactcggcattgctgttggatcggctgagcaccgtctcgttgaatgagatatcacttgatgacagggtggagtcatccgtgttccttactcaatacgaacaaacgcgtagtttgcctgatcatgtagccaagtcggcttggtcatccctggaacagcgactcaaacagcgaaatatgaaacttggtccagtagcggccttgcgcctaatcgctgaaaaatttgttaaaaacgagaaagacggccctagaaccgatcttgctttgttctcggaatggcaaacgctgatgagccgagtgtcgtgcctgccaattatggcgtgtcatcaggtctttaactctgggcctgccagtcaagaatatagttttcgctggcctttatacccatatcacccgacggttgaggactacattacccgtgaacgcctacacgaaacccaccaacatctgaatggcagtaccagtgcggaagagtgttggctggatgcactcaagcacccagaagtgagcgtcagagattttgataagggctgggcatctcaagagatgaaacaactctgcgcccagattgacccttctctgacnnnnnnnnnnggatag

SEQ ID NO: 452140 - DNA, 123 bp, Serratia marcescens
atgaatatcaaacgtcacatgatgcgtaatgtgtgggcctatatgcttgctggcctgttcgtgttatggatacaaggtaagggaatcccttcgctctatcggtctatcaatcaaaggggatag

SEQ ID NO: 452141 - DNA, 708 bp, Serratia marcescens
  misc_feature (636)..(645): n is a, c, g, or t
atgtatgtcatcaagaaccaaaaacttctgcctgaacagctagataagttatttgatcatcggccagtagcggccagagactggtaccagggtttggtagctgcgggtgagttggccgttaccgggcaagataagctgttaatcagcctattgttgcctgaacgtctgctggatatggttcgcttttatacgctgtttgataaaaaagtcggcaaggttgttgctcgctatcagcaagtttttggcatcaaacgcttgattgagcgcatcaataccaaaagacctgatggtagccgtgaaggtggtgttatttggcataccaccggttcgggtaaatcgttgacgatggtatttctgagcaaagcgctaatcttgcatgaaagcttaaagcaatgccgcattgtggtggttaccgaccgcgtcgatttggaaaaccagcttagccgcacctttatctccagtggagagctctccgggaagagagacaagtcagcggcgatcgcgacatccggcaggcgtttggcagagcagattggtaagggcactgagcgtattatcttctcgttgatccagaagtttaataccgcgatcaggcagcctgaatgcatcaataccagttcagatattatcgtgttnnnnnnnnnngacgcaggcgttgccgaaagccgcattcgttgcttttactggtactccattgctgaaagatga

SEQ ID NO: 452142 - DNA, 570 bp, Serratia marcescens; identical to SEQ ID NO: 82804

SEQ ID NO: 452143 - DNA, 177 bp, Serratia marcescens
atgctgcaaatggatgagcttgtcccactgaaacgcgccaagagcgcatcaggagtgcgctacatctccgctagcaaaaactacacctacgaactgtggggtaagggcaacgacatgaacctttcgacccacgatggcgggaaggagcaaaccgtcctcagtagctgcaagccataa

SEQ ID NO: 452144 - DNA, 1080 bp, Serratia marcescens
atgagcagaaatcacaagtacgatatatcaataagaatctcgtccaagacaaacgaccaaatcgggatttttgacgttgaatacccccatactaataactcaagattaaaagataaaattgtaataaaagagaaattaataaagatcacagcatacagaagcaaaaatacttcaatcacagatgttattcacaacgtcaatacagcaatgaaccatcaaatatcaaagtcactggcattttactatgcaagtgtaggtgtacccaataaaataaccagcataaaaataactaggtgtttaagtgggaaaattcaagaatcacaaaccatcatcaaatctaacgttcgccagattgtcacctcagacaatggatttgattatttaaagaaaataaacaaactagaacttgcaactatttttgaagaaaacagcaagggacgttctttattgtatgcagtaacacaccttattagttcatgttcatcacccgaaccatttcagcaatttgaggcattatggaaatgcttcaactccatttataagcttaaggaaaacctcacccaagatttcgaatgccttaaaaaattacgtgctcatatgttagcagcctcttctaaataccctttatctacagattatgttagctcaatgactcatgatgatatattttccattgttaactggcgtaatatgattctaaatgatttcagaaccgaggcccagagtaagtctctatgtggtttcattacacgcatttctgatgctaggttgattaaaaaaattgaagactctttatcaattcgacagaatttcctagacaatgaaggggtcttaaaaactgtacgcgctcatattgaacagaaaaaaaacacaaatgtgaatagtgatatagaagtggttgcattcatgtgtctaaaatatctttattatgtgagaaacaaacttattcatgcagagcgtgtacatcccagctttcactgggtgaaagaacactcaaatgaagagatgaaaatcagtaaatgcaatgtcattttaaaattactcatcattgatctcttaaattttaatacagctttctaa

SEQ ID NO: 452145 - DNA, 426 bp, Serratia marcescens
atgagttacggattcagtgcgtcaaccggtgcattctatgtttgtgaggatcgcaccagctatgaagaaaatggtaattggccaactgatgtaaagcctgtttcagacaaaatatggcagatgtattgcggtcaggggcccgttggaaaagtacggggtgcagaccgtaaaggtctgccttgttgggtagatactccgccaccaacgaaggcggaacagcgggaaatagctgaacgacaaaaggctcaacgactggaaaaggccagtaaggagatcgccccgttgcaggatgcggatgatttggggatagcgacggaggaagaagccgcgcagctcaagctctggaaaatctaccgggtgcagctgagccgcattaacccgcaggacgcgccggatattgactggccggtggaacccggtacctaa

SEQ ID NO: 452146 - DNA, 849 bp, Serratia marcescens
atgtcagaaacgctttctttaccggatactcaggtcgagtatcgggattatccgctggttgctgcgcaaccggggatctggatcgccgaccaaatcgcgctgcgccgcaacagcttcgccgtggcgcactacaccgaactgcacggcgctatcgatcgttcggcgctggagcgcgcgatccgtcaggggctggccgaagcggatacggttcaggcgcgattctttgaggcgcaggacggccagccggtgcagcgtttaccgctgatagccgatcccgcacgcgtgcaggcgccggagtggttcgatttcagcgcgcggccggacgccgagcaggcggcgctggcgctgatgaacgacgatctggcgcaggatctgccggcggacggcgaacggccgctctatcgccatgcggtgatccgcgtcagcgccgatcgctggttctggtaccagcgctttcatcatctgaccctggacggcttcagcttcgaggccatcacccgtcggatcgccgatatctatcgcgcgctgcgtcacgggctgtcgccggcggcatcgccgtttaccccgttcggcaaggtggtggaagagtttcagcaatggcaaacgtcgccggcgcgccggcgggcggctgagttctggcaacagcatctgcgcgatttgccgtcgccgctgtcgctatcgacggagagtcgggaggttgaaccgggcgcccggccgctcggccgctcaaacaggcgctggtgctgccggaatcgctgtttgacgaagcgctgcgcgatggcgcgctgcagtcgctgcaaccggccgatatcgtcacagcggcgctggcgatgtatctggcgcgcatga

SEQ ID NO: 452147 - DNA, 234 bp, Serratia marcescens
atgggggaacggcagccgctgtacggccacgtcgacgggctttccgccggcatcaacgacagcgagcgcaccaccgccgccggcactctgctcgccaacgtcaacccgacattcagctggatccgtctggcgcagcgcatcccggtgcgcatcgcgatcgacaccattccccacggcgtccagctgatcgccggccgcacggcgacggtcagtctcaaggataacggggaataa

SEQ ID NO: 452148 - DNA, 288 bp, Serratia marcescens
gtggtcaccaccttcccggcggatgtggtgcaggatctgcaagattttatcctgtggcagccggatgcgacggagattggtgtagaggccacctatgtgatggtgcgcagtccgagatatactccgggtaaagtgagcggcaaaggacagcaagtgggagacggctggttgaatacagcggggcagttcccagccagattgcggataaactgcatgggcgagagtttgcgagctttgacgcgtttcgtaaggcgttttggactgaggtggggaaagatcctgagctga

SEQ ID NO: 452149 - DNA, 330 bp, Serratia marcescens
atgcgcaatggagtggatatttccggcggtgcggtggtgtcgcacaacgcgggtatctacacctcgaccaccggcccgactccgcttatcaatggtcaggtttatgatgcggctgccatgcatactaattttaccagcggcaacgtcactacggtgatgttaatgggctcgcggattgtcgctggtaaagaaaattatggattgctctcttatcgagactggcagggtaactggaacgaactgcaggtaaggcccaacgccgagctttctgtagggcaattgactaaacgcaacccccgatggatggatttgggctgctgggaaccgtag

SEQ ID NO: 452150 - DNA, 603 bp, Serratia marcescens
atgagtgttgttgaaacattgagagaactgtccgaagtttggcagttatttggtgatatgcctgatgacactacgttaggtgtcgatttagcagcactctaccttggtataagtgtcaaaactcttgcccgttatcgtcagaacggtgatggaccaaactacatccagtatcaatctgaagacagtaaagccagaaaccaacgggttaattacctattgaaagaccttcgttcctggagagataaccatagagtcagtagcacaatgcacgctgctcaagttcggggattagcatttacatgcctatctgatttcaccgagcctcaacctttctggcgaatcaccaacaatactgactctacaagtaaaatcatatcccatgcactcactatccctgatgaaaactttaagcaaattcttttagagcctaatgcagaagttatttggatctctattgaggaagctctctttgtatcatggataaataaagatgaacgttctatttggcacggaatttttacatcgacactaaataatattgttttggcatcgggtgctgaacaggaaagatatattttgaatgacattttggatgataaataa

SEQ ID NO: 452151 - DNA, 336 bp, Serratia marcescens
atggcccaagcaagtaatcacgcggcggacaacacgccgcttctgatggcgcagaccatcgaacagtttccttcccatcatgcggcgatattgtgtcagctggcgttgatgggggagatgtcaacgtcggccttgctgaataacctgtacattctgggtatcagtcctgccagccaccgtggcatcaatgccgccgaaatgaccgaggcgttggaaaccctattgaccgggggctggctgcagcaggtcgagagccgctgggctctggcgtccggctacgagaatacggttttcctctacctgctgacctacccatccatctggcgtaaactgtag

SEQ ID NO: 452152 - DNA, 471 bp, Serratia marcescens
atgatcgcggcggtgggcggcatgcggttacaggtcacgccggagagcccggtagaccgatgcccggccaatcccaagtttgcgggcgatggcggttgctcccattttttcatccacatagaggcgatgcacttcggccggatcgatggagggtttgcggccgcggtagacaccgcgcgctttcgccgccgcgatcccctccagctgacgttcacgccgcagattggtttcaaattcggcgaaaacacccaacatatcgaggaaagctttgccggcggcggtacgcgtatcgacaggttgttccgtcgccttgagggtaaggcctttcaggttcagggcaaaaacaatgtcctggaggtcattgatgcagcgggcgaggcggtcaatccgcgcgacggtaaggatatctccagggcgcaggaagtccagcaacaactgcaattcggaacgccccgtaataaaatcacctga

SEQ ID NO: 452153 - DNA, 357 bp, Serratia marcescens
atgattaaaaacacacttgccgccgtactgctcatcggcagcttttctgcgctcgccggcacaaccccgttgtccgtaaaatctcaggcaacttacctcatcaataaccccaactaccccgtctggcaactgtcgctgaccagcctggagaacgacattaccattcagtcgctcacgctaaatcgtggcaactgcctgatttccatggcgggtcggggtaaaaacgtaaataaacgtctgggatacggtcagacgctctcttttaccacccccagtaacagtggcttcgataagtgtcgcccgcttgagctgacggtacaaaccagcaaaggcgactttacctttaattggcaataa

SEQ ID NO: 452154 - DNA, 306 bp, Serratia marcescens
atgaatggaactaactcaatgataaacagtaaattaaaagtgacaatggtaccccggggtgcatttctggccttcacgctattgtctgccctggtcgtgagcggctgtggtgacaagaacgaacgtgaatttatccgcggctgtaagtccggcggcggtactaccgccatctgcggatgtatctgggatgacctgaagaccaaatatacacacggggaactggagaaaatgcaccagctgcctggctatgtcccaccccgcttcatggacaacatgttgagtgccgctcagcagtgcagaaaataa

SEQ ID NO: 452155 - DNA, 504 bp, Serratia marcescens
atgaaacacggtacagccctgctgttgagcgtaggattgatgctggcatcgctgtcggcagcaaatgccggtacgctcgacgcacttatacaggcacaccaccagcgctgcggcaaacccgtcttctatgcgcagaccgctaaccacaaaaaagaggtcgaaatttgcatcatcaccccgtcggtatcgtattcattcggcaggaccggcgcagaacataaggagatggacattaccgtaccggcacacgccaccacgtacgcataccagagcaatcaggttatcagtctgcaggaattcacagtccggaacggcgacacctcataccaggtgtctgccggaacaaacgatgaaggcaggccgttctcgtccctggacgtttaccagggaacacctgagacgggtaaacgtctggcggaaatccagcttgacccggatacggtggtgaacaacatcagccatgcccttgcacaagaaggcgtagcggaatcggataacctctga

SEQ ID NO: 452156 - DNA, 294 bp, Serratia marcescens
atgacggagtaccaggttaacgacaaatcaatcattcctggtgctcctgtctttcattcctttaagacagagaaaatcgtcatgacaaataaaacggcacaaagcctactcagtgacaagatggtcgatatggcattcattacagaatttacgggatgcagtgataaatggttttataagttaatccaggatggtctgttccccaaaccaattaaactggggcgcagttctcgctggctgaaaagtgaagtggaagactgggtttttgaacgtatcactgcctcccgtaagtag

SEQ ID NO: 452157 - DNA, 1593 bp, Serratia marcescens
atgaatttatccccagagttatataatgccagccagacaaactattcgggtctgccttacagcccagtgaaaaaagcatccgttccctatccggtccagtcttttccgccggttcttcgaaatgtcatccaggcattacatagcaatactcagattccggtggaattaattggtaacgttgtactggcaaccacatcattaacctgtcagtcattaatcgaagtcatacagccccacaccaatatggccgaaccctgctcactttacttgatgaccattgcggaatcaggagaggggaaaacaaccatcaacaaacaggtcatgaaaccctgttacacatttgcagcggaactcattcagcaatatgaacagcaaatagtcgattataagaaaaaatttaaactctggaaaatccgccagcaggcacttgaaagtaatttaaggcaagccatcaaaaaaggctacccaggagaagatgaagaacatgaaatcagtaaacatgctcagaacgaacctctacggccgccacgtcccaattttatttatgaagacacgtcgcttaaagcactcgtggaaggcctcagcgaacaccccgaggccgggtttatttctgacgaagcgataaccttttttaaaagtcacctgaaaaacaatccagggttgctgaataaagcatgggatggggaaatgtttgattttcgtcgggctgacggagaaatttatcagataaccccacgcctgacattttcgttaatgtcccagccgggtgtttttatggattacataaaaaaacatggtgtatcagcacgagccagtggattcctgtcccgttttctttttgcatgggctgaaagcactatcggggaccgtcaggatattcatgtaaccatagatcccaaatataacctaaatattttccacgaaagggttgtcgaactcctggctcagaatgtaattccgattgccaatactacgacccaaaagaaaaaactgacactcacggatgaggctctcgctctttggaaagaaaaccgcactcaaattgaaaggaaaatcgcacccgactgcgaatgggaacacatcagggatattgcttcaaaagcaagtgcaaatatactgagaatagcagccctgttccagtatttttacaatgacagttcagagacaattcaatcaggcgtagtcgaatgtaccattaaagtcatgaactggtaccttgatcaagctgacagaatattttacccgatgtcagaacgctaccagtttgaccaggatgttcgcgagcttcattcgtggatcatgaatagaacaaaccaaaacaatggcttcgccattctgaaaaacgacctggaaaaatatggaccacatcgtctcagacgaacagagaggctgactcccgtactgaatcagttgataagccagggatattttggtgttatccagatgttttcacacagtgcactttacgtcaccatgcatcatcctaatggcatatttaaccttccctatggcttcgcgtacaattcaccattcaatatcatacaatcgcgcaataatacaaaagggaaatcgtaccatgttgatataaactga

SEQ ID NO: 452158 - DNA, 525 bp, Serratia marcescens
atggcagacggcattgtggcggacggcggtgccgatccttcccagaggccggcagtcatcaatactcagaacggcttgccgcaggtcaacatcaccgcccctaaccaggccggcgtctcgcacaaccagtatcaacagttcgacgtcgatgtcaaaggtgccatcctcaacaactcggcggtgatgacctcgacccagatggccgggatgatccagggcaaccctaacctcaatcccaattccgcgccagcgcgtgtcatactcaacgaagtcaacagcaacaatcccgccggcattgtctgcaacggctgcggcaccatcaacgccggacgtatgacgctgaccaccgggaagtcgcaactgaatgccgacggcagcgtggcaggttatcaggtcgagcgtggcgtggtgcgagcatcgagggcggtggtctcaacggggatgcccgtcatgatacctagtacgtcgacattctggcgcgcgcggtggaagtcaatgccggcgtctgggctaaagaagggctga

SEQ ID NO: 452159 - DNA, 234 bp, Serratia marcescens
gtgctcctttttttacaacagcccctgtaccgccagcagcatatctttgcccgtgcagacgtcgagttatcggtcagcacgatggcgggctgggtgggcgctgccggcgtggcgctgaacccgctggcggagctgttgcaccgggaactgctgacccgcagcgtgctgcacgccgatgaaaccaccatgcgtatccttgatacccgcaaaggtggtaaaacgcgttctggctaa

SEQ ID NO: 452160 - DNA, 705 bp, Serratia marcescens
atgtcgataaaagataagtctcaacacggaggtttaaaccctaagccaaaactttgccatcatagtaaatggattacttttctatccattgctttctgcaccttagtaactagttttttttggctcttcattttctatttggttctacgcccaagtttttactcttatattggatttgctgataattttgtgcttaaaaagcccgatgtaatttctgatcccaagactttacagaatatcggaaaaatggtcactgatggaacccttttaagtcttgacgatttttggtctttccaaagtaatttatatcaaacaattattactgtgctcattgcactcaatgggatagtagctgcattttcatttcttattattaaaaactcttctacagcaaaagcaaaagaagaggcgagagatattgctgttgtcgaagtaaaccaatatgtagaaagttcaaaatttgaaaaagaaataaagagaattttatacgaaaagattgaacctgtacaatttgatttattagctcaaattagttcaattgacgaaattaagcttagtcaacaggaacacaatcagtcatttgagaaacttgagcaagaaatagatggtttaaaaaggaatcttaaattaatttctgaaagcatttctttaaaagatacctcagatgaagatggcggcaactttatcttaggaaggagagcttaa

SEQ ID NO: 452161 - DNA, 543 bp, Serratia marcescens
atggcatttatgactaagaaattaaaaaaaagtggtgtaataatcggccaagacattgatatgacaacggcttcagagcttattgtttttgctaagaaaaacaatattgaaacaagccctttagatgtttcaagacttaccagtttgttaggtattacaatgcgactagaaccgatgaaaggagaagaatcggggtctcttaaacaagggaaaagcggcaattgggtaatgacggtaaactctttacaccatccgcatcgccaacgcttcacaatcgcccatgaactaggccattttattcgccatactctcaatagaaatagttttacagacacggttttcttcagaaatgaagaaacaaataaaatggaagctgaagcaaatagattcgcagccgaattattaatgccagagaatgaattcagtaagtttatagaagaaaaatcaaatcaagtggctgatatagcagcacatttccaagtgtcttcaatggctgtgagaatccgtgctcaacaattaggcttcagtggacataatttataa

SEQ ID NO: 452162 - DNA, 1002 bp, Serratia marcescens
atgaagactcgggacgctgagttaaaagcggtgtcaaaactctcttcaggagtatttgatcatattctaccaatttatgagctaacaaagtcacgaaaagccaaaattgctccagatggagacattcatcgtagaatgctgactatcaaagatattcagggggaaaggccttttattttagatttaacatcaaatgagaaatatattaacgatcaaattcgacaactcgttgatgaaaaagatggttattatgaatggagatacttcattaatctttatagccatttgaacattattccaatgatacacatctatgatgatgaagatttttctgaagtgcggagttttgttagcgaaataacaaaaacaaaaaaaatgctggcattacgccttccacacgatttagatgattattctatttttattaaacctatcgccgatagtttacaagatgatagtaaattttatgttattttagatgcaggccaagttgaaggagctactgataaagaagaagagtatttctcaaatgcttgtagtgatctagaaatgtttaatgataaaattgaagatgttatcattgcttgtacatcatttccctctagtccgattaagtatggacacgatgatcgaggtgaaatacccattttagaagaaaaaatcttcaaaaaaattagcgaagactatcaagtgaaatatggtgattatgcttcaattaatattgagcaaattgaaatgaaaggagggacttttgtaccaagaatagatatttctttagaggataagtttatctataaaaggtatagaagagacgccggaagttatccgttgtgtgcagtaatgatggtaaaagacgtacggtatacaccaattgggatatgggctgatcatgaaattagtcttgcagccaaaaatacaccttcgggtataagtccatctttttggattgcggtaagaatgaattatttcatgtcaagtcgtgttctattaagaaactcttaa

SEQ ID NO: 452163 - DNA, 624 bp, Serratia marcescens
atgaaagaaattgatatcaaattgaaaattgtagagtttcttttaaactctgaacccgctgatacatacctagctgctgaggttagatttagtttcgggtcaagacgtgctgatatcgtttcaatttcatcggatattgcaactgtttatgaaataaaaagtgaaaaagattccgttgaaagacttgtttatcaaatagatagttataaagaatattttgattattgttatatagtttgtgtgaatcaaaatttagatgcggtcagaaagaaaattagcacgaatgtgggtattattgtagtggatgatattagcgttaagagaattagaaaggcaaagcgtattgcccggcaagaaaaattatgtttagcgagcactataccagtgaatgaattgaaaaaaatcgttataaataaaaaagggctatcaaaatacgagttatgtatttcgttagctaatgaaaaatccctcgctgaaataaagtgcttatcgagaaagtttttattgaataacatcatgaaaaattttgacatttttcatgatgaaattggtgacattttatcaccagatgacattctaacaataacaagaatgcctcctggtagaatattaagagtttcttaa

SEQ ID NO: 452164 - DNA, 411 bp, Serratia marcescens
atggccagactgagaacgcggatgagtaaaatcaaagaagttttacgccttaaatttgactgtcacctgtccaacaggagtatcgcggtgtgcctgaacctgggcagcagcaccatctctgatatcgtgacccgcttcaagggcagcaaactggtctggccattgccggaagatgtcaccgaaacacgtctggaggcattgctttatgcggggcggcccagtgacttcaccaagcgcatgcccgacttcccattatgccatcaggagctcaaacgcaaaggcatgaccaagatcctgctctggcaggagtaccaacaggaaaacggcgataatgcctatggatacagccagttctgcaatctttatcgtgagtggctgacgctgcatgcgtcaacaccacgttgccggtga

SEQ ID NO: 452165 - DNA, 282 bp, Serratia marcescens
atgcctatccccgttgttcgtggtctcggtgccggctgtttgctggggctgactttgctgaccgcactacctgcctttgccgctgaaaaagatgagcaggcttctgcccagcgcatgctgattcaggtgcaggcagcacttgaacgcgcgcgtgttgccgccgttcaggctgacccgtcggagcgcggtcgtttcttcttcgactatgctcgcgctaccgccgatctcaaaaccatcaataccggtatcgatcgttacctcgagccttcactgggctactaa

SEQ ID NO: 452166 - DNA, 1059 bp, Serratia marcescens
atgaataacactctgtgcgaacggctgaacataaggcaccccatcattcaggctccaatggcaggcgtctcaactcctgagatggcggccgccgtcagcaatgccggcgctctgggctgcatcagcgtgggagcatccacgcccgggcaggcggaaaagatgataaacaacacccggagtatgacggtgaagccgtttggcgtgaatgtgttctgtcatgcgcaccctcaacgtaacgaggtgctggaaaaagcttggatcgagcgttttcgtgagctgtttgcacgctatgacgctgaaattcccccgacgcttacggaaatctattcatcatttcaggataatgaaagcatggcggacgtgctgctcgcagcggcgcccagctgcgtcagtttccatttcggcgtgccgtcgtcccgggtcgttaatcgcttcagaaagcgtggcattgtgacctgtgccacggcaaccagtgtcagggaagcccagcttatcgaagccgcgggcattgatttcatcgtggcccagggctatgaggccggcgggcatcacgggattttcgagccccgggaggaggacagccagcacagcaccttcacgctggtgcagactatcagaaaagcgtgctggctcccggttattgctgccggcggtataatggacggcgcaggtatcgcagcgatgctcaggatcggagcttgcggggttcagatgggaacggccttcgtgctttgccccgagtcctcggcgaatgaggcctaccgtcaggccctgaagagtgaaaatgcggccagcacgatgatgatcacagccatttccggtcgcccggcccggtgtatcacaaacgatttctgtacactgtcccgtgacattgcaaaagactgtatcccaccctatcccctggcctacgcactgggtaaatcgcttgcgggtgccgcggctgcccacggagatcatggattcggagcacagtgggcgggccagggcgcagccctggcccgtgagatgccggcggctgaattagtgcaaacgcttgtcagcgagatgcagaggggctga

SEQ ID NO: 452167 - DNA, 888 bp, Serratia marcescens
atgaaccatacgtctctggaaatttttcaggttgtcgcagaagagctgagcgtggtgaaagcggcgaagcgtctggggcgcgtgcagtccagtgtcacaacccgtatccagcagcttgaagaggggctggatgcacagctcttcatccgggaaaacaaaaaattacggctctccccacagggaaagaaatttctggtttattcgaagaaaattctccgtctggctgaagaagcgcgccaggcccttcatcccgacgaaccgaagggggtgctgactctggggtcaatggaatcaacggccgcaagccggcttccggcaccgcttttggccttcagccgttcctgtcccggcgttcatctgaagctcaccacaggcccgacccgacagctgaccgacaaagtgttaatgtccgagctggactgtgcgctggtctcgctgcaacgcgatgaaagcggggacatactctgccctgagaatctgagctttcagccactgtatgcggaaaacctgcgcctggttctgccggtcacgatgggagcggtgaaaaaaatcggggacatcccggaagggctgctggtgacgtttgcaaagggctgtaccttccgggatattgctgtcaggctgttaagccagatgcccggcaacggggaaaatattcagatccaggaagtgaattcctgtcatgccatgctggcctgcgtggcatcaggaaccgccatgtgcgtgctgccgcaaagcgtgctgaccctgatgccgttgccggaagggctcacaacactgcccgcgggaacggcagtcactcagctcatctggcggcaggactttagctcgccggccctggataaactgctttctgtcctacagaaaacctcggatatccgtccgtag

SEQ ID NO: 452168 - DNA, 888 bp, Serratia marcescens
gtgataccgaaagcgcacaacatggataacaatctgtcgattgccaaggcggcaacatggatgatggcatctgtgctgttgatactgctaatgtccgtttcgggtcgaattattacccgggagcttgatgtcttccaagtaatggaaatgcgttccgtcatcgccgtgtttatgttgttgccgttgatttatcgagagggtggaatccggactatgcgaaccattatcctgcccaggcacatcggccgtaacattgcccattatgcgggacaatatgcctggctaatggggctgacactaatccctttggctcaggtcgtttctattgagttcaccgcgcccatttgggccgcatttctggcggccatattcctgaatgagcgactgacatggcgaaagggagtagtaatcctttttggcttgacgggcgtcgcgttaattgtgcgtccgggcgcagcgcctctaaatccgggccatttgataacgcttggagcagccttcgcgtttgcaatttcgttcatctcgacaaaattgctaacgcgctccgatagtgccactaagattattttctggatgctcgtgatccaatcgatcatcggtatagttccagcactgaacgtgtggctttggccaccagcttcaatgtggccatggttatttctgttcgcattcgccggttcatttgcccacttttgtatggctaaggccttggcccatgcagatgccacagtcgtgatgcctatggactatctgcgggtgccattatcggccgtgctggggtatctgctgtacactgaggcgatagatggcttcaccgcgattggcgcaggtttgatcctggttggtaatttgttcaatctgcggccaccgaattctgagagattgtga

SEQ ID NO: 452169 - DNA, 324 bp, Serratia marcescens
atgatttatgagatcgctctgcttcccgttcacagggagaaagttgatacgttcaaaggagcattcgaaaaagtcgttccgttgctcagccgcgcccagggttaccgcggtcacctactggcgcaagggatcgaaacgcccgaagtgttcaaccttatcgtgcgatggcgttctcttgaggatcacacaccaggcttcgaagcaagtgaagaccatgaaatgttcatgagaggcctacaggaatatttttcggaagagccgaaagtccatcatatcgaaggcggagtctttgccgcaagcttaattgaaggaacaatcgcatga

SEQ ID NO: 452170 - DNA, 990 bp, Serratia marcescens
atgaaagcaatgacactcaactcttttggtggcccggaagcgttcgagcttcgcgacgtgccaaaacctgttccgcatgcgggagaagtcctcgtgcgcgtgcatgccacgtcgatcaacccgttggactatcaggttcgacgcggcgactatcgcgactatgtcccactcccagctatcaccggtcatgacgtatccggtgtcgttgaagaggtcggggctggagtgacgatgttcgctcctggagacgaagtctggtacaccccacaaatttttgagggaccgggcagctatgccgaataccacgttgcaaaggaaaccattatcggaaggaaacccacatcgctaagccatctcgaagcagcaagcctgagtctggttggcgggactgtgtgggaggccctcgttgagcgcgcagctctgagagtgggggaaagcatcctgatccatggaggtgcgggaggagtcggtcacgtggcaatacaggtcgcaaaagccatcggtgcgaaggtattcacgactgtacgcgaagataacttcgaatttgctcgaagtgttggggcggatgtcgttatcgactacaaaaaagaagattatatcagcgccattatgcgggaaacggatggccgcggcgttgacgtcgtgtttgacacaattggtggcgacacgttgtcccgcagtgcagacgtgctcgcgcaacttggccgcgttgtcacaatcgtggacatcgcacggccccagaaccttattgaagcgtggagcaaaaacgcaagttatcacttcgttttcacaagacagaaccgtggtaagttggatgaattaactaccttggttgaacgcggtcaattacgtccacatgtaggcgcaatttatgcgctggccgacctgtctcaagcccatgctcgccttgagaccccgaacaacggcatccggggaaaaatcgcgattgcagtcgacctgtgcgctgacactacgcgtgcaagttcgtaa

SEQ ID NO: 452171 - DNA, 303 bp, Serratia marcescens
atggacttgctcgaaatattcaaagctctctcaaatcgtacgcgacttcagatcctgagggacctgaagaatcccgcgaccaacttccctccgcaggacgaaggggacgtgtttgaggtgggagtctgcgtcagcagcatccaggagggcgtcggactgtcgcagtcaacggtgtctgattatcttgcaactttgcaaaaggcaggcttggtcgaagtgcggcgcatcggtcaatggacttactacaagcggaacgaagcggcgatcagtgctctggccgagatcataggaaaagatttgtaa

SEQ ID NO: 452172 - DNA, 585 bp, Serratia marcescens
atgcttgagtacacaaagatccagaagccccctctattcgtcggggacaacctcgcgctcgacttcatcaacactcaattcggtgtgggcccagcacaccaagagtacttcgccgatgacgacgcagtgctggcatggttgaaactggccggagtgattcctgacgacatcgatgtggtccccgaggggctactgaggctagcccttcaattacgtgagaacgcaaaatacttgttgagtgcagcaaaacatggggtatccgcagatgcctccgctgtcaatcaagtgctccgggccggttgtgcatcaaaagagctagagtgggacagcgagagcgggtctttcaagatggtgaggcagcgcccccaggagaacgcagccagctttctagaacccgttgctcaagccatcgccaatctcttggcccacacgccgttggatcttgtccggcaatgtgaagcgcatgaatgcactcttatatttcacgacaagacgaagtcgcatcgacgccgctggtgcagcatggctctctgcggcaatcgaatgaaggtcgcggcgttccggtcacgtaaaaaggagaaataa

SEQ ID NO: 452173 - DNA, 921 bp, Serratia marcescens
atgatcttgaagcgtttgataggggccgccggtctggttgacggcgtgcaggcggcagctatgcagatccaccacaagttcgagcaggtggagaatgtgaagatgttctatcgtgaggcaggcaaccggaatgctccaacggtccttctgctgcacgggtatgcggcatcttcgttcatgtatcgcaatctcatcccaatgcttgcagacaagtatcacgtcattgcaccagacctgccgggctttggattcaccgaagcgccccctcgcggacagtatgcctacacgtttgaccaactcgccaaaaccattgatcagctcaccgtgcagttgaagttggagcgctatgccatacaagtcttcgactatggtgctcccgtcggttggcgcctcgcggtagcgcatccttcgcgcgtgagcgccatcatttcgcagaatgggaacgcctacgaggagggattggggcagggctgggcaccgattcaaagatactgggaggatccgtcaaaagcgaatcgcgatgcgctgaacgagtttcccactccagcctccatcaagtggcaatatctcgaaggtgttccggatcaaaccctggttgcccccgacgcgatcgcgcttgagagcttcttggtgtcccggcctggcaatgcagatgttcaactcgatctgcttctggactacgcgtccaacgtagcgaagtacccggaatttcaagcctacttccgcaaacatcagccacccctgcttgctgtgtggggcaagaacgatccgttcttcttgccggagggggccgaagcttggaagcgtgacatcccaaatgctgacgtgcgtttctatgacactggtcaccttgcacttgagacgcatggagccgaaattggggttgtcatccgagatttcctggataaaaacgtgaaatga

SEQ ID NO: 452174 - DNA, 906 bp, Serratia marcescens
gtgattgatccgcttgccgaagtggtcacgatgcttcagccaagtgcccccttctcgaagatcgtcagtgctgcgggtgcttggcgcgtccgtcgcacggagcctggccggacgttctactgcgtcatccttgagggtacatgtcgcctgctagttaacggacacgacccggtggcccttcaagcgggcgatttcgttctgattccctcggcacacgatttctcgatgtcaggccttgagccaccgcctgagccgatcgtaagttcgcccgttgtattgccgaatggcgaatttagactaggtatccaggacggatcgcctgatgttcgatgtctcatcggctactgtgtcttcggtgcgccagacgttgccttgttggtgtcacttctcccccagttcgtgcttgtccgcggcgagaagcggcttacaactcttgtgcaattgttaggggacgagtgcaacgcacaccggccagctcgcgacgttgtcctagctcgtttgctggaggtgctctttgtcgaagcccttcgctctacggccggagctactgcatccctaggcctcttgcatggactggccgacgaacgtctcgcgatcgcgatccgaagaatgcacgagtttccgggccagtcatggacggcagatcaactggcgaaggaggcggcactctcgcgctcagcgttcttccaacgattccgtcgtgtgatgggaatggctccgatggagtacctgttggcctggcgcatggcgttggccaagaacctattaaagtatagtaagtgcagcattgacgaagtcgcagagcgactcggctatagctcggtaaatacgttcagtgtcgcgttcacccgctatgttggattgcctccgagacgctatgcgctacaaaactcggcgatacaatga

SEQ ID NO: 452175 - DNA, 759 bp, Serratia marcescens
atgaaaaccgtcctcatcaccggatgctcgtccgggttcggcctcgaaaccgccgaatacttccttcgcaacgactggaaagttgtcgccacgatgcgtacaccgagtgaggatctgctccctcgctctgaacatttgcgcgtatttgccctcgacgttaccgatcgggagagcattcgtcgaactgtggaagccgctgggccgattgacgttctggttaacaacgctggaatcggcgtcatgaacgccctagagggaacgtcgatggacgtagtacgtgaggtcttcgagacgaacgctctcggcacgatcgcgatgactcaggcgctgctgcctcagttcaggcagcgtaaagctggcatcatcgttaacatcacatcgagtgtaacgctggcaccgctgcctttgctttccgtttacacagccagcaaggcggctgtaaacgccttcaccgagtcgcttgcgttggaacttgagcagttcaatgtgcaggtaaggctcgtgatgccaggccgagcacctgaaacccgcttcggtgaaaacgcacgacctcgaatgggaggcatccccaatgcatatgctgaactggcgcagagcatctttgcagcacgggggcaatcgtcagagtccgttaccttggtatcggaagtggtagatgccgtatggctcgcagcgaccgatccatcgtgctcgctacgattgcttgttggttcagatgccgtggcgttggaggcactgaaaaccgatcctggctattga

SEQ ID NO: 452176 - DNA, 882 bp, Serratia marcescens
atgacatcgatactggaaaaaatcggtaaggcaattgactgctcacgccgcgcatctgatctggtgatcacggaagatcagcaggcaaccacccggaaactattcatttccggaaccatggataatgaagcccttcagttatggggggaagtaatagatgctgacgccgaaaacctcaggatcacctttgttgatgatgaaagccgggatgatatccaccctgcgcagggtatccccggtcagaagcactttatcactatcgtcagcgatgagactcccgggattctgcgactctattaccccagaagggtggcgtacgtttttactcggggatcccaggcttcgtcagcgaggcatttgaaacacagcaatggaaggtcgtgccgtgggaaaaaatacacccggaggagagtggaatcgacgctcccccagacaacctccgtcacaaaaagtatcatcagatgcttttcgaccgattttcttcctccagatactattgccccctggatcttagtatccgaagacaaattgacagatgaaacaatgaggttatgggcatcgctcgcctgccgtgagttattgaaatgtttcgtcaatgagctttttgccgccgaaataaaaaaggtcggactatccggaaaaccgccacggaaaatcccgttcggagaagaacatgcggctttgcccgcctttgaagtcattcaggaaacggcaaaatggatttttcttgaagggaatgaaactgagcttaaacatacctttctgtccagtgaactggccagagaatggcctgagggcgtcacgttttgtgaaggtattgtatgtcgactcccccggcactggagtcagcccgactgctctacaaggcccatatatggctaa

SEQ ID NO: 452177 - DNA, 240 bp, Serratia marcescens
atgatgaaaagtgaaaggatttttgcaggcgtaaataccgcacaagtcgagcaaaagtgctcgccgaatgcagatgtccatgacatacattttacgttgaggaatgagcaacatcatttcattatgacgcttgaggcagttttgtcgtgcttgcgctttgcagaacgggatggtgacattcccgctctgccgctggaatggtggcagcttctgcagacaaggtatcgtcaagtgaactag

SEQ ID NO: 452178 - DNA, 906 bp, Serratia marcescens
atgaatgtctacaaggttgagctgaaatcacaagcgtactatcccattgatatcacagattacgagaaacgtaccgctcgcagaccaccctggtataaaaccagcgataatggaactccccaatattttgccatctgcccggcgtgtaataatcctgtgcaaattatcggtttttacaaaaaactgactaatacaccgaacccctatgggaaacactttggtcgccccattccaggtgtggggatctatgatcgcgatgcttatgaatggtgtccttattctaagaaaaatacgggggatcaagcagagcgtcccaaaagggaaaagggctatcttgtagagcaaattcttagcttgctcattaatcattttgataaagttgcctatttcatcagtaaagactcaggcgtctccatcaatgaaaggatcgccagaaatatgttgctgaaatttcgagatgaagaaggatggttgtacgcgcgagccactttgatgaatgcgccatgggcttttttatacatgactgataatcaagacatcatgtatacaaagatccttgataaatcccttgcagcaaccttgtgtgagcgctacccagaggacctggtaataaatgaatgggggcagttgaaaaagcatccagactgcaaagactacgtacatgttggcatgtatcaaacaaaacacgcacaccaggtcttggataatgaactcacagaaagcatggagtgcgtgtttacctttaaaaaaggttctgagcgtacccacgaaatttgccgaaaaaaaatcactttcgattacaggtatttcgccaatatcatcaattttgccaaatgggaggtgactgaacgcaaccaaaaactcctcaccctggccaacgacatcctggggccacggctccgctag

SEQ ID NO: 452179 - DNA, 1281 bp, Serratia marcescens
atgagctttaaaattgagaaaatcgttgcccgtgaaatcctggactcacggggtaacccgacgatagaagtcgatgtcacaacccaatgtggcgagatggcaagagcctcagtcccttccggagccagtaccggttcgcgtgaagccattgagcgccgcgatggcaataaaacgcgctttaacggaaagggtgttctcaacgctatcgaaagcgtcaattccgaaatgtttgacagccttaaagggcatgatgtccgtgatcagcgtggcatcgataacatcatgattgctctggacggaacggaaagcaaagcacgcctgggggcaaatgctattttgggcgtgtcactggccgtatcgcgactggcggctcagctatcccatacgcctttgtaccgctaccttggggggatcggggctacccttctgccagtaccctgcatgaacattattaacggaggagttcatgcccgcgggcagagggctgactttcaggaatatatgatagccccttgcggagcgccaacattcagggaagctgtgcgctggggaagtgaagtgtatcaggctcttcgccaggttcttcttgagaagggactgtcgaccggtgtaggggatgaaggcggttttgcaccggctgtttcgtcaaatagtgaaccgctggagctgattgtgctggccattgagaaagccggttatcgccctggtgaagacattgtgatctgcatggatcctgcctcaagtgagttttaccgagacggcaaatatcatctgcacactgaaaatgccgagttgacctcgcaggaaatgactaactactatcaaacattggtgaaacacttcccgatcgccctgattgaagacggtcttgctgaggatgactggacgggatggaaaattctgcacgatacgctaggggaacaggtggaactagtcggggacgatctgtttgtgaccaatgtgaaatatatccagcgtggtatcgatgaaaatcttgccaacgccgcattgattaaactcaaccagattggttccctgagtgaaacctttgacgcggttcaactctgtcatgacaataactggggggcatttatttctcaccgcagcggtgaaacggtggacagctttattgctgatatgacagtagccatgcgtgcaggtcatcttaaaacaggagcaccgtgtcggggtgagcgtatcgaaaaatacaaccagctcatgagaattgaggatgagttgggctcatcagcgcaatttgccggaaggtctacctttaaatga

SEQ ID NO: 452180 - DNA, 429 bp, Serratia marcescens
atgccaatgtataaacatgctctcatattgctcagtgatgagtcggacggccagtttctgctccagagtgttgctcaaaattttcatgagcaaggaacggcgatcacccttggtcacatcactgcggattaccgtgaactcgatattgcctccgattctttaaccaaagaccgccagtctgccgacatcattgccgcaaaagccatgttaagccggttagtggagttagcaagtttccccgttgatgtaaaagaaattgttacgatcaatcgatttcgggacgttgaagcctgcgtcaccgggtcgggcattgagctggtcattatggggcacaaaaacaggctgttcgggacattttcatcccattctattgaattcatcaaccgcctgaccgtcgatgtgttgattaaacatattattattcagtga

SEQ ID NO: 452181 - DNA, 675 bp, Serratia marcescens
atgcagcgaaaaactgtagatgtcgaaggcgttaaagtcagctatctgacctccgatgagccaggaaagcctttactcttgcttcatggtacatactggagcagagtctggcagccagttattgacaggctggcaagatcaggacttgagccagtagctgtagattttccaggatgcggtttttcagaaggtgagttgcaaggtcaggaggcatcagtacctgctctcgcgcagtggctcgtgaaatttactcaggctatgggctggaataacagtatttatctcgcggcacatgacatcggtggtggcgtggcacagcaggtattagctgatggcaaaatcaagatagaaaaaatggcgttgatgaacgcggttatgtttgattcatggcctgttcctgccgtgaaaaagttcagagatcctgagtttcttgaaaatttaagccatgaggaatttatcaggatgcgtcgtcaaggtgttgtcagtggtatacaaagaacactttctgcaggagagtgcgatgagtatgtcgccccatggtattcactaaatcgttttcactcatggatatccatggctgctgaggctgacagcaaatatactatggcgatagttccaaaattgcgtgaatcccacattccaaaattgctcatttggggagaggatgatccttag

SEQ ID NO: 452182 - DNA, 1032 bp, Serratia marcescens
atgatcgatatcactgcagaaaattttttccaggctctccagaatgccactaaccccgtattagtagatttctgggcaccatggtgtgttccttgcctagctttggaaccctttcttgaccaaatcaccgcccgctatggccatcaattgactattctgcgctgtgatgtggaacaaaatgttgacctgattgccaactatggcctgcgcggggtccccaccctaatcggctttgccaacggtcaggaggtggtacgctgtactggaggcaatgtggcacagttgcacgctatagtaaatcgtctactgcaatcaccggcactgtccacagccacaggcgcttttaataatgacaacgtactgcgcttacaggtaattagtgatatacaacggacgccggaagaggcgattcctttgcgggtaacggaatggctacaacacccgaagattgtcgctgggatccctgctttggtcttgcaattaatattatttcaagctgagcaatacccgccaggagaacgtaaaacagtatttgagcagttactcagtactatcgctgtcggagccgatctctcaggtgctggccgcacgttggcacaacgtttactagcggcggataatagcagaatgaacagtctgtttgatatcacaccggaaataaatgcctgttggcggactttacaatacttgcaacaagcccatttgcagggggaaacgcgcccctctacggagtggcagacggttagtaatttgctggcacgtttcagtaaggcggaggatcccgtcattgccagtgcagcctcgaatctggcgatgtttgcctctccggtgaacagcgatgatctatcgctatttctggagttgtatcgcctgacctctgatgaacaggctgatatgctatatcataactggcaggatcaggatatgcaggcttgtcagcaggctatcgacgactatctgctcgcaacactgaccgcccatactcgccaactcaacgatattcttaccaccgctccgcgtcgcggttgctaa

SEQ ID NO: 452183 - DNA, 138 bp, Serratia marcescens
atggaagagagcttcgtgaagatgatgaagcgtgactacatcagcgttatgccgcgatcggatgcccgcacggtagtgcagaacctagcaatggcattcgagcataacaaccgaatagccatccgcacagtgcgttag

SEQ ID NO: 452184 - DNA, 633 bp, Serratia marcescens
atgattaaaaagatagtacgaatagactttaaaacaactcctacgtacagaaaagttcttgcggcagcgcgtgaggcatttctgcggaatggtttcggcggaactagcatggatgagcttgcgttggcagccaatgtagctagacgcactttgtataatcaatttggtagcaaagagaatttgtttcgggccgtcgtgactgatatctggggccgcattaatccaagagagttgattgaagaggcggcggagggaaaggggccgcaagaaggattgcaagcaattggcctcgcgatagcttgccattgggccagcccaactgttattgcgttcctacgtcttgcaatattggaaggcgaacgatttcccgagctaccaagaagtttttacaaatacggaaaagaacctattgttcttgcagtgagcacatatctggagcggatggtacgggaaaatgtcctgcatcttgagaatccattgattgcaacacagcagtttatcggcatgatcaacgagccactgctctggatgcgtcttatcaatacggaaggaagtgtggatgcagaacgacgtgacgatattgtgaaccgcgcagtacgtctcttctttactggatacggtattaaagcctaa

SEQ ID NO: 452185 - DNA, 495 bp, Serratia marcescens
gtgaaagtgattacaacagcaaccgcaagtctgttaatgctcattagctgcgctcacgctgaagggttgacgacatcatcggatagtaaaaaattgactatcggcttcggtcagcccaccattaagcaagtgttgcattaccgtaaaatgtatgacaaaaagccatttcctgatgccgagatttattattatgacaacggtgcctataaaatcatttctcagggcgaaaaccactatggcgtttacgtcatgcaaggaaagtttgatgatgaaacctttacggtgcgtttcatttcattgccttccgaagactggggaaataaaacggcctttcatcagttaactttcatccgtggcgagagcgataagcaaaacgtctttatccagaacgcgattgttgataccggcgaagccattgcccagcagaacggcacttatatccaggaaaaaaacaccgtgataaacccggtgcccatcaactggaaaaataaataa

SEQ ID NO: 452186 - DNA, 297 bp, Serratia marcescens
gtggtgagcaatgaccataccgatcgcatacaaaccgtcagctggctccttacccgccgctgcctcacgaatgagctccccgggatcaatacggccccagatatcaacaacaactgccttgaaaagattttctttactgccaaactggttatagaacgtgcgccgggcaacctgggccgctttggcaagttcgtccatgctcatctcggcaaaaccagcgcgcaaaaaactttcgcgggcggcccgaataatcgcctgtcacttggtgagcgggagtccagcagagtaggaaaataa

SEQ ID NO: 452187 - DNA, 129 bp, Serratia marcescens
atgatcaacgagcctctgttgtgggtacgccttatccataccgaagacaacacgagtgaagagcgtcggatgaatgtggtggcgcgtgcagtacacctgttcttcacgggttacgaaatccgggcctga

SEQ ID NO: 452188 - DNA, 1500 bp, Serratia marcescens
atgtctgctatcgattcaaaactactcaagacttatctctggtcctcgaataatcccgacgacgtattctccgtcgaaaatccggcaaccggagaaatcatcgcgtgggtgcagggcggtggtgaagagcaagtcaatgccgccgtcgatgccgccaacgcggcttacgaaaacgattggcggcatcgttccccgactgagcgtggtgcccttctgctcaaatgcgcagacgttctggaagcgaacgcagatgaaatcgcgcgcattgagacgatggagaacggcaagccgttcacgcaggcgcgcacattcgatgtgaacacgctgatcatgctgttccgctatttcggcagtatcgtcgacaagatcccaggagaccacatcgatcacggcaacatcagcacttctgtcctgctggaaccgttcggcgtagtaggcgccatcatcccgttcaactggccgccgatccataccgctggcaagcttgccccagcattggcagtaggcaacactgttgtgctaaaacccggcgaacagacgccgctcacgccgtcctacattgttgagttgctgcaaaccgtcctacccgagaacgtcgtcaatatcgttcctggcgcaggtgcagtagcgggcgcggcattgtcacgccatccactggtgaagaaaatcacgttcacaggctcgaccaaggcaggtgctgccgtgttgcacagtgcagccgacaacatcactccggcactgttggagcttggcggcaaagatgcctacatcgtttttgacgatgccgatcttgatcgggcagtccgtgatgccctagagggcggctacttcaatcagggtgaggcatgcacggcggcatctcgcatgctcgtacaatcgggtatctatgaccgcttcgttgagcgtctggcagaaggcgtgcgcaagctcaaagtaggagatggcatgaagcccgggactcatgtcggcccactggtgaccgaagtgcatcgccagcgcgtgcagtcatatatcgatcgtggtatcgccgatggacttaaggtcgccgcgcaggctgatttgccgaccgatccggccttgagcaaaggcttctatgtcaagcctacgctctttgtcgatgtgcccagcgacaatcccctgtttattgacgaaatcttcgggccggtggtcaccatcacgcgcttcgagactgagcaggaagctgtccaactgacaaattcgtcggaatacgggttggtctgcggcatctatacccgggacatggaaaagggtctgcgtgtggcacgccacgtcgatgtcgggctggtcctgtacaatacctataaccgtggcggagtgggtatgccgttcggcggtgccaagcatacgggctttgggcgagagcactgcctcgatacgctcaaggagttcggccgactgaagacgatccgtcatccctcgggcctgggcaagctgagcaactggttcgccgtggatgagatctacggttctaacaactga

SEQ ID NO: 452189 - DNA, 564 bp, Serratia marcescens
atgaagatcattgcactggaagaagccttcgccattcgagaattgcaattgggcgacagagcgtacgtcgtgcccgatgtttacgtgtcggacgaattcaagcattggtgcgggcccaggctctttgatttttcacaatggcgattaccagagatggataggaacggcgtggaagttcaagttctgtcgctgacagcgcctggaattcaagcagccacgtctgccgagatggcagtctcagacgccaggattgccaacaactatctcgcggacgtggtacccgagtaccctggccgctttaaagggtttgcagcgttgccgctgcaagacccggaggctgcggtgctggaattgcgccggtgcgtatcggagcttggattctgcggtgcgctcgtcaatgaccacactggaggccactatctggatgagccgcagttctatggtctatggaccgagcttgaagcgcttgatgttccactctatatgcatccgggggcaccgccagctgatacgtggcatgtactcaatgggcatccgaatctcgtcggaccaacctggacatag

SEQ ID NO: 452190 - DNA, 375 bp, Serratia marcescens
atgcgtatcgtttactccggtatattcgaccgacatccaaaggccaagctaattctgggtcacatgggagagtatcttccgtttcagttatggcgtctggactcgcgctacaagacgttggcgaatcagaaccttgcgcatctaccgtctcactacttcggccgcaatgtgtatattactaccagcggcgtgtgctcgcatgcctcgcttgtaggtgccatcacggccatcggcgaagacgctgtgatgtttgcaatcgactatccgttcgagtcgtccgaacaagcggtcgagttcttgaaaagcgcacccattagccctgagcagcgggaaaagctcgcccatctcaatgctgaacggatcttacggctataa

SEQ ID NO: 452191 - DNA, 741 bp, Serratia marcescens
atgaaactatctggcaataccgtcttggtaacaggtggcgcgactggcatcggtttgtctatagcgacccgatttctcgacgcaggcagtcgcgtagtgatatgtgcgcgaaacaaagagcagctagagtgggttcgtacgacgtatccggcgttcgaaaccatctacgcagacatcggtgggcatgaggcgcgggaatccttggtgaacgctgttatcgaccgttttggtgagctgaatgttctggttaacaacgctgggattcagcgtcgtgtcgatcttctggccgacaaggtaccatggtctgttaaagcagaggaggtcgccgtgaacttcgaagcaccagtgcatttagccatgctgttggcgccgtattttctgcagcgcgagcgtgccgccatcatcaatgtcacttctggcctggcattcattccgtcgaatcaggttgctgtttatgctgcaaccaaagcggcgctgcactcgttcacgttgactttgcgttcccggttgcagggcacatcggtctccgtagtcgaagtaatcccacctgcagtcaatactgacttgggcggtgcaggtgtgcatgcagctggagtctcgattgatgcgttcacaggacatgttatggctcgcctcgagacgggagatgtcgagatcgggtacggtacttcggagagatttcgtacggcaacacgagaagaggcagaggccatttttcgcgaaatgaacgcccagatgtga

SEQ ID NO: 452192 - DNA, 219 bp, Serratia marcescens
atggaccgtcagtttaacaccgggggttatggcctgatggatgcttcaattcgttatgagctcggcaaactcgatctttctttacgcggtggcaaagtgcaactgacagcacaaaacctgctggaccgtaaagttgtcgcgggttgctattccagcgacacaggctgtttctggggggcaggccgtcaggtgattgccaaatttagttgggacttttga

SEQ ID NO: 452193 - DNA, 378 bp, Serratia marcescens
atgggagtacgttgggatgaagaaaagttgatcggcattgggatcatcattctgggcatcatcgccctgtttattgcgcttattttccaccgtgcaatgtggtcaggcgatgctgccgattgtcagacattcgatccggccggcgccgagtccatcgtcagggaggattgccttaaaaacagattgccgcgctgggaacatgatcgacaacaactggcgacattgacgccggagctgcatttcggtgccggtcaaaacggcgggacagggggatatatgctgccgttcagcgtcgaaagcgcacaagccaaaattcactattccgcgatagtcgattgcaagtatggatcggtggaatattcacgcctggataagtaa

SEQ ID NO: 452194 - DNA, 1155 bp, Serratia marcescens
atgtctgcaaagatatgtttcttccccgttggtaatggggatatgaccctcatccaaacggaagatgggcaaaatattttaatcgattgccacataagaaaagggaaggaacaccctgatgttctttctcagttaagagaaaagctggatcgtgatgagaaaggtagattatttatccacctatttatttggtctcatcccgataaagatcattgttctggaatttctgagcacttccatttaggcaaacccgaagactggagtgaaaggtcagataaaatctttattaatgaaatctggtccagtccgatagtatttaggcgacaccatgcacaaaatcataatttagtccaagatgcaagagatcttaattcagaagtaaaacgaagagttaatctttacaaagaaaaacgatatttagatggtgtcggtaatcaagttttagtcttaggtgaagatgaaaatggtaaaactgatgatatccctaatattgtactgcaacttgataatacaactcgactaattaatggtgcatattcatacaattttgaagctcatttgcttgcaccatcaccaaaaaaagatttggatgaggatgaagataagttaggtaagaatcattcaagtgtaattatcaattttgagttaaaaggcgataataaaacagcattctttttaagtggtggtgatgcggaagttgtttgttgggaaggtgtccgtaaccgcctgtttaaaaattacaatatgtcgtggcttgattacgatatactacaaaccccacatcattgctcttggcgatctttatcgcatgatagttcaagcggtaaaggagatgaagcaaaaacctccgaactggcgatggaagtattcaaccgagcaaaacaaaatgcatttataattgcaagttcagatcctattgcagatgatgctaatgatcccccatcatatcgagcaaaaaaagaatacgaaaatattgttgataatgtacaaggtcaatttttatgtgtatcggaccataaaaagaatggagagaatattccgttagaaattgaaatttcagataatggtattaagaaaattgcagcatctgcattaggcatggctgaatcatcaagtgccgcagtaaatagacaaggtggtggtggttatgcctga

SEQ ID NO: 452195 - DNA, 1800 bp, Serratia marcescens
atgaatgaattaataaaattcgataatagatatgcttgcgcttgggagttaccaactgatttagaatttagtaatgaacctattgtattgcaactaagatacaaaactcttagtcaatttgacattccagatgtgtttatttcctcacctaaaattgatgtttgccaactcccgcacttagaaaaaaatggcaagttatgtgtttggcctgacagttatatcatcgatcataatgatatgacctatgcagtcgatttactaaacgatgctatactaatgctaagaaaaggaataaatggagatttaaatgaggattttattgatgagttccagaactattggatttatcaatgtaataaaatagatcgacttataagcctgtgtgatctaacaaataaaaacacaaggttggttttcggttatcggactcggaaatttggagtaatatattctgacacacaaaaagaattaattaactggttggaaaaccaaaaaatattgccattagaatcggatgaaagtaattcaaaagataagcgaataaggcaacagcaactctctaaaataatttcaatcccattgatattcttcgatgaagcctggtatccgagtcagtatcccaaaactgcaagggatttttttgaactaataaatcagcaacaggaagattcagaaagcactattgaattgatcttaagatcttgtgctaatatgttcaatgtcaagccaataattctaatttcattcccaactccttctgggatgaatattataggaatacagattcccaagggcgttagtgatcttgcctcagaccgcttcgataccagaggtcttagtcggggccgattcagaaatacagctttattagatggatatagaaattacatcgatggaaagattttaaaaaatagaataggccaaactaaaacagaaaatctcatagttgaccgttctgacgattcttggttaacgggccgtgagcataacaaaacttacaagaaaatctctgaacataaagtagctatcgtcggatgtggttcagtaggatcttcggtatcaagactgttacttcaatcaggcattagaaaaatgatgctttgggatgatgatttaatgaagagtgaaaacttctctcgtcatctattaggatttgattctgtttataaaaataaagcattagctcttgcctcaaggctacggaaagagtttccaaatgcctatatagaagcttttaatgaagattggacagaagattccaagaataaccaaaaaattgcagaagccgatattatagtaagctgcactgcacattggaatactgaacagcagttaattaaaagacagtcggaagacattcttggtgctattgtctttgcatttgttgaagctcatgcgatggctgggcatgtaatagtcaaccaagtggattctaatgcttttaatagctggcatattacagaaggtaaatatattggtgcattaaaatatcctgctacttactggaaagaaaatactcgcaaaagaatagctgcatgtgccggagagttccagccatacggagctatcccattgactaatttacatgctctaactgcaagaacagtaatagatcttattatggatcgtttttcaaatgaatcttttgcttatagttatttaggaagagaagcagaacttttagaattgggtggaaaatggaatgataaatggatagcacaattcggaaatccagaaaagggtgattgtatcatacctcttgtttttgaaaattctaattgggaaaaacgtgatgcataa

SEQ ID NO: 452196 - DNA, 141 bp, Serratia marcescens
atgatgatgaacggctctaagtttttccatgaatactttttacctaattgggatgctttgaatgaaattttggcgtattcaaatgaaaaaccgttcatttttccggttgaagccctgttggggattgctcttatcttctga

SEQ ID NO: 452197 - DNA, 567 bp, Serratia marcescens
atgaaaaaaataaccacgccaacaaagaatacaatatttattgtggcagctcttgttggaatctgttcctacattttccccagaagccctgatactcaaaagacagatgatatcgttggggtgtggacatctgattattcatatggcacacatagtgttcttgctggtgtgaatgtgagaacttcatatttttctaatgggaaatataatgtgaatggtcgaatgtcttttaaaatagataatgcaaatggaaaaacagccgttgttgactattatgttagtggtgcaggagagtggatacttcacgataaagaactgatagccacacttagcagtctgaaatcaattccagaccggattgtctctgatggaaaagacttcgatattcaggatcttgaaatattagaaaatatcatgggcaaaaaatttccaactatcgaggaaagaatggctcctggaacaagccagtcttacattatcaaaaatgacagtcataatcaaaagctattggaggtagtaaatccgtttgggaacaactttgacataattatcacaagagagaaataa

SEQ ID NO: 452198 - DNA, 177 bp, Serratia marcescens; identical to SEQ ID NO: 452143

SEQ ID NO: 452199 - DNA, 177 bp, Serratia marcescens
atgggcaaaccgtttggcggcagcgccataccccagaaaggggccattataggggccggggtgaggtgggtaaaggcggttatcccgctggcaaatcaaggggtttggcggcttaaagtgcatcacaatttgattgtctcgcgctggacaggcggtgaagcgcgtgcgaaacaataa

SEQ ID NO: 452200 - DNA, 1092 bp, Serratia marcescens
atgaaagctgccgtattgaatgcgagtaatgggatatttagcgttgaaaatatccagatagataaaccgaaagggcgcgaagttttagtggaagtgaaggcgtcgggcctgtgccactcggatctgcatatggccgagagcgacttcggggtgcccttgccggccgtattcggccatgagctggccggggtggtgaaagaaatcggccccgacgtgcgtgaattcaagattggcgatcacgttgtcggctcgctgattcaatactgcggccattgcgaagcctgtatagatggccgtacgtaccagtgcgagcatcccgaagagactctgcgcgacgaggctgaggggcaacggctgagccgcgatgggcagcctgttacgccggtgttcggcacatcggcatttgccgagtttacgctggtacacgaaaaccaactggtcaaagtgccggatgaattaccgtttccgcaggcggccatcctggggtgcggctgcgtgaccggcgccggtgcagcgatcaatacggccaacgtcaaggcgggggacacggtggcggtgataggtgtcggcggtgtggggctcaatgtgatctccggcgcgcgattggcgggtgccggccgcatcatcgccatcgatatgcagccggcgaaggaggcattggcgagcaaatttggcgctaccgatttcattaatgccggtgatggcgatgtggtggagcgagtgcgagccttgaccgcagggggcgtggatcatgcattcgaagtgatcggcctcaagtcgacgtcggaacaggcgatcaaaatggcgcgtaagggcggaggcgcttttcttatcggcgtccataaaccgggttcgactattaacgtcgaggtgtttaacgatctcttactgaatcaggtatcggtcactggggtttatatgggctcgaccaacattaaacatgacataccgatgtacgccaatctttacctgcaggggcgtttcaatctcgacgatctgatctcgaaagagatcaatatcgccgagatcaacgacgcttatgaagcgctgaagagcggcaccatcgcccgcagcatcatcacgtcattctag

SEQ ID NO: 452201 - DNA, 690 bp, Serratia marcescens
atgagtgagcgtaaacgcggcaccgccgcgtccattgatatcgatgcgctgctgcaggacacctggctacaggtgatcagcttgcgccacggcccgcagttccaggacggtgaagggcggaacctgtgggagcactgtatcgccgatgtggagcgcgtgcagcgtgaactgaaagcgcgcgagctcgatgaggtcagttgtctgcacatcatgactgcgcagtgtgccctgcttgatgaggcggttaaaggccggggcgtggaggatgacgcctgtctacagtggtatgacattccgctgcaggggcatttcctcggcaccatggatgccggcgacacgctgtgcgagcggatgcgcggtgtgctgcgtgagacggcaccggacaaggctgtgctgacctgtttccagcgggtgatgatgctcggatttctgggaagcttcccttccctgaactccccggaacgtcggcaactcgtcgttgccctgagcgaacaggtggcgccgttcagctatccgcagactcacccggtactggcagaaaaccgtaccggccggagtcttgacggctggctggcctcctggccagtgcgcatggggctgagtgtgattttgattgtcgcactctggtggggcctggatcactggctggatcagacgctgctgactctgttgccgggaatcgtgaaatga

SEQ ID NO: 452202 - DNA, 1713 bp, Serratia marcescens
atgagctctgcacaacagcgcgggcttgcgctgtgggccgctctgctgagtgccgtggtctgcctgggtttcctgccggtcacccgactggttttggtgctcgttctgctaaccgttctggggcttatcattgcgttttggtttgccgcccgtcgccgtgtggagcatgacgtcactttgtgtttggacgccctcccggaagccacttaccgtcaacccgtggtgctggtctgtggcgatctgccgctggcctggccgcaacagtcgccggtgctcaccgtcacgcaggggtgctggatccgcgtggaggatcatcaggacctggagcaggcagcccgccaggtactgtggctacgtcctgactggggacgtcagctgtcggtgatggtcagtgtctgcccgcagaaacacgctgacggcgagcggcttacctgccgcctgctggcgctgcgctggcaaatcagccggctgcgtaaagaaaccgggcattctgtgccgctggttctgaatggccagattggcagcgcaatgacgaatgacatgctgtggcaggcggctatcccgggggaaggggtgagggtctggcgtgcgtcttcagcaccgagctcaatcgctgcatgggtcaccacaggtggcgcgcctgcgatgcagcaacaggtgctgatgaacagcctgatgagctggttccatcagtacgtcaaagcggtctttatggatgagaaccccgatgttcctgtcattgcacctacggcggtgttgtggggaatagggccgatccttgccgaaagcctggcgacatctgcatggacggcgtggctttcgcgtcacactgcgatgcagcaggtggcgggctggcagccggtgggaacggacagtacggttatttcctccttcccggattttatcctgccgttgctgccggaaggacgaggcctgacgccgcgtgggcgtacatggcgttgtgcgctcgggatcttcacgctggcggccattgcagcgctgctctgcagtggctggaacaatcgccagttgctgcagcgtatgagtttcgatattgcccgctatgaccgtatcccgatgcatgatttcggacccaaagccgatgccattgccgtcctgcgtaacgatgcggcgcagctggatgagttcgcacgcaatggcgtgccgctccgaatgagtttcggtttataccagggcgagcgtctgcgcatgccggtgctggatgcgatccgctcgtatgcgcccccgccagcgccgcctgagtcgcgaccaaaactcaagccggtgccgagaattgtgcggcttgacagcctgtcgctgttcgactccggcaaatccgtgctgaaagcgggctccaccaaaatgctggtgcattcgctggtcggcatcaaagcgaagccgggttggctgattatcgtgtctggccataccgataacaccggcaatccgcaactgaaccagaccctgtctctgaaacgtgccgaagcggtgcgcaactggatgcgtgacaccggtgacatgccggaaagctgttttgcggtgcagggctatggcgaaagccgtcctgtcgcaaccaacgacaccccggagggccgtgcgctcaaccgccgtgtcgaaatcagtctggtaccgcaggccaatgcctgccagatacccggcaaacacccggcgccctctcaggatgatggcgcatcacaacacaatggagagtaa

SEQ ID NO: 452203 - DNA, 2673 bp, Serratia marcescens
atggaaaatccaaccatcctgttgcgacgtctgaacccttactgtgcccgagcgatggaaggtgccgcctccctgtgccagatccgcgctcacgccgaaattctgccggagcactggctgctgaagctgctggagcagggggaaggtgacctgacggtgctggcgcgccgctacgaatgggacatggatgcactgtggcaggcgctgctggtctggctcgacaagcagcctcgttcggtgcgcggtcgcccacagctttctgaccatattcaggtactcatgcaggaggcttggctgatcgcctcactggcgggtgaacaacagatccgaagccagcacctgctgatggcattggttgagaaacacaatctggtgcgctgcaatggtctgtggccactgctgacgctcgggatgagccaactggagcgcctgcgtccgttactggaggcacagtctgacgagcgtctggaggtacagcaggacgcggcgctggcacagagccacggtggcgaagtggcgtttgtcgggcgcccggctggtgcagaggtcaaagggggcgaactgaactcggccctgcagaacgcactggataaattcacccttgatgtcacagccaaagcgaaagagggcaagattgacccggtcttcggccgcgacacggaaatccgccagatggtggacatcctttcccgccgccgcaagaacaacccgatcctggtcggtgagccgggcgtcggtaaaaccgcgctggtggaagggctcgcgctgcgtattgccgaaggcaacgtgccggaatctctcaaatccgtcatcctgcgcaccctcgatctcggcctgctgcaggcaggtgcgggcgtgaaaggcgagttcgaacagcgtctgaaaaacgtcatcgatgccgtgcagcagtcaccggtgccgattttgctgtttatcgacgaagcccacacccttatcggcgcgggcaatcaggcggggggcgcggatgccgccaacctgctgaaaccggctctcgcccgaggtgaactgcgtaccattgccgcgaccacctggagtgaatacaagcagtactttgaacgcgacgccgcgctggaacgccgtttccagagggtgaaagtggacgagccggatgacgataccgcctgcctgatgctgcgtggcctgaaatctcgctacgcacagcaccacggcgtgcatatcaccgacgatgcggtgcgtgtcgcggttacgctgtcccgccgttacctgaccggccgccagttgccggacaaggccgtggatctgctggataccgcgagcgcccgcgtacgcatgagtttggataccgtgcctgaacagttgactcgtatccgctcgcaaataacctctctggaaatggagaaacaggcgctgctggaagatatcgccgtgggtaatcagagccacggtgaacgcctgacggcaatcgaacaggaagagaacagcctcactgttgagtttgacgagctggagacccgatacgctcaggaactcacgctcaccgaacggctgctggaaagtcgtcaggatatctcccgccagagtgagacccacaagctgctgcaagagctgaatggcatgaagcacagcaccaccaacccgctgctctccgtggatgtggatgttcgcaccgttgccaatgtgattgcagactggaccggcgtgccgctgtcctccttgatgaaagatgagcagaccgacctgctgaacctggaaaatgaaatcggccggcgtgtggtcgggcaggatgtggcactgacagccatcgcccagcgcctgcgcgcggcgaaaaccggcctgacgtcagaaagtggcccgcagggcgtgttcctgctggtgggcccgagcggggtcggcaaaaccgaaaccgcgctggcgttggcggatgtgctgtgcggcggtgaaaaatcgctgattaccatcaacctctcggagtaccaggagccgcataccgtttctcagctgaaaggctctcctccgggttacgtgggttacggccagggcggcattctgacggaggcagtgcgcaagcgcccctacagcgtagtgctgctcgatgaagtggaaaaagcgcaccgtgacgtgatgaacctgttctatcaggttttcgaccgcggctttatgcgtgacggcgaagggcgtgaaatcgacttccgcaacaccgttatcctgatgacctccaacctcggcagcgaccacattatgcagctgctggatgaacaaccagaagcgactgaaggcgacctgaatgaacggctgcgcccaatgctgcgcgaccacttccagcctgcgctgctggcccgcttccagactgtgatttatcgtccgctgacagaaacagccatgcgtaccatcgtggaaatgaaactcggccaggtgagcaagcgcctgcatcgtcattacggcttgtccacgaacattgaagagagtctctacgatgcactcactgccgcctgcctgcttccggataccggtgcgcgtaacgtcgacagcctgctcaatcaacaaattctgccagtactgagtcagcagttgctgacccatatggccgcgaagcagaagcccaaattactgaccctggagtggaccgacgatgagggcattgtgctggagtttgatgccccagccaccgaaccagaaggaactgacgcatga

SEQ ID NO: 452204 - DNA, 2493 bp, Serratia marcescens
atgagcacaaatctcaaaatccgcttcggccacaatcaccacgggctttcggtaaaaggctgtgagtccaggctggacgttctggcctttgagggtcacgaagccctgagcaaaccgttcagctaccgtattgagttcaccagtggcgatcatgccatcagcaaggaaatgatgctgatgaaagccgcttccctgacgctgcaggcacctgtggatcagggctacggcattaaggtgcaacaggccgttcgcgtcattcagggggtagtcagcggttttgaacgtctcagtacctcaaaagacgaaacgcactatgcactgacgctgaccccacgcctggcgttgctcagccgttcacaccagaacgccatctatcaggacatgtcggttccgcagattgttgaaaaaatcctgcgtgagcgccacggcatgcgtggtcaagatttcctgttctcgctgacacgagaatatccgcgccgcgagcaggtgatgcagtacggcgaagacgatttgcactttatcacccgtctgctgggcgaggttggcatgtggttccgcttcaccaccgatacgcgcctgaacatcgatgtggtggcgttttacgacagccggcaggggtatgagacagggctgacgttaccggcggtgccgccatccggccagcactcaaccggcgcggacgcggtctggggcctggcatgccaccaccacgtggtacagaaacaggtcagcacccgggattataactaccgccaggccaccgaagacatggatacgcaggtagacgcctctcgggaggacgtcaccacctacggcgatgcctatcactacgccgacaactacctgacgccgggcagcacgtacgacaacaacccggccccggagtccggggcgttctatgcccgcattcgccatgaacgctacctgaacggccagacgcaaacgcaggctatcaccagtttcccgacgctctccccgggtatgctgctgaacgtcaccggcggcgatgacgtggccgacgtgttcgctcatggcgtggccatcacgacgatgcacagcctggcccgccgtgaccgggattttgaggtgtattttgagggcatcccggacagcaacgatttcagcttccgccccgagcccggcgcccgtccagtgatggccggcacgctgccggcgcgggtgaccagcaccaccgaaaatgacacctacggccatatcgataaagacggccgctatcgcgtcaacatgctgtttgaccgggataactgggagaccggattcgagagcctgtgggtgcgccagtcccgcccctatgccggcgatacctacggcctgcacctgccgttgctggcgggcaccgaagtggcgattggctttgaggacggcaacccggacaggccgtacatcgccggtgtgctgcacgattcagcgcatggcgatcacgtcaccatccgcaactataaacgcaacgtgttgcgcaccccggcgaacaacaaaatccgccttgacgatgagcgggggaaagagcacatcaaggtcagcaccgagtacggcggcaagagccaactgaacctcgggcacctggtggacagcgagcggcaaaagcgcggcgaaggttttgagctcagaaccgacagttggggggcgatacgcgcgcaaaagggcattttcatcagcgcggacggccaggcaaaagcgcaggggcaggcgctggcgatgcagcctgcgctcgcgcggctttcagcagcattagtggaaatggagtctcttgcggccagcgcacagcaggctcaggcactggctgccgatgtcggccgtcagcaaaaactgcttaagcagaaaatagagcaactacagcaggaagtgattgtcggcagtgcaccaaagggcatggcactggtgagcggtgaagatatgcagctatcagccagtgataatctgacgctgacggcaggcaaacaactggatgtcggagcacagaaagatttcacactggctgcgggtaaacaactcagcctgtacagccgtgaaggtgcaaaattgttcagctcggataacgatattgatattcaggctcagggtgggaatatcaccacctggtccacgcaggacacgcatatttcgagtggcaagaaactggttgttacggcacaggatgagctgacgctgatatgcggtggaggttatatcaaaatcaaaggtggaaatgttgagattggtggtcctggtaaactgctgattaagaatacgggtattaaaaaggccggttccggcagtatgcaaagtgtgatgaaatcatttgagcctgaaagttttgatgaaaaattcattatcagaaatgcattgacccaagatccgctgccaggaaaagcctataaaataaccatgccaaacggatcagttgtcactggtataacagacgccttgggggcgacatcacttaactcgtcggatttaatagatgacatgataataacacttactggccgctaa

SEQ ID NO: 452205 - DNA, 1923 bp, Serratia marcescens
atgaataaaaaaaccgatacaacaaggtctttagagttgaagtacgatgataatggacgaccttcatggcgttcaagtccttcacataaaaatataaaagtccgcggagggtgcgatttgcctcctcatctccctggcttaataatacttgttcatggtgttaactcaacgggggagtggtatcaaaatgcggaagagtccctctgcggcggattaaatactaggttagggctcaagggtactccattcgagttgaaaccgaacaaatatagtgctgattctgttggggaaggtaattcttcaccatcgcctttagctcgcagagaacttattgaaaataatgaacgatctccaatcattcgattctactgggggtattcttctgttgggggggaagaggataaatatattattccgttagctaatgtggatggtgaagactatcaccaaatgaaaaaaataggtacaaaagcagatgacattcggagaaaaggtccatatatatgggggggcgggccatttcaaaatggtacaaataacttacattcgctttggagtaactatggattcgatgaggatttggcaggaattcctggagcgaaacttcagtatcttaatgaagataaagataggcttttaacaaatgccccgccaagaaaatactattcacatgctgccaagcgactagcggatcttttagatcttatccgagataaatatcctaatgatacagttagcattatctctcacagccaggggacaatgatttcactagccgcagtaacattagcaaaaaaaggaccagatgctcttttcatattaaactccccttatgcaatgcataatagccaacttaatgagttttcaattcctcagcaagagagagtttctccttacggccgcgagagtactttgtcatcaataattgaaaaaattgcaaagcaaacttcgcatctttccgctggcggttatgaagggttgtgtgtaggtaaatttactgataaatcgagttggaagcctgaaggtgagaatgtaatagaaggtgggaaaatacaggagcgtgataatcatggtagaacgtatatttacttctgtcctcatgaccgggttatgggggcattaccgcttcgctcaataggttggcaaggactgccgaatgataaaaatggaaatccacatgcattaattctgaaattcaaaaataatttataccaaaggatgttggctaggaatacaccatgtgggtctgatcctgataagcatacaccatttggtacgttgcctgatgggaaatcattttgggatgatgaaggtgataaatatcaaagtagtagcaatacataccctaaccctcccaaatggcaaactgtgtttgtaaatgcagaaagagttcctgagcctattaattctgatgagttggccggatttgatcaaacccgtgtaggtaaagagcatggctcaaaacaacaggatggatggggtgaagtgaaccctagaactgacgagaaaaatgataatacatatgataactatatcaatttatatccaaatcaagatgtcgtaatcggctataaagagcttccaagtggttatgtgcaagagataaaaaggaaggaaactttcgaagaaaaaaataagagattgcggacttatgtttcgcaaccaacagatcacagtacactaccgggaagcgagagatttatgtccagagtagtagcttatgatttaccaataggctactgcgatgctacatgggataaagaattcctttctaaacttcgatattttgcagattggactactggtgctgatccttatatgaaaacagggattgttgaaagtattagtgagccttcaatgataagccgggaaacgggcatcgaggaaattattcgggaaaaggcaaaggagtacggttactaa

SEQ ID NO: 452206 - DNA, 1431 bp, Serratia marcescens
atgggatggtctctgccggaggtgcctgtaaaagagcaggcaccggcctggtcaccgtggatctgtctgttgattattattctcggacttttcactgggctgtttgttgctgtattgaaatcgcctacgacagggttaccttcattgagcagtggggcctggctaccactgacggcctggacacttgcgggcatttcggcagccatcgcggtttacagcttctggtgggaaacgttggcaatccgtgtctggaactggaatgagtggtgccggagcacgcgtctgaaatggcgcttacgcgcgcatcagcatctcgtcattcttagccatgttttcatcaccgccaatacgaacctgttgtctcgtcttgcacatacacaggaaggggataacgcggacacgccacctttaacgttgttgtcggacgcccccattacgcccggcatttcacgttttgagcagctacttcgtcatctcattgctcagataacaccttcgattcggcgacgatatccttccggcccactccagattattgttcagaccaatggtcgcgacaaagatcgtgaatctcagtcattccatcgtatctggtcagcaggatccctcccctggaaagtcgagattcattttcaggacgcagactcatcctttggtgactggaatcagtttgtagggccaacaaagcggcccgtactggtactggcaatgcactatcgacttcccgatgattctctacctgaatttgccagcgcgttgtttatgatgcatccgtcgatgctaaatcaggggggaggaaaaaatgcgttacggattttccgggctatgccgctcaacacacgtacgcttgcaacggaactcagtgaattacgggatatggccctcacgtctgccagcaataaacaccttgtctggcacagagggctgtcagatgcgccacggcagtcagtgaatagggtgctgaatgatctgtcggttcctctgtacgatagcattggaactggtggtgtcattgattatgacacagcatgtgcccggtatgacggctttgctggctgggcaatgattggcgctgcggctgagatggctgcttatggcccagccagtcagtggctacttctcgaaggcgaggatgatgcctgggcagtgacgctcggaaacaacgcccccgaagtcgggtatgatcatttcgttattcagtcccccttccccggagggtctgttctgatggcattactgcttaatgccgggctgtacagcttgatgatccgctatttcccttcaacggcattctcctggtcagggattactcttctgctgctgtcactgatagtgacattgcccgggttggctattttgctgaggcgaattacagctcgtctccagcgcccggaatttatcaggattgcacgtcactccgtaaaggaataa

SEQ ID NO: 452207 - DNA, 3390 bp, Serratia marcescens
atgaaaaagatttcaaagccactgggggctgggctactcatcgtggcagtcctgctgttgatactctttgtttttgcacagacaacgcagttgccctctgatagtggtgacgataatttctggtatatgctggcaggtttcatcatcctgactgccacattatgcaccttggtattttttacgtggtccaggcaacaaaatccctctcccgtgacgcctgatggtgaaaataatcacaatgaagaaagaacgtcggatcaaaatgatttttcagcactgaacaagcatctcagaaggcggtactcgtttttctggctgcgtaaagtccgcctgctgctggtcaccggcaatgaagccgctatcgaacaactggtaccaggcctgcaggaaaaccagtggctcgaaggcaaccgcaccgtgctgatttacggcggcagcctgacggaagaagtcgataaaggaaagtttgaagcactgcgtaaactgcgccggggccgcccgctggatgggattattcgcgtactggatgcttcgcaaaacctcacgccgcagaccagcgacaacgacctgcgggggcttgaaaaaattggcgaagcgctgcgctttcagccaccggtctggctgtggcaactttgcgacagcaattggtcgcaggacggacgtactgaacaggcggtgggcgcttctttccctctgggggcaaatcaggaagaagtcgcgcagcaactggaacaactgctaccggaactcactgaacagggtacaagccaggtggttgagaatatcagctacgattttctgctgcgcctggggcagaagcttaaagagggcggcatcgcccgttgggcacagcagctctcgccctggctctacagtaaccagcagcgcgtcccgttgcgcggtctgatgttcagtctgccgcaggcggctgaaaacacgatggcggatgaggcagcctcgctaccgctttcccgccggcatgtcctgactctgcccgccacctggcagggtatcgttgacgactgtactcgcgtacgtggccgccgtgtcggtatggcctgggagcagatgctggcttgggggctaatggtggtgattggcatctggggcgcgggcatgctgctttcctttatcctgaactacagccagatttcctctgtggcaagtaaagcgcatgatttagtggagcatccttctgtctccgattatcagctgacggcgttgcacgatttgcgcaacgatgccggccgcctgctgcaccatgttcaggaggggacaccgtggtaccagcgttttggtctcgaccatagccggcaactgctcgatgcgatgctgccctggtacggtgtggcaaacaaccatctgatacgcggcccggcgaataccgccctgatgcagacgctcagcgccctggccaattcagcccccaacagcgaccagcgtgcggcgcttgcgaaaccgggctatgaccagcttaaagcctggctgatgatggcccgcccggataaagccgacggtgcattctacgcacagatcctgaaaaccgtgcagccgacgcataggggcatctcaaccggcctgtggcaaagtttggcgccggatttatggtccttctacattaccgaactgcctaagcagcctcagtggaaaatcaccccggacgcgcagctggtcagccagagccgccaggtgctgttacagcagattggtcgccgcaacgcagaaagtacgctgtatgagaatatgctcaaatctgtgcgccgtaatttcgccgatgtgtctctggaagacatgaccagcggcaccgatgcgcggcgactgttcgcaaccgaagaagtggtaccgggcatgttcacccgtcaggcctgggaagggggcattcagaaggccattgagaaggcggccagtgcgaggcgggacgaaattgactgggtgttgagcgactcccgcaaagccgtatcggctgacctgtcaccggaagccctgaaggcgcgcctgacccaacgttacttcactgattttgccggtagctggctgaattttctcaatagtctccgctgggagccggcgaaaaacattgccgacgttaccgaccagttgacgctgatgagtgatgtgcgtcagtcaccgatgattgccttgatgaatacgttggcctggcaggggcaagcgggccggcagaacgaggcgctgtcggactcaatcattaaatcggcgaaagagctggtcggcagcaaggataagccggctatcgatcagcgcgcagtcggccccctggggccgctggatgacagctttgggcctctgcttcaactcctgggaaaaaacactgccggcagcgtgatgtcggctgacagctcgctaagcctgcagacttacctgacccgcatcacccgcgtgcgcctgcggctgcaacagatagcgagcgcctccaacccacaggaaatgatgcagacccttgcacagacggttttccagggcaagagcgtggacctgaccgacactcagcagtacggaagcctcatggcggccagtctgggagaggagtggagcgggtttggtcacgcgatgtttgtgcagccactgacccaggcctgggaaacggtgttgcagccgtctgccgccagtctgaacggccgttggagtcgctcggtggtggcgaactggcgcaccgcttttgaggggcgtttcccgtttgcggcgagtaagagcgatatctctttgccgatgctggctgagttcatccgtaaagacagtggccgcatcgatcgcttcctgagcacggaactcaacggggtgcttcacaaagagggcaatcagtgggtgccggacaaggcgcacagccagggcctgatatttaatccagccttccttaaagccgttaaccaactgagccagctgtcggacattttgtttaccgatggcagccagggcatccgtttcgaactgcaggcgcgcccggcaccgcaggtggtggagactcagctgaccattgacggacaaaaactgcactactacaaccagatggccgactggcagtctttccgctggccgggggagacttataagccgggaaccatgctgacctggacgtcaacgagcgcaggtgcgcgcctgttcggggattacagtgggacctggggctttatccgctggctggagcagggcaagcgccagcaactggaccgcagccagtggatgatgagttttaccgcgccagatggtcgcacgttgcagtgggtgctgcgctcgcagctgggcaacgggccgctgtcgctgctggaactgcgcggctttagtctgccggaaaacatattcagcgtggaagcctcagccgccgcgcaggcgttgacccgtacggcaccctcaaccctggatgaggaggaataa

SEQ ID NO: 452208 - DNA, 1383 bp, Serratia marcescens
atgaatgacattacctcacgtaaaatcaaaaccggcggcgatccgcgtacgttgccggattatgccgctctgcgcgatgagctgagcaaattgacacacccggctcgcccagatatggactggcattatgtcgaaaagcgctgtctttcactgtttgagcaaaacggtgtggagctgcagacggcagcctggtacacgcttgcccgtgcgcaactggccggggtattcggcatgaacgaaggcctggcaatgttggaagctctgatcagccatcaatggggtgtgttctggcctcagtcggcacatgccagaatggacattctcagcagtctgagccgacgattgcagcagcggatgcgcatgctcccactgaattacggcgaccttggtcagttgtatcgggcggagcaattgctaacccgcctggggaacgtgctgcagcggttggaacttaaacacctaagtcagctcgatgccttgcgaactgtgctgcacaacagtgctgtccggctggagaacagtgacggcgcatccggttctgacgccgcgggtatcgtgctgtctaccacggtgatgaatgggccggaaatatcggcggatacaccgtccggtgccccggcgatagaggaaaacgccccagacagtacagtgaagtgggagtatgtggcacaaccggaacatcagccgaacgtcgaggtcatcacggcaatcccagcgccggcaacgataacggcaacaaagtgggcattcttctccgccgggatgtgcaccatgctggtgctcagcgtggccacagtgtggggctggcagtatctacctaggcctgacccgctacagactcagtttgccgcctccctggcgccattacctgcacttctcacgcctgagcagctggaaatattgcgtcagcaatctccgttaccacaaacgacacaaacgcagcagcagcttacccgcctgagtaagcttccccctgactggaatatcgtctacagccggctgctcgtagaacaggctcaggcgctgtggcctgaacaggttaatcctttgatacaacagtggcagcaacagattaatctctcagcactgcccgttgatgcattgaatggctggtatgaaggaatgagccaacttcaagtactggccgataaactgaatgcgcttgacggccagaagggaagatatattaccgtcagtgaacttaaatcacaggtttttggcatgatgacgagtttccgacaggccgttccggtggaagagcgggttcgacagttgagacagttacctgaagattcaccgctgcgccagcagcagatcctgcaagctgagcagcacctccgggcgcaaatctactcgctggctcaggaaaggcaccgtgactga

SEQ ID NO: 452209 - DNA, 2589 bp, Serratia marcescens
atgctgagctgtcgttttcgtagcgggaaaaaatatacacgcccgctttctgtctgccagataacaccgaccagacccctgcaaaatgttttactcgagcggaaggggggctctgtcacctcattggctcagagagtgattgtttatggcgataaatatgcggttgtttattaccctggaaataacagaccctacgtaatgaaaacgctagggctcgattttcaggtgtgctctgaatttacagagcaagccgcgtttaattatttcatccgtgtggctaacgaccgcatttcccatgccgctggaaacgacaggagtatcgctgagaatgttcttcggcagctcaataagattattccccatccggatacggctctgcatgcatactgtacagggaagagtaaaaaacgtgagtctccgagagagatgatttttccgtttggtcttaatgaaagccagttgctcgcagtaaaacgggcattttcttcgcaggtttcagttatcgaaggccccccgggtacaggcaaaacacagactattctcaatattgtcgccaatattttgattcagaataaaacagtggcgattttatccaataataatactgcggtcagtaacatttatgaaaagatggacaagcacaggctggggtatctgatagcccggctggggagcgcagagaatagacaacagttttttgctacgccagcttcgctttttgatgagatattatcagattcaccgccggcacaagcaattgatgatgtgcttcaaaaagtgaaaaaacacctaagtacccttaaccaggttgcttcgttgcaggctgaaattaatgagctgcgtgttgaatatgaatacctgcagcaatggcatgaacagaatccttgggcggaaggttcctttgccggcagttaccgcttatccacccgtaaaacaaccgatctgatggcttacattcattatctttccgatcgccggattgggttgaaaaacaggattgacttgctgttgaatttcaggattttgaaagtgaagccgttagccaatcaggagaaaaggctggcgctttttacttcccttcaactgttttattatgaaaaatccatccaggaaaagcaaaaggctctggttgagtgcaatggattattggcgtcggctgattttaattttttactggagcagctgacatcgttgtccatgctttatttgaaacgacatttgcgggagagcattccagcggcagcctcatttttggcggatacatatcggcatgattttgatagttttataaaacgctttccggttatcggcagtagcacgcattcaattattaactctatcggtcaaggtgcgatttttgactatgtcattatcgatgaagcctctcaacaggatattgttcccggcatccttgggttggggtgtgcacgtaatgtgattattgtcggcgatcgcaaacaactcccacatgttccgatcttacatccgagcacgcctccggctgagcactatgattgcgtaaaatacagcctgctggactctctctgcatgttattcagggagacggcgcctgttacgctgctgaaagagcactatcgctgccatcctaaaatcatccagttctgtaataagcaattttatgacaatgcactgatcccgctgacgatagattctggcgaagcctcattatctttagtgatcacggcaaaaggaaatcatacccgtaatttttcaaacctcagggagcttgaatccatagaagggcattactgggatgagggtagtagcagaggatacattgctccctataatgcacaggttaatttggcggaggcggtgctgccggccgattttgtaaagtcaacggtgcataaattccaggggcgagagtgcgatgaaatcgtgttttctaccgtattggataaaaaatacgctagccggcaaagtcggaacatcgcatttgttgatgatcctaatttggtgaacgtggctgtttccagggccagaaacaaatttacgctggtgaccggcgatgatgtttttgcaagtcagggtaggcatattgccgcactgattcgttacatcaaatactacgctaacgacggagaggttttcgagagcccggtgatatccgcgtttgatttgttatacagcgagtatgataaatcattggagcggctgaatagtcggttaaatccagatgattcgcgttttaagtcagagcagatcactgccagtttgttaagggatattctgtcgcaggagcgctaccaaggcatgatgttccattcacagatagcacttaaccagttggtatcgttggcgcaaggggatttttcccccagagaacgctcatttatgcataacggggccagctgtgattttgttatttactataaggttggaaagatcccactaggcgttatcgaagtggatggcggttaccatcgggaaaagacccagattgagcgcgatgcacttaagagcgacatactgaagaaatgcgatctgccactgctcagacttcgtacgatagacagtgacataacaggaaagctggattcatttctgtcaggcctgtcggattaa

SEQ ID NO: 452210 - DNA, 1608 bp, Serratia marcescens
atgaataaaaaaaccttcatggatttaaacatattccttgcgcaagaagagttctcaaatgaaaaatttgactttttcatatcaaagatgtgtaaagcgtatgatataaatggagtagaggacttagatgggaaaattttcgtaaaggaaagcaaagaaaaatatccgaaatggaaaggtttcattgagaaatataggggagggaatatagaagaaatagtgtcccgttctagctcagccgtgatcattataaggaacgaaggtagagtttttgcacttacatttggctatggaagatcacttattgaacactcctattttgaaccagactttggaataaaaaccgcccttaacatgttaaagcatgactttttgcggagtgtagatacattttctatagatgatgcaccagtgcagaagagaactcaagcgtccagtaacatagagatatcaatgtttggtttagatgtaactaaagacatattaagatctgttactgggacccctcttaaaggagtcccatttaaaaaaataagcggaggcgacagtgcaatctgtgtaggtttagagttagaacctgatgaaataaaaatatacacaaaagagttattatcaaggtataaaaacaacctctataaaaaaaatttctcatgggttgacaacttacgaagaattaaagacctgaaaaaaatatcgactctagatgaaatattaattaaagaaataaaatcaggaaatgttgaagatattaacattttaattccggaaataatcgatccagcagacatagagtcattcagctttaccagatcaaaacacaagagatcatatgaaatagttaaggaggattacataaaaaacctaccaattcaaggaattacaatagaaaacataaaaaaagataaactttttgtgtttaatcaccaacaaattgaaacaaattactcagtatataaatgcataaattttgagtataaaaaagaaaaaagcaagtacattctctttttaggtaattggttcgaagtagatagcttatttgttgagtcaatagatagagacttggaaaaaatacccttatcaaacattgcccttccaaatatagccatgataaaaaatgacgatgggaaaataataaaaacagaaaccgagggtgattataacataagggcaagcgaagaaaacggatatttgttattggatagaaaactagtgaaaagcaggaaaacaacaacctcaattgaattatgcgatctagcagatctagacaataaaatactaatacatgccaaacagaaaaaaggtggctcatcaggacttagtcatctttttgcccaaggtaatgtatctgctgaacttatccttagtgatgatgaattccgcaaaggtgctagaaaagttttacaaaaagagtttggcaaaaaagaaatggcattgataccagaaaaaggcataaagagttccgactatgaaatagtattcttaataatgggaagtaaaagagaatgtgtaaaagaaaaacttccatttttcagcaaggttaacttagcaaatacttattccaatctgattcaaaaaggatttaaggtttctataacaggggtagactaa

SEQ ID NO: 452211 - DNA, 1224 bp, Serratia marcescens
atggcaggtggaacaaataaactgagtgacaaaaaactaagggcaatcctttcagtaccaagagagaaagaggctctgatagcagatggtgatggcttgagcattcgggtatctaaatccggggtgatcagctgggtgtttgcttatcgcatcggtggacgtggtgcaaaactagaacgcttgaagcttggcaattatcctgacatgagcctgaagctggccagggagaagcgtgagcagtgccgtacttggctcgccgatagcaaagaccccaaacaccagttaaacctaactgcagcggaaaccctcaaacctgtgaccgtgaaggatgctcttcagtactggataactgagtacgctgaagacaaacgtgccaatgtcgaacgccacaaagcccagcttgaaaaacacatatatccctatattggctccctaccgctttctcagtgcgaaacccgccattggttagaatgtttcgataggatgaaaaaaaatacacccgtggccgccggctacgtttttcagatgtgtaagcaggctctcaagttctgtcgagtgcgtcgctatgccatcagcaacgctttggacgacctaaccatacccgatgtgggaagtaagcaggaaaaaggcgatagggaccacactgacgacgagattggtcagatctggcaggcttgccagcaactgaaatttaaaccctactatgccgccatgttgcgtctgctggtggtgtttgggtgccgttctcaagagattcggctctcaacttggacagagtgggatttgaaaaactgggtctggactgttcccaaagaacacagtaagggcgggatcaaaatattgcggccggtgccagcagaaatgcggccgtttatagtagagctgtatctacagaacaaagatagtggcctactccttggaacactaaaagattcatctgcagttagccaatgggggcggatggtatggaaacgccttggtcacgtagaaccatggtcattgcatgatattcgacgcactttcgctacaaaactaaatgaccttggtgtagcgccgcatgtagtggaacaactattgggacatacgatgcctggtgtgatggccgtttataatcttagtcaatatatgccagagaaattagaagcgctgaatatgtggtgtgagcgtttggaatttatttctgatgagcatgaaaatgtttatttagtgcaggtgaaaaaatga

SEQ ID NO: 452212 - DNA, 738 bp, Serratia marcescens
atgagcttaccagaacgcatgtattatccaattctagaagcagctgagaaattaggttgttcacaatcggatatattacactatgcatccgtaggtgtttttaacttaagtgtatatgtagatttaaaatgtgatgttaatagcaggcttgtttatattaatttgccgagagatagatttgatgacattgatgattttcaatgtatagatggtgacaaatggagtattggtgatattgatttcatcgtaagcaatggcaatgataatgtaattagtggatactattctggccgcttgtttggtttcttctatgttcatagtactgaggtgcttagagcagagtttagtcaaaatgatgatgtgcaactatctttcttaactactaacccaagcaattatgatggccaggacatagagatttccttattaagggatggtggggaggtgtttaagaaggcgaacctttgcttgatgctaaatgagtttaataaaataagctccggcgtgagtggtgattatcctaagtcagtacatccagaaacagacaaaacaatagctaaaaaggcggaattaataccagcgttattaaaaatggtgccagagttatctaatgtggattttgagtcaacacctgtaaaaaaaatcattgagttgatcgaagctgtagctgcaagtaaaggtgtttgcttgccagaaacacaccgccaaacgtggcaaaagtacctgggtcgtaagtga

SEQ ID NO: 452213 - DNA, 558 bp, Serratia marcescens
atgaaaactaaaaaaataccgcctctgaataaccaggttagcaatatttcggtgatctgcttcgaagaacacaaggtgcagattgtacaattggatggggaaccctggtttattgcgaaagatgtttgcctagcgttgggggttgttaactcgcgtgacgctcttactgcattggatgacgatgaaaagaatactgtagctttaacctacggtattcgcggcaatcccaatcgtggggttgtctcggagtctgggttctacaaattgattacccgcagtcgtaaggcttgcatccctggcacatttgcccaccgcttcagtaattgggttttccgtgatgttatcccgtcgatccgaaaatttggtgcttatggtgttccatgggcattactgcatgactttacccgccgatctgatgactcagcaaaacgtggtagccgggctgggaaagccttagcgatccgcaaggtcgaaaagcaccaactggcacatgaagagaggcgccttttggattgttatcagccgcagctggcattaggaggggaaacggatgcctaa

SEQ ID NO: 452214 - DNA, 495 bp, Serratia marcescens
atgaactatcaacatctatgttcaatccaaccaaaagcatacagggctggctcactggggcgtcacatgcagcgtctggagcgattgtcacagccggcggttgatgtcattccggcggtcgatagtcattctgacgcccacaagacagcggtaagccaagaggccaagagtaatccagtgctggcgctgcggcttattcagcaaggtaagccgtatcagcaagcccagcagaagctccagtccagcgctcgtcacctcagccgattcactcagcggataatggcaaaaaattatcctggctgggagtgtctcgataccgaagatcaaaatatggcggccttccagcacagcatgttgaataacgattcaaatggttaccgcgctggacttaaggccgcgctggtggctcttgagaagttcgtagagccattaacgctagaagacgttctgaaactgcaaagccgccatagttctggagataataatcatgcgtaa

SEQ ID NO: 452215 - DNA, 543 bp, Serratia marcescens
atgaccatagatattgaaaaaaaattttcgcattacgaaaaaaaacctacttctgatagtcaactagtcctagaggatttttatgaacgaggtgcctggctagagttagtagaatcgaactacttgaaagaaatatgtacccctgcgttgcagaaggcatttcatcttttatgggtagaaagagggcactttattcgagaaaaaatgaatgatgattctcaactcctaaaattactgcgtttacttatgcctcgttatgaaggggatggtttaatattatatagaggtgaaaatatcgaacgctatcgtatgggtaggatagggttttgttggactttggatgaaaggaaagctaggcaatttgctagtggtttaaacgcttataaatcaggtggtgttttactacggggctgggcaccggcccacgtaatattggctggagttcacccgcatagtcaatatctgggtgaatatgaggttactattgatggctctgcggtagagcagttagaggtattggcaactttccctgtatcacactaa

SEQ ID NO: 452216 - DNA, 699 bp, Serratia marcescens
atgaacaacaaactgatttttaaggactttcaattttcacctgttatcttacgtcgaagaatatggctaaaaagcactgacatatttcaagcattaaattacaaaagaacaatttacttccataagaaatttattaagcataaagagatatttagttcatcacaagtgcagaggctagtatctatatcaccatatctttctgataatactattttttctcttagcggtgcatacttattatgtacatttctcaacacatcaagagcatccgattttaaactatggttggtcaacactcttgatcgcgaagtcgctaacttacctatcaaaaagaagcctaaatatcactatcctattgagactgcagatcctcatgaccggagattcggtaatgattggcttaccccgagaaaaattctggacgaacgtaactccgcaccagaacaagagctcattgagcagcttgaaagtgatggatttgacgttactggcgcgaaagttagaatctacgcgatgtatgacattgctagaatgtctatacatatgcaagaaacattagcagaatcacggattatccttcatcgcttcgaagatagtttccgctggggaagtgaagaaagaggtatgaatgtatgcttcacaggaaaagataaaggaaaggcctatggaggctatccccgtcgatcattgcgaaaataa

SEQ ID NO: 452217 - DNA, 690 bp, Serratia marcescens
gtggcaggccaattagacgaagcagcaaagcaaatcttggggacattgttagcagattttaccgatagagggttgaccgctaaagacttgaaatctggctatgaagggccaaaaattgaagccttgacaacggctgtatgcaatgttgcagattttacaactgtcgattttgacgtagccttctcagaccttgaaaaaggtaaactgattaaaactggcccgatggagatgtacgataatgacaggaatagttccgttatcatcattggatcgtatagcaagcgtgaatatgtgtatttaacagaggctggttacaaggaatctagaaaggtgcctaatcgcccgcaaagagtccagcgaatagttaacaacctaactattactggggggcagttcagtaacatgcaactcggacaaggtgagagtcttaaccagtcaatgaacgttaccatgaacaattctgactctgaaattgtggaaaagctgatttcgatccttgagaaacacgggcatccggttgatggctctcagcgagccgatattatcgctgctgttgctgctgcaaatgacggtgatggtcgaggggcaaaatctttactgacgaaggtttgtgggcccgtttgggagtctgtacagccggttatgtggcccattgttggtgagcttgttaagagaagcttaggtctctaa

SEQ ID NO: 452218 - DNA, 138 bp, Serratia marcescens
atgaagatattcaataaatttgaattaaaaacggaggaatacgccggtaaacagaaagataaaaaatttatatatttcaatagattaataacaatcatgaatgtcatggcattactgccacacagatccaatttgtga

SEQ ID NO: 452219 - DNA, 1098 bp, Serratia marcescens
  misc_feature (1073)..(1092): n is a, c, g, or t
atgggcttgcaaagtataagaataaagaatttgctatcctttgatgatgtaacaataagttcgttagaggatgtcaattgcattataggaatgaataatgctggaaaatctaatcttatgaaaatgttgagatatttttatgacaaacttgatgatataaaagtaatacctcccgactttaattctagttacactccctcaggatcaataacattaacctatgatgtgacaagaataaagaagattgcaatgaatcccaacaataatggtcgcttccataaacatatttataacacattgtttaggccacaatcatttatccgaaagccacatgaattagttttcccttttactttcccttttagttttcagagtaaaagtacttatagtataactctcacaatttccaaagatgattctataacttggtctattaaagatcaaaatgctcgacgtttaattaaaactttattcccttttttccatattgaaaccagacatattaatttatacgattggaatagtatttggaaaatggtgagtagtataaattcgtttaatttttctgaaattaagaaagaagaccttctcgagttcttggatgagaaaatatcaactaaacgagggagttacaagaagtatatagaaagagttgaaaatgtaattcacacgaaaccttatacatataaagataaagttgttaattatctcaagatagttttagatggtgatatttttacaaacaaaggtgaagagttacatgttcagtctgatggtacaaattcccataaataccttgaagttatacttaacttattaatttcattaacgagaacagaattcatcaacccaattatatatattgatgaacctgaaattgggttgcatccaaaactaagtgagagttttattgaaaacttaagcctgacatataaaaagtacgataaaacttctaaagaaattgaaattaataaatattcaacgccatatccaacatttatatttagcactcactcttcgagtttgctaaagctaacattaaaatcttttttaagaaagcaacaggttttacnnnnnnnnnnnnnnnnnnnnaagtga

SEQ ID NO: 452220 - DNA, 150 bp, Serratia marcescens
atgcagatagcgtttcgtgattcctccacttttttcatgacctaccgtttgttgcaaatgcaagatgttagttatccatccagacatcgcagcagagcagacagagtgacgaatgctatgcaggagcctacgctgcccaaaatcatctaa

SEQ ID NO: 452221 - DNA, 1539 bp, Serratia marcescens
ttgaatgactttactatctatgatctattagggcttggccatgctaaacgtaccgaattaatagaaaaatggatttcattaggtaaagaggagtctattgacgaatcgacattgtatgaacaatgtgatgagtttaaactcaagttagatactattattcggaaaaacattgttccgccaaaaccaatttatgttttgattttgttacagatgtttgaagcatattcccagcaaaatctcgaaatgacttcatatggacactgttatcagcaattggtttatcagtcctttgatcacgcaaaaatccccaaaaaagacgttgaaaaatatcttaatgttttgacagaattagcttggaaaatgcatacaaacaatgggcagattcttgaatctgagttgccactatttttcaaagactatgggaatgtctatctaacagtaaatggcgaagaaattattaagacacttagaaataattccatacttttctctgatggttttagtataaagtttaaatacccttatctattctatttctttgcggcaaagaaaatcgcggaacagtatgtacaagacgaacaggttcgcaatgatttccgcaatcttttgtcatcattgcacagagaagattatgcaaatattttggtttttgtaactcatcatactaaagactcttgggtattaactgaaattaaaaatactctttctgaactttttcatgaacagcaacctgcgactcttgataaagagcagcttatctttatgagtgaattcattgcacaaattcctgaccttattttagaacaaagagaaataaaaactgaacgtgaaaagcatgatcggcaactcgataaaatcgaaaaagcacattctgaaataaatgattcagatgataattacgagcaaccagatatattagcaaaaataaataaaacattcaaagggatggaagtttcaggacaaattattcgtaatagatgtgcaactctaacaaggcaagatttatatgagttagcatctaatggtgccgaaactggcctgaggtttttagattatttcattcagctttcgaatactgcgaaaagcgaaattgtatcacttattgagaatactctcaaagagcatccgaatctaactgatgaacaaataaataagcaagccaagcatgtttttttacaaatgacatacggagtaattaatggggttatccgtaaaatagcctcgtcaataggttccagagaggcttcagaaatttattcatctctaaaacataagaactccgaatctcctgctattatcctgcttaatcaagctattgaattacaatttatgcgagcaattaatattcctaaactttctgataccacgcagaagttaaaaggtaacccggtctgcattagaatactaaaggaaatggtcattcagcatacctatatgttcccggttggatataaagaaaaacaacaaatagccgagttgctcgacttaagtgtcaagcaacaacggataatggactcgaaaaaaatagggaaagcttag

SEQ ID NO: 452222 - DNA, 321 bp, Serratia marcescens
atgccgcacctctataacaccgcgctgctgcatatctgggtgatcgccgccgggccgcgtggctatcggctatgcagtgccggcgatcgtttcattaaggcgacggaagcgggtaaaaagttcccggccgtcgtcaccgccggtatcgcgctggtgctgtttatttgggcgcggtcaacgcttcatcgccgtcagttcgctgattttcctcggcttcgggctggtgcatctgctggggatgacacagcgctggagtgcgtaggcgtaacgccctgttcctgcaagacggcgataaacgcctgcgcggcggcgctgcggtaa

SEQ ID NO: 452223 - DNA, 303 bp, Serratia marcescens; identical to SEQ ID NO: 450071

SEQ ID NO: 452224 - DNA, 681 bp, Serratia marcescens
atgttgggctgggtatacggttcgggctttcctaaatctcaccatgcgttaaaaccggcactggagccgattacccttgcccgtaagtcattcaactggtctatagaatcgaatctatgcgcgcatggtaccggcgttctgaacatcagtgaatgcaggatccctctggcagaaggagaatcaccctatgattatccaaatggcccgggaggttccgatcctaaccacatgtggcaaggcagaaataaaggtgctggggatatcgccaggcaaggaaaccctgatggccgatggcctgccaatcttatccatgatggcagtgatgcagtacttgcctggttccgggataaccctcagcaggtagaaattagcagcgccagttggttcttttattgtgcaaaatccagcaaaaaagaccgtggtgagggtaacaatcatccatgtgtaaagcccaccgagctgatgcgttacctttgccgcctggttactcccccaggcggcactgtacttgatccctttatggggagtggaagtaccggtaaagctgcggcgatggaaggtttctgtttcatcggtattgagcgcgaagcggattatgtggaaattgctcgcaggcgtattgcggcagcacgtagcaccatggctcgttctggcgatgcaggaatacacattgacaattga

SEQ ID NO: 452225 - DNA, 231 bp, Serratia marcescens
atgcatacgcctgccaatctcggcatgacgcagtctgccataaacgccaagcgtgttgacgatacccagcgaccagcgacttcctgcatgagtcagcacttcccgccgcaaaccatcatcatcgtctctcagacccttacatacagcctgcgaatactgaagaatctcttcccgaaccatctcactagctcccagtatcatgcatgtaccttcttttttagcctgttatga

SEQ ID NO: 452226 - DNA, 1098 bp, Serratia marcescens
atgaagcacaaaattacgaaaattagcagtgatttttacaaaaatttttaccttagagaaacgttcaccgatgatattattatgactcacggagttcctaatattaccaatagtgaatatcaaaatatttcatttaacaatagagtgtttttctctattaaacaaaactctccacataaaaaaatacaagaaagaatcataagaaatttcctgcaaaaggtaccccttagttcacccgcaattgcctatcgtaagaaattaagttatttacattttttagaacctcatatctatggtgaaaatttttgtcgaattgacttgtgtaatttttttcataatataaactacgattatgcaagagaatgttttaaatcctactttgaagatgaatatttagtaaataaaaaaataaaagttgttgacgcttttttgaatagtttatctgttgaagtagaactcaatgataagaaaaaaagaatattcccaatgggattttctacatcaccatttatatccaatataattttcagaaagttagatattttaattaaaaatctgtgtgacaaaagaagcattatgtacacgcgctatgccgatgatatgcttttttcaagttctggaaaagacaaccttcttggaagcgagcattttgataaagaaatatcctccattgttaacattgcaggactgaacctcaatgtacataaaaaaatatttaaaagaggtattgtttcactgaatggttatgtgattgagaataaagatggaggaggtgagcgaggaagcttgagaatatctaatgggaagacctacttgataaggaaagcattggataaatataaaaaagggtattctaaagaacatatctgccaaaaggtattctcagtaaaaccaccaagtgttaagtacaaaaataatgcagatcaatttgtaatgaagttttataactctcagtttcataataagctggctggttatcgttcttatttaatttcattggtgaaatttaatgagaaatttggatgttttcacgaaaaagaaattaccaagtactcagcgattattgatgaaatttctagcgtgttgctaaaatcctag

SEQ ID NO: 452227 - DNA, 1098 bp, Serratia marcescens
gtggagagtgtaaaagaatcaatttcacaagctctaaaagatcgttttactaacccattatggggttatatcgttctttcatggataggttttaactggcagaacctcgcctggctatttatgagtaagcaagatgttgaaaaaagaatcgaaatgattacatctcaaagtgggttctacagccattacctcgtacttccaattattgcaggggcaaccttggctgcattttcaccatattttaaggttatactttccattatacataaaaaggcagagtatctgttgactaacgttgagcgcgatcgttccctaaacaatctacagatagagattgatattatggagaaaacagcagagcgcaactttacttcacgccaagctgaggccaaagaacaaaagagactaatcgaaattgaagaagaacaaaaaaaactgccattccaaacagaatcacttatgaaagaacacgctagcctaagcgaaaaaacaaaggtccttagtgaagaggtaggtagttatacagcattgaaagaaaatttattatctgagatagaagaattgaaagcaaaaaccaatagaattattgacatatttagaaagtataactcaccaagcaatcacgaaggcattaaattattcatcaatgaaatatcgaaagaatttgaagaaatcgatcttttatatccttattcccaaaaattaacatcggttgatgatgcaaaaaaagctttggaaaacatttctaagatatcccttgcaggcttgagccctcaaagtgcattttctgaatcccaatacaaaatggcttatgatcagatccaacagtcactgacgccccatcccgaccttgcaaagttagcagctagtgcttctattgcttttaacagcccaagttttaaaaaaattgaagagctgagtcgccaaatagcagcccttaaagaaagctttccacaaatatcatctctttcatctcagacatcagaagccctaagaggtctaacaaacgaaaacattaaaagccttacaaaatatgcaaatctagtaagcacagaaaaaaatgaaactcaaaacttaattaaaaatcaacaaaaataa

SEQ ID NO: 452228 - DNA, 132 bp, Serratia marcescens
atgctattggggcaatggttggagcataaggaaatccccgatccgtacaagcagagtaaggaagcttttgagtttgtctatcagttaattgaccagtcatgtcaacgctgggtagaaaaaatcaataaataa

SEQ ID NO: 452229 - DNA, 1137 bp, Serratia marcescens
atggcgaaaaaacaatggaaactgataccgctcttggtatccatcagtgtagttagcggctgtactatcgtgccgggctctcacctttccagtagtggcaaagaggtggtcaaacagcaagacagtgactttgatattgatgagttggtgaacatttaccccatgacgccaaacctcatagagaagctacggcaaaaacctgtagttgcgcagccaaatatcttactggagcgtgaattacagaattatgagtaccgcattggcgtaggtgatgtgttaatggtaaccgtttgggatcacccagagttaactacacctgcaggtcaatatcgtagcgccagtgatactgggaactgggtaaattctgacgggaccatattctatccttacattggaaaggttaaggtcagtggtaaaacagtggcacaggtcagaagtgagatatcaacgcgcctgggacagtatgtggagagccctcaggtagatgtgagcgtggctgcatttcgttctcagaaagcttatataaccggggaagtaagtaaatctggtcaacagcccatcactaatgtacctcttaccgtgatggatgcgatcaacgcggccggggggttatctgagaatgccgattggcgtaatgtcgtacttactcacaatggcaaagagacgagaatttcgcttcatgctctaatgcaaaaaggagatttaacacagaatcacctactgtatcctggcgatatcttgtatgtaccacgaaatgatgacctcaaagtatttgtgatgggagaggttaaaaagcaagtgacattaaaaatggatcgtagtggtatgagcctaactgaagcattaggcaatgcagaagggatggaacaaacctatgctgatgcaacgggcatatttgttatccgcccactacgtggctctgaaggcagaaaacttgcaaatatctatcaattaaatgcttctgatgcgtcggctctggttatggggactgagttccaactgcgcccgtatgatatagtatatgttactactgcaccgctggtccgttggaatcgtgtcattagtcagttggtacctacgatttcaggggtccacgatatgactgaaacagtccgatacattcgcaattggaattaa

SEQ ID NO: 452230 - DNA, 1185 bp, Serratia marcescens
atggctgagttacatgaggttaaaccgagagaacaagcaggcagagacacattagaacgatataacgctcaaattcgagcggccagtatcgcgtgtttatcaattttagaaggtaaagatgtaaaacgtgtgttttgtgaatttcacgacgattttgtggtcgagagagttgtcgctaatgatatccattatacctttgtgcaagtcaaaactaaggagaaattacgtgaaatatggaaacttcgagaagtatttggaatattaaaaagaaaaactaaaaaaaaccctcaaacagatgagatgattagagatagttttgtcggtaaactattacaacacactataaattttgaagatacctgtaaggaagtcatttttcttacaaatacccatattgacgaagatattgagaatgtcattgatgatattaaaaccgatgcgttttccagtgtacattgtaaactgattattgattcgtttaataactgcttcatttctatcagagacgggaagaaaaatctcgaaattgaagaaataaaagaaaacctcaagaaattaaaatttaaaaccgatgttgaatatatcaaaagcaaacatgaaacatttgagattcttgcaaaggaaaaaatttttaaatacagcgaaatagatttatcacatattgaagctaaggagatattactttctcttttagctcttgttaataataagtcaagcgtaaaaatcaacgattgctcaaggggcaatattaaggatctgtctggaatagacatagatgatttattggatgtactgagtatctccaaaaatgcttattatgagtttctttataatggggatgagcatgcattgaaatcagcatctgtgattgagagattgttaagaaaggctggagctagtgaaagtcaaattgatttttttgcaaggtgtaaaataaaatgggatcagtggttaagaaaaaacagacatgtaatttctgacttagattacattactatagatagtgaaataaattcaacattagataagctgacatttatgcatggtgttttatttctctcaggcttaagatcggttgttaatgaattacatgattcgttatttgaaaataatttacttaattctttagataaagaagctttgactggaagcctctttgcgagacttgtagagcgttcaaaatga

SEQ ID NO: 452231 - DNA, 267 bp, Serratia marcescens
atgctcaaaaaaataagtgattggatcttatctaatagccattatgaagttaagtacaatgctaatgattttacagatagtctggttgttgatatagatgatgatacgaagattgcgcgttttactgtgtgggatgatgcatcttgtatgttggagaacattgatgttgaaaccgggaactatataattaatgaacgaagagaattatcagacgaggaaactgtaatagaagcatttaaagagtttgtatcattgcttagaacttag

SEQ ID NO: 452232 - DNA, 1398 bp, Serratia marcescens
atggcactcttacatcatagaacccattcaaaaaccaatgcatcattaatttctatggcgcaaagattttctgatattctcattatttttcttgggatatattcagttatccgtttaaactcatattctttcaactacaaacatcttttaatttttttggttgttttagttgtatatcaaatgattggagggataactgatttttaccgctcatggcgtggggggaaaatttcaacggaactgagtcttatcttgcaaaactggactttgagtttaatattcaccattgggttggtttctttcctttctgatcttgatttttcattcaagatctttttccaatggtatcttttggttagtattggcctgctgtgttgtcgtgtcggaattagattgatagcaggatttgtccgcaatttaggatacaatactcgtcgagtcgctgttgctggctctatgcctgttggtcttaaattattgagaagttttaattctgactcttggctgggtttttttgtggtaggtatatatgatgatgtacctatccataatgagccaggtattaattatgctggtgacttttcgaaattagttgaagatgcacgtgcaggacgactagatagaatttacgtagctatgagtatgggggatgaagttaggattaaagatctggtgagaaaactcacggatactacctgttccgttatgttgatacctgatttatttacattcaatatcctacaatctcgtacagaggaggttaatggcgttccggttgttccattgtttgatactcatttgaatggtgtcaataaactattgaagcgcctggaagatatcataatgtcatttgccattcttatttttatatctccagtgctggttctaattgctttcctcgttaagttcacctctcccggacctatcatctttaaacagacacgatatggtatggatggaaaacccattaaggtttggaagtttcgatctatgacagtaatggagaatgatagtgttgttattcaggcaaaaaagcatgatgttcgcattacgaaagttggaagatttctacgtagaacttcgttagatgaattaccgcaatttttcaatgtattgtttggtgcaatgtccatcgtaggacccaggccacatgctgtatcgcacaacgagcagtatcgcagcttaatcgaaggatatatgcttcgacataaagtaaagcctggtattactgggtgggcccagataaatggttggcgcggggaaaccgacacactagataaaatgcaaaagcgtgttgagtatgatcttgaatatattagggaatggagtctctggttagatataaagattattttcttcacagttttcaaagggtttgtgcataagtctgcttattaa

SEQ ID NO: 452233 - DNA, 1110 bp, Serratia marcescens
atggatggagtatccaataatgcaacgaagaagctacttggctttgattatcagaagcttctagcattagagtcctgcttaaatgctaaagaaaatgaaacaatctggattgaatgctatggggatatcgctcatgcagataaaagtatagaggtgaaacatcatttaactcgtggttatttaaatgatgctcacattgacttttggaaaacattatataatttagcaagtgaatataaaatactatacaactttaatagatttgagttattaaccacatcagaaatagactcatcttctatatttttcaattggaacaacatttcaaaagaaagtaaactcgaaaaaataatagcagttaaatccaataaaaccatatcaaaatattatgatttcgttttaaatcatgaccattcagaattactcagtatattagaaaaatttactatcaccggttctcagccatcgatagatgagaaatatgaagagttaaaatcacatgcctcttttcttacaataccagacctgcatgtagatagctttatgcataaaatgctaggttatatttcaatgaaggctattgataatatggaccgatggcacatagaaagaaatgatttcaaaagagagatggaaggctttgcaaaggttttcatagataaagattatccatttccgttagtcgctaaaagggatgtaaatagaagtaatgtatctaactttcattttattgatgaactaaaaaaaattgatcttgatgacactatagtaaacaatgccatagtagactttcttcgtgcagaaaggagcacgctaaaaatattaaaacttcatacgtctatggctgacaatcttgaagactttgatgatactcttagtgaagatctttctttagtcaaactgaagcactccacaataatctctcgcgaaaaacagaaagaattagagataatatcgacatcaaagaaactatactcggaatgcttgctgttaaataataaaaaaatcctaggaatacaggaaatagcagggtattaccaaaaaggtaggatacactcaattgtcgatagaaaggagttttcttggttattttcggagaataaaaaatga

SEQ ID NO: 452234 - DNA, 1011 bp, Serratia marcescens
  misc_feature (989)..(998): n is a, c, g, or t
atgtttcagaaactggtcagtcataatcaagacttaaacttgttagttgaaaaaggttatgcggtaagcttcgatagtaattatctgataattagagatattccttacttaaatgaaagtaaggaattattgtacgctgcatttatatgcaaaatcgtatataaagacgcagaaactgttatgcaagaagatcatcaggttttttttaccggagaatctccttgtgatgtaaacggcatgttgatcccgaatttagcagaccgtcctgctacattaacattaagcgaaaattgtacagatttaatagttcaaagacaattttcaaataaaccctatgtaaaaggggtacctggcaactttgaagatttttttaaaaaaattgaaagctatacatcaataatatctggaccagctatggaattatacaatgttgatccttatacctttaatcataaaattgatatagaagaaaatagcgtttttaaattccaagatactttaacgagcagagccgaaatagttgagttgtcgaataaatttaaaagtgaaattgtagcaattatagggctagggggcactggttcttatattcttgattttttggtcaagactccagtcaaggaaataagggggttcgatttcgacgatttcttcattcataatgctttcaggtctcctgggaaaacggaaaataccgagtttaagaaaaagaaaagcactgtatatcaggagcgatatgataatttcagacatggagttttccttaaaacacagaagattggtacagaatcattagagttactacagggagtgacttttgcttttgtctgtgtagataatggggagtcaagagtagagatatttgaagcattaattagtttaggaataccttacattgatgttggcatgggcttatctaagaaatcaggaaccttaagcggaatgataagaactacttactatccggaggggagcgcccaagaagtgtnnnnnnnnnnaaaatctttctga

SEQ ID NO: 452235 - DNA, 684 bp, Serratia marcescens
atgagtaacaataactacgttgttaaaatttccgatgataaatttgaatttagtgatttcacctttgacgatgccaaagttacaggtggagagttggctgatgtttttggtgtgcacccagttgaaaattatagggtttatcagcaggtaaaaaatttagagctggaagaattaaggcctaatgaaaaaatagatatttccagccctagcgatatttatatcatagaaggcgatgctagttataattttactgttgatggtctcaacttggtttggccgagggcaatcagggggggggatataaagaaacttatcaaaaaaaactcaagcgatttcgatctatttttagagtataaggatgaggctgatcaaatagttaatgatgataggcttatagatattacccaacccagtgttgaacgcttttatactaaaaagaagcctgacttatcatttgatatttttgtagaaggaattttacataagtggtacaaaaaagaaattagttatgaagaggtagtcacattggaagtgcctgattacgctacccaccctgaaataacgtattctgttaaatataaaaaaggtccaggggtaaagcctgaaggcattctcactaaaggcgctatcattaatgtaaaaaacgggatggaattcaatgtttcagaaactggtcagtcataa

SEQ ID NO: 452236 - DNA, 753 bp, Serratia marcescens
atggatgattttaatcttgattcttttgttgatgagctaaaaaggtcattcaacaataagaaaggccaactggtgttggccctggatgtggttggttgggaaatcgatattatccggttgaaagaggacgatcctgatattggcgaaatagtggatggcgttgtgcaaagcgccgcgaggcgtcgggacttcgagcagcagcaggatttgatgctttttgaaggggccgatactgtacagaagtcagtaaatgagcggatctttctggcgacaataaactggtatgcggggctgcgtttcttggcgtcggattggcgcgatgggttcaggatgttactaaaatcaattgaacttctcgctatgtgccgtggcatggttgagtgtgaactatggcaacaggcagaagcagagaaaaaaggtcgggcgattcatggcggtaaagcaaaagctgccctgttttccccgctcaaggccgaagttattcgcttgttacaggacaaacagccgaagggaggctggaaaagcaaaaaagtggctatagatgcgattgataacgatatatacgcatttatcaaacagtttgagtttcctggttatacagaggaagaaaacgcaaaaagtaagcgggaagatccgtttactcgcattcctcgtctggtcagtgactggtccagagatgatgctgatgtaaaagccgcttttgatgcagtagtgaagcaaaaaaagaaaagcgccccgaaaggcgcagagtag

SEQ ID NO: 452237 - DNA, 591 bp, Serratia marcescens
atgaatataaagcaggcagtaacgctttctctggttcaacggggggttggtcgtggactactattcagcggcgcactcttttattttgttagcctgcttatggcgatttatcatattgcacagaatgtgagtgattccgatctattttggcgcttgggccatatagtccaaaactttattgcaactttatatgaattaaccgcgccttacatcggtttcgtctggcgtaatgttccgactatcactcagactgacccatttacctatgggaacctacttttcctgggttttgttggtgtgatgattgtaggtaaacaactgacgctcgctggtcgacgacttcaagctcgtattcagcgtcagatcgagcatgttgaggaaatgcggtggcgcgattcaatgatgcaaaatagagcatcggttggcacagtgatttctaccaagtcggttgggcagatcaacatttttcagcaacctatgccattgaactctgagagtaactggtggactcgcccgtggggagtcatcggtctttctatcatcagcggatactttgtagctgttctggctaaactgaccgggatgctttga

SEQ ID NO: 452238 - DNA, 780 bp, Serratia marcescens
atgaatcctgctcagcagaaacgcttccctcgctgggtcgattttcactgccaccttgatctgtatcccgatcatgaggctatcatcgccgaatgtgagcaggcttgtgtggctactcttgcggtgacgacaacgcctaaggcatggccaagaaactgtgaactgacgatgcgttcgccatttgtgcgtgtggggctgggtctgcatccgcaattggtctcagatcgggagggggagattgtattgcttgagcaatatttaccttcagcgcgttacgtgggggaaatcgggcttgatgccagcccccgtttttaccaaagcttcggagcacaggagcgagtgttcacgcgtattcttcacgcctgtgaggagcaggggggaaaaatcctgagcattcacagtgtgcgtacggcagcaaaagttttaggtcatcttgagagaagcaatgttcttgaaagctgtcaggctattctccactggtttacagggactgtggcagaggcacggcgggctgttgagcttggatgctatttttccgttaatgaagaaatgctgcgatcaactaaacaccgcaaactcatcggtagccttccgctgaacaggctgctcacggaaactgatggaccatttgtccagagtaaaggtactgctgtgcgtccttttgatgtccatcgcgctgtccatgaaattgctctactccatagcatctctgatgaggctgcagcatcagtcattctcagcaatcttaaaagtctggtcacaaagggtggacctgcgtag

SEQ ID NO: 452239 - DNA, 1374 bp, Serratia marcescens
atgagccaccacactatcatcgcgagattgggcgatgacgataccgtgcagccagtgctgagccgattgcagacccagataacccaaattaactttctaaaaggtaacgggcgaatggattttggtcttgggcaggctctgacagggctaggtgagcttgggctcacaccgtcggaaacctccgttgatctcgctctactagccgcaacagttactgctgcggatactcgaatttcacgtaaccgaaatgctcaggatctgtggacccgggaaatcaccttacatgtccccgttgctaaccctgaattatggaacagtcagacggatttactcagcaatctattggatttcttgactggcgatcgttggtcattacagttccacaaacgaccagaaattgtggggacgctcgccagcgaggcaaccaaaacgcgcactattaatccaacttccgtttgtcttttctctggtgggctggatagttttattggtgcaattgatcttctttctcaggggagtgttcctttatttatcagtcattactgggattcgattaccagcaaatatcagaaagtgtgctcggagcttttgtctggtaggtttaatcaggagttcggtcatgttcgggctcgtgttggatttcggaaagagactattgaaggagataagggcgaaaatacattacgtggccgatcgtttctctttttctcccttgcggccatggctgcagactccgttggcggacctatagtgataaatgtgccagaaaatggtcttatatctctcaacgtgccgcttgatccgttacgtgtaggtgcgttaagcacacgaacaacgcacccatactatatggcccgctacaatgagctgctccataacttggatatagcagcacgcctggataatccttatgcttttatgactaagggtgaaatggctcagcagtgtcgcgatcagacattccttcgtcaacatgctgagaacacgatgtcatgttcatcaccacaaagtacccgctggaatcctgatttaaatgaagaacagtccatacattgtggtcggtgcgtaccttgcctgataagacgtgcatcgttatttgcggcttttggctcagacggcacctcttaccgtattccggaccttaggacacgagtgctcgactgtagtaaggttgaaggggaacatgttcgggccttccagttctcactggagcggttggcccgttcgcctgaacgcgctaaatttgatatccataaaccggggccgctaagtgatttccctgagcgtactgccgactatgagggcgtgtatattcgggggatgagagaagtttcccgactgctggacggggtaaaaacgagaccactatcatga

SEQ ID NO: 452240 - DNA, 843 bp, Serratia marcescens
atgggaacgtcaaaatcttacgggggcccaaccagtgggctagtcccaagctttgtggataatcctcccgagcccactttaccacttccgcctgatgcccaaggagatgagcaaccccaggagaggcctcttgcaccatcagtcgtgccttctgattcaaacggcgcgggaccgctaagcacaccgaaaggcaattttactcgttacgcacgatccggaagccgtagcgcactcggcaaggcaatcgccggttatgtaagaaacggcacgggaggtgcgggtaaagctagtcgtcgcatggggtcttcacgccttgtcgcggggggactgctcagtatcatcggtgattttcagcagggtggtgccacacaggctctgcagcgtttcaatctcagcaacttggctggagagccggctacaacggttttcgtgtctcttgttgagtttttgtgcccaccaggtggttcagttgatgaaggggtctcccgacaggcaatgtttgataccattgctgatatgtctgataccgacgtggaaagttttgatgcattaaccgccgaacagctacaggaaatatttatcggcttcgtggttcactccattgaggggcggattatggccgatattggtaagaacggcattaagttacctgatgatatcgatgctatcggggaaattcaggaaaccctacacgattttgtggatggcgctacccgtgttcagttgagaggcgaactgagggatgtatcagggttatcaggtcgtgcaattagccacaaagtcgaacagatttatgaactggcattcgaactgattgcttgtgaaggggagagagcagaatga

SEQ ID NO: 452241 - DNA, 1938 bp, Serratia marcescens
atgtttttgaacgatcaggaaacagcaacagaccttttatattacgaagcaattgctcgaacggtggtcaaactcatcgagcatacccctgatgcacctatcactatcggtgttcatggcgattggggggcaggtaagtccagtgttctgaaaatgctggaggcatcgtacgaaggaaaagataaaacgctctgcctttggtttaacggatggacgtttgaagggtttgaagatgccaagacggttatcatagaaaccctggttgaagagctcatgagagcccgtccaggatgtaccaaagtggctgatgccgcaaaaaaagtgttgcgacgggtcgattggttgaaaatggcccgtaaggcggggggattagccttcactgcgtttaccggtattccgacgatggagcaacttaaaagtgtctatgagcttgctaccggtatcctgcataatcctcaggataatatatccgtagatgatataaagaaatttacgtatatggctggtgatttcgtaaaagaagcagactctaattcagaaacactccctaagcatatccatgcgttccgcgaagaatttaaagcccttctggaggcggcgaaggttgagaagctggtggttattgtcgatgatctcgaccgctgtttgccaaaaacagccatagaaacacttgaggcgatacgtctattcctctttgtcgaaaaaacggcattcgttatcggcgcggatgaagcgatgatcgaatatgcggtacgtgagcattttcccgaccttccacaaagcgccggacctttgacatatgcccgcaactatctggagaagcttatacaggtaccatttcggataccggctctaggcagtgctgagacccgcgtttataccacacttcttcttgccgagaatgctctcggctcagaaaataagcattttgtcagcctacttagtaaagcacgtgaggaaatgaaaaggccttggattagtagtgggcttgacaggaaagcggtactcgaggctctgggtgaaaagataccagatgaaattgagcaggtgatacagatcagtgcgcacgtaacaccactcctcagtaaaggcaccagaggcaacccacgccaaataaaacgattcctcaactcgatgatattgcgtcaggcgattgcggatgaacgtggttttggcgaagacattaagcgtcctgtactggcgaagatcatgctggctgagcgcttctatcccaccttttatgagcaaattgtcagacaggcaagcagccacaaagagggcaagccggaggcgctggcacagtttgaaaaactggttcggggaacaaagtcaaaacgacatgatctcgaatccgttggcaaggaaactgtggccgagcattccgacatagatgaatggctgaaaaatgagtgggcagttggatgggctgggattgaaccgacgttaactaatgaagacttacgtccttatgtgttcgtgacgcgggataagcaaagtacatttggagtatcacttacatccagtcatctagcaccgctggtggataaactcatggggaccagaatggtcgttgccggtacgaaagcagaacttgataaactcactgcttcggaagtagatgagatctttgaaacgctcagtgagcagatccttcaagaggatagcttcggtaaaaaacccgcaggaattgatgggattcaattcctcgtgaagatgctacctcagacacaacgaaagctgcttgactttatccgtagaatcccggttccgaaaacgggggggagttggctgggatcaacctttatgcagtgtttcgtcgacgatactcatgaagatgaattccgagctattcttcagggctgggtagatcagcctgataattcaaaattgagtattgcagctaaagcaatgctcaatttgtcagggaaacaaaaataa

SEQ ID NO: 452242 - DNA, 2157 bp, Serratia marcescens
atgaagcttaacgtagatttgaagaactgctatggcataagtgagctgaatcactgttttgacttcacgaatagtagcgggtatgcgatatacgcacccaacggcttcatgaaaacctccatgtcaaaaacctttgatgactatgcaaaaggtaaagagtctggagatttgatttttccagatcgggtgacgacaaggatattcaccgatggtgctggaactgcgatttcggcagattcgatcttcgtcatagagccatacaaccaagagttttcttcagagcgcacttcactcctactagtaaacgcgactctcaaacagcagtatgacaatgctctaaaacagatttccgagaaacttggcattttgcttagtaagttaaagcaactatctggactcacgggcagaacgatcacgccagagactgaaattttgaaggtgtttggctctaaaggtttagctgatctccttgattcattggaggaaactgttggacaaactcaaccgcgcaaacttgctaatcttgtctatggtgaaatttttaatgacaagaccattgccctacttgagtcagggacgatcaaagatcaaattgaggaatatatcaaacggtataacgacttggtatccaagtcggatgtattgagtaagcagttcaatcattacagtgcaggggctgttaataaagaacttgccgccaacggattctttgctgcaaaacacaccattaatcttcataccaaagatggaaagacagagatcacttccgctgaggagctgacgcagaaaattgaagacgaacggaaaaaaattttcgcggacaaagaacttgctacaaagttcgatgcgattgacaagaaaattcagaacactgagcttaggaaattcagggattatctatttgacaatcaagaaattctgccagaactaaagaattacaagcagcttcagaaagatgtttggatctcgtatctagttagtcaaaagactctttatgacgattttttaactgaattcaaggcgggaaaggtaacgattgaagatgcagtaagacaagccaaagaagaaagaacagattgggagaaagtcgttgagacgtttaacaagcgattctttgttccattcaagatgtctgtcgccaatcaagatgatgtgattttgaaaggaatgaaaccctctattgccttcaaattctcagacggcgagcgtgagggcgaagtaccgcgtgactcattgcttaaggtgctcagtcaaggcgagaaaagggcgctttacatactaaatattctttttgaaattcaatctaggcaaaagcaaggtggcgtaaccattcttgttgtggacgacatcgcagactcgtttgactacaaaaataagtatgccatcattgagtacctaaatgacataagccattcaggaagtttctattgcatattcctttcgcataactttgacttttatcgaagcataagcggaagacttaatttaaaacgtgattttaaactaatggcttcaaaaagtgggcgcaagcttactctcagtaaagagctatatcagaataatccatttttgtattggagagacaaccttacagggcccgcttattgcatttcagcgattccttttgtcagaaaccttgctgagtactgtggtcataaagctgactactcgacactaactgcgcttcttcatgttaaagcaaacacggacacaattacgctagatgatctgtgtgtgatctacaagcgcatcttggttgataaggcggcgctagcacttacgcctacccatcgcacagtgatagatgtccttactcaggaagcagaggcaattgctgctggaatcgatgatcacatagagttagaaaagaaaatcgttatttccattgcgattcgcttgcttgcagaacgtcacatgatcaagcgaataaataaccaggcttttgtggatgcgataaccaggaatcagacggtagagcttctcaaagagtacaaacgtgctgcgctaggcagtgcagaggagattgcgaagttagagcaagtgaacctcatcacaccagagaatatccatctcaactcgtttatgtatgaacccatacttgatatgggttcggctcaccttaggagtctttatgtagatgtgaaggcattagtttag

SEQ ID NO: 452243 - DNA, 522 bp, Serratia marcescens
atgatagccctgctgctggccttctacttcctggcgctgcgccgcggctggagtctgcaacacgccagcgacgtgatgggcgccgcactgccgaccgccgcggtggtgatcctggtgaccggcgcgggcggcgtgttcggcaaggtgttggtggaatccggcgtcggcaaggcgctggcggaagtgctgacggccatcggcctgccgctggtgcccgccgcgtttatcatttctctggcgctgcgcgcttcgcagggttccgccaccgtggcgatcctgaccaccggcggcctgttgtcggaagcggtcagcgggttgaatcagctgcagctggtgctggtgacgctggcgacctgtttcggcggactggggctttcccacgtcaacgactccggtttttggatcgtcacgcgctatctggggctgtcggtggccgatggcctgaagacctggacggtgctgaccaccctgctcggcctgagcggctttctgttcacctggctgttgtggctggcggtgtga

SEQ ID NO: 452244 - DNA, 3000 bp, Serratia marcescens
atgatttatgactctaatgttttagaacataatgaattttgggatttggcgagccaaattttaaattggaattggcctgaaagctcttcatctttacttgagagtttggatttaaaaaataccgttggacttccccaaggtttagcatcggccggagctctggcgaatgcatatctcattgattttgatgaatctataatttctaagcttcgtacaaagatagaagatagccacattatactgcatgattattgtcgatatgtcgatgatattaggttagtcatttctggagaagcattaaaaaataaagaaattaagcaatgtattcatagattcgttcaggggattatcgatgaaacgttggatcaaaatgagtcagataaagaccaatatttagaaattaacgatagtaaaacttctattttgatactttcagatattgataacgaaagtggtcttacaaatcgaatcaatgagatccagcatgaaataggagcttcaagtatccctgagcgtaacgggctcgataataatataccagcacttcaacaactattactgactgagcaagataatttctttgaaggtgctaatggtttatttactggatttaacaatgataaatcgattaaagttgaatctttacgtagattttcggcccatagactggaaacaagtttagctaaaaaaaacaagctaatttcacctgaagagagaaagcaatttgataacgaatctgagctgattgcaaaaaaattgttaacggcttggctaaaggatccatccattatggttctctttcgcaaagcgataaccataaaccctaacctagatgcttataaaaccattcttgatattattttttcaaaaataaagtccaatcgtgacaaacgtgaaaaatatatcatgttatatcttctttctgatatatttcgtagtgtcgttgatatctatcgaaatcaacacacggagcacgtctctaattatcaaaaattgatgagtgaaattacatcatttgcccaaaaactactttcttgtaagtctgatattccaagctatgcatatcagcaagcactactttatcttgcagtgatcaacaaaccatttatagctagtaataaagcctcttctgatcttgctagacttcaaagcgtattaattaaacagcatttagaaccattagatagtagcgatggttacctatttgaattatctgctcagatcagtaaagactaccaagcaaatgctgcttttctactttctcataaaaataataaagaagtggtggattcaattatcgaaaaatttgctttccgtggaggtgaattttggaacaccatttggaaagaaattgttagagtgaaagatcatgataaggttaaaaataggattgacgaatttagatgggccataccaaaaagtgagtcaagaccaaatgggtcagagcattatctttcatcattgattagcttcaaggaaaacccatttaaatacgaacatgcgcttctcaagctaggtgtagcattagttaatctttttaatgataaagagaaaaacgcatggctacataatagtagccaatatttttccccacatgaaataaaagtaaaattagataatatctcaacctcatggactgaactatggcatccaggcgttaagatttcatgcacgatagataaaataggtaaagatccacgctataaaagccctgagtggttagtaaattctcaacacccccaaaatgatgagcacaaaatttattgggtgtgcagtgtgctaagaagtgctgctttaggtaatgtagattatacacagcgaaatgatttaaagtccgatagagcaaagtatgatggtatccgctctcagttttataagcgacgtatgggaatgttacatacaccagaatcaattgttggttcatatggaactataactgattggtttgcaaattttcttcaacatggattgcaatggcccggtttttcttcttcccacataaaccaagaagatatattgtcaattaccagccttggtgagtttaagaaatgtatgttggaaagactaggttgcttagaagcgcaaatatgcacttcatcaaatgttccaactttcccaactgttgtcagcaggcctgagttagcatctaaccattttagaattgttacggttcaacaattatttccaaaagataagcatttccacccctctgatgtaacactggataatcccgatgtacgttggaagcacagagagcaccttgcggagatttgtaagctaacggagcagactttaaatgcgaaacttaatactgagtctagagatcatgcaagtacagctgatctgattgttttttctgagttggctgttcacccagaagacgaagacatagtaagagcactagcatttagaaccaaagccatcattttttgcggtttcgtcttctgtgaacaaaatggtcgaatagttaacaaagctcgctggattattccagacacttccgaatctggcactcaatggcgtgttcgtgatcagggaaaatatcatataaccaacagtgaactgagtctaggtgttcagggatataggccatctcaacatattatttctattgagggtcaccccgaagggccatttaaattaactggtgcgatttgttacgatgcgacagatataaggcttgctgcagatctgagagacttgactgatctgtttgtcattgccgcgtacaataaagatgtagatacgtttgataatatggcctcagctctacaatggcatatgtatcaacatgttgttattacgaatacaggagaatatggtggttcaactatgcaagccccatacaaagagaaacatcataaactgatttctcatgctcatgggactggtcaaatagcaattagtactgctgatatagatttggcggcatttagacgaaagattaaagagtataaaaagaccaaaacacagcctgctggttttaatcgaaaacattaa

SEQ ID NO: 452245 - DNA, 660 bp, Serratia marcescens
ttgaagaaaataagaacgcttaagattaagttgagaaaaatgaaactacttgagaaacagtattacaacctcgaacctaaatttgattaccttaaggactcatttattttaggactcgcatggaaaaaaacagatagctttgtaagaactcataattggtatgcagatcttttagcgttagacaaatgtgcgtttgatattagtgccgaagttgctaattggtcaaatgaggccaaaaataaggctttaaccaaaagtgatattgaattgataccggctcccaaaggagcaaactggttctttcgtaaacgtaagtggactactaataaagatgatagaaagctaaggcctttagctaatatatctattaaagatcagtcttttgctacagcagtgatgatgtgccttgctgatgcgatagaaacgagacagaaagattgttcattgagtaatcttggctatgatgagcatgtaaaaaataaagttgttagttatggaaataggcttgtctgtgattgggataatgaaaaggcaagatttcgttggggaggaagcgaatattatagaaagttctcttctgattatcgaagctttctacaaaggcctatttatgtagggagggaaactgtaaataagattagtgggattgatgatttatga

SEQ ID NO: 452246 - DNA, 894 bp, Serratia marcescens
atggaattatttgcaataacggataatactgttggcacacgtattgttaaaatagtcaccgacagaccgacacaagacgtaatcgcacagttatttaatgagcaaaaagatttttttgaagcgcgatatacagaaggcgtcgagttttcaggaggttacatcacaagtagtgatgaatattttgtcattcctgactttgatgacgtaatagctgttttagatgctataaacaatcctactacaattcctgaatgggaaccggaagaaatatctgttttcaacattatatctcttttttcaggttatccggaagaaaatggcaaccctgccacagccttaattcagagttttgataaaaggcaagttattgacaacagaagaacaatttttcacaagcctttccaggctgggaatacgttctgtcagtctgctgaacatggcattgtgattgataataaactaactgctattttgttcggctcagaattgaaatttaaaagctttcacatgttacgaaggatttttgatgtagatgcatactttcgagaagcgacaaatgaagaattaataacattctcatctcatgaaaaattctcggtcgctcagggctttgatttaacgaccattgccgattcagttattagaaaaaaagtatcactaattaataaatccagaatactagaagattattctgtcactgagctaagggtctcagcagctgaaattggtgtaattttggatacagaaaatgcaggaggggatgagaaaataaagatgccacaggtaaggaaagatgttaaacggttactacacttcctagatgaagactacttcacgtcacatataacccgaactctctatagggcaaactctaaacgccgagaagacgtataa

SEQ ID NO: 452247 - DNA, 825 bp, Serratia marcescens
atgtcttgcaacaccctcgtcagcacctctgccgctgccgccatcctcctatgcggcgggttgccagtgcacgctctggagtggcccgtcgtggtcagtgcagaaacctacaacgttcaggtcatagatggttacacgtactacagcatgcggggcacggctggtgtcctcgctatgggacgcccggcaatgccgaaaccgccctctgctcaagagactggctggtgggggattcactgtcagttcggcagtctaagtgaagggttcaggtcgtgcggctggacctacgaccacgggcccagctactcgtaccgttgccagtatcgcaagccaacctcagaatcatgggatttgcaggcggagtgccgggtccctgagacctggaattacacggggcatgggggtgcagcaccgggcggggagtgcgctgtgtttgggtcaaggcgtgaccccgacacggtgtacaccccctggggcgcgctcaacgcaactgccgtagcaaacagcgggtccccagtgtgcgtgaaacccaagcccccaaccataccctgttctgtgggggcggtgggcgaactcgaccatgggaaccatgggccgaacggtactggaacagtcgtccaaacggccaccgtccagtgcgggccccgccccaaaattgaaattatagggggcggagaggtcgatctggcggcaggggtgtcgtctaatgtgacggcagcaatgtccaaccccaccaccctacggattgaatcccggatttctatccacagtggtgcgcctgggcggtacagcgcgtcgaaaatcgtggtggtgtcacccgaatga

SEQ ID NO: 452248 - DNA, 2604 bp, Serratia marcescens
atgaatttcgatgcgactgatatgcactggcagtatcaatccggtgcttccagcatggcggcgaagcaggctgagggggtggctgggttgtggaatttgctgaataaacaacgattggcactccttgctgatgaagtcgggatggggaaaacttatcaggcgatgggagtaatgttgttgttatggcaggcaaaacctgatgcacgcattctggttatggcacctaacaggacgctctgtgataattgggagagagaatttagcattttcacagagatacactatcgggctgaacataatgcctttacctctttagagggcaagacaaaatatgccccacaaattcatggcagactggcggagctggcggccgctgtggagaaaaattctcaccatttttaccttactactatccattcactaagcggtctggtccctccagatgaaaaaaaagatgctttaaacgctgccgcgtcttatggcgtgttatatcgtcaacaaattaagcaagctcttggaaaagaaggttttgacttaattataatagatgaggcgcattactttcgtaaccgaagcggatcacagcgcgccgccgccgcgcaggccttctttggtgatgcgcaggaccggctggggagcaatgtactgctgttgacggcaacccctaatcactcagcatcgcgaaatctttatgacatatttagctacttcagtgatatgccaaaacgttatgcagaggatgatgtccgtgcgcttatgaatgattttgccatccgcagactgcgtaaaatgcagggcagagagagcagccacagcaaatatgaatatcgtcatgagcgcgctagcatttccagttttactaataagatggatgctgagttgttttttgctctatatcagaaacaactcgtggttcaactggacaaagagaaaaagacaggtggcggcaggcgcatgctatatggctatcttgaagggtttgaatcaacgggcagtaccgccagtgagcgggataatagtagtgatcaagaggggcaaatccataatgacttcaaccacgcgccggattctgctctgctcaatagcttgacccggcagtttcacgatatctataaccgctttccagatcatcccaaatacgacactctggtagaggcctgctttaccagtgatccgttcaagcagtctcagccgctacattgtagtaagcatttggtttttgttcgtcgaataccatctgtgcgcgaaattactcagcgcatcaacgcacgttatgatgaaataatggctgagcgattgatgaatgtctggcagctacctgcaaaggcgctggcagaatggcgagagtcgggttggtcccgagatatttttgttaagcttttatcggaaaaatccaatgaaaagtccgattttgatgagcatatgctggaggacggggagacagatgagcctgaaacggataacgagctaaagctttcaagtaaaattgccgagctatttgttatgaagaaaactggcctgcgcagtaccgactgcgccaacgttagtttgcgtttccgtcgccctgaaagcctcttttctttatttcttgagcctgcattggatggtgcgaccgggacctatcattatcattaccgcaaagagtctggtgaacgtcaacgtgacagctatggtgatgccgcgagagatgcccggctgcagcagtcgacatcagctcataaaatcaaatatatcaatgctttgcccacagcctggggattgatgtttcatgagctgccgcggccagcaaaagagcaattgattaagtggcgtgaccagcctaacggtatggcaattattgagaattttgccaactatcttcgcacgggctacctgtttgccagccctgtgatcattgagctctattgctggtttacagagttcaaccgtcgacctcaaacaggtgaggtccagcagcgatatcagcattttgtagaatgggtcaccccaaagttgaatggatcactgatgctacgttattttgtggctgccattgaaactttcgaaacgctatgcgtgaaaattgttggtcagaaactagataatactcaatatacttggcgcgagttcactagcttgagtagccctagttggtatgcctgcgggcagtcacaaaatcgtgaacgtttaatccgtggatttaattcacctttcttccctaatgtgctggtagcaacctctgtgttgcaggaaggcgtgaatcttcatcttcaatgccatcaagttcatcattatggcatcgcctggactcctggtgataacgagcagaggaatggacgggttgatcgcctctttggtcgaatcaatacaatgcttcaagtccagggggcggctgagatgattatcaattatccctaccttgcaggtaccttcgaccaggatcagttggcctcatttatacgccataaatacagtgttgaagagaagttagatagttgcgagctggaggattttgacagcgaaattgatattcaggaggatcctcaaggttggcaaaaatggctacggcaaccttgtaaggataaagataaagaagatccttacccagccaagttcgatcagtag

SEQ ID NO: 452249 - DNA, 1902 bp, Serratia marcescens
atgaagctgttagatgtcttcaaaaagcaaattgctgatatgggaatgttgaaacgtgtctggctcaccacctttaatctggatatctcttttgttgaaacgtgggtacttcctgctgtgttgggtatggacccgcccgttagtcgtatggattacgaaggtctgcagcgtgcgctgaatgagagtggtattgatttccgcatctactgcgatccgcgcatgattgcgaaagaaaagccgaaacgtacctccattgcggtatatccggtgtcggtgtgtaagctggctcaaagcgaagagtcttatctggataaagagcgcgggctgtttcacccaaaagtattttatctcgaagatcactacagaaagattattgtgggtgcgggcagtgccaaccttacgcttagtgggtgggggcgaaatcaagaaactgtggattttcgttgtgttgcaagtaatgcccaataccagcaggtaaaacgattttttaccacaattgataacagtctgaatgacggagaatttttcccaacccgtcgcaagtttctcggtgatgatcctgattggtcatttattcacagtctggctggttgcacactgctagatgcattaaaaaacggcggtgagattcatacactcagtgtttggtcgccttatcttgctgaggatttagcagggtttatcgacaatattgggcatgaagtgctcgtagaactggttccggatttggttgagggacgttatatccgcactcgatggagtgacagtattcaggcgatgattacaaataaaaagcttaccgtgtatcgctctccagtgcccaaggacgatagggcattgatgacccacgccaagctctggctggcgaaaagcaataccggtacgcaacttgccgtggggtcctggaatttcaccaacccgggttgcagcagcttacctgaggcaaactggaatgtagaagcgggaattgtgcatccggtcactcgtaacatcacgatttgcggcaaagaatgggatgatgttaatgaagagaatttcgccagtgaagcattgttggaggaagaggcgctggagccggatgaacttcaacctttcgatctgagcgttatttttgactggactcgatgtgagtatcagatttccgggcaatggttcggtggtaagcctgcgtcaggttatcaactgatattgcccggtatcaacggggcaaatgaattggtatggaaagctaccggtataggtctgaaatcgccccggcaattgacggtattaaaaagcaatgccgtattggataacccattttatacccttcgtagaactggaataaccgactggcagggcatgatcgttgaaagcggtattgaacaccggcgtgcgttgagctttaagtcgctagatgacttacttaacagctatctgaattcagcggatcccgcattgagtgatcgccttatgctgcgctgtgctggagcgaaggatgaagagcaaagtgaagggatggcgcaagtcatgaatttagatgccactagctatttccgcctctttcaggctatccaacaacggcgcaactggctagcagacgcggacgatggcactcagctgtattgtcgtttgttcagtgaaccaggttgcttacaggaattggctgaaatagccagggagcgtataaatcaaccgactcagccagtatttaactggtttctggcccaagaagttaacactctggccgctctggcaagaaagcgtgttaaaagcatccgtcacaaacaaggggctgaagccatatctgtggctgtgcacttgtgggagtctctacaggttgtaattccacctctaactagcgatgccgctagcctgcgttatctcgcagctatcagggaagactgtagttatggcgaataa

SEQ ID NO: 452250 - DNA, 1326 bp, Serratia marcescens
gtggatccgcttgggcaattagtcatctggtcgtcctgggggcaggacatctttcatagccgtattacttctatcgcaaatgatgtacggcaatatacgctgaatctgctgcatcacagcgtattgcgccagatactggtcgatgaaaagctgcaaacttcaggcgtgatgaaaggtctgtatcccaaaaagcaattacatgagtttagagttgcctgtctgatccatttggaaaatatttatatctactccatgctggcggctgaaaaaagagatgccactctcactggtgtgcagggtattaataaagccagatctaaatggaacgctgcaaataaaaatcctcagatactttttggtcatgagaaaagtagtgagttactgactaatcagatcgctcttggtaccaatgggcgctataaatcgccaatgatgaaaatgcattttttctctactgattatcgctatgatctgccggaaagcaagccagtgtggcaggcagcagaggcatttattcggaatgtaccagagctgaaaaaattacatgcagcggcattgacttacatgcaattgaaaatgcaggcctcgcataagcgcgacctcaacccatttttcgaagatatgcctgtcggcctaaaaaaggcgtatgtaaaggcattccgcgatccgaaaatggtcggggattattcgcgggaattttggctacaaagaacggggttagataaatatgcggcaggtgctatttatcgggtactcaagcaggagcgttcggatgagttagagcttacagatgctgaagttttcaaacgtgccatgcaagaggcaaaaagtgtgcctgaaatgaatgaaagtgaccttagggcgttacaacatatcagtcaggcggagccatttttatccctgatcgacctgatgttttcaggcttacgccgacagagtagtcagacattggcagaatttcgtcaattctggcaggtgcgcggtctgactgaacttgatctgccacaaagggcgactcagcttctggaaaatgatgtgctcctttcctcgctttccggtacgcccgacagacgatttaggcaactattagcactggccagtatgccgtcgctggaagatcaggttcgaggcttgctggattatcatcacaagataatggagacgagggggcagttcccgtggctcatgcttgaaggtgatgatattttgctgcaggtaccaccatgttcgctacgcgaagatcgtcagaatagcgactgggtaaaccgttattatctaccacagttcagacatttgctgaacggtttatgggggcattctgcatga

SEQ ID NO: 452251 - DNA, 4923 bp, Serratia marcescens
atggcgttggtcggtattaataacgaaaatgaattttactccaaccactatctgggcgaagtctttaccagtgacatccgcgatgtactggaaccctggtttaaccaggaaaatgccgctcgcgaagctgaacgcgctgcccgtgaacagggcaaagaggttgaggcgggctaccgcgcgccgtggaaccagcttaacagcctggcaacagagtttttccgtaaacttactgaacatgaaaagcagcgccagatcccgcagcgtcttgccgatcagcgcagtcgctggcaaccgctgttaaaggcattgggttatgaactcaatccgcacattcagatgctggatgacgatacgcctttgccggtactggcgcgttacaacagcactgacggcagtccgtggctgtggattgttgaagcacacgatcaggaagagggaacgctggacccgctggcgctctccttactgaccgcgcaattcccggcggataccgacaaacataagcgcgacagtctgcgtaaaaaagcgaacggcgaataccgcagctggcaggatctgctctccacggtggtctttacgcaaaatgaaccgccgcgttttgtgctgctgctcggcaaccgccagctgttattgctggatcgtactaaatgggcgcaaaaccgccttttgcgttttgattttgaagaaattttaagtcgtcgcgagatagataccctaaaagcgacgtcggtgttgctacacaaagattcgctgctgccaggcagcggtgcgccgtacctcgattcgctggatgacaattcgcacaagcatgcgtttggtgtgtcggaagatctaaaatatgccctgcgtgagagcattgagttgttgggtaatgaagcgatgcgttatctcatcgacaatgagctggcttattataccgggaaacgtgctattaacccggatgagttgagccgcgaatgcctgcggtatatgtatcgtctgttgttccttttctatatcgaagcgcgcccggaactgggctatgcgccgatgaccgccaaaacctatctacagggctacagcctggaaacgctgcgcgatctggagatgatcccgctgacaagcgaagaagatcgcaatgggcgctacttccacgatagcctgaatatgctgttcaaactggtgcgtgacggctacagcggcggcgtgaaaatgcagagcgacctggagagcggcgaccggatcactattcacagccatcagttcagcgtgccgcgtctggaaagccatctgtttgaagcgaataacacccgcattcttaaccgcgtggtgttccgcaatgaaaccctgcaacagattattcaggcgatgtcgttaagccgcccgggtaaagggcgttttaaccgccgcgggcgtatctcctatcgccagctgggtatcaaccagttaggtgcggtgtatgaagcgctgctctcttatcgaggattctttgccaatgatgacctctacgaggtgaaaaaagctggagaagagtttaacgagctggagacaggctatttcgtcagcaaagacgagatcggtaaataccacgacgacgagaaggtctacgaaaaagacggcagcctgcgtattcaccgtaaaggcagctttatctatcgcatggccgggcgcgaccgcgaaaaatccgcctcttactacacaccggaagtactgactcgctctttagtcaagtatgcactgaaagagctgtttaaagagcaaattgatccgattaccgatccgaacgccaaagccgacgccatattaaacctcaccgtgtgcgaaccggcgatgggtagcgcagcgttccttaacgaagccatcaaccagctggcggaagcttacctgtcccacaaacagcaggcggaaggccgccgcattcctcaggatcgttacacccaggagctgcaacgggtgaaaatgtacattgccgataacaacgtattcggcgtggacttaaacccggtggcggtggagctggcggaagtgtcgctgtggctgaacgccatcagcggcgatgcatttgtaccgtggtttggctaccagctgcactgcggcaactcgctggttggcgcacgtcgtcagatgttcaacaagagcgaactgacctacaaaaaaacgaaagatccgagctggcttaacagcgaaccggccgagctggcgatgaatacgccgcgcgaagagaagcagattttccacttcctgctgccggacagcggcatggccaactacagcgacaaaaccgttaagcagcgttatccggatgatttcaaagcgctggatagctggcgcaaagagtttactaaaagctttgccccagatgagattgttgatgtgcagcgcatcagcggcaaagtggaagcgctctggaacacgttccgtcagcagctgaaagccgagcgccagaaaaccgccgacaattacccggtatggcctgcgggaaacacggctcaagttcgctcttctttaagcagcaaagatgaaactttcagaggccgcctcgaagataacagtacctatcagaaactgcgctgggtgatggactactggtgtgctctatggttctggccgatcgacaaagtggatgaactgccagatcgcggtatgtggctgatggagatggagactctgctcgatggtattgtcatcacggaaagagttactgaaaccgcagaacaggccaccggtgagctgtttgcctacgagggcatggtgcgtgaagagtcttcgctgttttccggtgtaggtcgcctgaaaaccgatgtgctgttccgccatttgccgcgtctggcgattgttgatgcgctgaagaagcagcaccgttttttccattgggatctggaattctgcgatctgttcgccgagcgcggcggctttgacctgatgctcggaaacccgccgtggttgaaagtagaatggcaggaagctggagtgctgggcgactacgagccggagtttgtgctgcgtaaactgagcgcctcgaagctggcgatgttacgtgttgacacctttaagggcattccggcgctggaagcggcctggtgcagcgagtatgaaggctgtgaagggatgcaaaacttcctcaatgcgcagcagaactacccggtgctgcgtggtgtgcagacgaacctgtataaatgcttcctgccgcaggcatggcgtttaggagcgcagaaaggcgtggcaggtttcctgcacccggaagggatttatgacgatcctaaaggtgggcagctgcgtgcatcggtgtatcctaggctaaaagcgcattttcaatttgccaatgaagtaaaaatatttgctgaagtggataatcacaccagatttagcatcaatgtatatggcccttattcccagatagtagcattttcaaatatagcaaatttatttattccacaaacaattgacgcgtgttttgaacatcaaggggacggtattgttccggggataaaagaggaaactgaaatcgatggcaaagttaaagttaaatggaatttccaagggcatttcgatcgagttgtacctataaatttaaaacagttgggtctttttgctcgtctttatgatgttgtcggtactcctgcccaggaagcccgccttcctgcgttgcatgctacacaattggttacagtacttgaaaagtttgcgaaacaacctcagcgattaggtgatttgcatgggcaatattattctctagaaatgtggcatgaaactaatcagcaaagcgatggcacaattgagcggcataccaaatttccggaagactcatcacaatgggttttgtccggtccacatttctttgttggcaatccgttctataacacaccaaaatcgatctgcgacacaaataaagcatatgataatctcgaccttttaacattgcccgacgattatatgccgcgtactaactatattccagcatgtgataagcaggagtatgccaaacgtactccacgcgttacatggactgaaccaggtgaagatgaaccgagaaaggtgacagattattatcgttttgttaacaggagaatgtttggtgggtcttctgagagatcttttatctctgcaattcttcccaagggatttgcaaacatcaacacatgtgtcgcgacagcgtttgagtcaactaatatgctggttaatttcaccggcctttcacattcaattgtttatgatttcattttgaaatcaactggaaaatcagatctgtatggtgcgcaactcggtgggttcgtttatacagaaatatttggtgtaaaactaaggaccttattattaaatgctctttcaagtgaatacgccgagctctggcaatcctgctataccccagatttcaacacccagcgctggagccgcaatctcccgcaacttccacaagatttcttcgccaacctgaccccagagtggcagcgtaactgcgctttacgctccgactacagccgccgccaggcgttggtggaaatcgacgtactggtggcacaggcgcaggggttaaccctcgaagaactacttactatctaccgcgttcagttcccggtgatgcgccagtacgaagctgatacctggtacgatcaaaacggccgcatcatctttaccccaagcaaagggctagtgggcgtcggcctgccgcgtaccgcgcgtaaagcggacctgaaaaacggttttgtctttaacgtcgacagcccagactggaccggcggcgattgcaccgatcaagccatcggctgggatgatgtcaaacatctgcaaacaggtaccgtcagtgtcacttttgatgactatacccgcagcgatgaaggcgagcgccgaaccgtcatttggcaggctccgtttatcaaacccgaccgcgaagatgattataaagtagcctgggcattctttgcacaagataaggagagcgcctga

SEQ ID NO: 452252 - DNA, 285 bp, Serratia marcescens
atgcagcagcaccgtcaccgcacgatggcggctcagccatctgccggccaacaggttgcccacgacaccgcccacaccgaacgccaccagaagaaagccgatgacgccgccgctgagaccgatttcgcggctgaggtactcggccgcgtaagcatagacggcaaacatggcggcaaagatcagcacgcaggtagtgatattcagccacagcgtaccgctgcgcaggattgccaactgtttgccatagctgaggcgctgtacggccgcatcaggcaaacgccatag

SEQ ID NO: 452253 - DNA, 378 bp, Serratia marcescens
atggttttatctgaacctaagataatgaagtcaccattagggcgttcgtttgatgcaattattgattttatcaaaaaggatgatcttttaaatctgattggaaatgatcgcgtaactcaaacggcgattaaaaaggcaccggtcattatccacaaagttaaaggacgtacggtatatgcagttgataaggatctggtacataactgcttgccgaaatctcagcgcaaaggcattctgatgcaattaacaaagcaaggggtattattatccgatgcgaataaggagtacagtactatccagattgtctataagcgtaagcaagttggtcgtcgctactgttttgtatgcagtaagttcgataagtttatgacagaatag

SEQ ID NO: 452254 - DNA, 582 bp, Serratia marcescens
atggaaaatctagaacgctcaactatagccttaaatgactatgtaaatactttgttagtgtgttgttttagtgaaaacatggaatcacctctcatgtggtcacattatgcagatggaatgagaggagtatgcattgcatatagcagaaagtcctttgaaaatcacgaaaattttaatttaaaaccagtgatatacaatactcatcctattgagttcaatcacgacgatctaaaaaccattcctgtaatcaatgaattcaaatcttttgattttaaaaactcagagcatattttatctgaagggcggttggttagattaaaatcccaaaagtatttattccaaaagcatataagctgggagtatgaaggtgaaataagaaatatagttgatcccaataaaagacttaatggacagctagtatcgttcccaaaatcggctattaaagcaataatagttgggggtaagatgccttatcataatgcaaggatggtcctaaagttttgcaggaagaataatctttcaatgtttgttgcttatcctgacaaggctaaatataaagttaaatttgaaagtgtcatttaa

SEQ ID NO: 452255 - DNA, 696 bp, Serratia marcescens
gtgatcgtaaaccctatttcttattcacagcaagttagaattcacattgacaaatatgatgggaaagatcatacttactggaatgtaacatgtgatgaaaataaggcaatcagaaaggaaattagagagttctatcgtacggagcaaagttttcactgtgcatattgtaacagattacgacaagactttaatggtgcccagtgggacattgatcatataattcccaagcaaagtcatcctcagtatctttacacccctaaaaatctcacagtcacgtgtaaagactgtaatggtaaaaaagggaaaggaaatgttcttgtagaccatgttgatgctactcaatgctttcctatatcaggtgaaagttatgcaatcattcatcctcacttcgatgaatatttagacaatattcgttgtagaacaacagttgatggtaagatcattcatgagccctttacacctaaaggtataaaaacattcaatttatgtggactgataaggttcagtgaaatgatagccggtacttcggaagtcattgaagagacaggtgaaagcttagaccttactgatggtataactgaggaacttagagaagcattcgatagacaaatctctgaatttgactatttgtcagattcacaattagctcaattactcaaaggaaaattatctcgaattactggagttatggtataa

SEQ ID NO: 452256 - DNA, 1182 bp, Serratia marcescens
atgcgacttaataacttacaaatccggaatgctaaacccacccctaaaccttacacgttgagtgatgggttgggcttatcccttttggtcgaacccaatggcagcaagagctggcgctttcgttatcgctttgccggtaagcccaagatgatttcattcggcgtctatcctgccgtttcgttggccgatgctcggttaaagcgcgatgaatccagaaagttagttgctgaggggcagaaccccagcacagttcgtaaagagaaaaagctggcgcagctatacgggaatgcgaacacctttgaagcgatcgcgaaggagtggcatcagtccaaattggcgacgtggtcagcagggtatgcggccgatatcatggacgcgttcaacattgatattttcccctatctgggacagcatcccatttcggcgataaagccgcttgagctactcacagtgcttcgcaaaattgaggcgcgtggggcgcttgagaaaatgcgtaaggtcagacagcgctgtggtgaagtcttccgatatgccacggcaaccgggcgggcggagttcaacccagccgctgatctctccagcgttttgattagcccaaaatctactcattatccttttttatccgttgatgaaatccccgattttcttgcggcgctggagatgtactccggcagtcggttggtacagctggcgacgaagttactgatgttgaccggagtcaggggtattgagctgcgcatggcgcaatggcatgaggttgatctggataacgcgctttgggaaattccgcaggagcgcatgaaaatgcgtcgagcccatctcgtaccattatcgacgcaggctgtggctatattgaatgagctgaagacgcttacgggtaactatcgctatgttttctcgggacggaatgatgtgaacaaaccgatgagcgaagcgagtatcaaccagctcctcaagcgtatcggttatcacggtcggctcactggtcacggcttcaggcacatgatgtccacgattttgcatgagcaggacttcaataccgcctggatagagatgcaacttgcccacgtggacaagaacgccattcgcggcacttacaaccacgctcagtaccttgagaaacgccgtgacatgttgcagtggtacgccgattttattgcgggcctggcccagcactcttag

SEQ ID NO: 452257 - DNA, 3159 bp, Serratia marcescens
atgacaagcccttttacctctactaaagcgctattaagtgcaattacaagaagcagaaaacctttaacaatattgttaggctcacctatttcaacgtcagacagccctaactcactaggagtttcatcagtgtcagaagtagttgggatgattgaggacactgtaaaaaaagaaaatctccatgaagaattctttgatatagtaacatctgaaaattcaaatgaaaggtatcaagatggattcgagtttataaaaaattatattagccaagatgtagtaaatgacattataaaaaaagccgtcttaaaagcattcgacgaaaaaacagaaacctggtatctacccagaggccttgattctctctgttcagtaatatcttctggagttttaaatgtttccaatatagttacgacaaacttcgatcccttgatagaagaaggcatcaaaaaatatggaatgcatccaattaaaacgattttccacactgatggaagttggaaccattctatcgacagcataccgaatagtgttaatgtagtccatctacatggtttttgggaaggttcagatacattacacaccccaaaacaattaacaacaagaagacctcaactaaaatcatctctatcccaagtattaaaaaacacaaccgtttttgttattgcctatggcgggtgggatgatatttttatagatgctttaaatgatatagcgtctgactcaaatgcaaatgtcgatgtaatatgggcattttatgagcgtgatgatttaattgtaaaaaagaaatatgacaaattactatctaatgttaaaaatatcatacagagaggccgattcagatcttattatggaatagagtgcaacgattttttttctgaacttaaaaaattctcaaatcaaaaatccgcaccagatacagaaataaatagcaaaaactcaaataaaaacaaaatctcatttgacacggttaaaaatgaaataaagaatttcattataggaagcaattcccaaccagagagttttttcccatttgaatcaatggcattaaaaagataccccgcacacaaaaatattagacttgtagaacaaacccaatttcaagaagaaataaagttacacaaaacattgtcattactttctgaatggggaacggaaagaaatggcttcatttattccataactgacaatccaacaagcccattatataaaaaatcaatttacaatgttaatttggaaggttgtacttcccttgacgatgttgatgtccgttttaatgaacgctttggacaagggttacaaaattttgtaatggctgcacttgagaaaaaagacatggttatactctttgaggggttatcatcacttgataacacatcatggcaaaatgatttcataaaactaattaatgtcttattagattacataccaagtcttttaattattaataatggtgacaattctttagcgtatttaaatttcccaatgataactctaaagccattaacagaaccagacattaagacgtatatattagagcatcctgaaggtgacattgactatcttagccaagcctactttgattctattgttagattatcagcaggcctgccatccagattgaacaacatattaatgcagcttaaagttagtggtatcacatcattacttgaagatgaacataatcaacgaattgattttgagcagtttagtgaagacgatccaatccctgcgcgtttaaaagagtctctactcgtattcattaatagcaaagatcacacaagatattacgacctactaaaagtactatctattttacagtatggcgaaactttttctagacttagaagattcaatccaaaatcaccatttttaagagatgatttcttgaccttatctaattctggattgatcaccacatcagaaaaaatcacagtactgagtgataaaggttttaccgagaaagaaccaatacacgtagtacacccactggttgggatatatattagacagggtattgagagagaagaaaattttggcatagtaaggaagtatcttgatattacttttggagataactggattagtggtgatgtaaaattcaacccatcttccttacgttacttacacgattttaacaagtcaggcccaggcaatgctcatatattaatttgtgcattcctccgatatgctgttgaaaacgacgcccgtcgagaaattaaagccacatttaacttggcattggcttttttcaagtttttagaggataatgataggtacagagatttaattttctctgcgactgaagttaaggcattaatacacgaatcatcagaattaattcctctcggaaggctgcatttttctctagccaaagggctcagaatgcttggccatagaaaagactcaattgatgaaatgcttttagcactggaaaatccaagtttattcacaaagaatgaattggcaacatgcaaattagaaatagctctggcatattcaaatagcgaacttgacaatgacgcaataaaatatgcagatgaagtaaaacaaacgagcaaaaaagattcagctcagtatacccatgccgaattaatcatcgcagaaaagaccccactacaaaaccgaattaacaatataaaaaaggttcagcgcaaagctgaaagattgggattcaaagttataaagagccaagcaatactagcgataaccaaacttcaaaaggatagtaccgacaatacaaaattatttgattcagctttaagaaatttaaatgaaagctattctatttataatgtaattgtacatagaaatatttatcttcttgatcaaaatatggtgtcagatataacagatgctgatgttatgactttatgtaaagcatattcatacttttacactcaacgaattgacgttcagcttaagaaaacccaccgagttctttgggctgtatttgttgacagaaaggacaatgatagcttagtcaaaatgtttcgctacagttcctttatatggcgactaaataatgacaaagaatcggaagagaagtatgcccaattacttagcattattgaattaaatatagatgacaactacttaacggagctaattaaatatgcaagagttagaataaaggtacttaagcaagcattgacacattaa

SEQ ID NO: 452258 - DNA, 1584 bp, Serratia marcescens
atggcaataaacgaatgcgcagatattcatagagcactgtggtaccagcagaaccttggagtagcacagggatacggcccatctccgcgggatcgtgaattactggttgtgcttgctcaaaaactaggcataccaaacgaggaatttatcagttccgacgagagtaaaaaaatcacagcccagaagtatctgatagctatgcttgagacaatggagccactttctcaaatgttccaagacatttggatatactgcgaacgaacattgattaggacctcgaagaacgccctcgatataaaatggaattttaatattaatggggagttgataacaatagactttgaagcattcaggaaatatcaaaggttgctaaacaatacccttgataaagataaatttaacaaactttgtaataaattcgcttctgcctgccgcaattacaatgatgggaagggttatgttagagatgccccgatgcccccgaaaccacatgatgcagacctaacaagtgttgcatcgagaattcatgatatgtgtaagagggtcaaggaagaagggataattcaagatgggtactttggagctacagacgcaattccttccctatccgcaatacggaataaaaacctctggcggcaagaagacttttcagagctaaagccattagtagatgagttctataatagtatagagttagacgacattctgtctttaccattctggaaatttcgctggcaaatttacgaactgtggtgtttgataatcacccttcaactctttgagtctcgtgggtttacactagtacagtcctctgacggagcttccttactggaactaggtaaaaaagtagtggttgctgaaagaaatactgaaccactaggacagattatttaccaacctacatataccagcacgtcagggaaaagtgttcatcccgacattgtggttgttcaggggcatacagatgctctcacaccgaatattgttcgggcaataattgagtgcaaacagcgtaatatgagcaatgaagattttttgttctctcataagaaacatttcgatgatgttgctcaagcctataatgattccatcgctcccaatggggagctggtattgttaaattacgatgaggttaaatttaacagaaattatacactattggataattttaaaccacaaaatacctgtttcttagaaaagtcacttacctcaatacttaatgagttttctgcggtaaaagaatcgcgtcaagttgtacttgtagttgatggctcaaaaagcatgttacaatcatccgttaaccttgagaagcatattaaagatcttcataaaacactgggcgcactaaacgaggtaatatggctaagaggaagtgttgtccatctcgaaaaaatagatagtttcgactacaggtcattctatggttccgaacacttagacctattcttggatggaatagatagagcaaataattttgtaccaaatgctagcattcatcttattactgatcttgaaccacactctgaattattgagtgaagtccgggaaaaggttcccaaactccatatacattatattccgtga

SEQ ID NO: 452259 - DNA, 684 bp, Serratia marcescens
atgggaaagttacttaatagggaagtgcatataattaccttgctaactgtggctttgtatgcattttcatatttgtttcagcaaggttacgcaagtttttatggattcccagacgaatttatatcgtttgacttaagcattttgttaaggtccgctgttacagggtggttgttatttttttctttttcttatgttttatacccattgctcgatggaaataagccaagtattgctatatccatcatctttgcttttattctttatgttgtgataatgattatcaccttcggtttcgggaatgttttttatgatttagataacatagctaaaattgggcgtatgcatgttattaccttatcgttctgcccagttttcttgatttttattatccgaagaatgtcggttactgatggttttgttgataagatagctatggcttccatagcttttggtgtaatagctattatttcttattcctctgggtgggtagtggcaagtcgaagtgaatctttatatttgaataataacggttattatcttttggcctcgtattctgacaaggcggttttgggcaagtgcattaataatcacaaagagttcaccatccaaggatttaatgatgcttactccaaagctgatagtagtgaagtgtttaaattaaaagagtgcttcttaaaaaagtag

SEQ ID NO: 452260 - DNA, 198 bp, Serratia marcescens
atgttagaaaattatttttttgataataacggcgtagaacagaacgataaagttaaacgagaaaaagccgttgcggctgcgttaacgattatcaattcgtcggcgattaacactggggctgttgtctcattgaatagcatccgcaactccctcaatgaagcagcaaatgccatacaggcatcattagataaagagtag

SEQ ID NO: 452261 - DNA, 216 bp, Serratia marcescens
atgggattctggagcaccgcagggaagttagccaaaggtgtggcaaacgctttggaaaaacaatccaatgagttgcaggctacaaaaatgcgtcttgaaagcaaaagcagtgatgatcttaaacgtctgattaaatcagaaggtttttttggcgccgcaagtgacacagaaaaaagtatggctgtgaaaatactcagagagcgcggtgatgtctaa

SEQ ID NO: 452262 - DNA, 552 bp, Serratia marcescens
atggataacctgaaatcaaagactaaagaagaacaggaaaaggaacttgcggaaagagctaagttacttatagaacatcaagaaaaacaatataacgcagcactttcagggattgttgggctggagaataaagccataaaaatatttggtgcccttaacgtcattattactgttgcattgctaattattaggtattggtgggatgatatatttccagagcatttctcctctttgaattatgtttgtgttacggttttgtttgcattttttgtattttcatttatttcatggggtttcatcttcgctgcaatgcaattgaatgatcgcgagaggccgtcgtcatcggaggagatggtagatttctatatgaatcggccacgctacaacagcctgtcgtcttactcaagggagtattcccgattaacggcattgttgggggatattcatgatgagaaagcgcgcttgatcaacaattgttccgagtccatgctttatagtgcttgggcattcgttgttttcttcataatcgtttttattttgaaattgacttag

SEQ ID NO: 452263 - DNA, 753 bp, Serratia marcescens
atgcccgtatcccttacatctcaaatcggcgataagcagcaggccgatcaggcgctgatcgacgccatcaacgctggaatgcgagtgtcgatccccggcatcattcaatcctttgacgcggacacggttacctgcgttgtcctgccggctgtgaaaggttacgagccggaaagcgccggcggcggaaattctgccagcttgccgctgctggtagatgtgccggtcatgttcccgcgtggcggaggcgttacgctcacgtttccggtcaagtcgggtgatgagtgccttcttgtgtttgctgaccgtagcatcgatttctggtggcaaaacggcggcgtgcaggagtcggccgccgaacgcatgcaccacctgtctgacgctttcgctattgtcggcccgcagtcgcaggcccagaaaatcagcggtatcagcaccagtgccgcgcagttccgtagtgacgacggttcgacctatctggaaattgaccctgcgacgaaaaaaatgaagattgttgcgcctggcggcctggaggtgatcactccgctggccgatttctctggagcagtaaccattaaagggttgctgagctggatgggcggcatggtgggcagtatcgccagcggcaccgccgccaagataactggcatggtggagtttgtcggagatgtcttcgccaacggcaagcgcattgacgataagcacaagcacggcggtgtagaacgcggtggcggtcaaaccgatgaggtgagctga

SEQ ID NO: 452264 - DNA, 738 bp, Serratia marcescens
atgccattcccagaaattgtaaactggacattcccaggtgtgggctttcctcaggcgagcgagtttgaaacattggcgcttgacgcacctgtgaaaacaggactgcttggcgcctattttacttcgtcatataccgctgatccgctgtacaactacgctaatccggccaagcctctcgttaaaaaaggaaacccattggttgaggggccgtatgccgtttgtaatgcgcagaactgttttgatacgggcatcccctctcaaaatgaaatgagcgtcatttcaatagcgcttcgctctgataattccagtgccggcggacagggaatggttatctcaaattatgacggcgtcggtggcgattcattgcgcattactgacacgtccgttgtcgctaactcctgggtaactgcagggctgacgaatgcgattacaccgatcgtgaacattccaggcacagattttgttatcggcaccggccaattcaacccaggccgttctgtagcaggtttctatgacccgaccgcaaaaaatattgtttccaactcgtcgctgggtgctggccgccaggtgcaatcaaacacgctgctcattggcgggcatcgcagtcctggtcagttcactggctgggcgcatgtttcggttgtgcttgtgttcaatcggctactgacagtcgatgagtacaaggcgatctgcttgtacttgcgcttcacgtttgggccgcagttcctgatttggtaa

SEQ ID NO: 452265 - DNA, 3399 bp, Serratia marcescens
atgggacggctggatgaagagagcgcccgtgcgttctttgagggggaaggcgatacggttaaaacggtcgaggtgatattgcggccaaaagtctggaaccgtctgctaaagcatggcaaagcgcggacggcaggcgcgccagctatcattacaccgctggtgacttcagctctcctgaaccgcgaaggtttcctattccccataacacctgccactatccctcgtgacctgctcgaaccgcttcctaagggaaccctctctatcggcgagatggagcagtatgataaatacagaacgacgcacagttcattcacctttggtgttgatggcgaacaggaacggcgtgaagaaaccgatgaacagcggtcagagcggtgtgccagatatcagcagttgtggcagaggtacctgactgagacaaacaatcttttgaaaaatgtggctggaaaatggggtgacacccacgaacaatacgaattggcaggatacggctatattatcaaagccaaccaacctggtggggccagcatccatattcttcctctgtacgatcatctgttgatgtgtaaaaaagaggttccactactatctcgttttgcctcgatggccaggccgcttgtagagccgctacttgccgctaatgtaaaattcagtgagcggctggggcattccggggatgagttcccgctggctgtggcgcagcgcgatgctctgagccattacctcacccagcagccgggtgatatcctcgccgtcaatggccctccaggaaccggaaaaaccactctggttctctctattattgctactgaatgggcacgagcggcccttaataaaactgagccaccggtagtgattgccacatcaaccaacaatcaggctgtgaccaacatcattgaagcgttcggtaaagattttgccattggcagcggagcaatggctggacgctggttgcctgagctgaaaagttatggtgcttacttcccgtcttcgggccataaggccgaagcggttaacaaataccagacggatgacttttttaatcgcgttgaatccctggagtatgttgaagatgcgcgggtattttatcttgaaagggcgaggatggcgttcccatcgtcggattgcagctcgcccgaacatgtcgtggctcttctacatgactgtttaaccaagcagtccgcgcagcttaagcaaatcgagctcgcatgggacagactgagctgcatccgccaggaacggaatgccatcagcgaagatcttgaccagtatattcaggacaaaagtacgctactgctcggcagcacggatgagatcacatttttaaaccaaggcaaaaagcagtggcaggaatatcgcgctagcgagtcgatgatatatgcattcttttcatggatccctgctatccgtactaagcgccattataatattaagctcttcttggacgttacgtttggctccaaaatgaccgagttccaggggattgtgccggaaggaatcgacgcctatatcgacggtcttattgctcaagtacaaaaagagcaaagcgggtatcaacagcaaatcgatcttgctcaggacgtttcccaacgtgaaagtgaggcagcccgatgttggtacgttctgctccagtcattaggtcatacgggcgaggaggagcttagtttagctgaagccgacgggcttgctgatacacaaatccgcttccctgcattcctgctcgcaacccattactgggaagggcgctggctgatggatatgactgctattgataatcttcaaaaagaaaaaggtcttaaaggggctagagcgattaaggctcgctggcagcgcaggatgaagctcaccccttgtgtggtgatgacctgctatatgcttcctcgtcatctggccatcagggaacatgttggtgggaaaacatttgaggatagttatttatataactttgccgatctgctgatcgtcgatgaagcggggcaggtgcttccagaagtagcagcggcttccttcgcgttggcgaaaaaagcgttagtgattggcgatacggaacagattgcgcctatctggaacagtttacctgccattgatataggcaatatggtggaggagaaaatcctccctggaggcactcaggaagaactgacggatgcctattctctgatatgtgattcaggtaaaagcgctgcgtcgggtagcgtaatgaagatcgcacagtttaattctcggtatcactacgacccggatctggcgcgtgggatgtacctgtatgagcaccgtcgttgcttcgataacatcatcaactactgtaacgcgctttgctaccatggcaagttacaacctaagcgggggaacgaaaaagagactcttcttccggcgatgggctatttgcatattgatggtctaggtcagcaggcgaatggtgggagccgttacaacacttttgaggctgagacgatagccgcttggctagctgtgcataaagaggaaatagagcgtcattacggcaatttgctgcacaaagtggtagggatcgttacgccattttcggcgcaggttaacgccatcaaggcagcattgcataagctcaatattaactgtaacggtgatgacgattcgctaacggttggtacagtgcactccctgcaaggagcagagagagcgctcatactcttttcccccgtctattccaaacatgaggatggtgggtttatcgatagcgaaagcagcatgctgaacgttgccgtctcccgggcaaaagatagtttcctagtcttcggtgatatggatctgtttgagatccaaccgggctcttcgccgcgaggattgctggcaaaatatctgtttgcttcgaatagcaacgcattgcagtttgagttccaggaacgtaaagatttaagtgcagagcaaacgcagatatcgaccctgcatggcgtggagcaacatgatgcgtttttgaaccagacctttgactccattgggaagagtattaccatcgtttctccgtggttgacctggcaaaagctggaacaaaccggatttctggcttctatggtccaagcacgttcacgaggtattgaaatcactgtcgtgacggacaaaagctttaatactgaacatgctaattatgaaaagcgcaaagagaaacaacggcgccttaacgacgccatggaaaaattaaacgatataggcatcactacgaagttggtcaatcgtgtgcacagtaaaattgtgatcggggacgaaaggttactatgtataggttcgtttaactggttcagtgctgcgcgagaagaaaggtatcaacggtacgatacatcgatggtgtaccgaggcgagagcttgaaaggagaaattcaaacgatttatatcagtttggaacagcgtcaattgcaaggctag

SEQ ID NO: 452266 - DNA, 822 bp, Serratia marcescens
atgattgcactccgtcgatttctggttgatcgctccggtttctccatcaatgatctcaccttatcttattggccacaaattgatgcagcagcaatgcagtgggaagctgcccctgatgctcaagaaccgattcaatgggagcgcttctcaccattcctagatgtatggctcgacgtcccacctaatgaacttcatcacgtacaaaagattttacccacgctggattgggatggggaaagcataggtgtgcgcctgcgttttgaacccaaagaccccgacgcactgcaacacgaatatctcacggcaaaacgcgcagcggccgaagttatggcacaagccaaagaattcggtgaacaagcgggctccacgactgtatttgcactttggccacgttcgatgatggagtttttagcccaaagaatgcgttctactttcgagatccgtgcttatttgcttgatccatctaaaatgaaaataccggaaaaaggtaaagcagcccctcaaacactcccagaaaacagcgacccaatcgatggcggagatccctttaatggtcttattcgtatcgacgagattagtgcacagcgtggatttgggcacagcgatcaaacaggatatacgcgaggtaacgaatcacgagaggatatggctgaacccagaatggggaaaaaactttccagccagctacgcaattactacagccaacatctggatcctttcgatacgccggaacccaaagatcttcaggcgttgatggcattgcttctcagatgcattgaccgaactggaaaatattggctatcccggcgttaccgaccctaa

SEQ ID NO: 452267 - DNA, 1152 bp, Serratia marcescens
atggcatttcgtgataactggatgaaggtcggaaaggctggaaaatcaaaagtggcggaagaaactctcatcccaccgcttcatcttgttttgattgaagaacctgaagcgcatttacatgcacaagttcagcaggtttttattaagcaagcctacggagttctgcgaaaacatgacaagctaaaggactctccacaccttcaaactcaactgatcatcagtacccactccagccaccttacccatgaagctgagttttcgtctttgcgttactttcggcggctaccggcactcgcacaaagcggtgccgtacccttaacttccgttatcaatctttcggaagtcttcgatggcaaagacaaaaccgaacgtttcgtgaaacgatatttaaaagctactcactgcgatctcttcttcgccgatggagcgatactcgtggaaggtccggctgagcgtattctcgttccccattttgttcgtgagcgtgaagcctatgcttacttaaagcgtagctatatcacatggcttgaaataggcgggagccatgcacaccgattgaagaatttgattgaacatctggggatcaataccttgatcatcacagacattgacgctaaagacggcaccaccaatgctgcggttgttccgaaacgaggcatgggccaacgagcccgcaatgagacggtgaaaacgtggctacctaaggaagaatctttcgatgcactcctcgacatgaaaagtgagcgcaaagtgcttgccgaaccaagcggctatgctatccgagtggcgtatcaaacacctattttcatgccattcaagtctgcagaagtgcttgaagcagtggccaacactttcgaagatgccctcgtgtatgaaaatccggcgctattcgccaacctggacggtcatggactcatcgcaaagtttcgtgaagcgctaatggagtccgccgatctcagcgagttggcaacaaggatttttgaggcactgaaaaatgggacaaaggccgaattcgctctcgatgtcctttttagtgaggaaatcgatcggctgaaggtccctcagtacattgacgaagggttagtctggctagcagaacagctaaaacgtaaagagcatgatgttcttggaaaagcggaggtgggagaatga

SEQ ID NO: 452268 - DNA, 1875 bp, Serratia marcescens
atgagcaggctggaagtgatagttcccgacgatgagatagacatgtcggctgatgcggaaatcagaaaatgtcttgaccccagctccccaaaaagtttcttcctttttgccggcgccggttcaggaaagacaagatcgctggtatccgctctccagtatgtgcgcgacaccttcggggatgaacttcggctgaaaggacaacgagtcgctgtcatcacttataccaatgcggcgagcgaagaaattcaacgccgcctggattttgatccaactatagacgtttcgactatacatagcttcgcctggtcgctgatagaagggcttaaccgtgatatccgtgaatggcttcgcgcgaaaataaccaccgatatcacaaagcttgaagcagaagaagcaaaagggagaaaaggtacggaagcatcaagaacccgcttaaaaaaaatcgcctcgagaaccaaacgccttcaaagcctcgataacgttaaacgcttcgtttacagcccaaccggagaaaatctcggccgagactcgctgaaccatgccgaagtgattcatctcaccgcctattttttaacaacaaaaccgaccatgcagaacatcttgatcggccgtaaccccattctgcttatcgatgagagtcaggataccaataaacttctgatagatgccttatttgccgttcaggctcaacataaagagacattcgttctcggcctgattggtgacatgatgcagcgtatttatagcgatggtaaagacggactggataacaatctgcctgccgactgggcaacccccggaaaacagatgaatcaccgttgcccaaaacgcatcgtaaaattaattaacgccgtacgtagcgcagtggacaaacaggtacaacggccacgaaccaacagccttgaaggcagcgtgaggctcttcgtccttcctagtcataccgttgataagcctgatgccgagcgaaaaattgcgatgcatatggccgaggtcgccgatgatgaacaatggcggaatttggcactctgcaaatgcctcacattagagcaccacatggccgccagtcggttaggctttttagagctatttgcccctttgtatagcgtgaaaagttggcgaaccaatcttctcgatggatctttgccctgcgttcgattctttactgatgagatgctgccattaattcaggcaaagtttgccgaagaccgttttgccatcgccagaattctaaaaaaacgatcgtcgctagtcagcccagatgccttgcaatacgcaacagatcaacgctcgcaactgaagttagcatcggcagcactggaacgccttatgacactgttcgcacagggtgctgatccttcgcttggcgatgtccttcgtttcgtagcggatagcgcgctcttgcctattcctgaatctctgctgctcagcgtaacgagcgataatacgccatctaacgtaacaccgcatgtcgatgaaagtgatgccgaccaccagactgagcgtacagcggcaataggcgagtttttacttgcacccttctctcaggtcgagaaatttgcatcctacgtatctggaaaagcgcctttcgatacgcaccaaggtgtgaaagggctggaatttgagagagtgatggtcattatggacgatgaagaagcccggggttttatgttcaaatatgagaaccttttcggggcgaaaagcgtggccgatccctcggttgaagcggttcgccgactgttctacgttacctgcagcagggcgcagcaaagcctggctctcgtggcctatgcagcgtcaccggaacaagttcgccaattcgtgataaaccaaggctggtttaatgctggtgaaattgtcatcggaataccagagtaa

SEQ ID NO: 452269 - DNA, 588 bp, Serratia marcescens
atgaatgtaaatatcaagcagattgtcggtaattgggatttaggttttgcgatggataagcacactgccagcagcacctatacgggggataatgagtatgggcggcctatgtttgacactaccagaacggaagtaggcgaggcagtttttctgcttaaataccgcgggcggatggatcaggttgatttgctcgcggagtgtttataccgtcatgcagtgccacttttcattaatgtacaacttatcattccaatggcagcgtctaatccaagagatgtacagcctgtaacagccgtttcagatgctttagccgctaaaatgggtaacaacatgatgagttttaatcaactcctgctgaaagcgcctggcggtcagtcattaaagaatttgcacaccaaggccgagaagcaagctgctgtagctggagcattttcttttgaagaccagattgacggaacaggcccttacaacgcactaatcattgacgatctctatcatacaggcgcttcaatggaagctgctgtagctgcccttcgctgttataataaaatcaacaaaatttatgtagcggcgctgacctggaggtaa

SEQ ID NO: 452270 - DNA, 558 bp, Serratia marcescens
atgacgacgacagttttcgttgctggctcgataaccataaagaaacttgatcagcttattgtagatcggttgaaaaagattgttgatcagaattttaacgttatcgttggtgatgcaacaggcgttgattcttcggttcagcaggcacttgtagatatggggtgcagggcgactactgtcttcagcagttcacctaaaccacgtaataaccttggttcgtggcctgtgaacgtggttcagacacatcacacgcccggaacacgagcattctttacggcaaaagatataaagatggctgaagctgcggattatgggcttatggtttgggacactaaaagccctggaacattaagcaacgtcttagaacttttatcgcgtaaaaaaagctccgttgtcttcatcaataagacaaagaaatttgtcattattaaagagccgaaagatgtggataatctgattaacctcatgtcggctacgtcacttcagaaagttgaagaaaaaattaaactttccgaaaagctgtctcttcttaagaatcagcaaatggctctcatttaa

SEQ ID NO: 452271 - DNA, 264 bp, Serratia marcescens
atgaacgataaagaaaaagaagctcgtattttggaagaaaccaaaacgttatttaatttaggctccgcttacacaaacgcccgagaggaatatctcagcgagcttaatagggactgtgaacgttctgacggtagtggtgcgcaggaagcaaggcgtgatgcacatcagaataaactgcgggaagccgagcgttccgcagaatccgcgcttaatgcacagaagcaactcgttaccaggctgacggaagagtatttgtcccgctga

SEQ ID NO: 452272 - DNA, 471 bp, Serratia marcescens
atgactgaccgagtgatattacagcgtgaattttcggagctatacggactgcataaaagtatcgtaaaatatgcaattgagcgggccgaacttcatcagtgtgacgtttatctgtgcgtgaacaccaaatctcacggcgatcagatactgagacgcatatttgaagaacgcgagtgcaacagacttacgtcaaatgaaattatcaatgtaaacgggcggaaagtgagtcttcacacgtcccggacactgaataaaaactatctgacggaaggcgtgtatttattattcttccccagccctgaactgctgaaagccgttgaataccagaccagccttaatcccgtttatgaaatcatcgtgtttacagaatctgacgggcatacggaagctacggatcagtggatgtcagaacatgacgtgcgcacgctccaaaccggaaaaacagctccggatccggaagaagatagttga

SEQ ID NO: 452273 - DNA, 948 bp, Serratia marcescens
atggctccccgtcagactaaccgacccaagctttatcagaaaccgacaaaaaccagtgcagaactgattcaaaaactgcgtgagagagatctactcatccccgatgtaaacgctgccgaaacggctcttacatttattgggtattacaggttaagcgggtattttattccttactataaaatgacccaggaaagaaagcctcagatagaagagcctaaaaaattcatacctggaactactcttgagaatattatagagctgtatgagtttgacaggaaactgcgtcttattgtactggaacaaattcagaaagtagaaatcggcctaagaacatgcctctctgagtacatgagtacaaaatacgactgtcactggtttatgaatctgacgaatcttgataaccactatgattatcaaggtttttttgaacaaataagagggtcgaaagagatttttatagaccactataattcaacatacgaccacccgaaatacccgccatcctggatgattacagaaacactcagcttcggcgcgtggtcgagaatttataaaaatctgcatcactacgatcagaagcagattgcactgaaattcaatatacgcagcgcggaaataatgacctcatggtttcataccttgagccatttacgtaatctcgccgcacatcataaccgtatatggaaccgttcttttaaggcatttcctccgggaaaacttaacggatatgaaagccatatgagcaacccatcaacgctttacagtcgcctcgttgtgttgaagtacctgtcagaccaagtttcatggtctgacggtttgaaaattcacttggatactttaatggcagagaagcccgactgtgtgacatggcaaaaaatgggcttcattgatgactggaaacttacctccctttggacacggtcaataaatccgcctccacaggtttaa

SEQ ID NO: 452274 - DNA, 285 bp, Serratia marcescens
atgagaaagacggctatttcattggttttcgcctgcacgatgttggcgagttacgcgcacgctggcttcaacggcaatcaaggcatgtcggggaacgaagggaccgggagcggcgcaggcaacagcaatgtcggcgtatgtattaacggcaacggccaaaatgcggggcagtgtgcaggagaaagcaacggcgccgccaaaccgaaagaaaaagacaaaagtgagacgttgaagtccatttgttcttcaccctttatgaaaaagtatgcctctatttgccagtag

SEQ ID NO: 452275 - DNA, 546 bp, Serratia marcescens
atgaaatcatttgatgttataatagatgatgaaaatcgctatttcgctgcgggtttagagcgcagcatatccgaatatgcccgggctaataataaagcagtctgctttgtcacgccgggtgttgggcggcgagctgatgtagtgatcgcatcgtcccggcggcgtaatcaacgttggcgtccgataggggtctgtagtaaagccgtgtcgatggtcactattaaggaaaagcctattttgacgagcgagtcgcttcgtgttttgtatcgcacggatagcccaaacagattgtttgaactgctaaccgaggcattggcgaatacgcccgttaccgggctgtttgaacgccaggctttgaccgttcgcgaacgtcaggtcatcggctacctgaggcgaggattcgatcagtcgcaaactgccagagtattgggcgtcagcgtcaaaacgattcacagtcataaacggtcggtaatgagcaaaatgatgctgagccggtctcatgattttatttattggctgctctctcatgagggagaatattcctaa

SEQ ID NO: 452276 - DNA, 564 bp, Serratia marcescens
atgatcctagaccgctcgattgtatcaagtcgtatgtatcatcgagctgcactcttcgatttgagatgtctcctgaaggacagggggggtcgggccagtttttttgttattcagagtacttttgctaataaggttacgttagttaatgctggcgtagaaactgtggggcaatactttcgctatttgaggaataacggaattaatatcctcacggattatgaatggcaagattcatttaaatttcagggtaatgttagctactttagcatatgcctgcaggttcagtcctttcagcataaacagcagctagcttgttcaaaccgaggaatggtggttcaacctggttgtgatatacgagagagccagctttcgcttgaccacggtgcgctcagtgcgaaccgcgtcaatgggcatgtagctagtgcagatttgacaatcagttgcgacagctggggctcggcctggttgatggcaccgaatccggtatcgaaattgccattaacgcccgacggtagtctgtttaccaccatctcggcagggggaaacccttgtctgaagggatag

SEQ ID NO: 452277 - DNA, 522 bp, Serratia marcescens
atgaaacgacgtttagggttggcgctggcactgtgttgcctgccctctttggcctgtgcggcggataacctgcgttttagcggcgcgctggtggcggagccctgcgtgatcccacccggccaggaaaccatcgcgctgaacttcggcagcgtggtggacaaatacctctataccaaccagcgtacgccgggcatgccgtttgaaatcaatctggccgaatgcgatctcagcctgggtaaaacggtcaccgtaaccctcagcggcagcgaaagcgcagccttgccggggctgctggcgttagcaccggggagccaggcggcggggattggtatcggcttggaaactccggaaggcaaaagggtaccgataaaccgccccggagataaattcagcctggcgagcggcgtcaatggtattcgtctgtgggcctatgtgcgcggcgaacccaacgccatcgctcaaaaaactatcgtacgtggcaattttggtgggacggcgacttttaccctggaatatgagtaa

SEQ ID NO: 452278 - DNA, 795 bp, Serratia marcescens
atggctgtagcacaaattgatgtttccatagagtggaaaaagatcagtagcgattcttattctgcctcgatctctcctaaggggacggtggaatatccgctttacagcatgccggatagaaaagtgtattgcagttttgctgctgggtgccggagttattggtacttgataataaatggacgtatgtttccatgtcagaaatacgtagattcagcaagatttacgctgcttaacgatcatagtgtgaaagttaatcgtgctctgatggtgccgtgtacgttttttaatgaatacaaatttaagggtgatgagataatctgcttggttttggttggtgagggggcttggcggggcgaaattacccctggcgagatcgattcgtttgcttactacgtggcaggaagaggttgccaaaatattcagagtggagagaatggaggggatgttcctccgccggtaaagcccgccacatgcgttttgaacggtgatgtcgccattaaccatggtgaaattaaccttaagcagcttaatggacgggaggccactacgacagcccgcctgtcgtgcagtcgcgaggtgacggccgaggtcagcgtcagtaataccggggtaatcaatttaaatgactctggttctttaaggtcaactatatatatatctggtgtgaaagggaaaaataccttccgcaatgtgataaatgccgatgtagtgtttaaatccgtcatttcatttgatggtggttatgttagtgggtatttcagcaggtctgcagtggtaacggtttcgattatttga

SEQ ID NO: 452279 - DNA, 543 bp, Serratia marcescens
atggagtttcgggttaaaggaataaaggcgatttgcctattgctgttgctgatttgctttgcgggaaaggctatttctgccgtgcaagggcaggggcgcgtcaatatgcaaggggccattatcgatactgcctgcgccatcgcgacggagagccgtgagcaaattattgcaatgggtgtaacgccggttgcggatattgtgcgggatggtaaaggaaaagaggtgcccttcagtattgagctggttaattgcgtgctggagcgcgcggataaaaaattaccagactggcggcaatttcaggtgatgttcgatggccacaatgaaggagatatgtttcgcgtcaatggcgatgtttccggtctggcgataagaataactgactcgaagggaaatatcgcacgtcctggcatttcgttgccggcgatggatattttaccgggcaattatcggctggatttttcaatggcgctggtaagcaataaacaagtgttgaaggtgggaagttatttttcatcggtgcgtttcaaaatggattattactga

SEQ ID NO: 452280 - DNA, 1086 bp, Serratia marcescens
atggaatttaatttacggcactgtgtcattcatgagttaatcaaagaaggtggtaagcagagagttgaaacgactcttaagcctgtacttccaaaggatgatgaatatgtccgtcaattagtggagtctttgactgaactaataggtaaaaaagacaatcaggctgcccgtggaacctttgattccgaagatgtaacattcaaagtacccgtcgccttcaagaaatattatgacggagacgcaaaatcggaagattttctccaactctctttaatttgcatgagcgaactatctcgtcaagctaaagatccttctcgagtggctgcttctggaggagctatagtttttgctcattatttacgtggtgagtctaattttcttctcattacaatggttaaacaaaaggaggccctgcgtttagatgcgaatttaaaaccagttggaacagttcagattgacttagcaaaaattcatcaggctgcacgcgttaactttgaccggtttcatttgtttgaaaatttacctgatgatgaaaaacctacttacctggcatttgtcagtcctaaagtaaatcaggatgcttccggatatttcgtagctgctcttggatgttctgacagcgtgccctccgcaaaagctactgatgctgttcttaacggtgtcagaagttactttgaagcaaatgcagatatcaagttgtataagaattccgcttatgatgcagtgctgtatcatctgaaagaaaaaaaaccgggagagactgcctctttattagagctcgagcatgcagtaaggcaagttgtgccagcggaacaacatgcacacatcgataatctagctatttatttaaatagtgaagaaatcggggtgccattagaatttgccataaacagaacggtggtaaataaaagaacaaaagtaagagccaaatccaatgggtgggagttaagcttcgaaaaaagatttttcggagaacaggctggatcaattatccagtttgtgcgtaaggaaaaaaaattaataatttctcagcttaatgatgaaataattaaaaagctagaagaagctctcaataaagaagaataa

SEQ ID NO: 452281 - DNA, 771 bp, Serratia marcescens
atgtttcgaatcaatcaattgatatcaattattaaatcattttccccctacaagcccccaccagcaaaaagtaaaattagtaaaatcgttagcaaaataatccgctggttatttatcaccagctgtgtttctttttttctcacaatgttaatttggcttcccagtctgctttcaaatgaaacaaccaatataaaaacagaaaaaattggcacgttagtaagtattgaacaattgcttgcaattttatgcgtgatatcagggcatctggcaataataatatcaatcaccaatgaagcatttaatttaaaaaactggaaaaaagaagaaatcaataacctaatcgcagaaatagactacgaccaagaatatgcaaaaaaattgacgctttatgagatagatgagttaaatcatctatctttttggttaaataaaaaatcatcaagaatttcaaaaaggataagtgcttttttcggggagaaaacagcagttatatctatgttcgggcttatttatacatacataaaagaaacaggagtcattgataaattactaaacaataactcaataacaaatcgaaaccacggatactcagatgacataaccatttatgcactggccatcttacttggtttatcacttggggcaatgttcttaaagaaaatcgcagaccattataattatttattagaaatagtagatcttgcagtcaagctgaaaactcatcaatgcgctaaaacagataaaaatagaattaacaggcaacttaattaa

SEQ ID NO: 452282 - DNA, 204 bp, Serratia marcescens
atgaaatccaaatatacagtaagtcgtatgagtaagtctgagcgccgcgaaattcttcgtagtttagatagtactgcgcctgttaagacccgtaccttattgagcatgttaccaaaattcaaacgaggtaagctcaaggctgagcgccgtacgcaagaagatatcaacaagatgttcgcgattgcgtttaaagcagtgcaataa

SEQ ID NO: 452283 - DNA, 621 bp, Serratia marcescens
ttgtctaaacaatgggtattcagaaaacttgtcgataagaataataaagatagttactatcgtgatcttattgcctacgccatttataaagaagctaaagatgattatgcgactgacttagctaagcagaatttatccaaagagttgctggagcaaaaacttgatgggtttcatgagatgtctgtgacggatgctcaaatatcggggtatcgtaaaaaagcagacgctgtcattgatagccttatcactcaattagatgaaaaggtgagagcgaagcacgaaaaagccctcaaaactcttcagcaacagcaggcaagagagcttaaggatataaaaggaaaagcgaagaaagaagccattagcgaatacaaaactcaaattgaaaatgccagtaatgccagaatgaatcgggcctctcgtgttatggtttggatcttgaccggttatcaaagcatagtggctacagccctgttgattattatcgttggcgggcttgcagtttggactgggcctaaagaacagcagcgaaatattgtagaggcctttattggtttgtttactactgcaccgatgcctgatatgagcgttaagaataatacaagccctgaatcgcaagactaa

SEQ ID NO: 452284 - DNA, 174 bp, Serratia marcescens
atggaagcgtatcagcatgtaaagatagaccacacaaaaagagccagtaaggacgggcattaccaaacaaataataattccatccacaagaataaccttcacttcgacaataaaaaaataaaatcctttgttttcatcgtgataggtgaaaataattactatcaaaaaaaataa

SEQ ID NO: 452285 - DNA, 549 bp, Serratia marcescens
gtgcagggtaagattgctgttgtaacggcgatagcggttcaacgtccgtttctccggcggtggaaaggcgttctcatcgaccggttgcgcttgtatcggctggcacaggattttatcgacgctttccaccgtcttgaatgtgcaagaacaggtcagactctgacattgataatacgcctctttcgtccgctccgtgatatagcgactggttcgtgtataggacgcatgagtgcacagcgggcagctccaccaaatacgtcgccagtgaaccagatagacccggcgataatagcgaagaagcccacaacttcggttgcgggcttttttgtttttatccgagaacacccagtaaaatccggagaagaagcgtctgctcgaaccagtggggaatggaatcggtggttaagaatatgcctgcctaatcgggctcccaacccactaacgacacagtttcccaggatgctccgcacagagccagtaaaaaaacaggcccacgagagctttgggaatgcagtagatgaagtgatgggcatagcggaatctttgtaa

SEQ ID NO: 452286 - DNA, 2586 bp, Serratia marcescens
atgttagtttcaaaagaagttggaagcatcgaactgcataacgcaataagtggttttaaagagtgcatcccacctggcctgaagtttttactggtaatagataatttagatagaatatctccggaaaaagttaaagaaatatggagtgacattgagcttattagtaactcttcagaaaaaagactaaaactgctaatcccttactcatctgagcatgtcgcaaaatctctttccaatgacccttacgaaggaagagagtatatatccaaaagaatacctattagttttcagatacctccaatactttcagcgggttggagaaatgcattctctaattattggaaagaaagtttccctgaagataaagatcatctttaccatgatacttcagaactcatcgaaatttggcttcctgaaagctatcaacctgttacaccgcgatatttgaagaaactagtaaatgatattcaaataatatccgtttccaccccagttgaagttaaaaacatagcatgtgcttattacatactcacgacaaagcaaaatgaacgtccttttagtgatttgttgattgaaaatttcgataatcatgaacttgacaagacattgatagataagttcaaaaaaagcattagaaagcttcagagaatatatggaaacgaccgacaaagttgggttgatgaacttctatgcattaattaccaaaccaatgctactttagcgcaaggtgagttaattgatgaacctcttaagatagcattaaaacaagctaattctgatgatttatctagagtttctgatatgttcggattccattctgcttggagaagaataatagactcaacagatccaactgactggttcgtaactctgtctaaaatccccactgccaaaaaagacatggttagagaaattcttcctgaggttatcagatcattggatactttagatgaaacttctgcatctacaatagacaatgacaatttcctgcccgcccttaatcatcttaaagaaagtggttttgaagttcatggtaagtatattgatgttttaaaaaacagaatatctaaagaaattcttagctttacttctttagacgatgactcactaatgaaacttggagcttacaacccagaaatacaacgagtgctatctcagtgcgatttaatggcaaaattgataaatgagaacattttaaatgatatataccctcagccagaatcaattttttacatattaaaccttaaagataaatctcaggattttttaaatttaaaaataacagactacaagctaaagcctgagagtctcatatatggcctgcaatattcttatgagcatgacattaatattcgactaacagatcctgatattgacagacatgccatgtttgaaaaccctgcaatagccagcataattaaagatggctcctcatcacaactagatgctgtttatagtaattttacaaacaactcatttaagagtattttttcctttgaagtcatggttcttattcaacaatggcatacatctaacttaaccagttactacaataagataatttcctcaactattgattggaaaaatgaatgcattgcacattttatagcacaaatggtatcatctaaagccatttcttcaatagaaagctatcagaatcaaatttctgatgaactcatgcttacctccaacttgtcgtgttacttaaaatacatctccgatttctcaagaattacagatgcgcttacagaagaaacattaaatgaatatctcatcccagcaatagacattttagcgcatcaagataaattaaagattaataacataaaacatgtggtgacgaaatcattttccaccttagataaatatctaaatgaaaatacattggataaatttacaaaaaacaacgaggccggaatttgcaacgaaatagaagatcagtatattaaagcaatcgataagtcgttagtaagcttcattcttaaaggagatacacccccccctattgttaagtcactgatctctagttttgagtatgaattagactcacaagaaagattcaatgaaacagctatcgcagaactgaccaaccatatcaatatagctagttatgcgaaaaacaaagccatatcattcccatacaccaaagactttatagcaaacttctttagttcatctaatgtcaatgaaattgatagagtcattccaaggctaacattcgacactttaaatgatgatgataaaaacattacactaagaaaaatatccgacttaatttacatgagggaaatagatgtaaaacggcaagtggttataataaaacactttggtgatttactgatttataatgacgaagaaataacatctggatcaagatcaatatcaagactttttgaaatgatccaagaaaatcctttcatagcttcttggcttgacgtccaaaatattaacttcgtgaaatggaatcgtgatgataaaaactctgcaattgcaattattgtcgataacattaagctattcccgaaattaagagaaaaaactgctgtaaaaaacaaattacgaacattaagcgatcaaggtggctaa

SEQ ID NO: 452287 - DNA, 216 bp, Serratia marcescens
atgcgtaaagcccgatttactgagcaccagatcatcaccgtattgaagtccgtcaaagatatctgccgggaagcaagaatatctgagaactcgaacaacaactggaaagcaaagtacggcggcatggaagcctctgatataaaaaagaaagaacttgaaaaaatagcattattaaacataagcttgccgatctcaactttgaataatgcgcactaa

SEQ ID NO: 452288 - DNA, 1380 bp, Serratia marcescens
atggctaagtataaggcgtatccggactataaggattctggggttgagtggttaggtaagataccaaagcattggcaggttattgcaactaaatacattgctcaactaaatcctaaaaaatcagagcttccaagaggtaaactgtcagcaatgtgtagtttcattcctatggaaaagttgaaacttaatacgttgattcttgatgaagagaaaataattagccaagtttatgatggttatacatactttgaagagggtgatattttaatcgctaaagtcactccctgctttgaaaataagaacatggcagtggctgaaggtttggttaatgaagtaggctttgggtcttcagagatttatgttctacgttgtagcaatcatgttaatagaaaatttttattctataggttgcaagaagataactttatggctatagcaattgcagcaatgtctggtgcaggagggctaaaacgggttcctgctgaggtagtaaactccttcttggtcggcctccctgagttgttagagcaaagagagattgctattttcctcgatcacgaaaccgcaaaaatcgataagttgatcgagaagcaacagcaactgattgaactactgcaagaaaaacgtcaggcagtgattagccatggcgtcaccaaagggctaaaccctgatgtgctgatgaaagattctggtattgaatggttgggagaagttcctgctcattggggtatatgtttattaaaatttaaatgctatacaataactgatggcgctcatgtatctcctgatactaatgagggtgagcattattttgtttcaatcaaggatattaaaaaaggaatcattgattttaacaactccttacttaccagttcggcgagttataaatatttagtcaaaactggttgcaagccatttagtggtgatatcctcttcagtaaagatgggactatagggcaaacggcaattgtgccagacgaagttgactttgttgttgcatcatccctgatcatcattcgacctgataatgagaaggttttaccggcctacatggacttacttctgcaaagttcactggtaaaagaacaggtagaaagtttcgtaaaaggagcagctttgagacgtctatctattcagaaccttgaaaaggtattcggaatatttccaacaatgagtgaacaacagaaaatatcagactacattaatgctcaattgaatagattggacgtattagaaagtaaagcgatagtccaaatccaattactggaagagcgccgtaccgcccttatctccgctgccgtcaccggtaaaatcgacgtacgcgactgggttgcacctgatatgcaagacgctgaggagccacaggagaccaccgcatga

SEQ ID NO: 452289 - DNA, 1464 bp, Serratia marcescens
atgttgcgttcgttatcttcctttgaaattaaaattgattatcctttacttgctattgctggtcgaaatggttctggaaaatcaactttattggctatggttgcttgtgcctatcatagcgatgaagaaaaacatctcttagtaggaagaagaaagccttattatacgttagctgatttttttattcaacattcagatgagattccgcaagaaggaataagtattggatatgaaattgctttcaataactggcgaatttcaaaaacgatgccagatggaaaagggattgggagacaggctcgtgtcaaaaagaagggagggaaatggaataactatgactccagagttaaccgtcaggttattttcttagggatagaaaggatcgttcctcatagcgaaaaaagccaatctaaaagctatgctaaacgatttatgttcaatggtgatgaattaggtttcgaaaatgaaattagagaaagtgtagggtttattcttaataagagatatgatgagtttaaatatgtctcgcattcaagatacaggctcccaattgtaaaatatgcaggtaaggtgatatcaggattcaatatgggggcaggtgaaaatgcactctttgaaatattctctttgctatattccgccaagtcaggagctttgattattgttgatgagattgagcttgggttgcatgcggaagcccaagttaaacttattgacagattaaaattaatttctctgaaaagaaaattgcaaattgtatttaccactcattctgatattgtatttggatgtgttcctgatgatgctcgtgtttatgttgaaaacctaaatggtaaaacgataattaatacagggatctcacctgaatatgcttttggaaagttaagtgcggaaaattctcaagagcttgatgtaatggtagaggataaagtggctgcaaagttattatcaagcgctcttcctagtaacattcggtccagattgcagatagaagtgattggttctgcaagttctctatcacgccaaatgggggctattttccaaagaggaaaaaaaacaaaatcattaataatttttgatggtgatcaaaggaaattctatcgaaataatttgaactgtgcacattctatgcttgaaaagagtgagggtgaatttacgaaatggttttcggaaaatatagcctatttacccggtgatgaatggccggaaaagtggattatcaataaaaacctagaatatgttgataaccttgcaatgttagtcaatggggatcctgacattacgatggctgcattaaatcgcggtgctggatcagaaaaacataaggaattttacgaggcatcaataattcttggtataagcgaatctgaaatgcttgatagatgttgcttaaatatagcaatgatgtgtccagaaagcatgattcatctagttgacttggtaaggaagaaactgtctgattga

SEQ ID NO: 452290 - DNA, 150 bp, Serratia marcescens
atgctgaatcaggtacttattgccagtgccctcttccgccgcagcgataatcagtttgttcacgacatcccactgatgataacgcgggaaaatcagactctctttcttacccttgaggccattccactcttctttctcttcgatttgtag

SEQ ID NO: 452291 - DNA, 249 bp, Serratia marcescens
atgagtgataaaaatgaaattcctatggagggattgtatgtttccacgatccctggcggtgtgcgtttagttgtagtcgatgtaaacgtggtcgatgaagaggaagacgaggaaggggatgacgttttcttcctggtaacggcagtgagagaaggcgacgaagacgatatgtctgcaccaagctgggagtatgatccggaggagtggcgtgaagttgttgagaggaaaaaactaaaattcgttggttag

SEQ ID NO: 452292 - DNA, 618 bp, Serratia marcescens
atgaaaaaaacattatcttttattgtatttagttccttttttggacttgttcatgctgaaacgaatatttctgaccaaataggtcagtgccagaaactcaccagtgacactgatagactggcgtgtttcgataaggtcggcaaactgaaaccagatgctaaaactgaaagcgcagaatctttgtctgttggtaaatgggattcaagaactgaaaaatcccccattgatgattctaataatgtgtatgtttttctgccggctgaaaatgaagtccaagttcagtttaagggggcgatagtccccacgctgtatgctacctgtagagaaaaaaagaccgagctatttatcgactggaatacttttattggggttgacagggttcgtgttcttactcgtattgatgctcaaaaagcagtgaatagcacatggctcatttccagcgataacaaagcaacattccatagcgggcaaactgtttcatttattaagcagctcatgaaaagcaaaaagatgttcgtacaggtaactccatatggtgatagccctgcacaaactacttttgatttgtcagggcttagcaatgccattaagccactgcgtgaatcttgcaactggtaa

SEQ ID NO: 452293 - DNA, 300 bp, Serratia marcescens
atgtcaagtcagtacgaaaaaaagttgaaggacatcaggaaagccgaaggctactcacaggccagttttgctgagttaacagggataaacgtagggacaataaagaattatgaatctggcaagcgagaagtcggactgagtgttattgaccgcatcatccatctagagcagtttaaaaaatacacaatgtggctaatgactggggatgtcgcaccggaaatcgggcagatttctccggctctctcccctgatgggctcgagagcacatccaacccccaaaaaggccagaaggttggctga

SEQ ID NO: 452294 - DNA, 267 bp, Serratia marcescens
atgagcaaaaaccgacaaaaaaaggtgattggagcgcgagaaaaccagatgccagctgattacccattcggcgaccttctggaagagtcgatttctgactatgcgaagcgtatcggcaagaacaaacaaaccgtgcgctggcaagctgaccaagggcatctgcctattcttcaggctaagccaggtgcaaagcgtcgtgtcaatctttatgccatctatctgaacgccaagcgccacgccgaaaagtacgttgaacgcatggaatga

SEQ ID NO: 452295 - DNA, 432 bp, Serratia marcescens
atgaacaaaacaccattctggatcttgctggcgcgtgaaggggaaacaacagacggccgttatatcagcgcagaaaagttaattgcactggctgaaaattattcatgccatagatatcaagcaaccgtgcgcgctggatatgacaggaaggaatatcttgtgaatctggggaacgttatcgaggttaaatcagaagtcgaaaacgataacgtctgcctgtacgcgcttataaagccaaacgaattatggtttaactacagatctcgcgactatctggaaagaatacaaatatttccagccattgagtacgtcgaagaatctaatgcattagggaaaaaaagggttgatggttcagtagtcggtgtgacgttgacggataaacctacaattaaaaaacttcaaccattgaataaattcatattgatggaatga

SEQ ID NO: 452296 - DNA, 222 bp, Serratia marcescens
atgggaagagactataaagacgaatctgagcgcgaaagtgactaccggcagtggttgaaataccgggagtcatcttgggaagaaaggaacggccaacaacacgaagagcatcagcaggaaagccgcggtaacggtgtctttagacagtttccgaaccatcaaaaactgatagaaaaggcagagcgagagtattttgattcgctgaaaaaggaagatgagtaa

SEQ ID NO: 452297 - DNA, 612 bp, Serratia marcescens
atgaataacaccctgctccccccgtccgccggcgcctggatgcgccacaccgaaacggtcactgcgcggttgtcggcgatcaccgtcgcgctgcgcacgctctggacgccgaccgcctgcccggttgagttactaccgtatctcgcctgggcgctgtcggttgaccgctgggacaagaactggccggcagagaaaaagatagcggctatccagcaatcctactggcaacaccgccgcaagggcacccgcgccgcggtgcggcgggtaattgagagcatgggcttttcggccacctttgccgaatggttcgacaccggcgataggccgggcacctttcggcttgaggtcgacgtcaacgaggtgggtatcactgaaaaaacactggctgaacttaaccgcctggtggcggatgccaagccagtcagccggcatatcagcggaataaacctggtaacagcatcaaggggacaggtttacacggggacagcctgctatctgggggagattgtgacgatttacccagaaagtgggccgcctgactttgaattgaaatacgacggacgcacacattacgacggacgcaatgcttacaccgggatcacacatgactaa

SEQ ID NO: 452298 - DNA, 1101 bp, Serratia marcescens
atggcaaagtattacagcatcatcacaaaccgtggggctgagctgattgcgaacgccatcgcaacaggtgaaaaggtcaacatcgccgcgatggccgtcggcgatgggcagggtgagctccccaccccgtcccccgaacagactgaactgctgggcgagcaatatcgcgcgctgttaaacagcctgaagatttaccccggcggtaacaacaccattatggccgagatcgtgatcccggccgaggttggtggattctgggtgcgcgaggcggccctgttcaccgccgacggcgagatgctggccgtggggaacgtaccggaaacgtacaagccggaactagccgagggctccggccgtgtgcaaactatccgcatggtgctcaccgtctccagcaccgagcacatcgaactcctgatcgatccgtcggtcgttgtggcaacggttcaatacgtcgatgaagccgtacaagccgcattgaacgctgcggccgatgcgctggaggaggccaaaagaaaggtcacgtttgatgaaatgtatccggttggtgatacaaaattctttgccaaggtcatcgaccctaataagaaatggcccggaacgctttggtatcaactggaagaaaacaaaacccttcgccttgcgaaaaaagacggttcaaacgtcatggaaaccggcggtagcgataaaataaaaatcgccaaaaacaatctaccagctgaaaaaatagatgtttctggcgacaccaatgaacatgacaccggacagctaaggactgatgattataattttggggaaaaagaaacatcggaatctggaaggcatgcgcatcgggggcgatatgtggagagtaatacatctttggacggaggaggctctgatcgccgcagctggtccgtcaattatggcaacaatgatgaggggttgattgaggaagagccagatcataagcacgttgtcacttttgaagatcacaaccacaccttgcccgccataaagcacaaacatagcgtaacagccaaaactgaacagcttggcaacggcgaagaaatcagtattgtgaatagctacatcacgctttacggctggtatcgagctgcataa

SEQ ID NO: 452299 - DNA, 540 bp, Serratia marcescens
atgacactaacgactgagcagctgaacgatatggccgatggcaattggcccgacagtgggttctacgacacgataaaggcgatggcccgcgagtgtactgaattaagagctgttgtagaacgcctgaacggcagcggttacgaatgcagtgatggcccagtcactgcgcttaacgccgctgctgtagtcgatattctactgcaacaacttgatgacgcagtgcaggaacaagtcgccccgccagcgccagcagtgccggacgaggcatattctgatgattgtcctgacctgtacccgagtcagccggatgcatgggctgccggctggaacgcctgccgcgccgcaatgctggctcagcctttaccagcagatctggagaagtacactcaaggcatcaaggatggattggagtgggcggccagaacagtagaggccaatcaccctgatacctgcgattggctttacgacgaccgcgatgatttggctaaagccattcggaaggggccagatatgctggcagtagcgccggggggctcatga

SEQ ID NO: 452300 - DNA, 801 bp, Serratia marcescens
atgagtgatttttattacggacaagggaaactttacctggctcgccggaatacggcgggccaggctttatcgtggcgatgggtcggtgatgtttcagcattatctattgagattgagtttgatgagaaaaaatcgaaggcatctgttggcggccgtctggttgacgctcagcgttatctatcgtctgtcaatggaaaagtaacgtctatatggcacgaatattcaacggataatttgcaggcattactgcatgctcacacaacaatcaagacgcctaaccttgtgatgggtgaggtattgccattagacattaaggctggagatacaatcagcttgcggaacccaaatgtatttggcgtgactattgcgacacttattgacggagatgattacgttgtggatccactctggggaaccattttttttctgaggacgccagccaatcaacccgtgaaggtggattatgcacatgccggcaatgcctcgttaccgttactgaatatggcaggcgaggagttttctttgcgttatgaaggcataaaccttgctgaaaacaagacacatgtgctgcttgagttatatcgcgtgagctttgatttaatttcaaagctgtcactgataaataccgattcaaatctcggcgagttggaaacgtcatctgtgattttgtatgacaacacaaaggttgccgatgctgaattagggcagtttggtcgtttgattaagtttgcacagttaagcggcgttacacacaacggcgccattaatcacaacggtgtttatacccacggggggcaataa

SEQ ID NO: 452301 - DNA, 828 bp, Serratia marcescens
atgaacagtatatcaattcttgaagcagttaacacttcgtctgtccagttccatggacaaccgatcatcactgctatggccgccggagtggcctatgtggcgatgaaacaggttgtagaaaatatcgggatcgattgggctgctcagtttgttaagctgagaaaccaaaaggataaattcaactgttgtgatatcccaatggttgctgcggatggcaagattcgcaatctgctctgcatcccactgaagaagctcaacggctggctgttcagcatcaacccgtcaaaggtgcgcgccgacatccgcgacaagctgatcgcctatcaggaagaatgcttcaccgttctgcacgactactggacgaaaggcgccgccgttcgcaaaccggaaaccactgtagacgaccgcaccccacttcgcggcatagtaaaccgcatcatgggcaagtacggcatgacctaccaagccgtctataagctggttcacaaagagtttggcgttaatcacattgacgagctcacgccaaagcaaacagcagaggcgattgagtacctcgcaaccaaggctatagagggtgaattccttggtaagcagccagagctagtaaacttcgacttcgaaatgtatgtgcataacgccaacgttgtctgcattcatctcgaatacatccggcaggtatggaagcaagaactccatccggcacttagattaattggctcacctttggccgttaagctttacgacagaatcattgatgctggggccatttcctacggaatcagacatggccttgagaaagcatccgggctcaagggtctgcaacactag

SEQ ID NO: 452302 - DNA, 753 bp, Serratia marcescens
atgactgcattagcaatcaattccgttgagttcgattttgaaagtcaaaacattcgcacagtgatcattgagaatgaagcttggtttattgctgaagatgtttgtcggactttgaaactaagcaatccgtccatgtctctgaaatcgctagatgatgatgaacggtctaagttgaacttagggcgtcagggtgaagcaaatatcatcaatgagtccgggctgtatacgcttatccttcggtgccgcgacgctgttaaacaaggcacccttccgtggcgttttcgaaagtgggttaccaacgaagtgctgccaactatccgcaaaactggccgctacgagaaacagcctactgctgaaccactgtctccgaaagacatgggcaatctaacccgcttggtgtggttaatgaccagtggcatgaaatttgaaagagcgtggagtgcagggatttggcactgcttgcgctcggtgacaggtaggccatcaccccagccattctctgtaaatgacttgccggcacttggggaagaatgccgccgaattctcaaaattacatctgcatttaattcggttatctatgatttcgagaaagaagtcatccgcacggtggtaagacgccgtggcaatatcgaacctcttgtcgacaaaatgaaaggacaaatggttgagttgttggataacgagcgcagcggtttactgtcgatagataaattatgcgattccggcgtaaaagagctaataaatcggcaataa

SEQ ID NO: 452303 - DNA, 390 bp, Serratia marcescens
atgagagacattcagcaggtgttagagcgttggggggcttgggcggctgataaccgcgaagatgcctgctggccgagtgtggccgctggcttctcatctctcatcccttcaaaagtgaagaaccgacctcaatgctgcgacgaagacggtattacgatttccaatgtcatggcaggactacgtaaaaagcaccctgtcgcccacgacctgctcttcgattactacgtgttcggcaaaaccttcatgcaattggcgcgtgagcatcactgctctgatacgcacattggcaagaagctccagaacgccgagggtgtgatagacggctacctgatggcattggaaatcaagttagaaatggataagtacgtcaggcgcgaggcagtggcttga

SEQ ID NO: 452304 - DNA, 603 bp, Serratia marcescens
atgcagactgcacgccgtcgccggtgcgccatttgccgagaatggttcgtcccgcgcttccagaatgaacgctggtgctgtccagatcacggagccgaattggcactaaggttaaggcagaaaacgcaccagaaggccatacaggccgcagaacgaagacgaaaagaaatagaacgcgaaaagaaagacaagctcaaaatcagacgcctcgcagtaaaaccccgcagttattggatcaagcaagcccagcaagctgtaaacgcctatatcagagagcgcgaccgtgatttgccctgcatatcgtgcgggacgttcacggcagtgcaatgggacgctggtcattttcggacaaccgccgcagcgccacagcttcgcttcgacgagcgccaaatatggaagcaatgcagcgtatgcaaccagcacaagagcggaaatctggtgccgtaccgggcggagttaatccggcgtatcggtattgcccaggtcgaagccatcgaatcaaaccacgaccggcacagttggacaatcgacgagtgcaaggcgattaagtcccaataccaacagaaactgaaaattttaaaagagagccgggaggcaaaatga

SEQ ID NO: 452305 - DNA, 528 bp, Serratia marcescens
atgcataaatcaaacacgccgctggcaaatcgagattgctggcaaaccccgctttggctttttgatgcgctggatattgagtttggtttttggctggatgttgcggccagtgcagaaaacgcactctgtgcgcactatttatcggaagccaacgatgcgttaacccacaattggagcagctacggggcgatctggtgcaatccaccctatagcaagattttaccctgggtagagaaggccagcgagcagtgtcgccaacaacagcaggccgtggttatgctcgtgcctgaagatatgtcggttggatggttcagcgcagcgctggcaacggtagatgaggttcgcgttattactgacggtcgcgtcaatttcgtcaacccggcgacggggttagaacaaaaaggtaatagcaaggggtcaatgctgctgatatggcgtccgtttatccgtcctcggcaactaattactacggtgagtaagcgttggctggaaacactttcagattccgctaatcggggtgttgcatga

SEQ ID NO: 452306 - DNA, 1881 bp, Serratia marcescens
atgacgcctagcgaattgagtaacgcgctatgggacaacgttgagcgcgtggtggcttacctgctgccgaatgggaaaaaatttgccaacgagtggacatgtggttcggtggatggcgagaagggcagtagcctgaaggttaacctggccggcaagcgcgtctggtctgacttttcaaccggtgagagtggtgacttgctggatttgtggtgtgcctgcaagggctgccagttgcacgtcgcaatgacggaggccaaggcgctgcttggcatcaaggacgacgatcaccacttcgaagctcgaaagaaaaaattcgacaagcccaaaaaacaggggttgaaaaaagccagtgattgctatgcctatcttgagtctcggggcatcagcaaggcagttgccgagcagttcaaagttactgatgcggttgtatggcaccacgatttgaagcgtgaattgcccgcagttggcttcccgtacattcgcgatggggagttgttgcaggttaaacggataagtaccgagcggccaaacggcaagaaggtgataatggcagaggccaactgcgagccgtgcctgttcggctggcaggtgatgccgccaagctcgaaagtggtggttatctgcgagggtgaaatcgactgcatgagcttctaccagtacagcattccagcgctctccgtacccttcggcggtggcaagggggctaagcaggactggattgagtacgaatatcacaatctggacaggttcgaagagatttacctgtgtctggacaacgacgaggtagggcgagaagcagcaaaagaaatcgccagccgtctcggtgagcatcgatgccgcgtcgtaacgctaccgcgcaaagacgtaaacgagtgcctgcaagccggaatatccgacgaggaagtattcgattgcgttcagaacgcgaccttcttcgatccggaagaactccacggcgccagcgaattcaagcaagcgacaatcgatgcgttctacaagcaagagtcaggaattttcaagagcccctggcgcatactgaaccaaaacttctccttccgcgattcagagttaactttggtcaatggggtgaacggtcacggaaaaaccgaagttgtagggcatatggcgctggaagcgatggcacagggtgttcgttgttgcatcgcatccctggagcttaaaccgggaaaattactgcagcggctaacacgacaggcgctatgtgccaaaaccccccccagggaagagattgacatggcttttgactggtacaacgacaggctctggctgtttaacgtaaccggtactaccaaggcggatcgattgcttgagatatttgcttatgcaagaaagcgctacggaatccagctgttcgttatcgacagcttgatgaagtgcggcgttggcgaggacgactacaacggtcagaaagattttgtagaccgcctgtgtgacttcaagaacaaaaacagttgccacatcatcctggtaactcatagccgcaaggcagacagtgaggacaagcccaccggcaaaatggacgtgaaaggtacaggagcgatcaccgacctagcagacaacctattcatcatctggcgaaacaagctgagggagagggcgctacagaagcaaacagagcagggcccgcaggctctggatgaaaaggagcagaaataccttgccttgcctgcctcgattctttctctggagaaacagcggaacggcgaaggttgggaggggcagcaacctctatggttagaccctcgctcccatcaatttttacagtcagaaggcgagagcccgctgaactacatcgcaaaccgtaagcagtctgatattgaccatgactttgagatcaacaaggtcacaagggcagcctga

SEQ ID NO: 452307 - DNA, 870 bp, Serratia marcescens
atgggcgtcgttaagcaattgtcaaactacaggcctcaactggaggtcgtggagcaacgcgtggccgataccgacgatgggtatacccgcatagctaacgagctactagaagctgttatgagcgcagatttgacggccagacagctaaaggttgcgcttgcgattatccgaaaaacatacggattcggaaaaaaatttgaccggatcaccaacacacagatagccagcatgacaggaatccaccatacccatgtttgcaccgccaaaaacgagatgataaccatgaatattatcatcaccagcggctttcagatcgggattaataaggtggtatctgactggaaattaaacattagccaaaatagtaaaacattagctaagtcagctaataaaagtttagccaagtcagctaacgagcattcgccaactcagctaaacacaaaagaaactattcaaaagaaagaaagaaagaataaaaacactatgcccgaacaagttcaggctgagtgcgaaaaaacacccagtgagccagcaaaactaaatccggttgatgaggctttcgagtcgactttctggtgtgcaggaatggtcaagaccggaaagaaagcggctaagtcggcattcgctacccaattcagggagtggcggaagcaatcaggcgggtcgccaatccaatttgctcaattcctggctgatgacattgcctgccggaaggggaagcagttcggctttgaaaaactccaccccgcaacgtacctgaacggtaagcgctgggaggatgagaaaccttcctcgccatccgcgacgcaaactaccgctgccgtgttctacggtcaaaatagcttccacgctgacttctcaaaactctga

SEQ ID NO: 452308 - DNA, 165 bp, Serratia marcescens
atggcacgaaaacgcagaagtatcaatcaaaacgaggagcggcgtcaccctgattcgcccgatgggctggtgtatatcgctgcgtgtaatcccgactatgggaagaaactggcgcaggttttccggcaacaacaagagagggtgaagaacgatgggcgtcgttaa

SEQ ID NO: 452309 - DNA, 303 bp, Serratia marcescens
atggaactagcaaactacagcaagccaacagagcaagaaatcaaccgggcagagactgacctactgatgacgttatcgctggtgacaaacaggcagtttgcgcgattggttggctgtcatgagtcgaagattagccgcactgactggcgctatatcgcaacggtgctttgtgttgcgaagaagtctctggaggttagccctctgggaatgatggtgcaggaagtggttaaggcagtgagcaccaaaaagcaaaaacgcccggtggcagccgagcgttctgagcaaataactatgtctttctaa

SEQ ID NO: 452310 - DNA, 543 bp, Serratia marcescens
gtggcaaagaaaggtgagtttaagccaacgcagatcgaggtagttaatgccatagccacccctaagaaggttaccttttcaggggtgacatggaatgctagcgaagggcgggcccctatctggttcaagcttaactttaaggcatttgacgctagcggaaaccccatcccagggctgagatttatgcttcactggcgcaaccccattgccgaaggggtagacatagtaaaattatcattcgtgatgtttttacacgacaggagaatttacgccctagatccatacccggcagacaacaaacctcacagaaacaaagttgttgttaaccacccggactatgtggaggtagccagagggcctcattaccatctttacttcgagttagccgaggatgcgatagccctcaagctagatacaggcatagaaccagatgactttttaggttactggaaatatttctgctctcagcttaatatcagttgtgagggcgttccgcctttgccaaatcaggacaaatcaggccagctatcatgggaaatgtaa

SEQ ID NO: 452311 - DNA, 777 bp, Serratia marcescens
atgggaaatgtaacgtgttcaacagtaatatcaaggctcgggttcgaatgtcacccaatgagcgatacactgctgcgcgtgatcagcccattcacctactacgatgatggagagcacatcagcgtttttgttcaggaaatgagcgggcaatatcgcattactgactactgcgatacgttgatgaacatagagtccagggggataagtctcaccaagcgtaaaattgagattatccgatcctccctagcatctcagggggttacgctgaacgattccggagaaatctcagcctgggccagcgaaagcaacgtgggtgagatgacagccaatgtcattcgtggtgggttgctagcatcagcacaaaccgctgattggtactctgacgtaaaagatgacaagttcgaaaggtgtgttatcagttacctcaaatctcaaggcttgggagctagactttctctaaaggaaaaaattaaaggtataagtgggcacgaaattactatccccattacactcaagcaggagttgccattgctggcacctaagaggggattcactgtgagtttggctggagcgagagggtggaacacagctcactcaaccgtcggcaagctcgtagacataagccacgcgacgccagacattaaaaacagattcgtaatcattgatagtgacgatatgtgcgcagaattgcagcaattatcactcctgttcaatgatagcgcccttgttctcccgttccatacaagagatacgtggatagaatcgctggttgcataa

SEQ ID NO: 452312 - DNA, 627 bp, Serratia marcescens
atgacatctattcgtttaacaaattctttacgcgataatatagctgcaaatgcaattaaaaaggcgggtgtttcagcggcacagaaagctaacgcccaagctttttccgcccttgctgagaaagtaaggataagaattttcggcagcgcagagaaagctgctgaagttgacgctaaatatcatcaagccgttaagatcgagaaggagttacgagcactcggtgttggcaatttttacatcagaagcggacgctgcaacgagatatatccttcttttggcggcgctcgtacaatgctggaatacgggaaagacaacgatggtaatgaaatttaccgcctcactcctttacgtgatctgtgccttctcgcagcagatgatccacttaccgttgaattccacaaattagatgatgaaaagcgcagtctggaacaacagcacgaagaagttaaagtgaacgtttatgcagcgcttaattcagtatcaactgtgaagcggctactggaagtttggccggaatgcaaagaactgctaccagctgatctagataccgcaaaagcggcaatgccggcactgatagttagcgatttaaacaaaatgatcggcttgcctactgacgcaatttcttaa

SEQ ID NO: 452313 - DNA, 225 bp, Serratia marcescens
atgcggttagctaacccctcgctcacgatgctggcgaaattggagtcggcgatggagcagaaaaaattccgtggtgttggcggttgtctcgatgctcacgacaattactacatcgagtatcgctatgtcagcgcgagtcgcactgaaagagaagtctgcgccctggcccacagtattgccgagcaggtgcagaaaggccccgtggtgttggttgataaggattaa

SEQ ID NO: 452314 - DNA, 159 bp, Serratia marcescens
atggataagctgagcgaactgagcaagcccgtacagattttcaagcacccagcaggccgtaatttctggtcagtgtcagcagatagcaatgccgggcagcaagacgttgaggcgttctactcgcaagagtacgtctccagccctgctggcagaccgtga

SEQ ID NO: 452315 - DNA, 747 bp, Serratia marcescens
atgttaacgactgaactgttgaacgacatggccgatggcaattggcccgacagtgggttctacgacacgataaaggcgatggcccgcgagtgtactgaattaagagctgttgtagaacgcctgaacggcagcggttacgagtacgaggacgggccagttactacccgtaacgccagcgcagtggttgatattttacttcagcagcttgatgacgcagtgcaagaaagggacaccccgccatcgccagcagtagcggaggaggttataccaggtggtctagtctactcatctgcactacctgagtttgaaagcaacgacagcgataaggtaattgggtatcactgctttataagcgggcaaactcgaagcgtggagagccaagagcaggcgtatgccgacgctaagactgtaattaacgccttccgtgccacagtgctgcaaaactgcgccagcgatgaacccagtattgacgctggtttgacagcaaataaatgcgaaaactgcgccagcgttaaccaacctgttagccagggttacgcggtgctggaaagctggatatcccgcgacgaacggatgccgaaagatggcgatgttgttctggtgttccaggaaggcgggattattttctgtgctgaggtagacgatggagagttttaccctgacgagttcccacgagtgccgacgcagggcagagagataacccactggatgccattacctgcagagccggagggtgggaatggctag

SEQ ID NO: 452316 - DNA, 846 bp, Serratia marcescens; identical to SEQ ID NO: 193561

SEQ ID NO: 452317 - DNA, 669 bp, Serratia marcescens
atgagatatcccggtggtaaaggcaagtgctatcagagactcatcaacctgatgccagtgcacgagacatatattgaaacccaccttggtggaggagctgtgatgcgcaacaaacggccagcagcccgtaatattggaatcgatattgaccaacaggttattgatgtatggcgcggcggggatattccctgcgaactcattcaggatgacgctatagcgtatctcagtacgtttccgtatcagggtagtgaactggtttacgccgacccaccctatgttcatagcacgcgtaaacgtagcaaaatctatcgtcatgaatattcagatgacgatcatcgccggttgctgcaagtgcttgccaggttgccctgcatggtcatgatatccggttacggaaatcctatctatgacgaaatgctgagcggatggcgctgcgagcgatttaacgccaagactcatacgagcgtgcgtgaagaatgcgtatggatgaactttgatgttcctgacaggttgcatgacgcgcgatacatgggcagcagttatcgggaaagacagactctggcccgcagacgcactcggctttatgatcgcatagaacgaatggaacccgcagagcgcaacgaactgatcaactggctgaacgcaacttatggtctggagactgtatga

SEQ ID NO: 452318 - DNA, 1365 bp, Serratia marcescens
atgacacgcagcaaagaacagctctggtctgaacgtcaggggaacaatacccgtaggccagatgaaataaggtcggaatacgaacgtgatctttcccgactaatccactcttccgcgttcaggcgattacagtcgaagacacaggtgctggggctgggcgagagcgacttctaccgcacacggctgactcactctatggaggtagcgcagattggcagcggcatcctgtctcagctgaatatacgctatcccgttggggtagcggctgaggcggaattcctgcctcacccaagccttatgcaggctatctgccttgcccacgatatcggccatccccccttcggtcatggtggtgaagttgcgcttaactactgcatgagagcctatggaggctttgagggtaacggacagacgctgcgtatactcacccaattggataagtacaccgagtccaacgggctggatccgacgcgcaggcttattctaggcgtgctgaaatacccggcaagctactctgaggtagtcaacgagagcgcttacggccagctagagtcaggaagccgtgaatggctgtttaaatcctccggctttaagcccccgaaatgctatctggactccgaagcggatactgtcagcttcgcactccaaccttttgatcatgatgatgcgctgttattcagatccggaagaaagaccaccgagccggttgagcacaggaaaacgaaatataaagcgctggacacaacgattatggacttagcggatgagatatcctactcactccatgatcttgaggacgcgatctcactgagaatgatcgacaaaagcatgtggatggactacttcagtgacaagtcgcatctgtttgaagcatgtcaacgtagctcgtttgacctgaccgctgaagacgtagccgataagctgttcggcagaagctaccttcgcaaggaatgtatcggaacgctggttcatctgatgatcacaagtgtcacgcttcaggtgcagcatcctgatttcaagtgcggaatgcttcgctataaagtggcactacctgctgaagtcgaagccttacgtaaggccattttcagtctggttgaggacaaggttatccggcacgaaaacgttcagctactggagttcaaaggccagaagttgattgtagagctgttcaatgtgctggcaagcgaccccacacgttttctcccggcagagacgtgcaagaagtatagagaagctgaaaaagctgacgataaaaaaatgcgggtcattagcgactatgtttcaggtatgacggacgagtacgcgacccggatgtatgagaaaatctttgttccgcgcaaaggatcaatctttgacagactctga

SEQ ID NO: 452319 - DNA, 246 bp, Serratia marcescens; identical to SEQ ID NO: 219651

SEQ ID NO: 452320 - DNA, 615 bp, Serratia marcescens
atggctcccgtctctgaggggggatggagtgaaatacaaaaaagaagaactaaggattctattaatacacttaagattagaggtgaatacacaagtgaattgatgggtttgtatgaggccgataatgttgcaaaagatgaaacaatagaagaactcaaaagtaatatattatctttagaatatcgtgttcgaatgcttcaatcacaagcttcagctcaaggaagtatagtaatgaatgcaggggaagaaactgactttttcaatggtgagatcaaagatgtaataatagaagcactgaaggttgctattgtgaatacgaaagagggtagtcgaagtaatcatatattatcttctttaatttccaataaccctcaaactatggaagcaaattcgcgtcaaactcatttgaaaagagcacttaatggctacaggagtatggataaggcaacgtcaaggcagcttaaggaacttgggtttgagttgtctgaggaaggtaagcattggaagttagtatataatggtgattccagatactcttacattcttcctaaaacagggagcgactatagaggatctttgaatgctatttctgatataagtaatattattttctaa

SEQ ID NO: 452321 - DNA, 1191 bp, Serratia marcescens; identical to SEQ ID NO: 193571

SEQ ID NO: 452322 - DNA, 1554 bp, Serratia marcescens
  misc_feature (1540)..(1549): n is a, c, g, or t
atgatgaataacatcttaccagcattgcctaccgagaaaatacctgcaaaatcaaatggatactttttcacgttgcatgaagctatgtggagattagataaaaacaacaatatttcggttggtatgatacatgaccttctggatcctgagactctgagtgggtttcttcataccctgtcattttatgccaggaacctgtccgcggcatacacgagacatattttcctgtgtttcttagacatgattcgtgcaactaaagctactcgtattgacgatatcatgttgattggatataggtcttctttggatgcggctcatgagcatgagttagcctgcgttagtgttttactgcgaaagtggcacaagctgggctatcccggtgttagcaagaacgtggcgtgtttgctggagggatggaggttaaagggggggcgtaagggggatgcggttaagcgattggatcctctaaaggggccgttgacggataatgaacttcaagcgtttaacgaggcggttgtacgagcttatgaaaagagcttaattaccatcgcggagttggctatggctcttagcgtcagtcatacagggcgtcgttcaatccagatctctcagctgcgcgtggttgatattctctgcggagaaaatgaaaagggtgaacccttctatgtgttgaatgtgccgcgagccaagcaacgtaacagcttttttcgcgaaagcttcaagccctatgcgatgactctcgaactatgggcagtcctgagtgctcaggcaaggaatgctgttactctggttgagaatcgtctcgggattgaattgcaggaagctgaccggcagcagatccctctgtttcctgatcttgatgtgctagcgaccatccaatccccttatgaattctaccaactgcttgccactgacaaactccacatcgccgcttcagtgataactaaaacactccatttaatcgtagaagaatcagatatccggtcagaacgtactggtgatctattgcatatcaattctcgccgctttcggtataccacgggcacacgggctgcccgtgaaggttttggcgagttggtaatagcggaactgcttgaccatacggacacccaaaacgcaggtgtttatatcaagaatatacccgagcatgtgaaaatgctggatgaggcggttggttttcaattggcgccatacgctcaggcatttgtcggggtacttgtagattcagagagggatgcacatcgaggtgacgacccaacaagccgtattcggaccgaaataggtcaaggtgttggaacttgtggcgaacatggcttttgtggcgccaatgtacctattccttgctacacctgcatgcattttcagccatggctggatggcccgcatgaagatgtctatcagggcttgcttaatgagcgtgagcgggtgaaagagataactggcgacatccagattgctgccgtgcttgatcgtagcatcatcgcggtggcagatgtgattatgcgttgcgctaaacgtcgtgaagagcttggtaaagagnnnnnnnnnnggtaa

SEQ ID NO: 452323 - DNA, 705 bp, Serratia marcescens
  misc_feature (636)..(645): n is a, c, g, or t
atggctgagattttccagttcaagccaaaggctattctgacggcagcagaaaaccttggagcattcatagccaagtgccgagatcaactgactgtattcggatccgaactcaattgggatgctcctgtgtggccaaacataactgtgttcgccaagttgggcgttactactcgcaaaccaaaaccccaagagatgcaagatccagagttcatcgatttcgctaaagcttatttccgttaccagcaggggcatcatcccacggggacaaaaaatgaaagtaaggccctccgagcggttgaggcgtctttgcttcaagtaaacgggagtgcaaatattgatggcctgtcaattactgtgcttgatgaagcagctgaattggcaaggcagcactactcagatggctcagcatatagttgcggccgtgagattgagcggctggctaagtttgtagttgaaaaccagcttgtaccaaacgctatacaagattgggtcaatccaattcagcgtgctagtgataagaataaaacaggcagagaggcgaagaaaaatagagaggagaaactgccctgtgatattgctctcaatgcgctggccgaaatttttgccactaatccaattaatgagagggatatattnnnnnnnnnnggatatattcacatcatcggtgtttgcgatgctgatgtcagcaccatcacgcattactga

SEQ ID NO: 452324 - DNA, 411 bp, Serratia marcescens
atggatttaaaacaacaattaaaacaatatgaaggtactaaagagtatcagactaaagtaggttatttcaagaatgggaagtactggcagtataaagacagtcttggttatccgacaatcggctatggtcatttagtcaaagaaggggaagacttctcacaaggtctaaccgaagtacagggtgttgcttcacttggcgtaaatctacccgtagaaagccgctggaatgattttctagtgattatggtattccaactaggtcttgcgggtgtgaagggcttcaagaagttcctagcagctctaaaggcaggtaattatgcaactgcaatcattgaatgtaaggattcacgttggtataaacaaaccactaaccgtgttgattctatgatcgcctatgtagtaaggggctaa

SEQ ID NO: 452325 - DNA, 858 bp, Serratia marcescens
gtgaaaaactggacaactgaacataccaaagaaatcaagaaatggttagatatcgacacatatcgtaagttcgaagatctcacccttctacagttataccacgagctgtgggccagaacactgttcttcaaaagctacagggaggattttgaggcaaaagccctaatgggatacttcgaaaaaattttcagcggaaatccattcttgattgaggaaaagcaacttggctatatggcaccggacaaccgattgtttcaaccgcctcatttctttctaactacacttgaacgacttgctgaactgagcatcatctcaatgcaacggggcacttttgtgtggcatggcgatgataagtattcaatcaacggtgagctacaggaagaaactctctacgaaagtttacccgaccaattccaaagaacagtcatgttagaagttgatctctcaagtggtacagacgacgaaattgcggaatcactcaaagcggctttacctcagtggcgtaaatatatggaaataaaggaaaatccgctggattccgttcgctttggatatggaaccattaagaagcttatcaactatcgaatcatacctatgctcgacatttttgtgtggacaaagattaaacagattcgtatatcggatgatcgcctgtccaggctgctttataccgatgatgatgatgaaagtcagatcagacttcactatcatgtcaaagataccgacagaccacttgccctcaaagcaacctcactagacttcatcaggcagttttattacttcataaacaagaatagtcatttaaaaaacatgagagtttcagacaccatgaaactctctgattctgaaaagagttaa

SEQ ID NO: 452326 - DNA, 174 bp, Serratia marcescens
atgggactggcgatctttctgcttctcggcgtgggcctgttcattggcctgctgatcggcgtaatttctgcctatgccgggttctggcactggctgttcgaccgactggatgcccggcaggcgcggcgattgtccgcaaaacctgtccgcaatgatggcggaaagcatcgctaa

SEQ ID NO: 452327 - DNA, 258 bp, Serratia marcescens; identical to SEQ ID NO: 101701

SEQ ID NO: 452328 - DNA, 246 bp, Serratia marcescens; identical to SEQ ID NO: 101700

SEQ ID NO: 452329 - DNA, 858 bp, Serratia marcescens
  misc_feature (770)..(779): n is a, c, g, or t
atgaagaaatcgctggaattgcctacttatcttgtcgcagattcgatgggttttgtgcctggcaacaaagcatttcttcacggcagtatgcctatcgcgcagcaccttttgggatttgactatttgattccggcttaccgtgttccacgagggcttgtcgagtcgggagcgctggatgactggaaaactatggtagctgagctggttcatggctggcctcaggtctttgcattatccacagcttttgcttcgatgctgctgtcgttgtgcaaaatggatgtcgcattgtttcatttttacggggggtcaacgaccggaaaaacaattcttcttcagcttcccatgtcagttcacgggcatggtggagaacctggcagtgcgccagatgtgaacattttacgctggaatactacagcgaatgcgcttgagaaaaacctgagtcgatattcagggatattagcctgtattgatgagttgggtgcttacaaacagaaggactttgcttccttgctgtacaatattactgcttcgaagggtaaggatagaatgaatcagcatctggagatagatgaggcctttacctggaaaatgtttattctttcgtcaggggaaatgtctatccctgagaagcttgccacgcagaaagagcaaattcagggagggcaggagcatcgtgccatcagtcttaacatccgccccgaagatgcccgtaaagacggtgagacctctgaagacgtacgtaatcgagctgagagactgaaacatgggtnnnnnnnnnnctgtgctggtgcgctgggattctcgcaactgaatggaatattcttccctttggtgaggatgttattgcagatgcggtaa

SEQ ID NO: 452330 - DNA, 150 bp, Serratia marcescens
atgctcataatggaatatgacggattcacgtacttcattcgtatgaagcgtgaagttttcaaaacaggcgcgttctcgaagaaccgaattgactacttcatcagcgtaggtgtacaaatcaacgtttacaccgagcgttgccagtgctga

SEQ ID NO: 452331 - DNA, 459 bp, Serratia marcescens
atgttccttgccctgacggggctgcgtctgggggaaacccgtcatcttcgtcttgaggatgtggactggatccggaaggttatcacccttcgccataccaaaaacggcaaactccgccgtgtaccggtatgtgataaggctttcgttcttctgacagaacagcgtcagcatctgggtgatgaaggctgggtatttccgggcaaggggaccgataatccggtttctgagccgcgtcgcctgcaaaaacggctttgtgaggctgcgggtattccaccgttcaccatccatgagatgcgccatacctttgcgacaaagctcattgagagcggggccgacattcacaccgtcaaagacttactgggccacagcactatcaaagtgacggagctttacttgcacgcttctccggcgcgttaccacgaagctgttaaccgggcgatgaatgtttttccggcctaa

SEQ ID NO: 452332 - DNA, 1818 bp, Serratia marcescens
atgatcgacgaccttcgcgccagcaaatcttgctatttctatcgccaaaaatcgccaataacaacagttgcgatcacaaccttgtttcgggaaatcagaaaagcgcagacgtcaccctcgaacaacattttctctttcattcgacaaccccacggaacatcaacttgttctgctttgtgctttcaattcgacaaggccccgactttcttgcccggtattgaagatgtgctcgatcgagttaccggatatttattggtcatagagcatcgcgattatgtcgctatttttaaatcccaaatcgacgtcactgctgattttaccaagcggtacttgcagcgtatcagcgcccaagaggtagaccgtggactaaccagtaaggattcaatatttgcccgagttcgactaaggcatatgacgctatctcgctttgcattacgtagcaagacccttgaaggcgagaacctccagaataatgtaggcatgtcatcctcggctcgttttgccccgctgggctacagcttcactgaggctgacgaacacttttcgacaactccgcgaaccgggcggatctcccttcgagcagatcgcgcgagctatctagaactggttgattatgcctgtggtatcatcgaccgtctgcatcctaaacccggaagaccatcctcctctcctttccttgcagcttttgctcggccgttggatctatctgacctgacagctagccccaccctattcgcagtcgatacagctattcttcggcaggccatctttgatgacgagataattcgcttagtcaagcgtggcggagcggtatatcgagaacttacaaaagcagagatcgatctgatactcgtagagctgacagatattttttccattgcaaaaaacgctactggcaagctagtgatgtctcagttggcaacagggttcaatgcaggtgagatcgcgataaacaaaacacgaatcgccttaaaacgtcttacactacctcagctaaccgatgtatacgtcgaagaaactcagttcgcacttggtatggacgagaatcgtgttacgattaagcaattcattgacaaacaggacacattcatcgtcctgttcgatcaaccgcgttttgcctatctagatggcagtctttatcaggacgactccctggtcaacggagggactcaattcttgggctatctcttcggcaatgcagagctagcactcgttacggatgagaaaggtacttttacccctgcgcatgtaaccttcgatccagactccactttcggcgctgttctatcgaccattgctcctgaggataatgtcatagtctgcgacgatctcggtgatgaatgggctgatttcattggttttcgcacggatccaatatccccaagaatcactttctaccatgccaagcacggagaattgaccctcggtgccggtgcatttcacgtttccgtcagccaggctatcaaaaatttgggtaatctaaatttacccattccggccatgaccaaaaagttcgctcgatgggataagttttatactaacaacagggtaaggacgggaattcatcgaacatgtcgcggcgtaccagctgataccaaaactgcagtagagttttgtagaaatgctcctcacattttcaaacgggtggcaatcgtgacctcatcacttagcagggccgcagttgagcgagagtttcaaaacatcgcagcggggcatactgtcagcccctactttatccagctctattggttactgtcatccttctttgcagcctgtgccgaggtaggagccttcggatgtgtgatatgtcaggaatga

SEQ ID NO: 452333 - DNA, 615 bp, Serratia marcescens
atgtcagaaaataccgccatccaggacgcggcgccagcaaacgcacaggcgtcgcgcacggccattttactgttcctggcgctggctttgatgtcggcattgctgaacagcagcgcgccgacgccgctttatccgctgtatcagcagcagcttgcgctaagctcggtcagtctgaccgtcatctacggcgcctatgccgccggcgtgctgatctctttgttcggcgtcggcaatctggccggcaaagtaaaggatttacgcagcatgatcgtgccggcgttgctggtggtgttgagcggcgcgctgctgttcgcgctggctgatacctttgccatgatgctgatggcacggctgctggccggggtaggcaccggggcgctgaccggcgcggcgaacatcgcgttggtgcggtttgggccgcgcgacggcggtaaaagcgcggcgttaatcgcaacgctgtcattcaccaccggattagcgctggggccgatcttcagcggcatcgctttgcagaccggttttcatcctacgacgctgccgttcgttttcatcatggccattgccgccatggcggcaatggccatgatgaaaacgaacggcagcgtcgtaggatga

SEQ ID NO: 452334 - DNA, 1458 bp, Serratia marcescens
atgacaataactcctcaacaactgatcgcactgctgccgctgttgatcgtcggattgacggtggtggttgtgatgctaggcattgcgtggcgacgcgaccactttatcaacgccaccctgaccgtgatcggtctcaacctggcgctgctttcgctgtactttgtcggccaggcaggcccaatggacgtcaccccgctgctgcgggttgacggctactcgatgttctacaccgggctggtgctgctggcgagtctggcgacctgcaccttcgcgtatccgtggctggtcggctatccggataaccgcgaagagttctacctgctggtgctgatcgccgccatgggcggcatcctgctggcgagcgccaaccatctggcttcgctgttcatcggtatcgagctgatctcgctgccgctgttcggcctggtgggctacgcctaccgccagaagcgcccgctggaagccgccatcaagtacatgctgctgtccgccgccgcgtcgtcgttcctgctgttcggcatggcgctgctgtacgccgaatccggcgatctgtcgctggccggcctcggcaagagcctgcaggaaaacatgatgcaccagccgctgatcctggccggcatgggcatgatgatcgtcggtctgggcttcaagctgtcgctggtgccgttccaactgtggacgccggacgtttatcagggcgcgcctgcgccggtctcgaccttcctggcgaccgccagcaagatcgcgatctttgcggtcgtgatgcgtctgttcctgtatgccccggccgccgacaacgaagcgctgcgcatggtgttgtcgatcatcgcgttctgctccatcttgttcggtaacctgatggccatcagccagaccaacatcaagcgtctgctgggctactcgtcgatcgctcatctgggctacctgctggtggcgctgattgcggtgcaaacccatcaactgtcgctggaaaccgccggcgtttatctggccggttacctgttcagcagcctgggcgccttcggcgtggtcagcctgatgtccagcccataccgcggcccggatgcggattcgctgttctcttaccgtggtctgttctggcacaagccaatcttgtccgcggtaatgacggtgatgatgctgtcgctggccggtatcccgatgacgctgggctttatcggtaagttcttcgtgatcgcgatgggcgtcagcgcgcacctgtggtggctgaccggcgcagtcgtggtaggcagcgccatcggcctgtattactacctgcgcgtgaccgtcagtctgttcctcagcgcgccggaatcgctgcagcgcgacaccccgaacaactgggcgttgactgccggtggcgtcgtggtgctgatctcagccgcgctggtgctgctgttgggggtttatcctcagccgctgatttcgctggtgcagatggctcagccgacgttctga

SEQ ID NO: 452335 - DNA, 1530 bp, Serratia marcescens
atgctattaccttggctaattcttatcccctttatcggcggtctgctgtgctggcagcttgagcgcttcggtactaaggtgccgcgctggatagcgctgatcgcaatggggctgacgttggcgctctctctgcagctgtggatgcagggcggctatacattgaccacgccgaaaggcattccgcagtggcagagcgaattcctgctgccgtggatcccgcgcttcggcatctccatccacctggcgctggacggtctgtcgctgctgatggtggtgttgaccggtctgctgggcgtgctggcgatcctctgttcctggcgtgaaatccagaagtatcagggcttcttccacctcaacctgctgtggatcctgggcggcgttatcggcgtgttcctcgccatcgacatgttcctgttcttcttcttctgggaaatgatgttggtgccgatgtacttcctgatcgcgctgtggggtcacaaggcgtcggacggtaaaacccgcatcaccgcggcgaccaagttcttcatctacacccaggccagcggtctggtgatgctgattgcgatcctgggcctggtgttcgtgcactataacgccaccggcgtgtggaccttcgattacgaagacctgctgcaaacgccgatgtcccataacgtgcaatatatgctgatgctgggcttcttcatcgccttcgcggtgaaaatgccggtggtgccgctgcacggctggttgccggatgcgcacagccaggcgccaaccgcaggttccgtcgacctggcgggcatcttgctgaaaaccgcggcctacggcctgctgcgtttcagcctgccgctgttccctgaggcttcgcacgagttcgcgccaatcgccatgtggctgggcgtgatcggcatcttctacggcgcctggatggcgttcgcgcagaccgacatcaagcgccttattgcttacacctcggtatcgcacatgggcttcgtgctgatcgccatctacaccggcagccagctggcttaccagggcgcggttatccagatgatcgcgcacggcctgtccgccgccggcatgtttattatctgcggccagctgtatgagcgtctgcatacgcgcgacatgcgtcagatgggcggcctgtgggggcgcatcaagttcatccctgcgctgtcgctgttcttcgccgtggctacgctggggatgccgggtaccggtaacttcgtcggcgaattcatgattctgttcggcagctaccaggtggtgccggtgatcaccgtgatctccaccttcggtctggtgttcgcttcggtttactcgctgatcatgatgcagcgcgcttactacggtgcgcctaaatccgaccagccgctgcagggcatgaccgcgcgcgaactgttcatcattctgctgctggtggtgttgctggttctgctgggggtttacccgcagccgattctggatacttccaacgcggcgatgagcaacgtgcaacactggtttggttcgtcagtttcagcaatttcaacaacaaggccgtaa

SEQ ID NO: 452336 - DNA, 1848 bp, Serratia marcescens
atgaacctattatatttaacaattctgctaccgctgatcgggttcctgctgttggcattttcccgcggtcgttggtctgaaaacacggcggccaccgtcggcgtgggttctatcggcctggctgcgctggtcacggtctatgtggcgatggatttcttcgcccagaaagccgccggcgtgcagctgttcgagcaaagcctgtggacctggatggccgtcggcaacttcaatatcggcgtgaccctggtgctggacggcctgtcgctgaccatgctgtcggtggtcaccggcgtcggcttcttcatccacatgttcgcttcctggtacatgcgcggtgaagagggctattcgcgcttcttcgcttacaccaacctgtttatcgccagcatggtggtattggtgctggcggacaacctgctgttgatgtacctgggttgggaaggcgtgggcctgtgcagctacctgttgatcggtttctactacaaagatccggccaacggcgcggcggcgatgaaagcctttatcgtgacccgcgtgggcgacgtgttcctggcgttcgcgctgttcatcctctacaacgagctgggcacgctgaacatccgcgagctgatgatcctggcgccgcagaaactggcggtgggcgacacggccatcacctgggcgaccctgatgctgctgggcggcgcggtcggtaaatcggcgcagctgccgttgcaaacctggttggcggacgcgatggcgggcccaaccccggtttccgcactgatccacgcggcgaccatggtgaccgcgggcgtctatctgatcgcccgtacgcacggcctgttcctgatggcgccggaagtgctgcacctggtgggcatcgtcggtgcggtcactctgctgctggccggcttcgccgcgctggtgcagaccgacatcaagcgcgtgctcgcttactccaccatgagccagatcggttacatgttcctggcgctgggcgtgcaggcatgggacgcggcgatcttccacctgatgacccacgcgttcttcaaggcgctgctgttcctgtcgtctggttcggtgatcctggcttgccaccacgagcaaaacatcttcaagatgggcggcctgcgcaagagcatcccgctggtgtacgtctgcttcctggtgggtggcgctgcgctgtctgcgttgccgctggtcacggccggcttcttcagtaaggacgagatcctggcgggcgcgatggccaacggccacatcaacctgatggttgcgggcctggtcggtgcgttcatgacctcgctgtacaccttccgtatgattttcatcgtgttccatggcgaagagaaaatcaaagcgcatgccggtaaaggcatcactcaccacctgccactgctggttctgctggtgctgtccaccttcgtcggggcgatgatcgtgccgccgttgcagggcgtgctgccggagaccaccgagctggcgcacggcagcgtgctgcggcttgaaatcacctccggcgtggtggctatcgtcggcattctgctggcggccgcgctgtggctgggcaaacgcagcctggtcaacagcatcgccaacagcgcgccgggtcgtttcttctcgacctggtggttccatgcctggggcttcgactggctgtatgacaaagtgttcgtcaagccgtacctgggcattgcgaagctgctgcaacgcgatccgctgaactcgctgatgaatctgccggccgtcttctcccgctgggggaaccgcggtctgacggtgagcgagaacggtcaggtgcgttggtatatagcgtctatgggtgtgggtgcagtggtcgtattggctctgttgattttggtttaa

SEQ ID NO: 452337 - DNA, 303 bp, Serratia marcescens
atgatccctcttcaacatggcctgatcctggcggctatcctgtttgtgctcgggctgaccgggctgctggtgcgccgcaacctgctgtttatgctgatcagcctggaagtgatgatcaacgctgcggcgttggcgtttatcgtggcgggaagctactggggccaggcggacggacaggtgatgtacatcctggcgatcagcctggcggcagccgaggccagtatcggcctggcgctgctgctgcagctctaccgtcgtcgtcataccctgaatattgatactgtcagtgagatgcgcggatga

SEQ ID NO: 452338 - DNA, 558 bp, Serratia marcescens
atggaaattgcattttatctggcaggtttgattgcggtggccgcgacgattcgcgtgatcacccataccaaccctgtgcatgcgctgctgtatctgatcgtctcgttattggcgatctcggcagtcttcttctctctcggcgcctactttgccgccgcgttggaaatcatcgtttatgcgggcgccatcatggtgctgttcgtgttcgtggtgatgatgctgaacctcggcaacgtgcagcagcaagagcgcgactggatgaagccgacggtgtggatcgggcctggcctgctgtcgctggcgctgctggtggtattgatcgtcgcgatccgcagcgtatccgatcagggtatcagcggtgagatggtcgacgcgaaggcggtgggcatcagcctgttcgggccttacgtactggcggttgagctggcttcaatgctgctgttggcgggtctggttgtcgccttccatatcggccgcgagcacaagcctggcgaggtgctgagcaacgcgccggcgagtggcgaaatggcgagaagaaaatcggaggagcaagcatga

SEQ ID NO: 452339 - DNA, 543 bp, Serratia marcescens
atgacattgaaagagttagtggttggtttcggcacccaggtgcgcagcatttggatgattggcatgcatgccttcgccaagcgtgaaacccagatgtacccggaagaaccggtttacctgccgccgcgctaccgcggccgcatcgtgctgacgcgcgatccggacggcgaagagcgctgcgtcgcctgtaacctgtgtgcggttgcctgcccggtcggctgtatctcgctgcaaaaagcggaacagaaagacggccgttggtatccggagttcttccgcatcaacttctcgcgctgcattttctgtggcctgtgcgaagaggcttgcccgactaccgctatccagctgacgccggatttcgaattgggtgagtacaagcgtcaggatctggtgtacgaaaaagaagatctgttgatctcggggccgggtaaatatccggaatataacttctaccggatggccggtatggcgattgacggcaaagccaaaggcgaagccgaaaacgaagccaaaccgatcgacgtcaaaggtctgttgccctaa

SEQ ID NO: 452340 - DNA, 978 bp, Serratia marcescens
atgagctggtttacccctgaggtgatcgacattctgatcgccgttcttaaagcggtcgtgatcctgttggtggtcgtggcgtgcggggcgttcatgagcttcggcgaacgccgcctgctcggcctgttccagaaccgttacggaccgaaccgcgtaggctggggcggctcgctgcagctggtcgccgacatgatcaaaatgttcttcaaggaagactgggtgccgagattctccgaccgggtgatcttcaccctggcgccgatgatcgcctttacttccctgttgctggcatttgccatcgtaccggtcagcccgacctgggcggtgtccgatctcaacatcggtattctgttcttcctgatgatggccggcctggcggtgtacgccgtgctgttcgccggctggtcgagcaacaacaaatactcgctgttgggcgcgatgcgcgcttctgcgcaaaccctgagctacgaagtgttcatcggcctgtcgctgatgggcgtggtgatgcaggcgggttcgttcaacatgcaggctatcgttgaatcgcaggcgcacgtctggaacgtcattccgcagttcttcggcttcgtgaccttcgcgatcgccggcgtggcggtgtgtcaccgtcacccgtttgaccagccggaagccgagcaggaactggctgacggttaccacatcgaatattccggcatgaagttcggtctgttcttcgtgggggaatacatcggtatcgtcaccgtgtccgccctgattgtgacgttgttcttcggcggctggcagggtccgttcctgccgccattcatctggttcgcgttgaaaacggccttcttcatgatgatgttcatcctgatccgcgccgcgctgccgcgtccgcgttatgaccaggtgatgtctttcggctggaaagtgtgcctgccgctgacgctgctgaacctgctggcaaccgccgcggtcattttgtacaacgctcaataa

SEQ ID NO: 452341 - DNA, 2748 bp, Serratia marcescens
atgctgactatggctacgattcatgtagacggcaaagagtatgaggtagacggagcggacaacctgctgcaggcttgtctctccctcggccttgatattccttacttttgctggcatccggcgctgggaagcgtcggcgcttgccgccaatgtgcggtaaagcaataccaaaacgcggaagatacgcgcggccgtttggtgatgtcctgtatgaccccggcatccgatggcaccttcatctccatcgatgacggcgaagcgaagcagttccgtgaaagcgtggtcgagtggttgatgaccaaccacccgcacgattgcccggtctgtgaggaaggcggtaactgtcacctgcaggatatgacggtaatgaccggccacagcttccgtcgctaccgcttcaccaagcgcacccacaacaaccaggagctggggccgtttatctcgcacgagatgaaccgctgcatcgcctgctaccgctgcgtgcgttactacaaagactatgcggacggcaccgacttcggcgtgtacggcgcgcacgacaacgtctacttcggtcgcccggaaagcggcacgctggaaagcgagttctccggcaacctggtggaagtgtgtccgaccggcgtcttcaccgacaaaacgcattccgaacgctacaaccgtaaatgggacatgcagttcgcgccgagcatttgccagcagtgcagcatcggctgtaacaccagcccgggcgagcgctatggcgagctgcgccgtatcgaaaaccgttacaacggcagcgtgaaccactacttcctgtgcgaccgcggccgtttcggttacggctacgtcaaccagaaagatcgtccgcgtcaaccgcagcagctgcgcggcgacgactggatcaccctgaacgccgagcaggcgatgcagggcgcggcggacatcctgcgtcaggcgaagaaaaccatcggcatcggctccccgcgcgccagcctggaaagcaacttcgcgctgcgcgagctggtcggcgccgagaactactacaccggtatcgctcaggcggagcaatcacgcctggcgctgatgctgaacgtgctgaagaacggcggcgttcatacgccggcgctgcgtgagatcgaagattacgacgcggtgctggtgctgggcgaagacctgacgcaaaccggcgcgcgcatcgcgctgtccgtgcgtcaggccgtcaagggtaaagcccgcgcgatggcggcggcgcagcgcgttgccgactggcagatcgcggcggtgcagaacatcggccagcacgccaagtacccgttgttcactactaacatcgacaacacccgcctggacgacatcgccgcctggaactaccgcgcgccggtagacgagcaggcacgcttcggcttcgccatcgcgcacgcgctggatagcgcagcgccggcggtgaacgatctggccgatggcctgaacaagaaagtcgacatcatcgtgcaggcgctgaccggcgcacgcaaaccgctgatcattaccggcagcaacgccggcagcgaagccatcatcgaagcggcggccaacatcgccaaagcgttgaagggccgcggttccgacgtcggcatcaccttcgtggcgggcgccgccaacagcatgggcctggcgatgatcggcggtggttcgctcgatcaggcgctggaacagctggcgagcggcgcagccgataccgccatcgtgatggaaaacgatctctatcgccatgcgccggcggcgcaggtggacgcagcgttggccaaggtcagcaacctgatcgtcgccgatcaccagcgcaccgcgatcatggacaaagccaacctgatcctctcctcggccagctttgccgagagcgacggtacgctgatcaaccaggaaggccgcgcgcagcgcttcttccaggtatacgatccggcttactacgacgacgccaagaagaatcagttcaccgtgatgctggaaagctggcgctggatgcactcgctgcactccacctacaccagccgccatgtggactggactcagctcgatgacgtgatcgccgcttgcgtcgccgcgttgccgcagctgcagggcatcgtcgatgccgcgccggacgcgactttccgcattcgcggtcagaagctggcgcgttcgccgcaccgttccagcggccgtaccgccatgcgcgccaacatcagcgtgcacgagccgcgtcagccgcaggataaagacaccatgttcgccttctcgatggaagggaacaacagcccgctggccgatcgtcagcagatcccgttcgcctgggcgccaggctggaactcaccgcaggcatggaacaagttccaggccgaagtgggcggcaaactgcgccacggcgatccgggcgtgcgcctgatcgaagcgggggagggcagcctcggttacttcgaccgcgtgccagccgccttcaatccgaacgacggctggcgtgtcgcgccttactaccacctgttcggcagcgatgaaatgtcgcagcgctctcacgtgatccagcagcgcatgccggaagcctacgtgatggtcaacccggccgacgcggcgacgcttggcgtcaacgcgggcagcctggtggagttcagctgtgcgggccagaccttgcgtctgccggtgcgtctgagtgaaaccctgacccagggccaggttggtttgccgctcggcttgccagggatcccgccgatcttggtgggtgctaaggtagacaatctgcgggaggcggcacgatga

SEQ ID NO: 452342 - DNA, 1347 bp, Serratia marcescens
atgaccaagcacattgtacgcactcccgaaacgcatccgctgacctggcgtctgcgcgatgacaagcagccgctgtggctggacgaataccgcagcaaaaacggctatgccggcgcagagaaggccctcaaaggcctggccccggacgagatcgtcggcctggtgaaagattccgggctgaagggccgcggcggcgcgggcttctccaccggtttgaagtggagcctgatgccgaaggacgaatccatgaacatccgttacctgctgtgtaacgccgatgagatggagccgggcacctataaagaccgcctgctgatggagcagctgccgcacctgctggtggaaggcatgctgatctccgcgttcgcgctgaaagcctatcgcgggtacatcttcctgcgcggcgagtacatcgaagcggcggcgcacctgcgtcgcgccatcgcggaagccaccgaagccggctatctgggcaagaacattctcggcaccgggtttgatttcgagctgatcgtgcacaccggcgccggccgttacatctgcggtgaagaaaccgcgctgatcaactcgctggaaggccgccgcgccaacccgcgttccaagccgccattcccggccagcgccggcgtctggggcaagccgacctgcgtcaacaacgtcgaaacgttgtgcaacgtgccggccattttggcgaacggcgtggagtggtacaccggcatctccggcagtgaagacaaaggcaccaagctgatgggcttctccggccgggtgaaaaatccgggcgtctgggagctgccgttcggcaccaccgcgcgcgaaatcctggaagattacgccggcggcatgcgcgacggtctgcgtttcaaagcctggcagccgggcggcgcgggcaccgacttcctgaccgccgatcacctcgatctgccgatggaatacggcgcgatcggcaaagccggcagccgtctcggcaccgcgttggcgatggcggtagaccacgagatcggcatggtgccgctggtgcgtaacctggaagagttcttcgcccgcgagtcctgcggctggtgtacgccttgccgagatggcctgccgtggagcgtgaagatcctgcgtgcgttggaaaacggcgaagggcagccgggggatatcgaaaccctcgaacagctgtgccgttccctcggcccgggcaaaaccttctgcgcccacgcgccaggtgccgtagagccactgcaaagcgcgattaaatatttccgtgaagagttcgaggcgggtatcgccgtgcagcacttcggcaacgcgcatgcgattggcggcattcagccgaacaatctgctgaagcaacgctggtaa

SEQ ID NO: 452343 - DNA, 552 bp, Serratia marcescens
atggactctcaaaaagacaatcacgcagtcaacgatgcgctcgagcccatcaatgcagccgctcctcagagcggcgttgatgcatttgtactgagcgcggaagaacgtgatgcgatcgagcacgaaaagcaccattacgaggatccgcgcgccgcttccatcgaagcactgaaaattgtgcagaagcagcgcggctgggttccggacggtgcgatttacgccatcgcggaagtgctgggcatccccgccagcgacgtagaaggcgtggccacgttctacagccagattttccgtcagccagtaggacgtcacgtgatccgttattgtgacagcgttgtttgtcacatcaccggttaccagggcattcaggccgctatcgagaagaagctgaacatcaaaccgggtcaaaccacctttgatggccgcttcacgctgctgccgacctgctgtctgggcaactgcgataaagggccgaccatgatgattgacgaggacacgcacagtcagctgaagcctgaagatatcgagacgctactggagcagtatcaatga

SEQ ID NO: 452344 - DNA, 1797 bp, Serratia marcescens
atgacagatttgacgacgcacgacgccttgcctgcctggcagacccgagatcaccttgacgacccggtgatcggcgaactgcgcaaccgttttgggccggaagcctttactgttcaggccacccgcaccggcatgcccgtggtatgggttaaacctgaccagttactggaagtaatgacgttcctgagaaaacagccgaagccgtatgtcatgctgttcgatctgcatggcgtggacgaacgtcttcgcacccaccgcgacggcctgcccgctgcggatttctccgttttctaccatctgatttccatcgagcgcaaccgcgacatcatgctgaaggtggcgctgtctgaaaaagacctgcacgtgccgacggccaccaaggtgttcccaaacgccaactggtatgagcgcgagacctgggaaatgttcggcatcaccttcgacggccacccgcacctgtcgcgcatcatgatgccgcagacctgggaagggcacccgctgcgcaaggactacccggcgcgcgccaccgaattcgatcctttcgtgttgaccaagcagaaagaagatctggagatggaagcgctgaccttcaagccggaagactggggcatgaagcgcggcaccgagaacgaagacttcatgttcctcaacctcggcccgaaccacccgtctgcgcacggtgcgttccgcatcattctgcagctggacggcgaagagatcgtcgactgcgtgccggatatcggctatcaccaccgcggcgctgagaagatgggcgagcgtcaatcctggcacagctacattccgtacaccgaccgcatcgaatacctcggcggctgcgtgaacgaaatgccttacgtgctggcggttgaaaagctggccggcatcaaggtgccggagcgcgttgacaccattcgcgtgatgctgtccgaactgttccgcatcaacagccacctgctgtacatatccaccttcattcaggacgtcggcgcgatgaccccggtgttcttcgcctttaccgaccgccagaagatctacgatctggtggaagcgatcaccggcttccgtatgcacccggcctggttccgtatcggcggcgtcgcgcacgatctgccgcgcggctgggatcgcctgctgcgtgaattcctcgaatggatgccgaagcgtctggattcctacgtgaaagcggcgctgaagaacagcattctgaaaggccgttccatcggcgtcgcgtcttacaacgccaaagaagcgctggaatggggcgtgaccggtgccggtctgcgcgccaccggcgtcgagttcgacgtgcgtaaatggcgcccgtactccggctacgagaacttcgacttcgaagtgccggtcggcgacggcaacagcgattgctacacccgcgtgatgctgaaggtggaagagctgcgccagagcctgcgcatcctcgaacagtgcctgaacaatatgccggaaggcccgttcaaggccgatcacccgctgaccacgccgccgccgaaagagcgcacgctgcagcacattgaaacgctgatcacccacttcctgcaggtttcctggggcccggtgatgccagccaacgaatcattccagatgattgaagccaccaaagggatcaacagctactacctgaccagcgacggcagcaccatgagctaccgcacccgggtacgtacgccgagctttgcgcacctgcagcagatcccatcggtcatccgaggcagcctggtttccgacctgatcgtctatctgggtagtatcgattttgtaatgtcagatgtggaccgctaa

SEQ ID NO: 452345 - DNA, 675 bp, Serratia marcescens
atggactatacgctcacccgcatagacccgaacggtgagaacgaccgttatcccctgcaaaaacaggagatcgtcgccgatcccctggaacaacaggtccaccgcacggtttacatgggtaaactcgagcatgcgctgcatgacatggtgaactgggggcgtaaaaactctatttggccgtataacttcggcctttcgtgctgttacgtggagatggtgacgtcgtttaccgccgttcacgacgtggcgcgtttcggtgcggaagtgttgcgtgcctccccgcgtcaggctgacctgatggtggtggccggcacctgcttcaccaagatggccccggtcatccaacgtctgtacgagcagatgctggagcccaagtgggtgatctcgatgggcgcttgcgccaactccggcggcatgtacgacatctattccgtggtgcagggcgtggacaagttcctgccggtcgacgtgtacattcccggctgcccaccgcgtccggaagcctacatgcaagcgctgatgctgctgcaggaatccatcggcaaagaacgtcgcccactgtcgtgggttgtcggcgatcagggcgtttaccgcgccaatatgcagtctgaaagagagcgtaaacacggcgagcgcatcgcggtgaccaacctccggacgcctgacgagatttaa

SEQ ID NO: 452346 - DNA, 438 bp, Serratia marcescens
atgtcaacaaccactgaagttatcgctcatcactgggcgctcgccgtatttctcgttgtggctatcgggctctgcggcttaatgctgctgggcgcgttcttcttgggcgggagagcccgggcgcgcgccaaacacaccccgtttgaatcaggcatcgactcggtcggcacggcgcgcatgcgtttgtccgccaagttctacctggtggccatgttcttcgttattttcgacgttgaagccttatacctgtatgcctggtcggtctcgattcgcgagagcggctgggtaggctttatcgaagccgccattttcattttggtgctattggccggtctggtttatctggtgcgcatcggcgcgttggattggactccggcgcgttcccaacgccgcagcaaaccgagcacgatcactaacaccaacagtcatccgcagtaa

SEQ ID NO: 452347 - DNA, 810 bp, Serratia marcescens
atgcagcgattagagcaactggtcggcaaagaactgtttgcccgccatgggcgtaacaaactcctgactgagcatggtattcagcttctcggttatgccaggaagatcctgcgctttaacgacgaagcctgtacctctctgatgtacaacaatattaaaggtgttctgaccatcggcgcttccgacgacaccgccgataccattctgcctttcctgctgaaccgcgtaaccgccatctatccgaagctggctattgacgtgcgcgtgaagcgcagcacgacgatggtcgatctgctggaggagggcgagatcgatctggcggtgaccacggccgatcccgaagggcatccgcacatcgtgctgcgcacgtcgccgacgttgtggtactgcgccgccgattaccattaccaggccggcgagccgatcccgctggtggtgatggacgagccaagcccgttccgttcgctggcgatcaagcagttggacgaagccggcatcccgtggcgcatcgcctacgtcgcttccacgctgtccgcggtgcgggcggcttgcaaggccggcctgggcgtgaccgcgcggccgatcgagatgatgagccctgacctgcgggtgctgggcgcggcggaaggtttgccgccgttgccggatacccagtatgcgctgtgcaaaaacgcgcagtgcagcaacgagctggcgatggccatcttcagcgcgatgcagggcggcaatgacggctatggcttcaacggcgcggaaggcggtctccagagcgatcaggatgacgccagcctggtggacgaagaagaataa

SEQ ID NO: 452348 - DNA, 1215 bp, Serratia marcescens
atgtcccccattgagaaatccagcaaactggacaacgtctgctatgacattcgcggcccggtgcttaaagaagctaaacgtcttgaagaagaaggcaataaagtcctgaaactgaacatcggcaaccctgccccgttcggcttcgacgccccggacgaaatcctggtcgacgtgatccgcaatctgcccacggcgcaaggctactccgattccaaaggcctcttctcggcgcgtaaagcgatcatgcagcactatcaggcgcgcaacatgcgtgacgtgaccgttgaggatatctacattggcaacggcgtctccgagctgatcgttcagtccatgcaggcgctgctcaacagcggcgacgaaatgctggtgccggcgccggactatccgctgtggaccgccgcagtgtcgctgtccggcggcaaggccgtacattacctgtgcgatgagcaggccggctggttcccggatctggacgacatcatcagcaagatcaccccgcgcacccgcggcatcgtgatcatcaacccgaacaacccgaccggtgcggtctacagcaaagcgctgcttgagcagatcgtcgagatcgcccgtcaacacaacctgatcatcttcgccgacgagatctacgacaagatcctgtacgacgaagcagagcaccactcgatcgccgcgctggcgccggatctgctgaccgtgaccttcaacggcctgtcgaagacctaccgcgtggcgggtttccgccagggctggatggtgctgaacgggccgaaaaagcacgccaaaggctatatcgaagggctggagatgctggcttcgatgcgcctgtgcgccaacgtgccaatgcagcacgcgattcagaccgcgctgggcggttatcagagcatcaacgaattcattcagcccggcggccgcctgtacgaacagcgcaaccgcacctgggaattgctcaacgacatcccgggcgtctcttgcgtgaagccgcagggcgcgttgtacatgttcccgcgcatcgatgccaaacgcttcaacatccacgacgaccagaaactggtgctggatctgttgctgcaggaaaaagtgctgctggtgcagggctccgcgttcaactggccttaccccgatcacgtgcgcatcgtcaccctgccgcgcgtagacgaactggaaatggcggtcggcaagctgggccgcttcctggaaggctatcaccaataa

SEQ ID NO: 452349 - DNA, 600 bp, Serratia marcescens
atgagtcagagccatttcttcgcccatctgtcccgcctgaaactgatcaaccgctggccgctgatgcgcaacgtgcgcaccgagaacgtctccgaacacagtctgcaggtggcctttgtcgcccacgcgttggcggtgatcaagaaccgcaaattcaacggcaacctcaacgccgaccgcgttgcgctgttggcgatgtaccatgacgccagcgaagtgatcaccggcgacatgccgacgccgatcaaatactacaatccgcagatcgcccatgagtacaagaagatcgaaaagatcgcccagcaaaagctgctggacatgatcccggcggagctgcgcaacgattttcgcaccattctcgatgagcattattacagcgaagatgaaaagcaggtggtgaagcaggctgacgcgctgtgcgcctacctgaaatgcctggaagagctgtctgccggcaacaacgaattcaccctggccaaggcgaggctggataaaaccctggaacagcgccgcagcccggagatggactacttcatggaagtgttcattcccagcttcagcctgtcgctggacgaaatcagcctcgacagttcgctgtaa

SEQ ID NO: 452350 - DNA, 1833 bp, Serratia marcescens
ttgaacagcgaattactgtgggtgctgagtttactgctgattgccatcgtgctgtttaccaccaacaagctgcgcatggacgtggtggcgctgttggtgatcatcgccttcgtgctgagcggcacgctcagcctgcaggaggcgacggtcgggttcagcgatcccaacgtgattctgatcgccgcgctgttcgtgatcggcgaagggttggtacgcaccggggtggcctatcaggtgggcgactggttggtgaaagtggccggcagcagcgaaaccaaaatgttgatgctgctgatggtgacggtcgccgggctgggggcatttatgagctcgaccggcgtggtggcgatctttatcccggtggtgctcagcgtgacggccagaatgaagatcgcgccggggcggctgatgatgccgctcagctttgccgggcttatcagcggcatgatgacgttggtggccacgccacccaatatggtggtcaacagcgagctggtgcgcgaaggcatccatggtttcggtttcttcagcgtgacgccgatcggcctggtggtgctggcgctgggcgtcggctacatgctgatcgcccggcgttggctgggcagcggtgacacgggcaaagccggcgacggctggcagcgccgcaccttccgcgatctgatccgcgattacagactgaccggccgcgcgcggcggctggctgtccgcagcgcttcgccgctgattgggcgttcgctggacgagctgcacctgcgcgcgcgctatggcgccaacgtggtgggcatcgagcgctggaaacgcttccggcgggtgatggtcagcgcctccggcagcaccgagctgcgcgagggcgacgtcctcttgatcgacatgtcggacagccaggtcgatctgcgcgaattctgcggcgagcagcggctggagccgatggtgctgcgcggcgattacttctcggaacagtcgcgcaacgtcggcatggcggaggtctcgctgatccctgactcggcgctgctgggcaaaagcctgcgcgaagcggcgttccgcagccgctacgatctgaacgtggtgggcatccgccgccacggcgagacgctcggcggcaaactggtggacgagccgctggagctgggcgacattttgctggtgatcggcgactggaaggcgatccgtcaactgcaggccaaaacccatgactttatcgtgctcaacttgccggccgaagtggacgaagtggcgccggccatcacacaggcgccgcacgcgctgttttgcctggcgttgatggtggcgatgatgctgaccgacgaaatccccaacccgatcgcggcgctgatcgcctgtttgctgatgggcaaattccgctgtatcgacatggagagcgcttataaatcgatccattggccgagcatcattttgatcgtcggcatgatgccgttcgcgcaggcgctgcaaaagaccggcggggtcagtctgatcgtcagcgggctgatggatgtcgccggcggggcggggccgcgcgtgatgctgctgtgcctgttcgtcttgtgcgcgactatcgggctgtttatttccaacaccgcgacggcggtgctgatggcgccgatcgccatcgccgccgcgcgcgaaatgggcgtctcgccatacccgttcgcgatgattatcgccatcgccgcgtccgccgcctttatgacgccggtctcttcaccggtcaacacgctggtgctggggccgggcaattacaagttcggcgatttcgtgcgtctcggcgtgccgttcaccctgctggtgatggcggtcagcgtgattgtggtgccgtggctctatggtttttaa

SEQ ID NO: 452351 - DNA, 657 bp, Serratia marcescens
gtggagtgtaagggttttctgttcgatcttgatggcaccctggtggattcgctgccggcggtagagcgcgcctggacgcactgggccgagcgtcgcggcgtcgatccgcaagcggtgctggacttcattcacggtaaacaggccattacttctctgcgccactttatgccgggtgaaagcgaagcggaaattcagcgcgagttccaactgctggagcaggtggaagcgcaggataccgaaggcgttcgcgcgctgccgggcgccatcgcgttgttggagcgcctgaacgcgctcggcatcccttgggcgatcgtcacctccggttcggtgccggtggccggcgctcgccgccaggccggcggtttgccgcagccggcggtgttcatcaccgccgagcaggttaaacacggcaagcctcagcccgatgcctacctgctgggcgccgaacgtctggggctggcgccgcacgagtgcgtggtggttgaagacgcgccggccggcattctttcggggctggcggcgggctgccaggtgattgcggtcaacgccccggccgacgcgccgaagctggagcaggttgacctgcggctggattcgctggcgcagatcgccgttgataaaacggcgcagggcgcgatcgttcgcctactggcctga

SEQ ID NO: 452352 - DNA, 495 bp, Serratia marcescens
atggaaatgacccatgcccagcgcctgatcctgtcgaatcagtacaagatgatgacgctactcgatccggacaacagcgatcgttatcgccggttgcaaaccatcgtcgaacgcggcttcggcttgcaaatgcgcgagctggatcgtgactttggcgaactgagcgaagaggtgtgccgcaccatcatcaacgtgatggagatgcaccatgcgctgcaggtttcctggggcaatctgaaagagaaacaggggctggacgagcgccgcctggcgtttctcggcttcgacgccgccaccgaggcgcgctacctgagctatgtgcgtttcctggtcaacaccgaggggcgctatactcacttcgattccggcagccacggtttcaacgcccagaccaaaatgtgggaaaaataccagcgtatgctggcgatctggctggcctgcccgcgccagtatcacttgagcgccgttgagatagcgcaaatcatcaatgcttga

SEQ ID NO: 452353 - DNA, 456 bp, Serratia marcescens
atgacgagcaaaccgtccggttccgtaagctggtttcaggtcttccagcgcgggcagcattatatgaaaacctggccgtcagacaaacgtctggcaccggtctttccggagaaccgcgttgcgcgtgccacccgtttcgctatccgtttcatgccgccgttggcgattttcacgctgacctggcagatcgcgctgggcggccagctcggcccggcgatcgccaccgcgctgttcgcctgcagcctgccgatgcagggcttgtggtggctggggcgtcgctctgttacgccgctgccgccgacgctgctgcaatggttccatgaggtgcgcaacaagctgacggaagccgggcaggcggtggcgccgctcgagggcacgcccacctatcagacgttggccgatctgcttaagcgcgccttcaagcagttggataaaaccttcctcgacgatctgtaa

SEQ ID NO: 452354 - DNA, 1203 bp, Serratia marcescens
atgtcgagtaagctagtactggttcttaactgcggcagttcttctctgaaattcgccatcatcgatgccgttaacggcgacgaattcctctccggtttggccgagtgtttccacctgcctgaagctcgcatcaagtggaaaatggacggcgccaaacacgaagctgccctgggggccggcgctgcacacagcgaagcgctgaacttcattgttaatactattctggcacaaaaaccagagctttctgcgcagctgaccgctatcggccaccgcatcgtgcacggcggcgagaagtttaccgcttccgccgtgatcaacgacgaagttctgcagggtatcaaagattccgtgccgtttgcaccactgcacaacccagctcacctgatcggcatcgcggaagcgctgaaatccttccctcacctggctgacaagaacgttgccgtgttcgacaccgcgttccaccagaccatgccggaagaatcttacctgtacgccctgccgtacagcctgtaccgcgaccacggcgttcgccgctacggcgcacacggcaccagccacttctacgtgactcaagaagccgcgaagatgctgaacaagccggtagaagaagtgaacgtgatcacttgccacctgggcaacggcggctccgtcaccgcagtgcgtaacggccagtgcgttgacacctccatgggtctgaccccgctggaaggcctggtgatgggcacccgcagcggtgacatcgatccggctatcatcttccacctgcacgattctctgggcatgagcgttgaccagatcaacaagatgctgaccaaagaatccggcctgctgggcctgaccgaagtcaccagcgactgccgttacgttgaagacaactacgacagcaaagccgacgccaaacgcgccatggacgtgttctgccaccgtctggccaaatacgtcggcgcctacagcgcgctgatggaaggccgtctggacgcggtgatcttcaccggcggcatcggcgagaacgccggcatggtgcgtgagctgaccctgaacaaactgggcctgctgggcttcgaaatcgaccacgaccgcaacatggccgctcgcttcggcaaatccggcgccatcaccaaagacggcagccgcctggcgctggtgatcccgaccaacgaagagttggtcatcgcgcaggacgcatcccgcctgaccgcgtaa

SEQ ID NO: 452355 - DNA, 2157 bp, Serratia marcescens
gtgtcacgtactattatgttgatccccaccggcaccagcgtcggcctgaccagcgtcagcctgggtgtcatccgctccatggagcaaaaaggcgttcgtctgagcgtgttcaaacctatcgctcaaccgcgcaccggcgacaacgcactcgaccagaccaccaccatcatccgcagcaactccaccattccggcggccgaaccgctgcgcatggactacgttgagggcctgctgagctccaaccagcaagacgtgctgatggaagagatcgtggctcgttaccacgagaacaccaaagacgcggaagtggtgctgatcgaaggcctggtgccgacccgcaagcatcagttcgccaacgcgctgaactacgagatcgccaaaaccctgaacgccgagatcgtcttcgtgctggcgctgggcaacgactccccggcgcagctgaaagagcgcatcgaactggcgcgcaccagcttcggcggcagcaagaacaaaaacatcaccggcgttatcatcaacaagctgaacgcgccggtcgacgatcagggccgcacccgtcctgacctgtccgaaatcttcgacgactccaccaaggccagcatcgcccacgtcgatcctgcacagctgttcgccaacagcccgctgccggttctgggctgcgtgccgtggagtttcgatctgatcgccacccgcgccatcgacatggctcgccacctgaaggcccgcgtggtcaacgaaggcgacatcatgacccgccgcgtgaagtccgtgactttctgtgcgcgcagcatcccgcacatgctggaacacttccgccctggctccctgctggtgacctccgcagaccgccctgacgtgctggtctccgcctgcctggcggcgatgaacggcgtggaaatcggtgccatcctgctgaccggcggctacgccatcgacgagccgatcaagaagctgtgcgaacgcgccttccaaaccggcctgccggtgttcatggttgacaccaacacctggcaaacctcgctgagcctgcagagcttcaacctcgaagtgccggcggacgaccaccagcgcatcgagaaagtgcagaactacgtggccagccacatcagcaccgagtggatcgactcgctgaccgctacctctgagcgttcacgccgcctgtctccaccggcgttccgttacgaactgaccgagctggcgcgtaaagccggcaaacgcatcgtgctgccggaaggcgacgagccgcgcaccgtgaaagcggctgccatctgcgccgaacgaggcatcgcggaatgcgtgttgctcggcaacccggacgagatccagcgcgtcgcggcggcgcaaggcgttgagctgggtaaaggcatcgaaatcgtcgatccggtcgccgtgcgtgaaaactacgtgccgcgtctggttgagctgcgcaagagcaagggcatgaccgaagtggtcgcgcgcgagcagctggaagacaacgtggtgctcggcaccctgatgctggaacaaggcgaagtcgacggcctggtctccggtgcggttcacaccaccgccaacaccatccgtccgccgttgcagctgatcaaaaccgcaccgggcagctcgctggtctcctccgtgttcttcatgctgctgcctgaccaggtactggtctacggcgactgcgcgatcaacccggatccgaccgccgagcagctgtctgaaatcgccatccagtctgcggattccgccgcggccttcggcatcgagccgcgcgtggcgatgatctcctactccaccggcaactccggtgcgggcagcgacgtcgagaaagtgcgcgaagcgacccgtctggcgcaggaaaaacgcccggacctgatcatcgacggcccgctgcagtacgacgccgccatcatggccgacgttgccaagtccaaggcgccgaactcaccggtagccggccaggcgaccgtgttcatcttcccggatctgaacaccggcaacaccacctacaaagcggtacagcgttccgctgacctggtctccatcgggccgatgctgcaaggcatgcgcaagccggtgaacgacctgtcgcgcggcgcactggttgacgatatcgtctacaccgttgcgctgacggcgatccagtcttcccaggctgatgctgccgccaaggcctga

SEQ ID NO: 452356 - DNA, 960 bp, Serratia marcescens
atgtttaacgtagtgacgcagttggaaaacgacgccgtcgaaatgcgcaaagtctacgccggcgcggtgcggcggcagattgaggcgggcgcgccgatcatcgcgctggaggcggatttgatgagctcgatggcgatggacggcgtgcataaggatcacccgcagcacgtgattaactgcggcatcatggaggctaacgtgatcggcgtcgccgccgggctgtcgctgaccggccgggtgcctttcgtgcacacctttaccgccttcgccagccgccgctgtttcgatcagctgttcatgtcgctggattatcagcgcaacaacgtcaaggtgatcgcttccgacgccggggtgagcgcctgccacaacggcggcacccacatgtcgttcgaggatatgggcatcgtgcgcgggctggcgcactcggtggtgctggaagtgaccgacgccaccatgttcgccgacattctgcgccagctgatggatctgcgcggcttctactgggtgcgcaccatccgcaagcaggcgacgcgcatctaccaggacggctcgcgctttaccatcggcaagggcaacctgctgcgcgacggagacgacattacgctgattgccaatggcatcatggtggcggaggcgctgaaggcggcgcagatgctggcgcagcagggcgtcagcgcggcggtgatcgatatgttcaccctcaagcctatcgaccgtgaactgatcaaaacctatgcggccaaaaccgggcgcatcgtcacctgtgaaaatcacagcattcataatgggctgggatcggcggtggcggaggtgctggcggaagagtgcccgacgccaatgcggcgcgtgggggtgaaggagcgttacggccaggtgggcacccaggcatttctacagcaggagtacggtctgaccgccgagcatattctggaggctgccgggcaattgctggcgcgttag

SEQ ID NO: 452357 - DNA, 852 bp, Serratia marcescens
atgaacgacacaacgagcgaaacggaaattgaagagctgcgcgccctggcgcgcgccatccgcctggaaacattgaaggcgttgaccgggctggggttcggccactacggcggctgcatgtcggtggtcgagacgctggcggtattgtacggcggcgtgatgcgcatcgatccggcggatccggactggccggagcgcgatgacttcgtgctgtcgaaggggcacgccggcccggcgctgtacagcacgctggcgatcaagggctacttcccgctggcggagttgcaaaccctcaatcagaacggcacgcgcctgccgagccatccggaccggctgcgcacgcgcggcgtggatgccactaccggctcgctggggcagggcgtgtcgatcgccgccggcatggcgctgtcccatcggctggcggggcgccgcaatcgggtgttcagcatcctcggcgacggtgaactgaacgaagggcagtgctgggaggcgttccagtttatcgcccaccacaatctgaacaacctgacgctgtttatcgattacaacaaacagcagctggacggcgcgctggacgaggtgatccaaccgttcgatctggccgccaagttccgcgctttcggctttgaggtgcagaccatcaagggcgacgacattgcggcgctgctggcggcggtgaggccggcgcgcggcggagaacagcggccgctggcgatcgtgctcgacagcatcaagggacagggggtgacctatttggaaaacctgtcgaactcacaccacctgcgcctgacgccggacgtgcagcaggagattgaaaaagccatcgccgaactggaggccgcccatgtttaa

SEQ ID NO: 452358 - DNA, 282 bp, Serratia marcescens
atgaaaatcatggcgatttgcggttcaggtctcggcagcagctttatggtggaaatgaacattaaaaaggtgctgaaaaagatgggggtggaggccgaggtcgaacactccgatctgtcgtccgccactcccggcgccgccgacgtgttcgtgatggcgaaagacatcgccgacagcgccagcgtaccggccgagcagctggtggtgatcagcaacatcatcgacattaatgagctggaagccaagctgcgcgcttacttcgaagcccactcaatcatctga

SEQ ID NO: 452359 - DNA, 444 bp, Serratia marcescens
gtgctgaaagaatggctgaccgccgaccatatacagctgtgcaaacgggtggaggactggcgccaggcggtaacgctgagcgcgcaaccgctgctgcaacgcggcgtgattacgccgaattacctgacggccatctttcatcagcaggagcagcttggcccctacttcgtcctggcgccgggcatcgccatgccgcacgcgcggccggagcagggcgccaacgcgctggggctgtcgctgttgaagatccaccagggcgtgaattttcattctgcggataacgatccggttcaggtggtggtgatgctttccgcacccgacggcaacagtcacattgaaatgatttcgcagttggcggaattattttccgataacacggcgatggaggcgttatttcacgccacagacaaacggcaaattgaggatattatcgcccgctattaa

SEQ ID NO: 452360 - DNA, 1020 bp, Serratia marcescens
atgtcgatcggtaaaaaacgccgcagcacaggcagggtgacgttggctgacgtagcgcaactggcgggcgtcggcaccatgacggtgtcgcgcgcgctgcgcacgccggaacaggtttcggacaaactgcgcgagaagatagacgcggcggtaaacgagctgggctatctgcccaacctggccgccagctcgctggcctcggcctcgtcctacaccatcgccatggtggtgcccagcctgtccgaatccggctgcgccgagatgttcgccggcctgcagaaagtgctgcagcccgccggctatcacatcatgctggcggagtcgcagcaccacctggaacgcgaggagaaactgctggagacgctgctctcttacaacctggcggcggcggtgctgctcagcgtcgagcattcgcaaaatgcccgcaacgcgttgatcgccgccaacattccggtggtggagatcggtgccgtacgcgccgatccgatcgacatgagcatcggcatcgattacgtggcggccatgtatcagctgacgcaaacggtgatcgccagcggttaccagaatgtcgggctgctgtgcgccaatcaggagcagtggattttccagcagcacctgcagggctggcacaaggcgctgctgcgcaaccatatgtcgccgcatcgggtcatcaacgccgcgcagcccgccagcttcagcaccggcgcgcagcagctgccggaattcttgctggcctggccggagctggacgcgctggtgtgcgcgtcggacgaactggcgggcggcgtactgtatgaatgccagcggcggcgcatcaaggtgccggataatctggcggtggtgggcttcggcaacagcgagttcagccgggtgtgccagccgccgctgaccaccatgaccattccgcatcgcgacatcggcattcaggccggccaggcgctgttggcgcggctgaacgagcatccctcgcagccgccaggctccctgcccgccacgctgtgccgccgcgacagctgctga

SEQ ID NO: 452361 - DNA, 546 bp, Serratia marcescens
atggcggaacagggtcaggctgcagataccgagtgggttgatatcgtcgacgagcaaaacgaggtgattgctcaatccagtcgtcaacagatgcgggcggagcggctgcgtcatcgtgctacctatattgtggtgcatgatgggatgggaaaaattctggtgcagcgtcgcaccgagatcaaggacttctacccgggctggctggacgcgacggcgggcggcgtagtgcaaagcggtgaaaacgtgctggattcggcgcgccgcgaggcggaagaggagctgggcatcgccggcgtgcctttcgccgagcacggtctgttctacttcgaggaagagcagtgccgggtgtggggggcgctgttcagctgcgtatcgcacgggccgttcgcgctgcaggaagaagaagtggccgaggtgtgctggctgacgccggaagagatcaccgcccgttgcgacgagtttaccccggattcgctgaaggcgctgtcgctgtggctgacgcgcaacaatgaacaggattacggcaagccgctcgacaatcactga

SEQ ID NO: 452362 - DNA, 552 bp, Serratia marcescens
atgaagctgatgttcgcctcggatatccacggttcgctgccggcgaccgaacgcgtgctggaattgttcgcacaacacggcgccgactggttgattcttctgggtgatttgctgaatcacggcccgcgcaacgcgctgcccgccgggtatcagccctctcaggttgccgaacgattgaatcgctatagcgacaagatcatcgccgttcgcggcaattgcgacagcgaggtcgatcagatgctgctgacgtttcccatcgaggcgccctggcaacaggttttactgcaaaaaagacgattgtttttgacccacggtcacctttatcatccctcggcactgccgccgttatcctgcggtgacgtcttggcctatggccatacgcatctgccgcaggcggagcggcagggtgagatctattgcttcaatccgggctcggtcagcatcccgaaagggggctttcccgccagctacggcatgttggaaagcggcactttgcgcgtgctgacgctcgacgacggcaaggtcgtcgcggaggtggcgttaacacgctaa

SEQ ID NO: 452363 - DNA, 630 bp, Serratia marcescens
atgattgacctgtattacgcgcctactcccaatggtcacaagatcaccttgtttttggaagaggtcggcttaccctaccgtatccatcgcgtaaacatcagcgccggcgagcagttcaagccggactttctgagcatttctcccaacaacaaaatcccggcgatcgtcgatcagcaaccggtggacggcggcgcgccgatcagcctgttcgaatccggggaaatcctgctgtatctggcggagaagaccggcaagctgctgagcaagggcctgcgcgaacgcgccgctaccctgcagtggctgttctggcaagtggccggattcgggccgatgctcgggcagaatcaccactttaaccactacgcgccgcagccggtgccttacgccatcgagcgttaccatctggagaccaagcggctgtacggcgtgctggaagctgaactgcaaaaacacccgtacctgggcggcgataactacagcatcgccgatatcgccacctacccgtgggtcgtgtcgcatccgcgccagcgcatcgatctggcggattacccggcggtgcgcaactggttcgagcgcatcagcaatcgcccggcgaccgagcgcgcctacaaactggccgaacaagcctaa

SEQ ID NO: 452364 - DNA, 372 bp, Serratia marcescens
atgtctttcagtcaacccgacgccgttattcgcattaaaaatctgcggctgcgcacgttcatcggtatcaaggaagaggaaatcaacaaccgacaggacgtcctgatcaacgtggtgatccactacccggcggacaaggcgcgcaacagcgaagatatcgccgatgcgctcaactaccgcaccatcaccaaagcgatcatccgccatgtggaagataaccgtttcgcgttgctggaaaaattaacgcaggatgtgctcgatatcgtaaaagaacacgcctgggtgacctatgctgaagtggagatagataaacttctggccctgcgctacgccgactcggtttccatgaccatgagctaccgccgggactaa

SEQ ID NO: 452365 - DNA, 915 bp, Serratia marcescens
atgcggatcctgatcaccggcgcaacgggattgataggcagcagcctgacggcaagactgctggcgctttctcaccacattacggtgctgacccgagacgaacggcgagcccgagcccggctgggcgaccggccgagctattggcgaacgctggacgaccggcaatcgctggatgaatttgacgcggtgatcaacctggccggcgaacctatcgccgacaagcgctggagcgtgcagcagaaagagcggctgtgccgcagccgctgggatctgaccgaacgcttggcgaagctgatcaaggccggcagcacgccccccggcgtgctgatttccggttccgccgtcggctactacggcgatcaggggcaggcggtggtgaccgaagaggagccgccgcacgacgaattcacccaccagctgtgtcaacgctgggaagcgctggcgctgcaggcgcaaagcgacgccacccgcgtctgcctgctgcgcaccggcgtggtgctggcgccacagggcggcgcgctggccaaaatgctgccgccgttccgcttcgggctcggcggcccgatcggcgacggtcgccaatacctgccgtggatccacctcgaagacatggtcaacggcattatttatctgctggatcacgccaccctgagcggcccgttcaacatggtcgctccctacccggtgcacaacgagcaattcgccgcccaattggccaacgtgctcgatcgcccggcgtttctgcgggtgccggcgttcgtcatgcggctgttgatgggggaagcggcggtgctggtgctcggcggccagcgggcggtgccgaagcgcctggaagaggccggtttccacttccgttatctggagctggaacaggcattggatgacgttgtcaatcagcgggccgaagcccgctga

SEQ ID NO: 452366 - DNA, 774 bp, Serratia marcescens
atgtctgagaataaattagccgtcacggaactgcacaaacgctatggcgatcacgaggtgctgaagggcgtctcgctggcggccaacgccggggatgtgatcagcatcatcggctcctccggctccggcaaaagtacctttctgcgctgcatcaacttcctcgagaagccgagcgaaggctcgatcagcctgaacaacgaagatattcgcatggtgcgcgacaaggacggccagctgaaggtattcgacaagaagcagctgcagctgctgcgtacccgcctgaccatggtgttccagcattttaacctgtggagccatatgacggtgctggagaacgtgatggaggcgccggtgcaggtgctggggctgagcaaggccgacgcgcacgagcgcgcggtgcgctacctggataaagtgggcatcgacgagcgggcgcgcggcaagtacccggtgcacctgtcgggcggccagcagcagcgcgtctccattgcccgcgcattggcgatggagccggaagtgctgctgtttgacgaaccgacgtcggcgctggatcccgagttggtgggcgaggtgctgcgcatcatgcagaagctggcggaggagggaaaaaccatggtggtggtgacgcacgaaatggaatttgcgcgccacgtttcgaaccacgtgatcttcctgcacaaagggttgatcgaagagcagggcccgccggccgagctgttcggcaatcccaaaagcccgcgcctgcagcagttcctgtccggcgcgttgaagtaa

SEQ ID NO: 452367 - DNA, 705 bp, Serratia marcescens
atgatcgagattttgcaacagtattggcagtcgctgctgtggagcgacggctaccgtttcaccggcgtggcggtcacgctgtggctgctgatcgcctccgtggtgatgggcgggttgctggcgatcccgatggcggtggcgcgcgtctcttccctgcgctgggtgcgtttcccggtgtggctctacacctacgtgtttcgcggcacgccgctgtacgtgcagttgctggtgttctactccggcatgtacagcctggaaatcgtgcgcggcagcgagtttctcaacgcgtttttccgcagcgggctcaactgcaccatcctggcgctgacgctcaacacctgcgcgtatactaccgagatcttcgccggggcgatccgctcggtgccgcacggtgaaatcgaggccgccaacgcctacggtttctcgcgcttcaagatgtatcgctgcatcattttgccttcggcgctgcgcaccgcgctgccggcctacagcaacgaagtgatcctgatgctgcactccaccgcgctggcgtttaccgccaccgtgccggacctgctgaagattgcgcgcgacatcaatgccgcgacctatcagccgttttacgctttcggcattgcggcggtgttgtacctgatcatctcctacgtgttaatcagcctgttccgcaaagctgaaaaacgctggatggcacacgttagtcactga

SEQ ID NO: 452368 - DNA, 687 bp, Serratia marcescens
atgctgcaaggctattcccaactgattttcgagggggctctggtgacgctggagttggccctcagttccgtattgttggcggtggtgatcgggttgatcggcgccggcggcaaactctcccacaacccccttatttccggcctgttcggcgcttacaccacgctgatccgcggcgtgcccgatctggtgctgatgctgctgattttttatggcctgcaaatcgccttgaacaacatcaccacgctgctcggtttctcgcagatcgatattgacccgctcggcgccggcatcattaccctcggctttatttacggcgcgtactttaccgaaaccttccgcggcgcctacttggcggtgccgaaagggcagattgaggcggcgacggcctacggcttcagcggcgcgcagatctttcggcgcattttgttcccggcgatgatgcgcttcgccttgccgggcatcggcaacaactggcaggtgatcctgaaggcaacggcgctggtgtctatccttggcctgaacgacgtggtgaaagccacgcagttggcggggaaaggcacctatcagccgttcttcttcgccatcgtagccggcgtggtttacctgattttcactaccgtttccaacggcgtgctgttgtggcttgaacggcgttactcactgggcgtcaagagggccgagctatga

SEQ ID NO: 452369 - DNA, 783 bp, Serratia marcescens
atgaaaaagctggttaaggttcttcctttagtcttggctttggcggccgcaaacagcgcattcgccgctatcccatcgacattgaagattggcaccgatccgacttatgcgccgtttgaatccaaaaacgccaaaggcgagctggtcggcttcgatatcgatttggccaaagagctgtgcaaacgcataaatacccaatgcaccttcgtggagagcgactttgacgcgctgatcccatccctcaaggcgaaaaagatcgacgctatcatctcttcgctgtccatcaccgaaaaacgccagcaggaaatcgcctttaccgacaagctgtatgccgccaacgcccgcctgatcgcgccgaaggggtctaagctgttgcctaccgtggatgcgttgaaaggcaagagcgtgggcgtgctgcagggcacgacccaggaagcctacgccaacgccatgtggcagccgaagggcgtcaccgtggtgccttatcagaaccaggatctggtctacgccgatctggcctccgggcgcatcgacgccgccttccaggatgaagtggcgggcagcgatggcttcctgaaacagccgccgggcaaagactatgcgttcgccggcgaatcggtgaaggatgacaaattctttggcgtcggcaccggcatggggctgcgcaaaaccgataccgagctgaaagcggcgctggacaaagccttcgccgagatgcgcaaagacggcacctacgataaatacgcgaaaaagtacttcgacttcgacgtctacggcggctaa

SEQ ID NO: 452370 - DNA, 573 bp, Serratia marcescens
atgaaacgactcatcatcggcatttccggcgccagcggcgcgatctacggcgtgcgcctgttgcaggtcttgcgcgacgtcgcagaggtggaaacccatctggtgatgagcaacgctgcaaggcagacgctggcgctggaaacgccgtacagtctgcgtgaagtgcaggcgctggccgatgtggctcacgatgcgcgcgatatcgccgccgccatctcttccggttccttcaaaaccctgggcatggcgattttgccttgttcagtcaaaacgctgtccggcatcgtcaacagctacagcgacgggctgctgacccgcgccgccgacgtggtgctgaaagaacgccgccgcctggtattgtgcgtgcgtgaaacgccgttgcaccttgggcacctgcggctgatgacgcaggcggtggaaatgggcgcggtgatcatgcccccggtgccggcgttttatcaccagccgaaaagcgtggaagacatcatcgatcagaccgtcaatcgggtgatcgatcagtttgatatcgaattgccggccgatctgttcacccgttggcagggtgctgattaa

SEQ ID NO: 452371 - DNA, 1518 bp, Serratia marcescens
atgtgcggtattgtcggtatcgccggttttatgccggtaaaccagtcgatttatgatgcgctgacggtgcttcagcaccgtggccaggatgccgcaggcatcgtcaccattgacgcccacaacgggttccgtttgcgcaaagccaacggcctggtgaaggatgtgtttgaggcgcgccatatgcaacgcttgcagggcaacatgggcattggccatgtgcgttacccgacggccggcagctcgagcgcctctgaggcccagcctttctacgtcaactcgccgttcggcattacgctggcccacaacggcaacctgaccaacgcccatgagctgcgccaaaagctgttcgaaagcggccgccgccatgtcaacaccacctccgactcggaaatcctgctgaacgtgctggccagcgagctggatcgcttcccgcattatccgctggaggccgacaacatctttaccgcggtcgccgccatgcatcagcaactgcgcggcgcttacgcctgcgtggcgatgattatcggccacggcctgctggcgttccgcgacccgtacggcattcgtccgctggtgatcggcaaacgcacgctggaagatggccgcagcgagtatatggtggcttccgagagcgtggcgctggataccctgggctttgaattcctgcgcgacgtggcgccgggcgaagcggtgtacatcaccaccaagggccagctgttcacccgccagtgcgcagagaatccgaaaaccaatccgtgcctgttcgaatacgtttatttcgcgcgcccggactcctttatggacaagatctcggtctacagcgcccgcgtacgcatgggccagaagctgggcgagaagattgcccgcgaatgggaagatctggacatcgacgtggtgatcccgattccggaaacctcctgcgacatcgcgttggagatcgcgcgcattctcgacaaaccctaccgccagggctttgtgaagaaccgctacgtcggccgcaccttcatcatgccgggccagcaggcgcgtcgtcagtcggtgcgccgcaagctgaacgccaaccgcgccgagttccgcgacaagaacgtgctgctggtggatgattccatcgtgcgcggcacgacctcagagcagatcgtcgagatggcgcgcgaagcgggcgccaagcgcgtgtacctggcttccgccgcgccggaagtgcgtttccctaacgtctacggcatcgacatgccgagcgccaacgaactgatcgcccacgggcgcgaagtggatgaaatccgccaaatcatcggcgccgatgggctgatcttccaggacctcgacgatctgatcgaagcggtgcgtgaagaaaacccggacatcacccagttcgaatgctcggtattcaacggcatctacgtgaccaaagacgtcgatcaaagctatctggaatacctggagtcgctgcgcaacgacgacgccaaggcgctgcggggacaaaccgaagcggaaaatctggaactgcataacgaaggctaa

SEQ ID NO: 452372 - DNA, 501 bp, Serratia marcescens
atggtctggattgattacgtcattatagcggtgattggattttcggctctggtgagcctgatccgagggtttgttcgcgaagcattgtcacttgtgacatggggatgtgcgttttttgttgccagccatttctactcttaccttgcggtctatttcactcgttttgaagatgaactggtgcgaaacggcatcgcgatcgcgattttgttcatcgcgaccctgatcgtaggggctattgttaactatgtgattagctcactggtagagaaaaccgggctgtcgggcaccgacagggtgctgggcatctgcttcggcgcattgcgcggcgtgttgatcgttgcggcgatcctgttcttcctggatacctttaccggcttttcacaaagtgccgactggaaacagtcgcagctgattccccagttcagttacgtcatcaggtggttctttgactacctgcagagcacgtcgagtttcttgccgacccaattgccggggcggtag

SEQ ID NO: 452373 - DNA, 753 bp, Serratia marcescens
gtggcgagtaaatttcagaaccgactggtcggaaccgtgattctggtggcgctgggggtgatcatcctgccagggttgctggacggcaaaaagaagcattacgaggatgaattcgcggccattcctttggtgccgaaggcgggcgacgtcgaagagaacgacgtgttgccgccggtgacgcagccgttgccggcgcagccgccggaaggggcgggggcgctggtcgagcagcaggcggctaacgaagcggcggcgcaacaggcggtgcggcagaatgctcagcaaccgacgcaggtggcgcagccgccggtcgagacgcgtcctcagccggtgcagcagcagcctaagccgaaaccggtggaaaccaaaccggtagaggtgaaaccgaaaccggcgccgcagccgaagccggtggaagtgaaaccgacgcctaagccggagccgaaacctgaaccgacgccgaagcctgagccggcaccgcagccgaaaccggcggaagaaaaagcgccggccgggcaagcctatgtcgtgcagctcggggcgttgaagaatgccgccaaggcgaacgagattgtcgcttcgctgcgtctttcgggctatcgcgccttcactgtgccgtcaacgccggtgcaagggcagatcacccgcatctacgtcggcccggatgcttccaagcagaagctgcaggcggcattgccgtcgctgaactcgatcagcgggctgagcgggcaggtgaagccgtacggtcgttaa

SEQ ID NO: 452374 - DNA, 1266 bp, Serratia marcescens
atgcaaaaccaccaaattccccaagccacgtcgccattgagctcgtggctttactatctggaacgtctgcacagccaggcgatcgaactcggcctcgagcgtgtacagcgcgtcgcggcgcatctggacttactgacccccgctcccacggtgttcaccgttgccggcactaacggcaaaggcacgacctgtcgcacccttgaagctattctgctggccgccggcctgcgcgtcggcgtttacagctcaccgcatctggtgcgctacaccgaacgtgtgcgcattcagggggaagagctgagcgaagcggagcacagccgctcgtttgccgccattgaagccggccgcggcgaaacgtcgctgacctatttcgaattcggcaccctgtcggcgctgcagctgttcaaacaggcgcggctggacgtggtgatcctggaagtcggcctgggcggacgtctcgacgccaccaacatcgtcgatccgagcgtggcggtgatcaccagcatcgcgctcgatcacaccgactggctgggcaacgatcgcgaaagcatcggccgtgaaaaggccggcattttccgcagcggcaagccggcggtagtgggcgaacccgacatgccggacagcattcgccaggtcgccgaaacgctgggcgcgccgctgtatcgccgcggtgaagcctggagcttcagcgagcagggcgatcgctggcagtggcagggcggcgacacgctgctgaccgatctgccgacgccgaacgtgccgctggccaacgccgctaccgcgctggcggcgctgaactgttccccgctggaaatcgacgagcgcgcgatcttcaccgggctgcagcaggcgacgctgccggggcgtttccagatcgtgcggcgggagccgatgctgatcctcgatgtggcgcacaacccgcacgccgccggctatctcgccgggcgtctggccaagctgccgcgcgacggcggcaaggtgcgcgcggtggtgggcatgctgtcggacaaggacatcgccggtacgctggcctgcctgagcgagcaggtggatgaatggtactgcgcaccgctcgacggcccgcgcggcgccagcgtcgaactgctggcgcaacatctggcggaaccgcgacgctttaatgatgtcgaaactgcctggcggcaggctatgcaggatgctgataaacaggatattgtgatcgtctgtggatcgttccacaccgttgcgcaggtgatggcggcgtcagacgagatgcggggagtgtga

SEQ ID NO: 452375 - DNA, 909 bp, Serratia marcescens
atgagctggattgaacgaattcttaacaagagcaatatcacacaaacccgtaaggcgagcattcctgaaggggtctggaccaaatgcgacagctgcggccaggttctctaccgcgccgagctggagcgtaatctggaagtgtgtccgaagtgcgaccaccatatgcgtatgagcgcgcgcgcgcgtctgcataccctgctggatgaaggcagcgaagtggagctgggcagcgatctggagccgaaagacgttctgaaattcaaggattccaagcgctataaagatcgtctggtcgccgcacagaaagcgaccggcgagaaagatgcgctggtggtgatgaagggcacgctgtacggcatgccgatcgtcgccgcgtccttcgaattcgccttcatcggcggttcgatgtcttccgtggttggcgcgcgtttcgtgcgtgcggttgagcaggcgttggaggacaactgtccgctggtgtgcttctccgccagcggcggtgcgcgcatgcaggaagcgctgatgtcgctgatgcagatggcgaaaaccagcgcggcgttggccaaaatgcaggagcgcggcttgccgtacatctccgtgctgaccgacccgaccatgggcggcgtctccgccagcctggcgatgctgggcgacatcaacatcgccgagccgaaagcgctgatcggctttgccggcccgcgcgtgatcgaacagaccgtgcgcgagaaactgccgccgggcttccagcgcagcgagttcctgatcgaaaaaggcgcgatcgatatgatcgttcgccgcccggaaatgcgccaaacgctggcgagcattctgtccaagctgaccaaccagccgcagccgcatttcgatgaggccgcgccggtcattgagccggagcagcaggccgacgcctga

SEQ ID NO: 452376 - DNA, 663 bp, Serratia marcescens
atggacatcatcaagtttattattgatttcattctgcatattgatgtgcacctggccgaactggtcgcacaatacggcatgtgggtctacgctattctgttcctgatcctgttttgcgagaccggtttggtggtgacgccgttcctgccgggggattctttgctgttcgtcgccggcgcgctggcggctttgccgaccaacgatctgaacgtgcacaccatggtggcgttgatggccgtggcggcgatcatcggcgatgcggtgaactacactatcgggcggttgttcggcgagaagctgttcagcaacccgaattcgaaaatcttccgccgcagctacctggataaaacgcatcagttttatgagaagcacggcgggaaaacgattattctggcgcgattcgtgccgatcgtgcgtacttttgcgccgttcgtcgccggcatggggcatatgtcctatcgccacttcgccgcctacaacgtgattggcgcactggtttgggtgctgctcttcacttatgctggctacctgttcggcgatctgccggtggtgcaggagaacctgaaactgctgatcgtcgggatcatcatcgtttcgattctgccgggcgtgattgaaatttggcgccacaagcgcgccgccgcccgccagcaaaaacaataa

SEQ ID NO: 452377 - DNA, 822 bp, Serratia marcescens
atgtctgaggtggtctcgcccgttaagccgacgctgaaggtagcgctgggcatcgaatatgacggcagccgttactacggctggcagcggcagcaagaagtggccagcgtgcaggaacggctggagcaggcgttgagcaaggtggcggatgcgccgatcaacgtgctgtgcgccgggcgcactgacgccggggtgcacgccaccgggcaggtggtgcacttcgaaaccaccgcgcgccgcaaggacgccgcctggacgatgggcgtcaacacccatttgccgccggacatcgcggtgcgctgggtgagccccgtcgccgatgattttcacgcgcgtttcagcgccaccgcgcgccgttaccgctatattattttcaaccatcgctaccggccggcggtgttgcaacagggggtgacgcatttttatcacccgctggacgcggaccgcatgcatcgggcggcgcaggcattgctgggcgagaacgactttacctcgtttcgcgcggtgcaatgccagtcgcgcaccccgtggcgctgcgtaaaacacgttaaggttacgcgctacggcgaatatattgtggtagatatcaaggcgaatgccttcgtgcatcacatggttcgcaacatcgtcggcagcctgatggagatcggctgcggcaatcaggatgagaactggatggccgagctgctggcgctgaaggatcgcaatctggcggcggcgacggcgcgagccgaggggctgtatctggtttccgtggactatcccgaccactttggcatcccgcggccgccgatggggccgctgtttttacccgacgattaa

SEQ ID NO: 452378 - DNA, 1011 bp, Serratia marcescens
atgtctgacggctggaatatcgcgctgctcggcgccactggcgcggtaggtgaagcgttgctggaattgttgcaggaacgccagttcccggtgggtgagctctatcctctggcaagcgaacgcagtgcgggcgccaatgtgcgcttcaacggcaagtctcttctggtgcaaaacgccgaagagttcgattggtcgcaggcgcagctggccttcttcgtcgccggcagcgacgcttcagcgcgctatgccgaagaggccggcaacatgggctgtctggtgatcgacactagcggcctgttcgccatggaaccggatgtgccgctggtggtgccgggcgtgaacccgcaggtgctggcggattaccgcaaccgcaacatcgtcgcggtggccgacagcatggtcagccaactgctgacggcgatcaaaccgctgaccgaacaggcggggctgtcgcgcctgcacgtcacgacgctgatgtcggtatcctcgcgtggcaaggcggcggtggacgatctggccggccagagcgcgcggctgttgaacggcatcccggccgaagaaggcgttttcacaaagcagctggcgtttaatatgctgccgcttgtcgccgacgagcagggcagcgtgcgcgaagaacgcctgatcgtcgatcaggtgcgcaaggtgctgcaggacgaagggttgccgatttcggtgagctgcatccagtcgccggtgttttatggccacgcccaggtcgtgcatctggaagcgctgcgtccgctgtccgccgaagaggcgcgcagcgagcttgaagaggtcgaagacgttcaactgagtgaagaggatgattacccgactcaggttaccgaagcttccggcagcgatgcgctcagcatcgggtgtctgcgcaacgattacggcatccccgagctgttgcagttctggacggtggcggacaacgtccgcttcggcggcgcgttgatggcgatcgaaaccgccgagcgtctggtgcaggagcagatgtactga

SEQ ID NO: 452379 - DNA, 1122 bp, Serratia marcescens
gtgaaaattctggttgatgaaaatatgccgtatgcggccgagctgttcagccgcctgggcgacgtgcgggcggtgccggggcgtccgatcccgcttgaggcgctggcggatgccgacgcgctgatggtgcgttcggtcaccaaggtcaatgaagccttgttggccggcagccgcatcggctttgtcggcaccgctaccgccggcaccgatcacgtcgatgacgcctggctgcaacggcagggcatcgggttttccgccgcgccgggctgcaacgccatcgcggtggtcgagtatgtgttctccgcattgatgctgctggccgagcgcgacggcttccaattgcgggataaaaccgtcggcatcgtcggtgtgggcaacgtcggttcgcgtctggacgcgcgcctcaaagcgctgggcgtgcgcacgctgctgtgcgatccgccgcgcgccgatcgcggcgacgccggggaattctggccactggagaagttggtggccgaggccgacgtgctgaccttccatacgccgctgaataaatccggcccgtatcattcattgcatctggcggacgccgatctgctggcggcgttgccggacaaccgcattctgatcaacgcctgccgcgggccggtggtggataacgctgcgttgctgcaggcgctggaaaaaggcaaaaagctgagcacggtgctggacgtgtgggaaccggagccggatctcgccttgccgctgttggcgcgggtggatattggcaccgcgcacatcgccgggtatacgctggaaggcaaggcgcgcggcaccacccaggtgttcgaagcgttcagccgccatctggggcagccgcaacaggtggcgctggcctcgctgctgccggtgccggagttcagccagatccgtctcaacggcccgctggatgaagcgcgattaaaacgattgatgcacttggtgtatgatgtgcgccgcgatgatgcgccgctgcgcaaagtcgccgggcaaccgggcgagttcgatcgcctgcgcaagcactatcaggaacgccgcgagtggtcttcgctggccgtgcaatgcgatgacagcgccagcgccgagctgctcggcaagttgggcttcagcatcgcgtag

SEQ ID NO: 452380 - DNA, 774 bp, Serratia marcescens
atgccagaaatccgccatttccccgagtcgctgatcccggcgccaaacccggtgcagtttcgttgcgaggagttcaacgtccgcaccgaattccagccgcacagccatacctggggccaattgatgtgggtcaaagccggggtgatggtgctgcgcatcggcgggcagcgctttctggcgccgccggagtacgtgctgtggacgccggcgggcatcgaacactcctgttacaaccagcggctggcgcagtgccgcatggtggacatcgcgccggcgctgtgcgccggcatgccggccgatccttgcctggtcaatgtgacgccgatctttcgcgccatcgccgaggatttctatgcgcgtaaacagtacattccgcaggcggaggcggatttgcgcctctgccaggtgctgatcgaccaactgcatctgtcgccgcgccagcaaacctatctgccgtcgtcggacgacaagtttttggcgccggtgctggaagcgctggaacattgcccggcggacaacacttcgctggcgacgtgggcgaagcgggtatacaccaccgagcgcacgctgtctcgccgctgccagcaggatttgggcatgccgttcagcgaatggcgccagcgcctgcggttcctgcacgccgtgtcgctgctcgaacagggcaaaaccgtgcaggacgtggcgctggaggtcggttacagctccgcgtcggcctttatcgtcatgttccagcagatcgccggcaccacccctgagcgctttcgccgtgcctga

SEQ ID NO: 452381 - DNA, 921 bp, Serratia marcescens
atgaatatgcttttccccctgctggccgtgctgatttggtcgattaacgccgtcgtcagcaaactctccgccaccgccatcgatccggcggccatctcgctctaccgctggctgctggcgctgatcgccctgacgccgtttgtgctgccgggcgtgctgcgcaattgggcgcaggtgcgcgccaactggtggaagctgatgatcctcggcttgctcggcatggtgctgtatcaaagcctggcctattacgcggcgcacagcgtcagcgcgctgtttatgggcatcatcgtgtcgctgatcccactgctgaccatcctgatcagcatcgtactgctgcgcattgcgccgaccgtcggcgtgctgctcggcagcattctctccttctgcggtttgatctggctggtcagcggcggtcagcccggcgcgctgttgcagcacggtatcggcaaaggggaattgatgatgctgctcgccaccgcctcttacgcgctgtatggcgtgttgaccaaacgctgggccatcgcgctgccgaactggcaatcgctctacgtgcagatcctgttcggcgtgctgttgctgctgccgaatttcctgatggcgcaggatgttggcttgaacggccataacctgccgctggtgctgttcgccggcattccggcctcgatcatcgcgccgtacctgtggatccagggcgtcctgcgcctgggcgccaacaccacctcgatcttcatgaacctggcaccggtgtttaccgccgctatcgcggtgctgttcctgcatgaacaattgcacggttaccacctgatcggcggcggcatcaccctgctgggcgtgatcctgtcgcagcggctgcgcacgccgctgacgcgtaaagccaaagccccggcggcaggcgcagattcctgcaaagaacaggcctaa

SEQ ID NO: 452382 - DNA, 1419 bp, Serratia marcescens
atgcggtggtttaacgcgccgcgttcgctgttttatcaactgctgctgttttttggcctgccgctgctggcgctgggcggcatctctatctacacccactacttcagcgccatgagcgccgctaccctggcttacgatcgcacgctgctggcgtcggcgcgcacagtggcggagcggctggtggtgcgcgaaggcaagctggcggtcgatgtgccttatgtggtgctcgacagcttcgagcgcaacatgaacgatcagctctattacgaggtgatctcgccgcaggggaaaagtatctcgggctatgacgacttgccgtcgttgccgccccacattccacgctccaccctctatccggcattggtgcatttctacgatgcggaatacctcggccggccgatccgtgtggcggcgctgtttcaaccggtcaacgagtcgggcgtgagcggcatggcgaccattctggtggcggaaaccctggaatcgcgtcgttacctggcgcggcagatgatgatcgcggcgctgttgagccagggcacggtggtggtgttgaccctgatcctggcgttcgcgctgctcaagcgggtgttgaagccgatgcgtaaactctccggcatcatgctgcggcgcgatccgggcgaactgacgcctttgccgcgggttcttccctggtcggagatgcagccgctgctggtggcctttaatcgttacatcgaacggctgcggctgatggtggcgcgtcaggaacgcttcagcgccgacgcctctcaccagctgcgcaccccgctggcggtgctgaagacccaggtcggggtggcgctggccagcgatcggccgcagcagtggcgcgaaagtctgcaggcgatgagcgcgacgctggataacaccgtggcgctcaccgaccgtctgctgcacctctcgcgcctgaaagccagcgagcacagcgccgatcgcaagctgcagccggtcaatttggcgcaggtgctgcgcgacgcctgtttctctcgcttgccgcaggcgcgcagcaaacagatcgatctcggtttcgagggtgaagcggcgtgtcaggtcgcgggggagccgctgctgttggccgagctgtgtgccaatctgctggacaacgcgctgaaatacacgccgcgccagggcgtggtgaccgcccgccttacgcgggacaaggctacgggggaaggggtgctggagattgaagacagcggcccgggcatcgccttgcaggacaaggcgttggcgctgcagccgtttcatcgtttggacaacgtgggcgatcagccgggcgccggtttgggattggcgttggtgaaggatatcaccgcgtatcacggcacccgcccggagctgttgagctccgccgcgctgggcggcctgttggtgcgggtgcgtttcaggttgctggcttag

SEQ ID NO: 452383 - DNA, 675 bp, Serratia marcescens
atgcgactgttattggttgaagatcaccccgagctgtctcactggttgcaaaaggcgctgaccggcgccggatttgccgtcgacgtcgcgccggacggcgtggccgccgaccacctgttgcttaatgaacgctatgcgctggcggtgctggatgtggcgttgccgcgtctgaacggtctcgatttgctggcgcgcttgcgcaagcgcgggcaggatctgccggtgctgttgctgacggcgcgcaccgacgtgaccgaccgggtgaaaggcctgaatctgggggcggacgactacctgaccaaaccgttcgaactggacgagctggaggcgcgcattcgggcgttgctgcgccgcagcgtcggcgccgcgcagccggcgttgcaatacggcgcgttgacctatcatgacgaaggttatttcctgctggagagcaaaccgctggcgctgacgccgcgcgagctggcggtgctgaccgcgctgatgcaccggcgcggccgcccggtggccaagcagcagctgtttgagcaggtgtttacgctgtctgacgaggccaatccagagagcatcgagctttacgtacaccgtttgcggaaaaagctgcagggcagcgacgtggcgatcgtcacgctgcgcggtctgggctacagcctggaactgtgcaatgcggtggtttaa

SEQ ID NO: 452384 - DNA, 330 bp, Serratia marcescens
atgttttcgttagggaaattgtttggcggcagggacagcgccaaggtatgtgctattaaacggttgccagaggtatacgccgagatggcgggagaagccgggcagtgtcgtttgaagcgcttgcgccctgagattggcgtatttgagttgcatttcgtcaacgccgacggtgaaaagtatgcttgccagatgaccgcctgtgtgaccggcatcgatctggtgtttgccgccaacaaccgctccgtgctggtttcttcgccgtttaccgccgacaagctgcgtccggtgttggatcttgctctcgccgatagccccatcacgctgatctga

SEQ ID NO: 452385 - DNA, 981 bp, Serratia marcescens
atgaaaaaaataatgacccgcacctttaccgccgccgccctgttgctggcggtctctcaggcctttgccgtggaagcgcccaaacgcaccgaatgcattgcgccggccaaacccggcggcggcttcgatctgacctgcaaactgattcaggtatcgctgcaggacaccaaggccattgataaaccgatgcgcgtcacctatatgcccggcggcgtcggcgcggtggcctacaacgccatcgtcgcgcaacgcccggcggagttcggcaccgtggtggccttctccggcggttcgctgctcaacctggctcagggcaagttcggccgctacaacgtggacgacgtgaaatggctggcggcggtcggtaccgactacggcatgatcgcggtgcgcgccgactcgccttacaaaaccttgaaagacttgatggacgctttccaaaaagatcccaacagcgtggtgttcggcgccggcgcctcgatcggcagccaggactggatgaaaaccgcgctgctggcgcgcgaagtcggcgtggatccgcgcaagatgcgctacgtggcgttcgagggcggcggggaaccggtcaccgcgctgctgggcaaccacatccaggcggtatccggcgatttgagcgaaatggtgccttacctgcagggcgacaagatccgcgtgctggcggtgtatgccgagcaacgtctgccgggccagttggccgatattcccaccgccaaagagcaaggatacagcctggtgtggccgatcattcgcggcttctacgtcgggccgaaagtcagcgatgaagagtatcagtggtggatcgacaccttccagaaaatgatggcgaccgaggaattcaaacagcagcgcgatctgcgcggcctgttcgaattcaacctgaccggcaaagagctggacgcctacgtgaagaatcaggttgcccaataccgtgagcaggcgaaagtgttcggcctggccaaataa

SEQ ID NO: 452386 - DNA, 432 bp, Serratia marcescens
atgagcgatcgtatttttgccggcttttggctgctgctgtgtatcggcgggctgttcatcggctggggcatccagagcgaatacagctatgaaccgctggggccgcgcccgttcccgctggcgatcctcagcctgatggcgctgtgcgcggcgctgctgttgctgcgccgcccgcaggcggtggaatggccgcaccacaaggtgatgcagcggctgctggtgctggtgatcaccctggtgctgtatgcctgggggtttgaatggcttggctttccgctggcgaccgcgctgctgacgttcagcatcggcctgctgtttcaggccagcctgccggcagcggccatctccggcgtcatcatgggcgcagcgttgtactacgcctttgaccaacttctcgatgtcacactgccgctcggcgcctggctgagctaa

SEQ ID NO: 452387 - DNA, 1518 bp, Serratia marcescens
atggatacctggatgtatttgacccaagggtttgaagtggcgctggtgccgcaaaacctgattatcgccctgatcggctgcttcgtcggcaccatcgtcggcctgctgccgggcctcgggccgatcaacggcgtggcgatcctgctgccgctggcgttcgccctcaagctgccggccgaatcggcgctgatcctgctggcgacggtgtatatcggctgcgaatacggcgggcgcatctcgtcaattctgctcaacgtgccgggcgatgcggcggcgatcatgaccgcgctggacggctacccgatggcgcagcaggggcgcgccggcgtggcgctgtccatctcggcggtcagctcgttcgtcggctcgatgatcgccatcggcggcattattctgttcgcgccgctgctggcccgctggtcactggccttcggcccggcggagtatttcgccctgatggtgttcgccatcgcctgcctcggcagcatgatgagccaaaacccgctgaaatcgctgctggcggcgctgatcggcctggggctggcgacggtgggcgtcgacgccaacaccggcgtttaccgctttaccttcgacagcgtgcacctctccgacggcgtgcagtttatcgtggtggtgatcggcctgttctcggtcagtgaaattctgctgatgctggaaagcaccagcgccgggcaaaagctggtgcgtaaaaccggccggttgctgttcaaccgcaaagaggcggcgcagtgcgccggcccgaccctgcgttcgtcggtgatcggcttcttcgtcggcattctgccgggcgccggcgccacaatcgccagcgcgctgacctacatgaccgagaagaaaatcagcggcaacagcgacaccttcggcaagggcgacatccgcggcgtagcggcgccggaagcggccaacaacgcctcggcctgcggttcgttcattccgatgctgacgttgggggtgcccggatccggcaccacggcggtgatgatgggggcgctgacgctgtataacatcacccccggtccggcgatgtttaccgaacaaccggatatcgtctgggggctgatcgccgcgctgctgatcgctaacgtcatcttgctgatcatgaacctgccgctggttggcctgttcacccgcatgctgaccatcccgctgtggttcctggtgccagcaatcgccgcggtttccgcggtgggggtttatgcggtgcacagcaccaccttcgacctgctgctgatggtcgggttgggggtgttcggctacattctgcggaaaatgcactttccgatgtcgccgctgattctgggcttcgtgctgggtgagatgctggagcagaacctgcgccgcgcgctgtcgatcagcaacggcgaattcggcatcctgtggagcagcagcatcgcgcaaacgctgctggtgttggcggtcgcggtgctggcgctgccgccgctgctgcgcctgatgcgcaaacgcagccatccggcggccgaggccaaggccgagtaa

SEQ ID NO: 452388 - DNA, 630 bp, Serratia marcescens
atgtccgaaaaacactggtccaacaccgagctgctgcatcagacggtgactaacccgaatattatcgtcaaaggcacccacagctactacagcgactgctgggataacggtttcgaacgctcggtggtgcgctatctgcacggcgacgcggtcagccggcaatggcagccgctgggcgaaatagatcgcctgctgatcggcgattacgtgtgcatcgcggccgaagcggtgatcctgatggggggcaatcacacccatcgcatcgactggttgagcctgtacccgtttatggcaaccatcaaacaggcgtaccgccccaaaggcgatacccggctgggtgacggttgctggattggtatgcgggcgatgttgatgccaggggtatcgataggcgaaggggcgatcgtcgccgccggcagcgtggtggccggcgacgttgaaccttatgccatcgtcggcggcaatcccgcgaggtttatccgttggcgattcgcgccggaagttatcgcgcgcttgctcgccttgcgcctctatgagttgcctgaggcggactttgcggtgattcagcccctgctcgccgatgacgatatcggggcgctggaaaggggaattgcggccttgcgccgttaa

SEQ ID NO: 452389 - DNA, 996 bp, Serratia marcescens
atgtcattaccgtcaggcgtttccgcccggccggcgctgcccggcgcgcgtctctttcagggcagccaccagggttacgtcatcgccatgatcagcgccatgctgctggcctttaccgccatcatcatccgcgcgctgaccgaatactatcacctgccgaccttcgtgctggcgttctggcgcgcggcgctggtggcgctggtgctgttgccgctgctgttggtggtgaaaccgcagtgggcacgcctgcggcgtgaacaggtcttgttctacgcgctttacgggctgctgctggcgttgttcaacagcctgtggacgctgtcggtggcgctgaacggcgcatcggtggcgaccattctgacctactgttcggtgggctttaccgtgttcctcggctgggtgatgtacagcgaacgcctgacgctgcgccaactgctggtgatcgccatcagcctgggcggttgtttcctggtcagcaacggcgacagcatgggcaaccagcacttcgacttgttggggctgctggtggggatgctgtcgggcatcggctataccctgtataccctcggcgggcgggtggccagcgaacggggctatccggtgtggaacaccattttgtacgttttcggtttttcggcgctgtatcagctggtgttcaacgcggcgctgacggcgttcccgctggcggcgttccacggcatggccggcgatctgtggttcctgtcgcacggcgcgcagggcattcagtggagcggctggctgttgctgctggcgctggccgccgggccgacgctgttgggcttcgggttgtataacatcagcctgaaaacgctgccgctggccgtagccaacctgatcctgtcgttggagctggttttcaccgcggtgatcgcctatttcctgctgggggaaaacatgaatcagctgcagctgctgggcagcgcgttggtcatgggtggggtgctgctgttgaaaagcaagaccgccgaggtgtga

SEQ ID NO: 452390 - DNA, 1467 bp, Serratia marcescens
atgcacattccgttagatcgcgagcaggacgttccgctctatttacagatcgaagaagcgctgcggcgcgccatcctcaccggcgtgttcgtggatggcgacaagctgccctcaacgcgcacgctggcggccgaattggcggtcagccgtttgacggtggataacgcctatgccgaactggcggccaagggctttttgcatcagcgacgcggcagcggcgcctatgttgcgcacccgcaggcgcaaacgcgcccggcccggccgaccagcgatgcccccttcccgctggagagcttcaccaccctcacctcgcggctggacggctatgccgacgccccgctgccggagaggctgatcaacttcgccgccggcgtcggcagccctaaggtgttttcgctggaggcgtttcgcaaagtgctgctgtcggtgctcagccgccatgcggaagaggccttcagctacggcgaatactgcggctactacccgctgcgcgatacgctgagccgcattctcagcgcgcagggcatccccacgcaggcggaacaggtgctgatcaccaacggctcgcagcatgccatcagcctggtggtgcaaagcctgctggcgccgggcgatacggtgatcgtcgaagaaccgacctacgccgaagcgctgggcctgctgcgccagcaccgcatcaatatcgtcaccgtaccgggcgatcgccacggcatgctggtcgaacgattgcccgagttgctggaacgccaccgccccaaactgatctacaccatccccaatttccacaacccgaccggccgctgcctgagcgaggcgcggcggcgacgcctgctggcgatcgcccaacaggccggcgtggtgatcctggaagatgacttcgtcggcgatctgcgttatcagggcaaacagctgccgtctctgcgcgcgctggcgcaaccgggcgcggtgatctacgtcagcaccttctccaagatgctgctgcccagcatgcgcatcggctatctggtggcggacagcgaacactatcagcgtttcgccaggctgaaacacgtcgacagcttcaccagctccagtctgatccagcgcgcgctggacgcgttcgtcaccgtcggccgttacgacaagcagctgcggcgcgccgggcgcgtctaccgccgccatctggaagtgatgatcgacgcgttgcaacggcggttgccgccggggtgccgtttcgaaacgccgcagggcggcttgtttatctggctgacgctgcccgcgacggtaaccaccaccgaactgatgccggtggcctggcggcacggcgtcactttcgcgcgcggcgaatgcttttatgcgcaggaacagctgggcgcgcacggcctgcggctgaacttcgccgccaactcgccgccgcagattgaagaaggtatcgcccggctatgccgggcgattgaggaggtgataacggagaaaaacgccggttag

SEQ ID NO: 452391 - DNA, 501 bp, Serratia marcescens
atggctaagctcaagcgctgggggcgcgagttgctgctgctggcgctgatcgcactggcggtgatcacggtgatggattggctgaatgcgccgcaggcgccgccggccttcgatgcccagacgctgaccacgttggacggcgagcgcgtgtcgttggcgcagctcagccatgagcggccgctgctggtttacttctgggccaactggtgcggcgtctgccgcttcactacgccggacgtcgcccgtttgcaggcggcgggcggcaacgtgctgaccgtcgcgctgcgttcgggcgacgatacccaggtgaaacactggctggcgcgcaaacggctggcgctgccggtggtcaacgatccggctggtacgctctcggcgcagtggcagattggcgtgacgccgaccttcgtggtgatctcgcagggcaaggtggtgcagagcaccaccggctggaccagctactgggggatgaagctgcggctgtggtgggccgccgtctaa

SEQ ID NO: 452392 - DNA, 717 bp, Serratia marcescens
atgaaaaagttactgattttactgatgatcatcgccgccccggtgtgggccgccgagcctttcaccccggcgcaagaggcgcgtatcaaagagatgatccgcgaaacgctggtgtccaacccggacattctggcgcaggcggtggacgcctggcagcagcaaaccgcaggccagcaaatcagccaggctatcaagcagaatgccaaaacgctgtatcaggatccggccagcccgcgcctcggcgccgccaacgccaaactgacgctggtgacctttaccgactataactgcccgtactgcaagcggtttgatccgatgctggagaaaatcgtcaagcaatacccggatgtggcgctggtggtgaagctgttgccgttcaagggcgaaagttcggtcagttcggcgcgcgtggcgctcaccacctggcagcagcacccggagcaattctgggccttgcatcagcggctgatggcgaaaaagggcttccacgacaaggccagcatcgccgccgcgcaggagaaaaccggcgtcaagacggtggcgccgagcgaacagagcatgaccacgctgcgcaccaatatggcgttggcggaacaactgggcgtacaagggacgccggcgacgctgatcggcgatcggatgctgccgggggcggtgtcctatgaagagctggaaacgatggtgaagcagcagctggcgaaggccaaccatggctaa

SEQ ID NO: 452393 - DNA, 2037 bp, Serratia marcescens
atgttgaaaattatcaggctggcctgcgcttgcctgtttatgctgtggctgcccgccttgcaggcggcggacagcggctggctgcaaaatccggccaacgatcatgccaaggtgcggctgcgcgccgacacgtcacagccgggagagacccgtctgctgctgtcggtcgagctgcaaaaaggctggaaaacttactggcgttccccgggtgaaggcggcatcgcgccggctatcgtctggcaaggccacccaccgccggcgacctggcactggccgacgccgcagcgtttcgaggtggccggcatttccacccagggctatcacgatcgggtcacgctgccgatcgtgatgccaggcccggtgtccggcccgctggcgggtaccctgacgctgtccacctgcagcaatgtctgcattctgaccgactacccgttcagtctggatctgacggcgccgaacgatccgcagtttaatcacgacttcgcgcaggcgatgggacaggtgccgatcgccgccgggttgacggataacgtcaaggccgggtatcgcagcggcgagctgcagattgccgccgaacgcgccgacggttggcagcggcccgcgctgttcttcgatacgctggcggatgccgatctcggcaagccgcaggttgaaaccgacggcgctcagctgttggcgcgagtcccggtgagcgatggctggggagaggcggcgccggatctgcgcggaaaaacgctgacgctggtgatcgacgacggcggcatggcgcagcagataacgctgccgatcggcgagccgctggccgcgccggccggtgcggcgttcccgttatggcaggcggtattgatggcgctggcgggcgggttgatcctcaatctgatgccgtgcgtcctgccggtgttgggcatcaagctcggttccatcctgcaggtggagcggcgcgatcggcgcagcgtacggctgcagttcctggcgtcgtcgctgggcatcgtcgcctcgtttatggcgttggccctgctgatgacgctgctgcggctcggcaaccacgcgctcggctggggcattcagttccagaatccgtggtttatcggctttatgatgctggtgacgctgctgttcagcgcaaacctgttcggcctgttccatctgcgcctctcttccgatctgaatacctcgctggccacccataacgggcacggcctgagcggccatttctggcagggcgccttcgccacgctgctggcgacgccgtgctcggcgccgtttctcggcacggcggtggccttcgcgctggcggcgtcgctgccggtgctgtggggcatgttcatcgcgctcggcatcggcatgagcctgccgtggctgctgatcgcagcctggccttcgctggcgctgcggttgccgcgtcccggccgctggatgaataccgtcaagctggcgatgggattgctgatgctggcgtcgtcgctgtggttgctgagcctgctgagcaatcatatcggcgtgcaggctacgctgtggctgggggggttggcgctgctggcactgctgctggcggtgtggcgccggcagggggcacggttggcggccaagctggcggcgggcacgttggtgctggcgggcgccctcttgctggccggctcgctgaccgccggtctgtggcaccagccgttgcaggatcgggtgccgtggcaaccgctgagcgaacaggcgatcgccgaggcgctggcgcaacataaacgggtgttcgtcgacgtgaccgccgattggtgcgtgacctgtaaagccaacaaattcaatgtgctgctgcgcgatgacgtacagcgggcgttgagcgccgatgacgtggtcgcgctgcgcggcgactggagccgcccgtcggccgacatcagcgccttcctgcaaaggcgcggcagcgtcgccgtgcctttcaaccaaatctatggccccggcagcccggacggcgtggtgctatccccgctgttgacccgtgacgccgtgctgcaaacgctttcccatgccaaaggaaccgaacaatga

SEQ ID NO: 452394 - DNA, 363 bp, Serratia marcescens
atggttaaacggcagcggattgcaaaatggtttttatgcctggcttgcctggtggtgctgacgtgcatgacccagcgcatggcgggcctgcatgcgctgcagcaaacgctggggatcccggccgctaccgccgttcagtccagtgatgccgccgccgaagcgcagccgacgccctgtgaactgagcgccaaatcattgctggccgcgccgccggtaatgttcgaaaccgtgctgttcgggctgggtctgctgctggcgctgttggcgccgaccattgccgcgcgtctgcgcattcctcctcctcgcgccatttctccgcccaccctcagggtgcaccttcgattatgcgtcttccgtgaatga

SEQ ID NO: 452395 - DNA, 1029 bp, Serratia marcescens
atgcaacctttgagtgggccgggcaccccaatcgccggcgagcgccccccttccccgggcaaaacggcggccactgacgatcaacccctctctccggcgcagcgcacaacgctggaaaaactgatcgtgaaaatcatgacgctcagcccggtaaaatcggcggagatctgggcgtctctgcgtcacgatctcggcgccgacaaaggcggcgaactgctggcgcgccattttcaaccggcggaacagctgctgcaaacgcgcctgacgcaggcgcagcaaaaccatgccgggcgccaactgctgcaacagctggccgagttgctgccgcagggcaataatcgccaggcggtcagtgactttattcgtcaacggttcggccatacggtgttgagccagctaagcccaccgcagctgcagcaggtgctgaatctgttgcagaccggcggcctgaccattccccaaccgcagcaaaccgccaccagcgatcgcccgctgctgcccgcagagcatcaaagcctgcagcagcaggtcaccaaactcagcgccgcgaccggtgaagcgccggctaaaatttggcaaacgctgttcgatctggcgggcgtgaaaaccaacgatccgctgccggcgcgccacttccagctgctgaaccagtttttacaggtgaaggtggcgctcagcccgcagaacgcgccaacgctgaacaacctgctggcggcgctcaaacagccggcggatgagcaagaactgcagcagatgaacgactattgccagacgcgcttcaactgcggcgccaacgcgccgctgacgcatccgcaaatgagcgacgccattcatcagctgtttgcccgccgtctggacaaagccggccaggcgcagccgatcgccagcccctctatcgaaccgcagccgctgctcaacccgctgatcgccgccctgcctctgccgctgcaaaaagcgctgagtaagcccgccgtggcgctgatcctgctgctgttggcgttggccgtcgtgctggcgctggtgttttaa

SEQ ID NO: 452396 - DNA, 456 bp, Serratia marcescens
atgtcgaaagaatccttggtactggcctttccgccggcagcgccggaagagagcctggcctatctggtggctaaactgagccgctatgcggatgcctgggacgtggcggaagatttgcgcaatggcgtggacgggatggtggtgatcgacacccgtgcggaggcgctgtacgccgccgggcatatccccggcgcattcagcttgccgcatcgcctgatggatgaagccagcacggcgcacctggatcgccaaaaggtgtatgtgacctactgcgacggcatcggctgcaacggttccaccaaaggcgcctacaagctggcgaagttggggtttagggtgaaggagttgattggcgggctggatttctggctgcgcgacggccatccgttggccatcggcgaactgccggggtcactgcgctcccgggcggccgcagcggactgcggctgcgcctga

SEQ ID NO: 452397 - DNA, 1434 bp, Serratia marcescens
atgcggcacacgctgatcacgctgtttcagcaatcgccccaggccatcggcacgctgcgcgatcgtctgtgtgcggcattgcggcaggccatccaccacggcgcattgagcgttgggcaacggctgccctccagccgagtgctggctggggatctgaacctctcaagggtgaccgtcgaagcagcgtacggccagttggaggcggaggggtatttgcagcgccgcgtcggccagggcacatttgtggctatccgcatcgccaaatcgccgccgccggcgacccgcaccgccatgccgcgcctttcgctgcgcggccaacagatcgtgcacaccggcggctgccgcgatccgcagaaccctcaggccttcgctgccggctcgccggacctgcgcgcgtttccgctggccctgtggaagcagttgaccgctcaacgcctgcgcctgcagggggaaagcctgctgcgctacggcgatccgcaaggctatctgccgctgcgcgaagccattgccgcccacgtcaaccaaacgcgcggcgtagtctgcgatgcgagccaggttatcgtgctgaccagttcgcagcaggcgctgcaaatgatcgccaccttactgttggacagcggcgacagcgtctggatggaagagccgggttacaccggggcgagaaacgcctttatcagcgccggcgccacgctgacgccggtggcggtagacggcgatggcctgcgagcagaaccttccttgcccgatccgcgtttgatttatctgacgccctcgcaccaatacccgaccggcgcggccctcagcctggcacgccgcttagcgttgctggcgcaggcggagcggcaacaggcctggatcattgaggacgattacgacagcgagtttcactacgacgggctgccgattccggcgatgcaaggcctggatcgccatggccgggtgctctatctcggcaccttctccaaatcgttgttcccttcgctgcggctggcgtacctgatcgtgccgcccgcgctggtcgcccccttcgtcaccgcacgcacggtctatgacggccacagcgcgcaattgatgcaggcggtgaccgccgagttcatccgccaggggcacttcgccgctcatattcgttacatgcgccagctctaccacagccggcgcgatgtgctgctgacggaagtgcgcgaaaagctgagccacttcgccacggccgctcccgccgccggcggcctgcagctcagcgtttggctgccgcccggccgggaggcggcgctcagccaacaggcgcggcggctcggcgtccttacgcccgggttaacggcgcaataccaaacggttcaggcccagcgcgacggctggctgctgggtttttcggccctgacgccgggcgagatccgcagcgccgtcgagcggctggcgcggatcgccgcggcttag

SEQ ID NO: 452398 - DNA, 897 bp, Serratia marcescens
atgcacaccggtcacgctttgctcatcaccttactgtccctgggcatctctcacagcgcctggtcgtccgccgataccgggcacgccaacagcaacgccaacagccgcgaggtggccagcgcgttgggcggcctgaagaacaaaacctacgagctggaacaggcgccgaagatccgcgtcgccagcttcaatatcgccgccggcaaggtcagcgacatgaccgctatcgccaaggcgattcgcgcgatgaacgtcgacgtggtggcgctgcaggaggtggataaactcaccgcccgcagcgggcgggtcgatcaggcggcggaactggcgaagctgaccggcatgcaggcggtgttcggccgggcgatcgatttcgacggcggtgaatacggcctggcgtttctctcgaagtatccgctgcacgacgccgtgatctatccgttgccgtccggccagcgcgagcagcgcatcgccttcagcgccaaggtcgatgtgccggagttcccgacgccgatcaccctgttcaacacccacctcgataccaaggaagatccgacgatgcgtctggatcaggtgcgggagctgaacgatcgcaccatcgaagtgcgtggcatcaaactgctgttcggcgacatgaacgacgtgccgggcagcgtcacttggctggagctgagccgctattggaacgacatcatgcccaacgggcaggacggccgcagctggccggcggaaaacgccgaaatcaaggtggattacatctttagcggcaatgcgcagcgttggcatctggacagcctgacggtgccgaacgccagcggcgattggaacggcgtgcactggccggcggtgagcgatcacctgccgctggtggcggagatgcgcctgaccgagcaataa

SEQ ID NO: 452399 - DNA, 1248 bp, Serratia marcescens
atgaccagcccgattgccgaacagcttaccgaacgtttcttccgctacctggcggtcaccagccagagcgacgccgccgcaaccgccctgcccagcacgccggggcagcatgagatggcgcaactgttggcggacgagctgcgccggctcggcctggccgacgttcaaatcgacgagcacgccaccgtgaccgcccgcaagcccggcacccaacccggcgcgccgcgcatcggcttcatcacgcatatcgacaccgtggacgtcggcctgtcgcccgagattcgcccgcagcgcctgcgcttcaccggcgaggatttatgcctgaacgccgagcaggacatctggctgcgtaccgccgagcatccggagatcctgccctaccggaacgaagagatcctgttcagcgacggcaccagcgtgctgggcgccgacaataaggcggcagtcaccgtggtgatgacgctgctggccaacctgaccgcggccgatcgccacggcgatatcgtggtggcgttcgtgccggacgaagaaatcggcctgcgcggcgccaaggcgctggatctgcagcgtttccccgtcgatttcgcctacaccatcgactgctgcgaactgggtgaagtggtgtacgagaatttcaacgcggcggcggcggagatccgcatcgagggggtgaccgcccacccgatgtcggcgaaaaacgtattaatcaacccgatacgcatcgccaacgacatcattaaccgattcgatgtgcaggatactccggagcacaccgaagggcgcgagggctatttctggttcaccgatctggccgccaacgccaatcaggcgacgctgaaggtgtcgattcgcgacttcgatcgcgcggcgttcgaggcacgcaaagcccgccttgaggagaccgtgcgccaggtggcggccaactatccgcgggccaacgtcagctgcagcgttagcgacatctacagcaacatcagcaacgccatcggcgaggaccgacgcgccatcgatctgatcttcggcgccctcgccgcccacggcatcccgccgaaggtgatcccgatgcgcggcggcaccgacggcgcggcgctctccagccgtggcatcctgacgcccaactacttcaccggcgcgcataacttccactcgcgcttcgagtttttacccgtcagcgccttcgtgaaatcctatcaggtgacccgcagcatttgcctgctggccgcgcgacaaagcggccaaccggcttag

SEQ ID NO: 452400 - DNA, 1113 bp, Serratia marcescens
atgagttcaaccgccatttctcggcttatccacccctttgtcaaagatcgcttcttgcatacattgctgctggccggcgtggtgatgttcgcttttcatccgcaaccgctgtcggcgctgggtggtttcatcgactgccgtaccctcatcaccctgttggggctgatgctgctgaccaaaggggtggaggtcagcggctacttcgattttgtcggccgcaagattatcaaccgcttgcacagcgaacggcggctggcgctgttcctggtgttttccgccgcgctgctgtcgtcgtttcttactaacgatgtggcgctgtttatcgtcattccgctcaccatcacgctgaaaaagctgtcggcgctgccggtgggccgtttgatcatctttcaggcgctggcggtgaacgccggttcgctgctgacgccgatcggcaacccgcaaaatatcctgctgtggagccgctccggcctttctttcctcggcttcatcggccagatggcaccgtttggcgccgcgatgatgctgagcctgttggcgttgacctggttcagcttcccggcgcgcgacatcgtgaaaacgccgaataccgagggctacccctatcaacggccgctgttgctgagctgcgtggggctgtatgcggttttcctgctgtgcctggatatcggtctgccgctgtatgggctgctggcggtgttcgccggctttttgttgctggcgcgccgggtgctgttgcagatcgactggagcctgattttcgtgttcgccgccatgttcatcgatgtcggcctgtttacccgtttgccgccgcttcagccggcgttcgccgccatcgccgggctgagcgaggggagcgtgtatgcgttgggcgtcgggctgtcgcagatcgtcagcaacgtgccggccaccatactgttgctcaactatgtgccctccagcgctcagctggcctatgcggtcaacgccggcggcttcgggttggcgatcggatcgctcgccaacctgattgcgctgcgtatggcgggggagcgcaagatctggttgcgcttccactattattcgctgccgctgttggtatgggccgcgttgctcggctgggtgatgagctaa

SEQ ID NO: 452401 - DNA, 1032 bp, Serratia marcescens
atggcttccctgctcgctaaaggggcgttgctcagcgccttatgcgccctgctcgccgcctgtgacgatcccgcctctcgcccgcaaatcgatatcgacggcaagaccatgggcaccttctacagcgttaaggtcagcggtgacgtcgcgatcggcaaacaagagctgcagcggcagatcgacacggtgctcgaacgggccaacgacgatatctctacctaccgcgccgattcggtgctgtcgcggtttaaccgcagcgccagcctcgagccgcagcctatcccgcgcggcatggcggacatcgtattgatggcccaacgcatcggccgcgataccggcggcgccatggacatcaccgtcggcccactggtgaacctgtgggggttcggcccagacaagcatccggtcaaggtgccggaacaggcgcagatcgacgcggcgaagcagaacatcggcctgcagcacctgaagctgatcagcgacaatcgcggggagtggctgcaaaaagatctgccgggcatgtatgtcgatctctcgacgctgggcgaaggctatggtgccgatgagctggtgcgcctgatgaaccgtcacggcattaccaactacctggtgtcggtaggcggcgcggtctcttcacgcggcgtcaacggccagggcaaaccctggcgggtggcgatccaaaagccgaccgatcgtgaaaatgcggtgcaggcgctggtggatctgcacggttacggcatcagcaccgccggcagctaccgcaactacttcgaacaaaacggccagcgttactcccatgtcatcgatccgaccaccggcaggccgataaaccaccgactggtttccgccacggtgatcgccccgaccgcactcgaggccgacggctgggataccggcttgatggtgctgggcccggagaaagcgttgcagctcgcagaagagaaagggctggcggtctacctgatcagcaaaaccgacgacggtttcagcgccgtgatgacgccgcagttcaaagcatttttagtgcagtga

SEQ ID NO: 452402 - DNA, 222 bp, Serratia marcescens
atgaaaaagttaattgcggttgggttactgtcggccgtgttggccggatgcgccaccgattctccctgcgtgccggtctacgatgaccaggggcgtctggtgcacaccaacacctgtatgaagggcaccactcaggataactgggaaaccgcgggcgcgatcgccggcggtgcggcggcggttgccggtctgaccctcggtatcatcgcgctgaccaagtga

SEQ ID NO: 452403 - DNA, 1221 bp, Serratia marcescens
atgaaacgtgcagtgattactggcctgggagttgtctccagcattggtaataaccagcaggaggtcctggcaagcctgcaggaaggacgttctgggatcactttctcccaggagctgaaagattccggcatgcgtagtcacgtatgggggcaagttaagctcgacactaccggcctgatcgaccgcaaggcggtgcgtttcatgagcgacgcttccatttatgccttcctggcgatgcaagaagcgatcgcgtcttccggcctgaaggaagaagagtatcaaaacaacccgcgcgtaggcctgatcgccggttccggcggcggttctccgcgcttccaggtgttcggcgccgatgcgatgcgcagcccgcgcggcctgaaagcggttggcccgtacgtggtgaccaaggccatggcttccggcgtttccgcctgcctggcaacgccgttcaaaatccacggcgtgaactactccatcagctccgcttgcgccacctccgcgcactgcatcggcaacgcggttgagcaaatccagctgggcaaacaggacatcgtgttcgccggcggcggcgaagagctgtgctgggaaatggcctgcgagttcgatgcgatgggcgcgttgtccaccaaatacaacgacacgccggaaaaagcgtcccgcacctatgacgccgatcgtgacggtttcgtcatcgccggcggcggcggcatggtggtggttgaagagctggagcacgcgctggcgcgcggcgcgcacatctatgcggaaatcgtcggctacggcgcgacttccgacggcgccgacatggttgccccttcgggtgaaggcgcagtgcgctgcatgaagatggcgatgcaggatctggatgcgccgatcgattacatcaacgtgcacggcacctctacgccggtaggcgacgtgaaagagctgggcgccattcgtgaagtgttcggcgacaataccccggccatctcctccaccaaggcgatgaccggccactcgctgggcgccgcgggcgtgcaggaagcgatctacagcctgctgatgctggagcacggctttatcgcaccgagcatcaacatcgaaaccctggatgaacaggcggccggcatgaacatcgtgactcagccgacccagcgcgagctgaccaccgtgatgtccaacagcttcggcttcggcggtaccaacgccacgctggtgatgcgcaaactggcgaaataa

SEQ ID NO: 452404 - DNA, 2022 bp, Serratia marcescens
gtgaaccacgcccccatccaaaccgcaacgctaacctggaacgaacagggtacacctgtttcgaaacagtttgatgacgtctatttttccaatcaggatgggctggaagaaactcgctacgtcttcctgcacggcaatcggctgccgcaacgtttcgccgcccatccgcgttcgctgtttgtcgtggcggaaaccgggttcggcaccgggctcaatttcctcacgctgtggcaggccttcgccggcttccgtcaagccgagccggacgcgacgctgcagcgcctgcactttatcagcttcgaaaaattccccctgcagcaggctgacctggcggcggcgcatgcacgctggccggagttggcgccttatgccgacgagctgcgcgcccagtggccgctgccgttgccgggttgccatcgcctgctgttagccgaaggccgcattacgctcgatctgtggttcggcgacgtcaacgatctgctgccgcagtttgacgccagcatgaataaccaggtggatgcctggttcctcgacggtttcgcgccggcaaaaaaccccgacatgtggaccgatcaactgttcgtcgccatggcgcgcttcgcccggccgggaggcagcttcgccacctttaccgccgccggcttcgtgcgccgcggcttgcaacaggccggttttcaggtcaaccgctgcaaaggcttcggccaaaagcgtgagatgctcgccggcgagctcccggccgatgcgcagcccgccgcacatccggcgccctggtatcgacgcccggcgacggacaacaccgccgacatcgccctgatcggcggcggcgtcgccagcgcgctcaccgcgctggccttgctgcgccgcggcgccaccgtcacgctgtactgcgccgatgagcaggcggccgagggcgcatccggcaaccgccagggcgcgatttatcctttgctgaacggcagcggcgacgcgctggagagctttttcagcgccgcgtttcccttcgcccgccgccagtacgatgccctgttgcaacaaggcgtcgcctttgatcaccagtggtgcggcgtcagccagttggcctatgacgaaaagagcggcgccaagatcgccaatatgctgaaagccgactggccgcaggccttggcgatggcggccgaccgcgagacgctcagcgaacggtgcggtgttgataccggctttggcggcatcatctacccgctaggcggctggctctgcccggccgagctgacgcgcggcgctatcgcgctggcgcagcgtcagggcttggtctgccactaccggcacgatgcacagaggctgacgcaggaagaaaacggctggcgcatcgatttcgccaacggcgacagccgatgccatgcgacggtgatcctggccaacggccatcggttggccgaactggcgccgacggaagccctgccgctgtattcggtacgcgggcaggtgtcgcatatcccaagctcgccggccctcggtcaattgaaacaggtattgtgttacgacggctacctgacgccggttaatgccaacaacggccaccactgcattggcgccagctaccagcgcggcgacatcgccaccgactaccgcgagcaggagcaacaggagaaccgcgagcgcctgctgcgctgtctgccggagcagtcctggccgcagcaggtggacgtcagcgctcatcaggcgcgctgcggcgtgcgcagcgccacccgcgatcatttgccgatggtcggcgcgctgccggactatcaggccacgctggcacagtatcaggatttgcagcggcagaaccagcgcggcgaaaccgtcgccgatgcgccggtctatcccggtctgttcgctatcggcgggttaggctcgcgcggcttgtgctcggcgccgttggcggcggaaattttggcggcgcagctgttcggcgaaccgttgccgggtgatgcgcgcctgctggcggcgttgaatccgaatcggatgtgggtgcggaaattgctgaaaggacgtgcggtttaa

SEQ ID NO: 452405 - DNA, 282 bp, Serratia marcescens
atgatcgcagaatttgaagcgcgcattttggcgctgattgatgacatggtagagcacgccagcgatgatgaactgtttgccggtggctacctgcgcggtcatctgacgctggcggtggccgaggcggaagagcagggcgaacacaccgccgaagcgctgaaagcgcgggtggaggagagcctgcacaaagcgatcgccgccggggaactctcgccgccggatcagatcctggtgcgcggcatgtgggaaaacctctatcaggctgcaacccctgccgcctga

SEQ ID NO: 452406 - DNA, 558 bp, Serratia marcescens
atgtcagacacgcagacccgtcatcgctatgaacagctgatcgagatcttcaatcagtgcttcagcgatgactacaacacccgcctggtgaagggcgacgacgaacctatctacctgccggccgacgacgaattgccgtatcaccgcatcgtgttcgcccacggcttctacgccagcggcctgcatgaaatttcgcactggtgcatcgccggcgaagcgcgccgccaactggtggacttcggttactggtattgcccggacgggcgcgacgcgcaaacccagagtgaattcgaagcggtggagatcaaaccgcaggcgctggaatggatgttctgcgtggcggccggtttcccgttcaacgtcagctgcgacaacctgaacggcgattgcgaaccggatcgcatcgcgttccaacgcaaggtgcgcgcccgggtattggcgctgctggagcagggaatacccacaaggcctgcgcgctttattcaggcgttgcaatcgttctacaatacgccaccgttggcggccgagcactttccgtatccggaagatctcaactga

SEQ ID NO: 452407 - DNA, 807 bp, Serratia marcescens
atggactggttcgtcattggccccgagatgctcggggtgttgtttgcggtagcgctgctggcggggtttatcgactccatcgccggcggcggcggattactgacggtgccggccttgctggcagtgggggttcctccggcgcaggcgctggcgaccaataagctgcagtcggtcggcggctctttctccgccagtctgtacttcattcgtcggcgagcggtgaacctcaacgaccagaagctgacgatttttctgacgctgatcggctcgatcgccggtgcgattctggtgcagcacatgcgcgccgatttgctgcgtcagatgttgccgctgctggtgatcggcattggtctctatttcttgttgatgccgcgactgggtgaggaagatcgtcaacgccgcctcggcgccttgccgttcgggctggtagccggcggttgcgtcgggttttacgacggtttcttcggccccggcgccggctcattctacgcgttggcctatgtgacgctgtgcggttttaacctcgccaagtccacggcgcatgccaaggtgctgaacttcacctccaacgtcggcgggttggcgctgttcatcatcggcggcaaggtggtgtggagcatcggtctggtgatgctggtggggcaggtgctgggggcgcgtctgggggcgcacatggtgctgacccgcgggcagaagctgattcggccgatgatcgtgatcgtctcgctggtgatgagcctcaagctgctgtacgacaatcacggcgcggaaattcagcagtggttgaccgccttggtgcacggttaa

SEQ ID NO: 452408 - DNA, 828 bp, Serratia marcescens
atgaaaaactggatgttgggcctggtggccctgacggcctccgcttccgccatggcgctgacgccgtggcagaaaatcgaccatccggtggccggcgcgccgcaggcggtgggcggtttcgccaacggctgcatcatcggcgcgcagccgttgccgctgaattcaccggactatcaggtgatgcgtaccgaccagcgccgctatttcggccatccggatctgctggcgttcatacagcgtctcagcagcaaagcgaaccagaaagcgctgggcacggtgctgatcggcgacatggcgatgccggccggcgggcgcttcagcagcggccacgccagccaccagtctgggctcgacgtcgacatctggctgcagctgccgcgccaacgctggagcgcgcagcaattgctcaagccgcagccgatcgacctggtgtcgggcgacggcaaacaggtggtggcgagccaatggcaaccgcagattgagtcgctgatcaaactggcggcgcaggatgcggacgtgacgcgcatcttcgtcaacccggcgatcaagcagcgtctgtgcctggacgccggcgccgatcgcgcctggctgcacaaggtgcggccgtggttcggccaccgtgcgcacatgcacgtgcgtctgcgttgtccggccggcagcctggagtgccaggagcaggatacgccgccgccgggcgatggctgcggcgccgaactggcgagctggttcgtaccgcatcagccgaacgcgaagccgggcaaacccgtgccgccgccgttaccgcctacctgtcaggcattgctggatcaccatttctcagcggaataa

SEQ ID NO: 452409 - DNA, 1086 bp, Serratia marcescens
atggcaggaaacagtattgggcagattttccgcgtcaccaccttcggtgaatctcacggggtggcgctgggttgtatcgtcgacggcgtgccgcccggcatcccgctcaccgaagccgatttgcaacacgatctggaccgccgtcgtccgggcacctcgcgttacaccacccagcgtcgcgaaccggatcaggtgcgcattctctccggcgtattcgaaggcgtgaccaccggcaccagcatcggtctgatcattgaaaacaccgatcagcgctcgcaagactacagcgccatcaaagacgtgttccgtcccgggcatgccgactacacctacgaacagaaatacggtctgcgcgactatcgcggcggcggccgctcttcggcgcgtgaaaccgccatgcgcgtcgcggcgggcgctatcgccaagaaatacctgcagcagaagttcggcgtgcaggtgcgcggctatctggcgcagatcggcgacgtgacctgcgagctgaaagactgggatcaggtcgaacagaacccgttcttctgcccggatccggacaagctggaagcgctggacgaactgatgcgcgcgctgaaaaaagagggtgactccatcggcgccaaggtcagcgtgattgcggaaaacgtgccggttggcctgggcgagccggtgtttgaccgcctcgatgccgatctggcgcacgcgctgatgagcatcaacgcggtgaaaggcgtggagatcggcgacggattcgccgtggtgaccaaacgcggcagcgaaaaccgcgatgaaatcaccccggaaggcttccaaagcaaccatgctggcggcattctcggcggcatcagcagcggccaaccggtgatcgcgcatctggcgctgaagccaacctccagcatcatggtgccgggccgcaccatcaatcgccacggggaagcggtggaaatggtgacccgcggtcgccacgatccgtgcgtgggcatccgcgccgtaccgatcgccgaagcgatgatggcgatcgtgttgatggatcacctgctgcgccagcgtgcgcaaaacggtgatgtggtttccgacgtgcctcgctggtaa

SEQ ID NO: 452410 - DNA, 933 bp, Serratia marcescens
ttggacaaaattttcgtcgacgaagcagtgaacgaactgcacaccattcaagatatgctgcgctggacggtaagccgtttcaacgccgccaatatctattatggtcacggaaccgacaatccgtgggacgaagcggtgcaattggtgctgccaagcctgtttctgccgttggacattccggaggacatgcataccgctcgtctgacttccagcgagcgccatcgcatcgttgagcgcgtgatccgccgcgtcaacgagcgtatcccggtcgcctacctgaccaacaaggcctggttctgcggcatggaattctacgtcgacgaacgcgtgctggtgccgcgctcgccgatcggcgagttgatcaacgatcgtttcagcgcgctgatcccgcacccgccgcgccatattctcgacatgtgcaccggcagcggctgcatcgccatcgcctgcggctacgctttcccggaagcggaagtggacgcggtggacatctccagcgaagtgctggcggtgaccgagcgcaatattcaggcgcacggcgtcgagcaccaggtgattccgatccgttccgatctgttccgcgacgttcccgcgatccagtacgatctgatcgtcaccaacccgccgtacgtcgatgcggaagacatgtcggatctgccgcaggagttccgctttgagccggaactggggctggcggcgggcagcgacggcctgaagctggtgcgccgcatcctggcctgcgcgccggactacctgaccgacgacggcgtgctgatttgtgaagtgggcaacagcatggtacatctgatggaacaatatccggacatcccgttcacctggctggaattcgaaaacggcggcgacggcgtgttcatgctgaccaaacagcagctggtggattgcaaggatcacttcagcctctatcgcagctaa

SEQ ID NO: 452411 - DNA, 531 bp, Serratia marcescens
atgaagaacaagccccctctgagcaaagacgaacaacagctcttcagagagtcggtggcgggcgcaaaaaagctgcgccaggacaccatcgtccaccgcccgccgaagctcaaggtcaaacaggtcgcgccgcagcggctgctgcaggagcaggtcgatgccagctattatttttcagatgaatatcagccgcagctggaagaggaaggcccgacgcgctacgtgcgccccggcagcagcccgtatgagctgaagaagctgcgacgcggcgattattcgccggagctgtttcttgatttgcacggcctgactcagctgcaggccaagcaggaattgggggcgctgatcgccgcctgcaaacgcgagcatgtgcactgcgcctgcgtgatgcacgggcacggcaaacacattctcaaacagcaaacgccgctgtggctggcgcagcatcccgacgtgctggcgttccatcaggcgccgaaggaatggggcggcaacgccgccgtcctgctgttggtggagctggcagaatag

SEQ ID NO: 452412 - DNA, 483 bp, Serratia marcescens
atgcaagttttgattatgcgtcacggagaggcggcgctcgaggcagccagcgatgcggtaaggccccttaccctatgcggccgcgacgagtcccgtcagatggcggcctggttgaacaccaagtctgtagatattgaacgcgtgctggtcagcccctatctgcgggccgaacagacgctggcgacggtgcgtgaagccttgacgctgccggagggcgaagaagtgctgcccgaactgacgccgggcgggaacgccgaacaagtcggcagctatcttcaggcgctggcgatgcaaggggtgagctcggtgctgatcgtgtcgcacctgccgctggtggggtatctggtggcggaactgtgtccgggcgagtgcccgccgatgttcgcgacctcggcgatcgccaacgtcgatctgccggcggacggcagctacggcaaatttgaatggcaggtcagcccgtcgcaggtgatggccaaagtgtga

SEQ ID NO: 452413 - DNA, 2169 bp, Serratia marcescens
atgatgagcgtcgaaaacgcattgcacgagcagcgcgccaaaccgtcggcctttcaactgacgatccgccccgacaacatcggggtgatcaccatcgacgtgccgggcgacaaggtcaatacgctcaaggccgagttcgtcgaacaggttaacgacgtgctgatccgcgcgcagcagcatactgcgctggaagggctggtgatcgtttccggcaagccggactcgtttatcgccggcgctgatatcaccatgatcgccgcctgcaccagcgccaaagaggcggaaacgctggccaagaaagggcagagcacgctggcgcagatcgccgccttcccggtaccggtggtggcggccatccacggcgcctgcctgggcggcgggctggaattagcgctggcctgccacggccgcgtctgttcgctggatgacaaaaccgcgctcggtctgccggaagtgcagctgggcctgctgccgggctccggtggcactcagcgcctgccgcgcctgataggcgccgccaaggcgctggacatgatcctgaccggcaagcacattcgcgcccgccaggcgttgcgcatggggttggtggacgacgccgtgccgcaatcgattttgctgcagaccgccatcgagcgggtgaaacagggctggaagcatcagcgcgagctgccgtggcaggatcgtctgctcaacggcccgctgggcagaaatctgctgttcagcatcgtgcgcaagaaaacgttggcgaaaacgcacggcaactacccggcggcggagcgcatcattcaggtggtgcgcaccgggctggatcacggcagcgccagcggctatgaagccgaagcgcgcgcctttggcgagctggcgatgacgccgcaatcggcggcgttgcgcagcctgttcttcgcttccaccgcgctgaaaaaagagcggggcggcgatgctcagccgcgcgccttgcatcgcgtcggcattctcggcggcggcctgatgggtggcggcatcgcctgcgtcaccgccacgcgcggcggtttgccggttcgcatcaaagacatcaatgaaactggcatcaatcatgcgctgaaatacagttgggacgtgctcggcaagcgggtgcgcagcaagcgcatgcgcccggcggaacggcaaaaacagatgatgctgatctccggctctaccgattacaccggcttcgagcaggtggatatcgtggtcgaggcggtgtttgaggatctggcgctgaagcagaagatggtggccgaggtcgaagcgaactgcgcgccgcataccgtgttcgcctccaatacttcctcgctgcctatcggtcaaatcgccgaacaggcccagcggccgcagcaggtgatcggtctgcactacttcagcccggtggacaaaatgccgctggtggaagtgatcccgcacgctggcacaagcgaagagactatcgcgaccaccgtggcgctggcgcacaagcagggcaagaccgccatcgtggtgggcgacagcgccggtttttatgtcaaccgcatcctggcgccgtacatcaacgaagcggcgcgctgcctgctggaaggcgagcccattgaatcgctggacaaagcgctggtggacttcggcttcccggtcggccccatcaccctgttggacgaagtgggcatcgacgtcggcaccaagatcattccggtgctggtcgaggcgctggggccgcgcttcgccgcgcctgccgcgttcgatgcggtgctgaaggacgggcgcaaagggcgcaagaacggccgcggcttctatctttacccgagcgaggagcagcagcgtcagcggcgtaagcgcgcggacacctcattgtatacgttgctcggcgtcacgccgaaggcgcacatgctgccggcgaccattgcccagcgctgcgtgatgatgatgctgaacgaagcggcgcgctgtctggatgaaggcgtgatccgcagcgcgcgcgacggcgacatcggtgcggtattcggcatcggtttcccgccgttccttggcggcccgttccgctatatggatgaactcggcgccgagaaagtggtgaagacgctggactacctgcgtcagcagcacggcgagcacttcgcgccgtgcgagcgcctgcagcgcatggcgcagcagggcgagcgtttctacccgctggggagttga

SEQ ID NO: 452414 - DNA, 1311 bp, Serratia marcescens
atgagtaaggcactgccgttggtgacccgtcatggtgaccgcattgcgattgtgaatggactgcgtaccccctttgccaaacaggcgaccgcctatcacggcattccggcggtggatttagggaaaacggcggtgagcgagctgttggcgcgcagcggtatcgagccgcaactgatcgaacagctggtgttcggccaggtggtgcaaatgcccgaagcgccgaacatcgcgcgtgagatcgtgcttggcaccggcatgagcgtccataccgacgcctacagcgtgtcgcgcgcctgcgccaccagtttccaggcgatcgccaacgtggcggagagcatcatggccggcagcatcagcgtcggcatcgccggcggggcggactcttcttccgtcttgccgatcggcgtcagcaaggcgctggcgcgcacgttggtggacgtcaacaaggcgcgcacgctgtcgcagcgcctcaaattgttcagccggctgaaattccgcgatctgatgccggtgccgccggcggtggcggagtattccaccggcctgcgcatgggcgataccgccgaacagatggcgaaaagccacggcatcacccgtgaagcgcaagatgcgctggcgcatcgttcccacgagctggcggccaaggcctggcgggaggggtggctgcgcgacgaggtcatgaccgcctacgtgccgccttaccgcgctcagctttctgaagacaacaatatccgcaaagactccagcctggcctcctacgccaagctgaaaccggcgttcgatcgcaaacacggcagcgtcactgcggccaacagcacgccgttgaccgacggtgcggcggcggtactgatgatgagcgaatcgcgcgccaaagagctggggctgcagccgctcggctatctgcgcagtttcgcctttgccgccatcgacgtgtgggaagacatgctgctggggccctcctacgccacgccgctggcgctggatcgcgccggcatcggcctggccgatctgacgctcatcgacatgcatgaagccttcgccgcgcaaacgctggccaacctgaagatgttcgccagcgaagcgttcgcccgcgagaagcttggccgcagccaggcaatcggcgaagtggacatggacaaattcaacgtattgggcggttctatcgcctatggtcacccgttcgccgccaccggcgcgcgcatgattacccagacgctgcgtgagctgaaacgccgcggcggcgggctgggcctgaccaccgcctgcgccgccggcgggttaggggccgcgatgatcgtggaggtggaatga

SEQ ID NO: 452415 - DNA, 297 bp, Serratia marcescens
atgtcagatgcaattaataaatgcagcgcccaggaaaccgccgcgtgttgctgcgtggatgtcggcaccgtgatggataacaccgattgcaccgcatcctacagccaggtgttcagcaatcaacaagatgcggaggcgatgctggcggccctgagcgaaaaggcgcgcgcggtcgaatccgatccctgtgacatcagcagtagcattaaaccggttgacggcggcgtacaattggaagccgattttactttcgcctgccaggcggaaaccctgatcttccagctcggcctgcgttaa

SEQ ID NO: 452416 - DNA, 1323 bp, Serratia marcescens
atgagccagaaaaacctattgactaaatcagctctcgcagctgcagtggcaattatttcttcaaacgtgtctgccgcaggattccagctgaatgagttctcatcagctggtttaggacgttcgtattctggcgaaggcgccatggcggatacggcggcctccgcaagccgcaacccggcgttgctgatgatgtatacccgtccggagctctctttcggcgcagtcttcatcgatccggacgtcgatatttccggtacctcaccttcccgcgccagtctggatgcgaaaaacatcgcgccgaccgcctgggtgccgaacctgcattatgttcacccgattaacgatcagttcgccgtaggcggctcggtcaccagcaatttcggtttggcgaccgaatacaacgacggttacgcggcgggttccatgggcggcaaaaccgacctggaaaccttgaaccttaacctgagcggtgcttatcgcctgaacaagaacttcagcttcggtttgggctttgacgccgtttatgccaaggccaaactcgagcgctatgccggcgatctgccaaaactgatcgccggatcgggcaagttaccgccacagttagccggccctgtttcgcagatcccggcagatacccagatttcgcacctgaaaggcgacgaatggggcttcggctggaacgccggtattctgtacgaagtggatgaaaacaaccgttacggcttcacctatcgctccgaagtgaaaatcgacttcgacggcgattacaaaagcagcctgccttcagccttcaacccgttgctggcctctcaaggccttccgtggggtaccaacggcaccaccattccgggttctctgagcctgcacctgcctgaaatgtgggagctgtccggctacaacaaagtggcgccgcagtgggctatccactacagcctggcctacaccagttggagccagttccaagagctgaaagccaccggcaacaacggacagactctgttccagaagcatgaaggcttcaaagacgcttaccgtatcgcgctcggcaccacctacttctacgacgataactggaccttccggaccggtatcgccttcgatgatagcccggtgcctgcccaaaaccgttcgatctccattcccgatcaggaccgtttctggctgagtgccggtactacctatgcgttcaacaaagacgcctcggttgacgtcggcgtgtcctacatgcacggccagaaagtcaccatcaacgaaggtccttacaccttcacctccgaaggcaaggcctggctgtacggcgccaacttcaactaccgcttctaa

SEQ ID NO: 452417 - DNA, 759 bp, Serratia marcescens
atgaactttcgcctgactggggtggcattcgcagcggcattactggtgggctgtgccagcgcgccagacaatgagccgcaagggcgttccgatcctctggaaggatttaaccggacgatgttcgacttcaactacaacgtcctggatccttatatcctgcgtccggtcgcggtggcctggcgtgactacgtgccgatgccggcgcgtaacggcatcagcaacttcacctccaacctggaagagccggccagcatggtcaacgccttcctgaagggggatccttaccgcgggatgatccacttcaaccgtttcttcctgaacaccctgctcgggatgggcggcctgatcgacgtggccggcatggccaacccgaaactggcgcgcgaagagccgaaccgtttcggcagcacgttggggcattacgatgtgggctacggtccgtacgtgatgctgccgggctacggcagctttaccctgcgtgaagacggcggcgactttgcggatacgctgtatccgatgctgagctacctgactttctggatgtcggcgggcaaatgggtggtcgagggtatcgaaactcgcgctcaactgctggattccgacggcctgctgcgcaactcctccgatccttatgtcatggtgcgcgaagcttacttccagcgccacgatttcatcgccaacggcggttcgctcaagccggaagagaacccgaacgccaaggcgattcagggcgatctggacgagatcgactcgcagtaa

SEQ ID NO: 452418 - DNA, 1215 bp, Serratia marcescens
atggctttttggctgattatttgcgtgttgctggccggcgccgccgcgttgctggtggtgccggcgatgcgccacggcaagcagagcgccgctacgcgcgatgcgctgaacaaggcgttctatcaggatcgcctcagcgaactggagcaggacgagcagcagggcgtggtggccgagcgcccggagctggttaaagagctgcaacagaacctgttgaacgacatccccgtcgaacaggcagagcaggcgaaaccgatcaaccgttgggcgttagtgccgggcgtgctgttattgctggcggtgaccgttggcttttatctgaaaaccggcgggttggcgcaggtgctggattggcgtctggtgcaggcgcaaatgccggaattgcgtgagcgcgtcgccaatgagcgcgccaaaccgctgagcatggaagagatcgctcgcctcgggctggggctgcgcaccgagctgcagcaggacgatcgcaatatcaatgactggatgatgctggggcgcgtcggcatggcgttgaacaacgccaccaccgccacgcaggcatttgctcatgcctatcaattggatccgaatagtctggaagtgcggctcggctatgccgaggtcttgacgcgatccaacgatccggaggataacaagcaggcgacgcagctgttgcggcgcatgatcgcggaaaatcacagcgatccgcgggtgctcagcctgttggcgttcaacgctttcgaacagggcgatttcaaacaggcgatcggcgcctggcaagtgatgctgcagctgctgccggctaacgatccgcgcgcggaagtgataaagcgcagtattgcacaagcaaaagcccaggccggcggagaaactgttaaactgaatgtgactgtttcgctgtcaccgcaggcggcgaaagccatgccgccgcaggggacgctggttatctcggtgaccgacggcgtcagcccggtgccggtcgcggtaaaacaattgccgctgagccgttttccgctgtctttctctctggacgacagcaacgccatgatgcccgagcgtctactctcggcacagcatcaggtgcaggtgcgtgtgcgcctctcacaggacggattggccacgccgcagccgggggactggttcggcgaaagctcgctgcagacattcagcggcaaagagcaggttagcgttcagataaacaagcaggtccctgaaaaataa

SEQ ID NO: 452419 - DNA, 468 bp, Serratia marcescens
atgaggctgattgccctgctgttcgccgcattgctgagctggagcgccgctgcggcgatcgatacctatcgcttcaactccgttgagcaggagcaacagtatcgcgagttgaccgaacagctgcgctgcccgaaatgccagaacaacagcattgccgattccaacgccattatcgccgcagacatgcgcaccaaggtgtacgagctgatgatgcaggggcaaagcaagcagcagatcatcgattacatggtggcgcgttatggcaatttcgtcacctacgaaccgccggtaacgccggcgacgctgatcttgtggatcggcccgctgctgttcgtgctgataggcggggcggtggtgatcctgcgcacccgtcgccggcccgatgcggcggtggacgatgaattctccgaacgggaacggcagcgcctggcggcgttgttgcaagagactgacaggaagaaaccctaa

SEQ ID NO: 452420 - DNA, 552 bp, Serratia marcescens
atgaagcgtaagctgctgtttatcccgttggtgctcttcctgctgctggtggcggccctgatggtgcaactgacgcgcaacgccggcggcgaagatccgaccatgctggagtcggcgctgatcggcaaaccggtgccgaccttcaggctggaatcgttggatcagccgggcaaaacctacgatcaggcggtgctgcgcgacggcaagccgatattgctcaacgtctgggccacctggtgcccgacctgccgcgcggagcaccagtatctcaatacgctggcggcgcgcggcgtgcgggtggtcggcctgaactataaagacgatcgcgccaaggcggtgacctggctcaattccctcggtaatccctatgcgctcagcctgtacgacggcgacggcatgctggggttggatctcggggtgtacggcgcgcctgagaccttccttatcgacggtcaggggatcattcgctatcgccacgccggcgacatgaacgagcgcgtctggcagcaggaagtgctgccgctgtatagaaagtacgggggtgaggcatga

SEQ ID NO: 452421 - DNA, 1971 bp, Serratia marcescens
atgatgccggaactgggcagttttctgctgtgcctggcgctggcgatcgcgctgctgctgagcatttacccgcagtggggcgcggcgcggcaggacagccgcatgatggcggtggcccgcccgctgacctacggcatgttcgccgcgattgcgctggcgttcctgtgcctggtgcatgccttcgtggtcaatgactttaccgtcgcctacgtggccaccaactccaatacccaactgccggtgtattaccgcatcgccgccacctggggggcgcacgaaggttcgctgctgctgtgggtgctgctgctgagctgctggtcgctggcggtggcgttgtgcagccgggcgatgccacaggacgcggtggcgcgggtgttgtcggtgatgggcatgatcaccgccggcttcctgctgttcatcatcatgacctccaacccgttcacccgcacgctgcctaacttcccgatcgacggcagcgatctcaacccgctgctgcaggatatcggcctgatcttccacccgccgctgctgtacatgggctatgtcggcttctcggtcgccttcgcgttcgccatcgcctcgctgatggccggccggctcgacaccgcctgggcacgctggtcgcgcccgtggaccaccgccgcctgggtgttcctcacgctgggcatcgtgctcggatcggcctgggcctactatgagctgggctggggcggctggtggttctgggatccggtggagaacgcttcctttatgccgtggctggccggcaccgcgctgatgcattcgctggcggtgaccgagaaacgcggcacgttcaaagcctggacggtgttgctggcgatcaccgctttctcgctgtgcctgctgggcaccttcctggtgcgctccggcgtgctggtctcggtgcactccttcgcctccgacccggcgcgcggcatgtttattctcgcctatctggtgatcgtcatcggcggttcgctgctgctgtacgcggtcaagggcggccaggtgcgcagccgggtgcagcacgagaccttctcgcgcgagaccttcctgctgggcaacaacgtgttgctgatcgccgccatgctggtggtgctgttgggcacgctgctgccgctggtgcacaaacagttggggttgggcagcatttcgatcggcgagccgttcttcaacaccatgttcacctggctgatggcgccgctggcgctgctgttgggcatcgggccgctggtgcgctggcgccgcgatgagccgggcaagctgtggcgccgcctcggcgtggcgctgctggtgacgctggtgctgtcgattctgctgccgtggctgttgcaggacagcatcgccggcatgacggtggtgggcctgattatggcgctgtgggtgatcatcctgacgctgatggagctgcatgagcgcgccacccatcgtcacggtttctggcgcggcctgcggcagctgtcccgcagccactggggcatggtgctcggccacctcggtgtggcggtgacggtgatcggcatcgccttcagccagaactacagcgtggagcgcgacgtgcggatgaaggccggcgacagcgtggatatccacaactatcacttcgtgttccgcgacgtgcacgacattcgcggcccgaactacagcggcggcgtcggcatcatcgacgtcacgcgcaacggcaagccggaggcgacgctgcacgcggagaaacgctactacagcgtggcgcgcagcatgatgaccgaggcggcgatcgacggcgggttcagccgcgatctgtacgcggcgctgggcgaggagctggaagacggctcctgggcggtgcgtctgtattacaaacccttcgtgcgctggatctggttcggcggcgtctttatggcgatcggcggcctgctgtgcattctcgacccgcgttatcgcatgagcaaaaagctcaagcgtgaaggcaagctggaggcgcaatcatga

SEQ ID NO: 452422 - DNA, 495 bp, Serratia marcescens
gtgaatccacgtcgtaaaagccgcctttatctggcgatcgttgtgctgatcggcatcgcgctgaccgcaaccctgatgctgtacgcgctgcgctccaacatcgatctgttctacaccccgggtgaaatcctgcagggcaagggcgaaaaccatgagaagcccgaggtcggccagcggctgcgcatcggaggcatggtgatgccgggctcggtgaaacgcgatcccaatacgctgcaggtcagcttcaagatttacgatgcgcgcggcgcgatcggcgtgacctacaccggcattctgccggacctgttccgcgaagggcagggcgtggtggcgcagggcgtgctgggcgagggcaacgtggtcaacgcgcgcgaagtgctggcgaagcacgacgagaaatacaccccgccggaagtggccgacgcgatgaaagagaatcacaaagggccggcggaagcgtataacgcgccgcaggcggagggcgccaagtcatga

SEQ ID NO: 452423 - DNA, 237 bp, Serratia marcescens
atgaatgccgcgttcgattcctggccggcgtttttcgccatgggcggttatgccttctatgtctggctggcggttgccgtcacgctgatttcgctgttggggctggtggcgcacaccgtctggcagcggcggctattgctcgccgagatcggccgccgtcaggcgcgcgagcggcgcattcgccatgcgcaacaatcaaaacaaaaatccgccgcaccgcgggagaaatcattgtga

SEQ ID NO: 452424 - DNA, 738 bp, Serratia marcescens
atgtggaaatggttacatcaactggcgcggcccgaacggctgtatcacgtctgcggccgctttatcccctggctgggactggcggcggcggcctgcctgctgctcggctgggcatggggctttggcttcgcgccgaaggattatcagcagggcgacagcttccgcatcatttatattcatgtgccggcggccatgtggtcgatgggcatctacgcctcgatggcggtggcggcgtttatcggcctggtgtggcagatgaaaatgtccgataccgtggtggcggcgatggcgccgatcggcgcggtgttcacctttatcgcgctggtgaccggttccgcctggggtaagccgatgtggggcacctggtgggtatgggacgcgcggctgacctccgagctggtgctgctgttcctctatatgggtgtcatcgcgctgtataacgcttttgaagaccgtcgcctggcgggccgggccgccggcattctggtgctggtgggcgtggtgaacattccgatcatccatttctccgtcgaatggtggaatacgctgcatcagggctcgaccaacatgcagcaatccatcgcgccaagcatgcgcaccccgctgcgctgggcgatcctcggctacctgctgttgttcgtcacgctgacgctgatgcgcctgcgcaatctgatcctgttccaggagcgccagcgcccgtgggttgccgggctggtgaataaggagcgtcagtcatga

SEQ ID NO: 452425 - DNA, 660 bp, Serratia marcescens
atgtttttgactctggtgcgtcgcgaattgaagatcgcctgccgtaaagggtcggagatcgtcaacccactgtggtttttcctgattgtgatcacgctgttcccgctggggattggccctgaaccgcagctgctggcgcgcattgcgccgggcatcgtgtgggtggcggcgttgctggcctcgctgctgtcgctggagcggctgtttcgcgacgactttctcgacggttcgctggagcagctgttgctgctgccgacgccgctgccgatgacggtgctgggcaaagtgtgtgctcactgggttgtgacgggattgccgctgctgatcctatcgccgctggtggcgctgctgctgtcgcttaatatgcaaacctggctggcggtggcgggtacgctgctgctcggcacgccgacgctgagtctgatcggcgctatcggcgtggggctgaccgtcggcctgcgcaaagggggcgtgctgctcagcctgctggtgctgccgctgtatatcccggtgctgatcttcgccactggcgcgatcgacgccgcctcgatgggcatgccgatcgacggttatctggcgatactcggcgcgatgctggcgggcagcgtgacattggcgccgtttgccaccgcggcggcgctgcgagtgagcgtgcactag

SEQ ID NO: 452426 - DNA, 633 bp, Serratia marcescens
atgctggaagccaaaagtctgagttgcgtgcgcgatgagcgcatcctgtttagcgagctaagcttttcagttcagccgggcgatatcattcaggtagaggggccgaacggcgcgggcaagaccagtttgctgcgcattcttgccggcctggcgcggccggacggcggtgaggtgtgctggcgcgggcgcaacacgctgcgcgatcgcgcggcgtatcagcaagatttgctgtttatcggccatcaaccgggcatcaaagccgtattgacaccctttgaaaatctgcagttttatcaggcggtgcgcggcgcggccgagcatcaggccatctggcgcgcgctggagcaggtggggttggtggggtacgaagatctgccggtggcgcagctttcggccgggcaacagcggcgggtggcgctggcgcgattgtggctcagcgcggcgccgctgtggatcctcgatgaaccgttgacggcaatcgataaacagggcgtggccgagttgattagcctttttgaacaacatgcgcagcggggcggcatggtattgttgaccacgcatcaggatttggctggcgtcagccaaacggtgggcaaaattcgtttggcggaacacgacgcggggagtttgtga

SEQ ID NO: 452427 - DNA, 927 bp, Serratia marcescens
atgaacgaacagccacgccaggagcacgagccggatgagacaatgcaggtagagagcgaagagcaggaacagggcaaacgcgaaatcgaagtcagggaagaaaatttgccttcgcgcgcggcagcggtgcatgagcagatccggatggaaggcgaaaaagagctagagcgcgacgggctggcgctgctgtggtcggcgatcgccgccgggctgtcgatgggcgcctcgctggcggcgaaaggcattttccacgcccgcttgccggacgatcccagccgctttttcattgagaacctcggctacaccttcggttttatcattgtcattatggcgcgccagcagctgtttaccgaaaacaccgtcacggcggtgttgccgatcatgcataagcccacgccgcgcaacctgcttatcctactgcgcctgtggggcgtggtgctgctcggcaatctgatcggcaccgcgctggcggcactggcgtttacccatatgccgctgttcgacgccgaaacgcgccgcgccttcatcagtctgggcgaagaggtgatgcgccatacgccgggagaaatgttcgccaacggcatcctggccggctggatcatcgccaccatggtatggatgttcccggccgccggcgcggcgaaaatctgggtgatcgtgttgatgacctacctggtggcgatttgcgatttgacgcatatcgtggtcggctcggtggagatcctgtatctggtgttcaacggcgcgatggaatggcaagcattcgtttatccgttcgccctgccgacgctggcgggcaacatcatcggcggcacttttatctttgcgctgataagccacgcgcaaatccgcaacgatttgagcgccaaaaataaggcggcgcgcctgcaagaggaaaaacggcgccacggcggggaaaaaccgtga

SEQ ID NO: 452428 - DNA, 606 bp, Serratia marcescens
atgtcgataaagaaaggactcattggctggcttggcgcattcttggcctttgatatcagcatattggcttcagtcatgatacagcaagtctcgttatcggaaagtatagaaatagccaaaatagccagtacattcttagctcctcccttattacttctgctctctacggttatcccgccggacgccaaggcgtcactcgccttctggcggtttaagtatgccttgccgggtcacagggcattcagtaaatatatgtatagtgacaatcgtattgatgagcgatggctacaagaaaatataacccccttgccttccactgccagagaacaaaacgttgagtggtatagaatttatagaaagcatcataaagaagaagccattcaggatatcaataaacgctttctgctttttcgcgatctggcgacaatatcgtttttgttcctcattattctgccagtgatcttgcgtgctactcatacggaagtgacgatctggccgatcatcatcgtctttctgattcaatacctcatgagcgcaatcgccgctcagcagatgggcatccgcttagtctgcacggcgctggccattgaggcttcgaagaaataa

SEQ ID NO: 452429 - DNA, 885 bp, Serratia marcescens
atgtcattaataaaaagcttctccgtcagcaatggcgatatgttctatattaggcataacaccgataattttacgatcattgattgccatatcaaccgcgataatgcagagagcatcatcgcagatataaagaagcaggctgccgacaagggaataagccgttttatcagcacgcatccggatgaagaccacttcggcggaattgagcttcttgatgccgcattcaagatatacaacttttatgtagtcaagaataaggccatcaaagcggaagaaaccgtttcctttaaaaaatattgtgaattgcgagatggagataaagcattttatatttcaaaaaactgtaaacgtaagtggatgaaccttagcgacgaagcaagaaaaagcgcaggcttgtctattctttggccaaaaatagacaacccgcattttactgacgcattgaacgccagcgagcgcggcgaaagttataataacatttctgctgttgtccgctataaactgaacgatggtgcaagcgtgatgtggctaggggatttagaaactgaatttatggaaaatatcgtcgatgatatagaattacaggaaaccaccgttgttttcgcctctcaccatggccgagattcggggaaaatccctaattcctggctagataagattaaacccaaagtgatcattatcggcgaggctccctctcgtcatttgcattactatacgggttacaagacaattacacagaatcgtgccggtgatgtcactatggagtgtgtcggccgtaaagttcatttctatgtttcctgtgaaaattatcaaaatgataagtttgataacgaatatgctgacaacgtagaactagggcgctatatcggttcagttaacatataa

SEQ ID NO: 452430 - DNA, 198 bp, Serratia marcescens; identical to SEQ ID NO: 432696

SEQ ID NO: 452431 - DNA, 261 bp, Serratia marcescens
atggatagagaaaatcgccccgattcgatgaataaacggcaccgcgcactcctgctactgtatttaaggctgtctgcctttggccgaatcatcgtcgccggtttaggaaaacgggccattcaattcatgctggcatttattctgttcatgttttcaggaaatgcgatggccaataattgggaacatcagccaatcgcagtagtcggtgcctggatacatatttcaaatgcgtcggccgatatcctatacatgccacactga

SEQ ID NO: 452432 - DNA, 801 bp, Serratia marcescens
atggattacagaagagatattcttttacaagtattggagtatatggaaaagaatattgtggaagggctttcggttgagaaggtttcaattatctcgggttactctaaatggcatttacagcggttgtttaagcattattttggcattacgctcgggacgtatatcaggaatagaaagctgagccgatcggctgtcttgctcaaacagcatcaagggaacatattggatgtcgccttggcatcggggtttgcctctcagcaatgctacacccgggcattcaaacgtttctttggcgaaacgcccaacagctttagaaacagccggggatgggatttttccacgcagatccccccgtacggcaacgataataaaccctatttctatcatacggtcatgccggatgacatcgagatgctgaagcattacaaaacattaattttccattctataaggaaatacagagatgccaatgatattgcgcagactaatgagaaacggctaagcaaaaattggggggcatataatgtagagaaaagcagggggaataaatgccatgccaacggcaaggagcaggcggtttttcactccatcttcaacttctatatcccaatgggcaaatatattgttattccctttatgggcgagttgcctgagtacgttaatttttttgaggggatatatgacgcttacttgccggctatcaacgccaaaatgagggaaagcttctttatcgagctatatagagatgaaaattcaaacagtaaagttatcaatgtcgatatacttattcctgtgacgtag

SEQ ID NO: 452433 - DNA, 222 bp, Serratia marcescens
atgggcaaaaacctgtcgtgcatctcgctgaattatcgaaaagtggcgggagcgtctgcgcccgtactggtcatcgatttttgcaacgagaacaacgagcgctacaccttgcgctataacttgccgccggataccccggaacggaccgagcgacgggtgtccttgctgctgtatctgttgcgtaagcacagagcggcagagatcgacaacctgacggactaa

SEQ ID NO: 452434 - DNA, 972 bp, Serratia marcescens
atgaccactgtctatgaatcaaatcgctttgcgtttcaggtgtcatggggctcgatattggccgggagtgccgtggcgctggtgacttatctgatattcagcgtgctggggacggcgatcggcgcccaggccgtggatatgatgcaaaagggcaacccgctgagcggatttggcaccagcaccgggatctggctgctggtttcaacgctggcgtcgttggccgcaggcgcgttcgtcgccggccgcaccgcgccgaatcgcggcggcttgcatggcctgttgagctgggcgatcaccaccttgctgaccacctggttgatggtgtcgctggcaagcggcgtggtggggctggctggcaacgcggttggcaaagggctctcgctggcgggcagcggcctggcggcggcggcgccaagcgtgggcgacagcctgaagcaacagttggataaaaatggcatcagcctggactggggaaacctggaaagccagttgaacgcaacgcttaagcagaccggtaagccggagctggatccggctcggttggagcagaaagccaatcgggcggccgccgacggcaaacagtcggccgtggatgctgcggccgatccggcgcaggccgccaccgagcttaagcagtggttcgagcgcgttaagcagtccggtgagccgacgttgagcgccgccgataaggacgcgctggtgaatattgttgcggcacgcaccggcaagagccgtgatgaagcgagccaaatcgtcgataactacgcccaggcttatcagcaggcggtgcagaaggtggaaaaactcaaggccgaggccgagcagaaagcgcgtgaagcggctgatgaagcggccaagcaactctctcgcgccgcgtggggctcactgctgatactgctgctgggcgctgcgttgagcgccggcgtggggcgaattgccgagtcaacccgccgtaccgtcacggtgagttga

SEQ ID NO: 452435 - DNA, 1497 bp, Serratia marcescens
atgagccaatccgtcttggccagcgaaaccaaccgcggccacctgcagcaaatcatctccggcttgtccgacggcgtgatcctgacggataccgatcaaaccctgctatgggccaacgaggccgcgttagccatgcatggcgtgagccaccagcaagccctgggggccaatgccggcgagtacgcggcgcgttttgccctgcgctatcgcaacaaccatccgctggctttggagcagtaccctttgaaccgggttgccgatggcgagaccttcaccgatgtggtggtggaagttcgccaggtcgacgatccggacagtttctgggtgcaccgcctgcggagcctgatcgtcaccgatccgcaggggcagccggagctgctggcgctgatcatgagcgacgcgacggagtgggccagcgccgaacagcgctttgaaaaaacctttaacgccaatccggcgccggcggtcatctgtcggctcagcgatctgcgctacgtcaaggtcaatcaagggttccttgatatgaccggttaccaacgtgaacaggtcttggggcgttcggtttatgaactggacgtcctgcaacaggccgagcataaagagctggccgtgcagcgcctgggggaaggcgccaccattccgcagatggaggccgagctgaaactgcccgatggaggcagcaagctggtggtggttgccggtcaaccgttggacatcaatgaagacgactgcatgctgttcacgtttaccgatctcgaaccccggcgccaggctgaatcggcgctgcgagaaagtgaagagcggttcgccaaatctttccgcctgagcccggtgccaacgctggtgtgcaccgcagacgggcggcgcgtgctggatgttaacgaagccttcgtccgcgccatcgaatgcgacgccgaagccttggtcggcaaatcggtcgacgagatcccggtttttgacgatcccgaggcgggcagccgtttgtttgccgccctggaaaaaaccggcaatgtcgaagggatggacatccgggtgcgcaagaaagggagcgagttaatcgactgcgtggcctcggcggatgccgtcagcatccataatgcgccctgctatctgttggtgctcatggacattaccgaacgcaagcgctcggagctggagctggtgaacgccatcgaggaagtgatgcaggacgcctcgtggtttagccaaaccctgatcgaaaaactggctaatgtgaaaagcatcaatcggtccaaccagaccgggtttgccgccaacgatctcaccccgcgcgagcgcgatgtgctgggtttgatctgcgagggactgccggacaagaaaatcgcggcgcgcctcaatctggcgctcaacaccattcgcaatcatgtcgcgacggtctattccaaactcggcgtgcacagccgcagcgaagccatcgtatgggccagagaacgcgggctgtttaccggcggaccagcctcgatgaatggcaagtag

SEQ ID NO: 452436 - DNA, 252 bp, Serratia marcescens
atgaacagcgaaaaagccaatggcatgatggaaaaagtggcgggcaaagcgcaggaaatcgcgggcgacgtcagcggcaacgaacgttggcaggccgaaggcgtcacgcgccaggcagtgggcgcgctgcaagaaaaatacggcgacgccctgagctgcgccggcagcatgatgaagaaaaatcccctcgccgcgttggcactcgttgccggcgcaggtctgttggccggcctgctgctgcgtcgccgttga

SEQ ID NO: 452437 - DNA, 930 bp, Serratia marcescens
atgttccccagtaaaaaacattcgcagcgggcgaccccgctgaccagctatcaattttccaggctgcatactttcgaatgcgtcgcccgtcatttatcttttgcgctggcggcacaagaattgtcgatcacccccagcgccgtgagccaccgcattaatttgctcgaaaaggaattggggtttctgctattccaacgctttcatcgcagaattacgctgacgccggagggcgagcgcatgcaatgggcgctggacagctccttcaacaccttgaatcaggaaatcctggacatcaaaaatcgcgagttgacggggaccttgaccctctactcgcacccgtccctggtgcaatgtctgctgctgccgcgcatcggcgattttatcgcccagcaccccaccattcacctcaacattctgaccgggcaggaaatcatcaacctggccaaccgcggcgtggatctggcgatgtacttcggcaaactgcgctcggggcggcatctggaagaagcctttatgcaggaatcgatggtgccgatctgcacgccgcagtacgccgccgcacacaatctgtatgatgcgccggaaaacctggctcactgtacgctgctgcacgatcgctacaactccggcgaagatgagtggcaaacctggtcacaacactttgcgctggggctggataccgacagtaaaagtatggagttcgaccgttccgatctcgcggtgctggccgctacgcggcaccttggcgtcgccatggggcggcttaatctggtgcaggactggatcaaaagcggcgagctgatcattccgttcgccgatatgaccgtgccctgcgaacactgctattttacctcgaccatctccgagcggcagtggccgaagatcctcgcgtttaagcagtggataatgaaaatatcccctctggtctga

SEQ ID NO: 452438 - DNA, 303 bp, Serratia marcescens
atggatgttgatgtacagaattaccaaataagctgcgaaagccaattcattattcagatgcaaatatcccgctatgcctggggcgtgccgttgattacgctcagcgataacggtgactttaccgtgataagaagccgaggttggtcgaaattggctaacgggatgccgctggaggtttattactttgccaataattccctgctgacctgggataaaaatcgcaaatatatctcttattcaaaggccggccggctctatgcctgcgcgttgcatttttcttattctcccaaagtatggcgataa

SEQ ID NO: 452439 - DNA, 924 bp, Serratia marcescens
atgaatgcaagaatcggtatcgacggcagggctgccgccgccatggtgatgctatgcgccatttgggggatgcagcaggtggcgatcaaggccgccgagccggatgtgtcggcggtgctgcaaattgccattcgctctggtcttgccgcgctgggggtttacctgctggcgcgctgccgcggcgagtgcttcacctgggatcgcgccacgctgagcgccggtttgagcgtaggggcattgttcgcgctggagttcttttttgtctccgaagggctgcgctataccagcgcttcgcatatggcggtgtttttgtacaccgcgccgctgttttccgctctcggcctgcattttctgattcgccaggaacgcctgtcgtcggtgcagtggcttggcatgctcatcgcctttggcggcgtggtgttggccatatcgggcatggctgagggcagcggcgacgcagctcggttgaagggcgatctctacggcctgctggcggggatcgcctggggcggttctacgctggtgatccgtacctcgcgtctggcagagtgtccggctaaacagacgctgctgttccagttgacgggcgcctgcgtgctgctgtcgttgctggcgatagcgtcgggcaatttgcacgttgttctgagccgggtggcctggagtagcctgctgttccaaacggtgatcgtgtcgtttttcagttacctgatctggttttcactgttgcgtcgttatcaggcgtcctcgctgggcattctcacctttatgacgccggtattcggcatcctggccggcgtcgtcatgctcggcgagccgctgcaaattgagtttgtattgggtgccgtgctgatcgtgctggggttaatcgtggtgagttgttcatatcttatttattttgaccgtagggtggcaccaaaaatataa

SEQ ID NO: 452440 - DNA, 291 bp, Serratia marcescens
atgagaaacctgttaatgttgttggtggggctgttttcattaccggcgatggcggcggagtcgcacgtttgccattctcaagcctatgattatgcagaggttagtaagctaaggttgtctgacgacactctgtttttctgccgcggcgtggggcgcctgacgatcccggaattggcgcgaaaaggctggaaggtgattcacctggcgcagcaaactgaatataccgactccgtcgacagcgatggcgaagttattaagctttatcaggaaatcgtggtgtataaagaataa

SEQ ID NO: 452441 - DNA, 1152 bp, Serratia marcescens
atggcaatgaaattgcgcgtaatgactcaagcggtggcgctgggtctggcgatcggcagcgcgtcgttcgccgctcaggcggaaatcaccctgctgaagcaagatccacaggccggcgatccgctcagccgcctgaacttcaccgttggcggcagtattcgtccgcagttcaacaacatgacgggcgacggtgacaagggctcgtacaagcgtaacggcttcgacggcggcacccgcttccgtttcgcggcggactactatctgttcgacgatatcagctggatcagctactacgagctgggcgtgaacattccggcgctgtttgactgggatcatcactatgccgacggcgcaagaaacaccagccgccgcatgctgtacaccggcctgaaaagcaacacctggggccagatgaccttcggtcagcagaacagcgtttactatgatgtggttggcgccaagaccgatatctgggactacgacatgctggcccaggcgccgggcaacggcattaacggcgactacgacggctcttaccgttcacgcaaaatgctgaagtacaagaaccgcttcggcgatgcggacgtttacgcttcgtacctgttcagcgacagcgactacctgccgggcaacggcctgcgctacaagcgcaaaggcggcggctctctgggcgtggattaccacattacgccggatctgacctggggcaccgcctggaactacacccgcgccgaaatgcgcaacccgtccaccagcggcagcaaaagctacgatcagaacattttcggcaccgccatcagctggaaaccggacaactggaccctgaccttcggcggcggttactacaacgacttcctgaccaccaagaaagccgacgtcaataattacttcgccggcgatgcgtggggtatcgaatacctggccggttataccgtgccggtaggtcagtacgcggtgaaatcggtgatgccgtactttatgggcgatcgcctggaatacatcaccggccgcaactaccagcgcatcgataacggcctcggggtgaccgtacagtttgactacggtttccgcgttgacgtggagcacgtgctaacatcgagcaccgacaacctcggcgatatgaccgtggtgcgtctgcgctacgatttctga

SEQ ID NO: 452442 - DNA, 1089 bp, Serratia marcescens
atgcgtcacctggttgcgcttttaccgctgattaccttgcttgctgcctgtagcagcacgccgaaacccagtaccaccgctacgccgcagagcaccccggtaaagggcggctttttgctgagcccggcgcacagcggcgcgccgctgggtggggatttcgccaataacccgaataccgcgcgctttatcgagaagatggtgcaggaacacggttttgaccggcagcagctgcacgacgtgctggcgcaggctcggcgattggattcggtgctgcggttgatggacaggcaggcgccgacgccgtctacccaggggccaaccgggccgaatggctcctggctgcgctaccgcaacaagttcatcaccccggataacgtgcaaaacggcgtagtgttctggaatcaatatcaggatgcgctgcagcgcgcctggcaggtgtacggcgtgccgccggagattatcgtggggattatcggcgtggaaacccgttggggccgcgtaatgggtaaaacccgcattatcgatgcgctggcgacgctggccttcgactacccgcgccgcgccgattacttcgccggtgagctggaaaccttcttgctgatgtcgcgcaccgaaggcgacgatccgctcgagttgcgcggttccttcgccggtgcgatgggctacgggcagttcatgccttcttccttcaaaagctatgcggtcgatttcaacggcgatgggcatatcaacctgtgggatccggtcgatgccatcggcagcgtggccaattacttcaaagcgcacggctggtccaaaggcgagccggtcgccattcaggccaacggccaggcgccggggttggaaaacggtttcaagactcgctactcggtcgccgcactggctgaagccggcctaagcccgcagggttcgcttggtgataaccaagaggccagcctgctgcggctggatgtcggcaccggctaccagtattggtacggtctgccgaacttctacgtcatcacccgctataaccacagcacccattacgccatggcggtatggcaactgggcgaagcggtcgggcgctcggcgcgcggcggcttctga

SEQ ID NO: 452443 - DNA, 453 bp, Serratia marcescens
atggaatctctcggacaactcgccaaagacctgtaccgtgggcgcatctcgcgcaaaccgtttattttctcgctggcgatcttcgccatcggtatcgtgctgctgtcgtttctgtcgacctatctggataaaaaccattttcgcgcccacgcgcacggcgacggcgccgaattcgtctcggtgctgctgtatctgctgtgcattatggtgtgggcgttgttctgtttcggcctggtcacgtggttcatggccaaaaccgcattccgactcaacgatatcggcctgcccggttgggcgttggccgtagcgtgctatgtttgctcggtgctcaacaactactcccccggcccggtagcgcgctggctgccgctgttcagtctggcagtcatggtctgcgccctgctgttgccgcccgacgggctgcgacgcaagccgcgtgaacagaccgattga

SEQ ID NO: 452444 - DNA, 438 bp, Serratia marcescens
atgttcagccattacttcgcccattacgccttcgatcgcgacagcgacgcctggcagatcggttttcgcgacttccccgagtggcaaaccgcctgctataaacgcgaagacatcgaactggaggcgcaggaaagcctgttggccgccatcgccgccacgatggatgaaggtttgcccctgcccgccccttctcctctgcaagccgatgagttgagggtacacctgccggcgctggtggcgctgaaaatcgaactgcacaacgccatgctgcgcaaaaacaccggtaaagcggcgctggcgcgcaagctgggtttcaacggcgggcaaatggagcggttgctggatatcggttacgcctcgaaggtggaagcgttggagcaggcgctgtatctgttgggctacgacgtgcgcgtgacaataagtgaagtttgccaataa

SEQ ID NO: 452445 - DNA, 525 bp, Serratia marcescens
atgagcaaccgctacgcgcgatcgcaaatcgttttacattggttgacgctgctgatggtgatcctcacctacgcggcgatgttgctgaaggattcggtgccggaggcgtgggcgccgctggtcaaaaatctgcactttaattttggggcttcggtttttgccctgatgctgattcggctggcggtgcgcaccctccacgcgacgccaccgaccacgccgccgctggaggaatggcaggaagtgggcgccaagatcttccattggctgctgtacgtggtattcctgatgttgccgctgctgggcgtgttaaccctggcctacggcgggaaatcgtggactttactggggtggccggtaccgcaatgggtgacgccggatccggtgatgcgcaagctggttaaaacggttcatgagacgctggcgaatatcggctactttatcattggcgcgcatgcgctggcggcgctgtatcaccactacctgcgcaaggacgacaccctgcgccgcatgatgccgggcaaataa

SEQ ID NO: 452446 - DNA, 1230 bp, Serratia marcescens
atggctgataacagtccacagcgccgtttcacgcgcattgaacgccttcccccttacgtattcaacatcaccgccgaactgaagatggccgcacgccgtcgcggcgaggatattatcgacttcagcatgggtaaccccgacggcccgacgccgccgcacatcgtggaaaaactgtgcgccgtcgcccagcgcgacgacacccacggttattccacctcgcgcggcattccgcgcctgcgccgcgccatttcgcgctggtatgccgatcgttatcaggtggatatcgatccggaaagcgaagccatcgtcactatcggttcgaaagaggggctggcgcacctgatgctggcgaccctcgatcacggcgataccgtgctggtgccgaaccccagttacccgatccacatttacggcgcggtgatcgccggcgctcaggtgcgctcggtgccgctggtggacggcgtggatttcttcggtgagctggagcgcgccattcgcgaaaccattccgcgcccgaaaatgatgatcctcggcttcccgtccaacccgacagcccagtgcgtggagctggatttcttcgagcgggtggtggcgctggccaagcagtacaacgtgctggtgatccacgatctggcctatgccgatatcgtctatgacggctggaaagcgccgtcgatcatgcaggtgccgggggcgaaagacattgcggtggagttcttcaccctgtcgaaaagctacaacatggccggctggcgcatcggtttcatggtcggcaatcccgaactggtcagcgcgttggcgcgcatcaagagctatcacgactacgggacctttacgccgctgcaggtggcggccatcgccgcgctggaaggcgatcagcagtgcgtgcgcgatatcgccgaacagtatcggcagcgccgcaatgtgttggtgaaagggctgcatgaggccggctggatggtggaaaacccgaaggcgtcgatgtacgtctgggcgaaaattcccgaaccttatgcccatctcggttcgctggagttcgccaaacgcctgttggcggaagccaaggtttgcgtttcgccgggcatcggcttcggcgactatggcgatacccatgtgcgcttcgcgctgatcgaaaatcaggaccgtattcgccaggcggtgcgcggcatcaaggccatgttccgcgcggacgggttgctgatgccgggcaaaggcggcggcgccaaataa

SEQ ID NO: 452447 - DNA, 540 bp, Serratia marcescens
atgaagctggtcactgaacgtctgcagttacagtcgataaccgccgaggattggccgctgtttctgcgcctgtaccaagatcccgaggtgatccgttacatctccgatccgcgcagcgaagcggagatccgcgcacggttcgaggagcgcctgccggtctgggacaaacacggcgaccagtggctgtgcctggtgatgcgtgagaagcacagcggagaggcggtgggcattaccggctttcgcccgcactgggcgccgtatcggcaggcggaagtgggatatgggagtttgccttccgggcagggcaagggctatggcaaggagtcgctgcgggcggtgctggattttgcggtgaacgcctgcggttttcacaagctgaccgccaccgtgaccgccggtaacgtcgcctcgcgcggcctgctggagtcgtgcggtttccagctggagggcacgctgcgcgacaactaccgtctggcggatcagtggtgcgacgactggctgttcgggctgctggcggcggagtttcagagcgctaaataa

SEQ ID NO: 452448 - DNA, 1245 bp, Serratia marcescens
atggcctctttagtcatcgacgatattccgcaggcgatcgttaacgtcaagcgtcagctgcgccaggcattgcccaactatcgcgacgtattccaggcgctggaagagaacatccgcggccaggtcgaacagattcgccgcgaactggccgccggccacaacccggtgccgcaaattgacgcggaagatatcctgcagcagcgcgtcactgaacaacaaaaagcgctgatcaaacaacgcggcgcctgcgctattcgcggggtgtttccgcgcgccaaagccgagggctggaaccgagaaatcggcgattacctcgatcgcaacaacttcgtcgagcgattgaagaacgccgccgaagacaactatttcggcaagctggccgccagcaagccacagatctacggcatctattggtcaaaaccgcaggttgaagcgcggcaggacgcgcgcatgcatgcggtgcaggtgtttctcaacagcctgtgggccaccgaaagcaacggcaaacagcatttcgatccgactcgcgtcgccacctacgccgatcgcacccgccgccgcccgccgaactcctcgtcgctgggcctgtcgccgcacgtcgacagcggcaccatcgagcgctggctggacgagaacttccgctatgtgtatcgccacgtcttctccggcgactggcagcagtacgatcccttcgccgccgacggccgcaccgaagtgcgcgagatagcctctccggcggtctgctcgatgttccgcaccttccagggctggacggcgctgacgccgcagcgcaccaacgccggcacgctgaacctggtgccaatcgccaacgccatggcctatgtgctgctgcgcgcgctgcaggacgacgtcgccgatgacgatctgtgcgatgcggcgccgggtcgcgcgctgtcgatctcggaaaaatggcatccccttttattaagcgggatttcccctattcccgatctggagccgggcgacacggtcttttggcactgcgatgtgatccacgcggtggagaacgaacataacggcgagttcgacagcaacgtgatgtacatcgccgccgcgccgggctgcgagaaaaacgacgcctatctgcagcgccagctgccgagctttatcgacggcagaacgccgccggacttcgcccccgacgatttcgaggtcgatttcgagggccgcgccaccgtcgagctgctgacgccgctgggcaaagcgcagctcgggatgcgctga

SEQ ID NO: 452449 - DNA, 1710 bp, Serratia marcescens
gtgcaccctttttttgaaatgctgttggcggtgtttgatcgcgccgcgctgatgttgatctgtctgtttttcctgacccgcacccggctgttccgccaactgctgcaaaaagaagaccatacgccgcttgagctcggcatcgtcacggcaatcttctcgctgttcgcgctgttcagcacctactccggcatcaacgttgagggctcgctggtcaacgtgcgcgtcatcgccatcatggccggcggcatcctgttcggcccctgggtggggatcgtcaccggcatcatcgccggggtgcaccgttatctgatcgacatcggcggcatcacctcggtgccctgccttatcaccagcatcatcgccggcatcagcgccggttacatcaacctcaaggtcaaaaaagagcagcgctggcgcgccggcatcgtcggcggcatgctgtgcgaatccctcaccatgctgctgatcgtgctgtgggccaagccgaccgagctcgggctggacatcgtgtcgcagatcgccctgccgatgatcctcggcacggtgtgcatcggcctgatcgtgctgctggtgcagagcgtcgaggatgagaaagaagtgatcgccgcgcgccaggccaagctggcgctggatatcgcccacaagacgctgccctatttccgcaacatcaacagcgaatcgctggccaccatctgcgatatcatccgccaggatatccgcgccgacgcggtggcgatcaccgatacccatcaggtgctggcttacgtcggcgtagggcgcgaagcctacccgatcggccgcgaagggctgagccgcgtcactcgcgaaagcattcgccacggcaaaatcatcatcaaaaacaacctggaaaacccggccgcgccgcagatccattcgcagctggtggtgccgctgtgggaaaaaggcgaagtgaccggcgcgctgaaaatttactactgccacgctcaccagatcaccaacacgctgaaggtgatggcggtcgggctgtcgcagatcatctccacccagatggaggtttcgcgcatcgagcacctgcgccagatggcggataaagccgaaatgcgcgcgctgcagagcaagattaacccgcacttcctgttcaacgcgctgaacgccatctcttcctccatccgcctgaatccggacaccgcgcgccagctgatcatcaacctgtcgcgctacctgcgctacaacctggagctgaacgacgaactgatcgatatccgcaaggagctgcatcagatccaggattacatcgccatcgaacaggcgcgtttcggcgccaagctgacggtgatttacgacatcgacgacgacgtctcggtgcgcattccgagcctgctgatccagccgctggtggagaacgccatcgtgcacggcatccagccctgcaagggcaaaggggtagtggtgatcgcagtgaaagatcagggcgaccgggtgaaaatatcggtgaaggataccggccacggcatcaatcaggaaaccatcgatcgagtggcgcgcaacgagatgccgggccacaatatcggcctgctcaacgtacaccaccgcgtgtcgctgttgtacggtgaagggctgcatatccgccgcctggagccgggcaccgaaatcgcgttctacatcagcaaaaacggcggcaagctgcatcaggagccgagcgcgccgccggtcggggaggcctcatga

SEQ ID NO: 452450 - DNA, 735 bp, Serratia marcescens
atgaaagccattatcgtggaagacgaattcctcgcgcaggaagaactcagctacctgatcaagaaacacagcaatatcgatatcgtcgccaccttcgaagatggcctcgacgtcctcaaatacctgcagacccaccaggtcgacgccattttcctcgacatcaacatcccgtcgctggacggcgtgttgctggcgcaaaacatcagcaaattcgcgcatcgcccgtctatcgtgttcatcaccgcctataaagagcacgcggtggaagcgttcgagatcgaagcgttcgactatatcctcaagccctatcacgaggcgcgcatcgtcaccatgctgcaaaagctggaggcgctgcatcatcgtcccgccggcgcgacggagccggccagcgcgccgagccgcggcagccacagcatcaacctgatcaaagacgagcggatcatcgttaccgacatcaacgacatctattacgccgccgccgatgaaaaggtgacgcgggtctatacccgccgggaagagttcgtgatgccgatgaacatcaccgagttttacggccggctgccggaagagcatttcttccgctgccaccgctcttactgcgttaacctggcgaagatccgcgagatcgtgccctggttcaacaatacctacattctgcggctgagcgatctcgagtttgaagtgccggtcagccgcagcaaggtgaaagagttccgcaagctgatgcgcctgtaa

SEQ ID NO: 452451 - DNA, 333 bp, Serratia marcescens
atgaaaaaaacgctgttgttactggctgcgctgctggcgctgccgctggcgagccaggccgacgtctccatcggcgtgaacgtgcctggcctgtcgttgcatatcggcgatcgcgacaatcgcggccattactgggacggctatcgctggcgcgatccgcgctggtgggccgatcaccgccggtatgaacgcccgcgcgggtactattacggcccgccgccccgggtgatttactacgggccgccgcggcgcgactggcgcgaccggccgcattaccgcatgccgccaccgccgccgccggggtattactaccgtccgggcccgcgctggtaa

SEQ ID NO: 452452 - DNA, 1230 bp, Serratia marcescens
atgaacaccaaaccggcaaatcgcagcttaatcgttctcggcaccatcatctgtcagatgggtctgggcaccatctacacctggagcctgttcaaccagccgctggtcgacaagttccactgggggctggcggacgtcgccaccaccttctccatcaccagcttcttcctggccttcgccacgctgttcgccggtaagctgcaagaacgcttcggcatccgcaacctgacgctgtgctccggcatcctggtcggcctgggccttatcgccagcgcccacgtcagctcgctcgacatgatctacctgctggccggcgtggtggtgggctttgcggtcggtatcgcctacatctccaccctgtccaacctgatcaaatggttcccggccaacaaaggcctgatttccggcatctccgtcggcgccttcggcagcggcagcctgctgttcaaatacgtcaatgccgccctgatcgccgacgtcggcgtttccggcgccttcttctactggggtgccatcgtgatgggcctgatcgtcgtcggctccctgctgctgaaagagccggtgctggcgaccaacgccgcacagccaggcgccaacggtctgggcaacgacttcagcgtgcgccagatgctggccaccaaagaagcctacctgctgttcaccatcttctttgccgcctgcatgagcggtctgtatctgattggcatcgtgaaagacatgggcgttcaactggccgggatggacttggccaccgccgccaacaccgtgtccgccgtcgccatcttcaacaccgccggccgcatcatcctggggacactgtccgataaagtgggccgtatgcgcgtcatcagcttcaccatgctggttaccgtgctggcgattgtcgccctgagcttcatgaccctgaaccacacgctgttcttcatctgcgtcggcgcggtggccttctgcttcggcggcaacatcaccgtgttcccggcgattgtcggcgacttcttcggtctgaaaaaccacagcaagaactacggcatcatctaccagggcttcggcctgggcgcgctggccggttcgttcgtcgccaaatacttcggcggcttccacgccaccttcatggtgattggcgtcctgtccgccgcctccttgctgattacgctgttcatcaaagcgccgaaagccgtggaagtggaaagcgaagaaacggcacaggcggcagagctggccaaagcctga

SEQ ID NO: 452453 - DNA, 963 bp, Serratia marcescens
atgacctatgccctcgtaggtgatgttggcggcaccaatgcccgcctggcgttgtgcactgttgcgacgggtgagattacccaggcgaaaacctattccggcctggagttcgacagcctggaggcggtgatccgccactatctgaaagcgtgcgatatcgaggtgcaggacgcctgtatcgcgatcgcctgcccggtgacggaagactgggttgcgatgaccaaccacagctgggcgttctctatcaaagaaatgaaggccaacctggggttgagtcatctggaagtgatcaacgatttcaccgccgtctcgatggcgatcccgatgctctcgccggacgacgtgctgcagtttggcggcggcgatgcgcagccgggcaaaccgatcgcggtgtacggcgccggcactgggctgggtgttgcccacctggtgcaggtcgatcgccgctgggtcagcctgccgggcgagggcggccatgtcgatttcgcaccgaacagcgaagaagaagacattattctggaggtgctgcgcggtgaagtggggcacgtttccgccgagcgcgtgctgtccgggccgggcctggtcaacctgtatcgcgccatcgtcaaggcggacaaccgcctgccggagaaactggagccgaaggacattaccgagcgggcgctggccgacagctgcatcgactgccgccgtgcgctgtcgctgttttgcgtgatcatggggcgcttcggcggcaacctggcgctgaatctgggcacctttggcggcgtgtacatcgccggcggcatcgtgccgcgctttatggaattcttcaaggcctcgggtttccgcgccgctttcgaagacaaagggcgtttccgtgactatgtgcgagacattccggtgttcatgataacccatggccaaccgggcctgctgggggccggcgcgcatctgcgccagacgctgggcatgcagctgtaa

SEQ ID NO: 452454 - DNA, 1248 bp, Serratia marcescens
atgctgcatccgcgcgccaatgccatgttggcctttgctttgcctgcgctgattatcggttccgcctccagtctggtgctgctgttgatgatgaaagtcgccgctacgctgcagcaatggctgtgggtgacgctgcccgacgcgctgagcctggacgcccaggcaccctggtggccgctcggcatgctgacgctgaccggcgtggcggtcggcctgatcgtgcgctatatgccgggccatgccgggccggatccggcgacggaatcgctgatcggcatgccgctgccgctctccgccctgccggggctgggattggcgctgatcgtcggcctggccggcggcgtcagcctggggccggagaacccgatcaccgccatcaatatcgcgctggtggcggcggcgggggcgcgcctgctgcctaaggtgccgcgcatggactggatcatcctggcggccgcgggcaccatcggcgcgatgttcggcacgccggtcgccgccgcgctgatcttctcgcaaaccctggcgggcaataacgaaacgccgctgtgggatcggctgttcgccccgctggtggccgccgccgccggcgcggtcaccacccagatgttcttcgtgcccaatttcgccctgcagctcgacgcctacgacgtaacgcgactgccggacatcttcagcggcgccatcgtggcgctgatcgccatcgcgctcggcatggtggcgctgtggtgcttcccgcacgttcaccgcctgttccattcgatgaagaatccggtgttgatgctaggactggggggctttgtgctgggcctgctggcgctggtgggcggtgagattaccctgttcaaagggctggatgaaatgaagcgcctcgcggcagacggcaactattcggtgccggcgctgttggccgttaccctgaccaagctggcggcgctggtgatcgccgccgcctgcggctttcgcggcgggcgcatcttcccggcggtgttcgtcggcgtggcgctggggctgatgctgcaccagcacgttccggcggtgccggcggcgatcaccgtctcctgcgccatcatgggactggtgctggtggtcacgcgcgacggctggctcagcctgttcatggcggtggcggtggtgccggatctgcacctgctgccgatcttgtgcatcgtgatgctgcccgcctggctggcgctggcgggcaaacccttgatgctggtgaaccgccggcaaccgccgcacgacgattag

SEQ ID NO: 452455 - DNA, 693 bp, Serratia marcescens
atgaaagtgttgggtctgctgggcggcatgagttgggaatccaccattccgtattaccgcaccatcaacgagcaggtaaaggcgcgcctcggtgggctgcattcggccaaaatcgtgctctacagcgtcgattttcaggaggttgaacgcttgcagcaccagggcgattgggacggcgccggtcggctgctggccgccgccgcggtggctttgcgcgccgccggcgccgaagctatcgtgatctgcaccaacaccatgcacaaggtggcggaggcggtcgagcaggccagcggcctgccgctgattcacatcgccgacgccacggcgctgcaggtgcgggaaaaaaacattcgccgcgtcgggctgttgggcacgcgctttaccatggagcagaccttctaccgcggccgcctgcaggaattgcatggcatcgacgtggtgacgccggccagcgccgatcgcgacatcgtacaccgcatcatctatgacgaactctgcctcggcaaaattcgcgacgcctcgcgcgacgagtatcgccggatcatcagcgatctggaacaacagggcgcgcaggggattattttcggctgcaccgagatagggttgctggtgagcgagcgggatgcctcggtgccggtgttcgacaccaccgcgatccacgctcgcgccgccgcggcgttcgcgctggcctaa

SEQ ID NO: 452456 - DNA, 453 bp, Serratia marcescens
atgcaactgcaaaacaagtctctcattgaacgtatcgtccacgccgtcggtttcgaggccatcgccgtgatggtttgcgccccgctgggcgcgtggctgctgaaccgctcaatggtgcaggtcggtgcgttggcggtgatgctctccaccgtcgcgatgctgtggaacatggtttacaacacggtgttcgaccgcctgtggccggtcagccgggtggtgcgtaacctgaaggtgcgtgcgctgcacgccgtcggctttgaagccggttttatcctgatcggcgtgccgatcgccgcctggatgctgagtatctcctgggcgcaggcgtttatgctggaaatcggtttcttcctgttcttcctgccgtacaccatggcctataactggctgtacgacacgctgcgccagcgctggttcgaagcgcgccagccgatcaattccggcgccaaataa

SEQ ID NO: 452457 - DNA, 891 bp, Serratia marcescens
atgcactattcaccggaagcgttacagacgttcgttgaagccgccgccctcggctcattttccgccgccgcgcgcaagctgcgcaaaagccaatccaccgtcagcaccgccatcgccaatctggaagccgacctggcattgacgctgttcgatcgcagtgcgcgccaaccggtgctcaccgccgccggccgcaaggtgctggggcacgtgcaggagatcctcgccgccagcgagcgactcgacgcgctgagcattcagctggcgggcaatgtcgaaccgcgcctgagcatggtattttccgatacctaccaaccgaagcatcacgacagcctgatgcagcggtttgaacaacgttacccggagattgagctggaatggatgatcgccgaggaaggcgacgtcatcgatctgctgcaaagcggccgcgcgcatttgggcatggtggaagtgcaaaaaacctatccgccggatatcgccttctcccgcctgcctgagcagaccgaaatggggttgttcgtcgcgcatgggcatccgctggcgcaggtcgccgcgccgaccccggagcaattatccagcacccgtcagctgatcctgaacacttacaccggcgccgaagcggccagacaaggcgggctggtctggtcggcgcccagctatctgctgttgctggagatggcggaacagggattcggttgggcggtgctgccgcactggctggtgcaacaatacggccacggcaggctcacccagctgcgcccgcgcggctggcccaaactgatttcggtggatgcggtatggtccaaactgaccccgccgggcccggcggggtactggatgctggagcgattgctggaagacgacgcggctcaggcggcggcgttgcgcgactga

SEQ ID NO: 452458 - DNA, 1662 bp, Serratia marcescens
atgactcagatctacacggtggccgattatctgctcgaccgtctggcccagattggcatccgccacgtcttcggcgtgccgggggattacaacctgcaattcctcgatcacgtcatcgctcatccgcaaatcacctgggtaggctgcgccaacgaactgaacgccgcctacgccgccgacggctatgcgcgttgcaaaccggccgcggcgctgctcaccaccttcggcgtcggggagctgagcgcgctgaacggcgtggccggcagttatgccgaatacctgccggtgatccacgtggtgggcacaccggcgcagcgtgcccagcgcgccggcgatttgctgcaccattcgctgggcgatggcgacttcactcactttgcgcggatagccaaagaagtcagcgtcgcacaggccaatctgaccgccgacaacgccgccagggagatcgaccgcctgatcgacgccgccttgctggagcatcgtccggtttatctgatgctgcccagcgacgtagcggaagcgccgctgccggccaaaccggcgccgctgatgctgcgccaggccaggctgtcgcggagcgcattgcaggcgtttatcgccgcagcgcgtgaaaagctgcaatcggcgcggcaagtgtcattgctggcggactttctggcggaccgctttggcgttgaaacggcgctggataactggatgcaggaggtggctatcccgcacgccacgctgctgctcggcaagggcgtgctggatgagaaccgcgacggttttgtcggcacctacagcggcggcgccagcgctgcggcgaccaaagcgctgattgaaaatgccgatgtcgtgatcaccgttggcgtgcgtctcaccgacaccattaccggaggattcacacatcatctgccggcggaaaaatgcatcgatatccaaccgttcgaagcctgggtcggtcgtcaacggttccgccgcatcccgatgtgcgccgccgtgcaggcgctgcaccgcctgactctgtcgctggcgtcgcgctggccgttgccgacgatcggccgtccggcgctgccggaaggcgatggggaagggttggatcagcacgccttctggcggcagatacaggatttcctgcggccgggggatatcgtgctggccgagcagggcacggcctgtttcggcgccgcgaccttgacgctgccgcgcggcagccggatgatcgtgcagtcgctctggggctcgatcggctataccttaccggcgaccttcggggtgcaaaccgccgaaccacagcgccgggtggtgctgttgatcggcgacggcgccgcgcaattgaccgtgcaggagctgggatcgatgctgcgcgacgggcttaaaccggtgattttcgtgctgaataatcagggctacacgattgaacgcgctatccacgggccggagcagagttacaacgacatcgcccggtggaactggacgcagctgccaacggcattggccggtgggcggccggtgacggcgttgcgggtcagtcagccggaggcgctgcgccaggcgctgagtgaggcggcgcagggcgaccggctggctttcatcgaagtgatgctgccgaagatggatattcccgaactgctcgatacgatctcgcgcgtcattcagtcgcgcaacgccgccgcctga

SEQ ID NO: 452459 - DNA, 1434 bp, Serratia marcescens
atgtcagccgcaacccataacgtcaaaaaagtcgctgaacaccgccagcgcattctcactctgctgttgaacaataaagaattggtcgatggcattctcggccgaccaggggatgaacacgccctcagccaaagcgaacggctgaaccaaacggcggaaatcaccggcctgctggacgacatgcacgccgccgacctggcggacctgctggaagcgctgccgcaggacgaacgcatggcgctgtggcggctggtgggcaacagcaagcgcggccagacgctggtggaagtcgccgaaccggtctgggacagcctgatcgaagaaatgagcgataaagacctgctcaaagcgatcaaaacgctggacgtcgacgagcaggcctatctggcgcaatacctgccgcgtaacctgatgggccggttgctgacctcgctggagccggagcagcgtgcccaggtgcgcgagatgagccagtacgccaaagacagcgtcggctggatgatggatttcgaactggtgacggtgcggccggacgtcacgctcggcgcggtgcaccgttttttgcgcatgcgcaaaaccattcccgacgccaccgataaactgttcgtcaccgatcgcaaaaacaccctgctgggcgaactgccgctcaccgcagtgctgctgaacgacccggagatcccggtgcgcgaagtgatggacagcgatcccgccacctttcagcccgaagacaaggccgatgaagcggccggcgcgttcgaacgttacgacctgatcagcgccccggtggttgacgcaaaaggcaaactgatgggccgcctgactatcgaagagatcgtcgacgccgtcaacgaagagagcgacaccaatttgcgccgcatgggcggtttgagcccggaagaagacgtgttcgccccggtcagcaaggcggtcaagacccgctgggcctggctggcgatcaacctctgtaccgcgttcgtcgcctcgcgcgtgattggcctgttcgaacacaccatttcccagttggtggcgctggcggcgctgatgccgatcgtcgctggcatcggcggcaacaccggcaaccaaaccatcaccatgattgtgcgcgcgctggcgctgcaccagattgaagtcggcaacatctcgcgcctgatgctcagggagctgggcgtcgccatcatcaacggcgtggtgtggggcggcatcatgggcgtgatcacctggctgctgtacggcgacgcggcgatgggcggcgtgatgacgctggcgatgctgctaaacctgctgctggcggcgctgatgggcgtggtgatcccgatgaccatgctcaaactgggccgcgatccggcggtcggctcgagcgtgctcatcaccgcgctgaccgacaccggcggctttttcatcttcctcggcctcgccactctgttcctgctgtaa

SEQ ID NO: 452460 - DNA, 1236 bp, Serratia marcescens
atgaaaccggaaaaaataaacacccagaaaaaagttgttgttattggcggtggttcatctggaataagcgtcgtggcaagcataaggaagcgagttaaaggcattgatataacggtaattgaacctggcgactgtcattattatcaaccggcatggaccctggtgggcggcgggctttttgatatcaatgaaacgcggcgttccatgcgcgccgtcatccccccaggaaccgcatggattcaggatagcgtggtcagagtggagcccggcccaaaatatgtcgagacccgccaagggcagaaaataaactacgacttccttattgttgcctgcggcctcgttttacgttgggataaaatagagggtcttgaagaaacgttgggaatgaatggcgtcacctctaattatcgttttgatcttgcggaatacacctggaaactggttcgtgaaatgcaaggcggcgaggcgatattttctcaaccaccaattccgataaaatgcgccggcgcgccgcaaaaagccttatacctttcatgcgatcactggcggcgacaaggtgtccttaataatattaacgtcaatttttgcctggcgggcgcggcggtattcggcgtgccgcaatttgttcctccgctgacccattacttgaaaaaataccgcgcacaggtcaacttccggcataatttagttcgcgttgatgggcagcgtcggcaagcgaccttttctctggacggtgatgaagaaggcaaacgcgaagtgacactgcccttcgatatgctgcacgtagtgccgccgcaatctgcgccggcgttcatttcgcaaagtgggttgtctgacgagtcaggttggtgcgacgtggataaattcaccctacggcataagcagtggcagacgatttttgcggttggcgactgttgcgccacgccaaatgccaaaaccctggcggcggctcgcaaacaggtggtggtggtggcagagaacatcgcggcgcagcttaacggcgctcctgatgcggcacggtatgatggttatggctcctgcccattgacggtagagaaaggcaaggttgttctggcggagtttggttacgacagtaaattgctccccacctttcctctgttcgacaacacgcatcccagccgtatggcatggtggctgaaggcctggtttttacccaaattttactgggcgggcatgttgcgcggggtcgaatggtttgccaaaagcaagccatag

SEQ ID NO: 452461 - DNA, 153 bp, Serratia marcescens
atgagtcaccagaaacgtaactctgtgcgtgcggcctacattcacaaggcagagcatctgggggagagaaggttgatgctgcagtggtgggctgattatctggatgctaatcgggagaaaggggttagtccgtttgattttgctaaaaaataa

SEQ ID NO: 452462 - DNA, 1752 bp, Serratia marcescens
gtgcttgattatttatcaaagcttcctttaccggctgagcaaatacctcagggtttaaaggatctattatttgttgaagacaattctaacccccagcgagaagttactgtaacccatcggtacgaaagaaataaatatcaagatgattatgattacactcatatgatcatggccgtagttcccgaggatgatgtcgcaaatctaagtgtgttacgtgaatcctgtgaaggtgtcgtcacattttccacgcaggactgcacagagaaaggtggggcttggggtacagatatatctatctccggttatgggtatattgtagcttcttggggatcaagtcttcactactccttttttttggccgaagatgtctggatgaaactgggattgaaaccaagactcataggggatgatgaacaaaaagtaatttttgatgaggtttcttcgccatcatatggagtcgcacaaggcgatgtctcaagcgaatattatttcaaaagcaacaaagatgttaaatggacgatgaggaatgattacctcagaaaatatttatggatgaaaggttgtgttggagtaaaagttttcttcttcgaagcctatatcgaacgaactaaagaggtactcgaactcttatcaggttctaatcactttagaatcgaacttccttggattgaatttgaaatagttgatcatacagataggatattgcttcaagcatggggaactgttcaatctgttcagccagagctttgctttgaattagacgtcaacacattagtatggcccggtcacaagtcaccgatgacaatgtcacgagcgaccgattatcgtagtggcgaatacgtatatgttgatgatgcttttcttactaaatatgagaaagataagacatacgaagccatcccattttttgatggtaatcactatcatgcaaaccctagctatggcgggcaatgggcatttagagactgtgtcagagtcggtagaaacttagtgaaaatacctttttatgagctttaccgaggagttccagaaaaggaaatatatcatgtgtttgattatgcgaaagaccaaagccttattgatactaattcattagatgatgagcatattgtttctaagacttttagatttgctagagaactagctgagcttaatgaaaacctagtatctctgggtagagttttagatgttcccctgtcgagttctgatatttttgaatacaacaaagatgaacttgatgatgaaggtattagaaactatcctgtactgcaaaagcttgctcatgtagcctcaatcgatatgcaagagcaagatttcctggctagatgcaagactataaacgagatcattaataagattaaaactggttcattaaagaaattaagtattgctatgggtgtaaaggctaaggatattgaaagattgcaaacgctaaaattattgcaaggaatattaaaccttacagggtttattaatgaacaaaatgaagagcaatccgcgctaagacatgctaatgaacttgcaaattataattcatccaatcatacgttagcagctctatttataaataatgacttgaggaacgctgaagctcatgaagcagtcaataaatccattgaacatttagctagtcttggttttgatagtgctactttggcatcaggttatagccatgctttagattttatatttgatcaagtcattgagagcttgaagaattttaatgcaactttaaatgaagtcctgcattaa

SEQ ID NO: 452463 - DNA, 567 bp, Serratia marcescens
atggctagcatcgatgatataaaacctcatcttagattgcatggcagattcatgatgagcatcactcctgcagatgtaggttcctttttcttaacactcatagttccaattatgactggcgttgcagcggcgggttttacagcctattttgcattaaaccggttttatcgcgaaaaatggtgggagaagaagcacgccgcttataatcagctaatagataacttgttggaaataaagtctatatataatcacgcatacaacataggtgatcgaagctatcaggcagctatgcaggatagagttattccagaagaaacagctgattggggtagactctatgagctaaatgctcagcttcatcggttctatgtgttggcacctatatcgttaagctcgtccacgagacagttattgagcaatttttttaagaagacagccgattcagaatacagcgtttatgaagaaggcatgccagattttgtggcctatggggagagggcatctttcgcacaaaatcttattgactccatagttaaagatgccgaatttgaattgaaattcaagtaa

SEQ ID NO: 452464 - DNA, 552 bp, Serratia marcescens
atgtgggtgtttgatggagttatgaaaatagctgattgggttgtcattacagcgatgattgcatttgttgttattattgctatttcttttgtattaatttcgtttgcatttgttaatgaatgttttaaaagaaatttaaagagcaagcttgagagaggtttgtcacaaggggaggtttctttctccgattttaaaaaccttcaaagaattataggcttagacgaaaaacaaacctatgcagctcttttgtctttgaaggctaatattgattttggtgatctcgaacataaaaaacttgttaaagataggcttgataagttaattgatgagtttgtgcttaaagagccgtttggctttttacctgataatatcaaagataatttgattttgttacgcggcgaaagtaaaaaaccagagttggttgataatttcgcagaggtgttgagggtggatataaaaaaacaaagcaggaatgattatcttttgaaggcgattagttatgttgggtttgttattggtcttgtgggttttatttgggggttttttaagtga

SEQ ID NO: 452465 - DNA, 216 bp, Serratia marcescens
atgaaggtaattattgaagcgccggaaggcatcatctggatgcgtaatgctgacactggcgaagggcttgcttcgaaaggttacataaaggacggcacacagcagaagataattgccgccctcgaagaggcattagctcaggctaaggatgaggccttatgctgggataatgttaatggaatgcctaatagtggcagcccttccgccaatatctaa

SEQ ID NO: 452466 - DNA, 945 bp, Serratia marcescens
atggcgaatgaaactactaagaaaacgcgtcgcgtacgtgttggtttttatacaggcaacgggagtaagaaagatggaatttcatcggcccgaatcgctttcgaacaaatattaaacgattcgaataatattttacctgccacctgcactgctgattttaaggataaaggactaaaattagttctacttgataaagatgtgttatctaataattatcatggctacatttcttggcggcgacactctttgctcccatttatagaagacggtaaaacgggaagcgaaagaaccataccaatgacagattcagattatgtcgttgaacgcacttattttatctactactacgagacagatctcttagttctatctctcaaccatcttggtccaaaagtgaatgacattgcctttgtcctttacagcaaagcaggacaaaaaaaggttagctttgaggctatttggaaagaagatgatatgaaagagcttcttgaagaaggtaatgtacttcgtagtttcgacctaactattgcagcccctagaaacttcaacaaggcgaattataactttgagcacaaattaacaagagaaattgttgatatggtggtcgggcttggtgggactcatcttaagctaaccatgcgagggagagccaggcctaagaaagacggtttcagttatttaagttcacaggttacagattcaattaaagagatgcttgagctttttccagcgggttctggtggtttaaagattaagaaagcagatgtaaccgaacctacaaactctagacctaaaagcttacttgaccaagttctaatcggtaaaaaaactattaacgtgataggcggatatccgtccgattctgatatcagagccgccatgatttctgctaaaattgacaatcaaaactacttggcgcagttcgagctaagtggtactagctaa

SEQ ID NO: 452467 - DNA, 240 bp, Serratia marcescens
atgagcaaagaaacaggcggacaggcattccccatgctgggaaatgttggatgcaactcagattggcaagtggaagacggtatgactttgcgcgattacttcgccgcaaaggttatgcagggaacgtttgccagcggaaccagagtaaccatcggcaccaatcatgaagaggaaatgctcggcatagccaaggctttttactctatggctgacgccatgcttaaagctcgcaatagttaa

SEQ ID NO: 452468 - DNA, 1287 bp, Serratia marcescens
atgaaaattgcggtagaaaaatacaaatcgatatacgaaaaaaaagaaataacaatcgatggtctaacaattctttccggttcgaatagctctggcaaatcgagttttatgcaaccctttctaattttgaagcaaacattagaaaaacaatatgattccggttatttgataataaacggtgaaaacatcaaactaactgatgccaaacaaatattatctaaagttggtaataacaaggacaaaaaattttccttagcattcactgagggagagtcgtcatgtcgcataatttatgaatatagaaaaggcgcagggttcatacctaaagaatcatcaatgcgcagcagtaaaatgaatagtggcataaccctcaaccttagaatgaaacatgatgagatgttgggaagggaaaaagaatttggttttatggatgaatacgcaaaaattaaaaaaataaaacccatttggaaaaccattaaaaagaagtgttttattatagcggaatatagatctccagataaaaaagcatctttttttgctgctggtgtggatccaacatataatttggaaagatttattcgtagtataatacacgttcccggactacgtggaaatccagaaagaaagtatcagattgcagagtcagaaaatgtattccccggttcttttgaaaaatatgtagcaagcatcatatccatgtggggtaaatcaagaaacatggataagtataatctattagttaagcaattaaattatttaggtctcgctagctctataaaggcgaaaagaaccgatgatacatcaattgaaataaatatatccagaaaaataaaaaatggagacgatgattgcgtaagtgttgcagatgtaggatttggtgtttcgcaaactctccctgttcttgttgcattattggttgccaagaaaggacagcatgtttatattgagcaaccggaactacacctgcatcctaaagctcagtttaagctagcagagatcataaaatcagctttagatagaggggttaaaattatcatagaaacccatagttccttattaattaggggtattcaaacaaaaattgctagaaaggagattgacagtacccaagtttctttaaattggttcacccaagatgaagaaacaggtgagacaataataaatactaaagctcctgacgagcttggggcttttggagattggccttctgatttcgatgatatatcgttatatgctgaacaacaatatttggatgctgttgaggaatctatatatggctcactataa

SEQ ID NO: 452469 - DNA, 858 bp, Serratia marcescens
atgtttaaattttatcctcctaatgaatatgcactaaaaaacatcgtagataacactatctatatgagccccgtgcagtattttaacgacccctatgagttagattgcaaggtggaaagagggtttccttctcttgatagtgatagtccgcggctccagcacatcttggaagcttggttgggtgacaacgtagatatgacactggtaaatgaacattacgaagagttcacctcagggctttttgaggcagattttagtaatggctcatatcggagtaaggttcgtgttgcctgtttcacgcgtaatccaatgaacgcgctcatgtgggcttactattctgcgtctatgagtggcatctgtgtagaattcgatgaggcaaaacttattgaggtctctgacacagaaacgcagatttttgatgtggtctactcagaagagtctccggtagttgataccgctgtcttagccgtctgggattcagtagcggattattactcagatgtttatgacccctctcatgagtatgaaaaaaataggaaaatttatgatgaaggctacagtctttcggtgaaatcaattcgggaaatatatcagaagctgatagccaccaaatttagcgcttgggagcgtgaagatgaagtgagaatggtaagatttattaatggagacatcaggaacgaggatggatacattttatcccttccggagaatgcaattaaatctgtcattctgggcccaaatatcccatcagcctataaagcgcagttgctgcagacactacaagcaagagatatcccctcaaaagcgatgttgaagtccggtaattatcgttgggaactgaagacgatccatggataa

SEQ ID NO: 452470 - DNA, 1377 bp, Serratia marcescens
atggcaaaccgcgcagtctccggcggcggccaactgacggccgcgctccagcgtggcggccgaccaggtgccggcgccgggcgtcgccaccggcgagatctctgcccgccacggcaaggcgctgccggcgatgcccagcacggcaccgaacagccccgccgcgccgccgaaccaccatttgccgcgcttctttttcttgggcggcgcggcctgccgctcggcgtccggcccgttcagcgcctcacgcagcttgtccgaggtgatcggcagctcgcgaaaacgaatgccggtggcgtcgaacaccgcgttggcgatggccgccgcgctgggcaccgacgccgactccccagcgcccagcggcggatcgtaagggcgaggcatcatcaccacgtccacctccggcacctccgggaaggtcaagatcgggtaagccccccactctttggcggagaccgtcgattcctcaaaggtcacgcgctctttcaacacccgactggtcgattgcaatacgttgccgtgaatttggtggcgcacgccgtccgggttaaccatcatgcccgcgtcgtggccgaccacgatgcgcgtcaccgccacttcgccgctggctttgtcgatcgccacgtcggccacccaggcggcccaggccgcgccaaagccgggaaacttgctgtggatgtaacgggcataagcaaagccgcgcccgcgcagcacgccgtcttccgccggggtctgcatcggttcggtgtgcggcgtccagccggcgcgttctgcggtgctgcgcatcagttcactggcgcgttcgtcatggatatagcgcagccgatattccagcggatcgacgccggcggcgtgggccagctcatcgatataagattcgtgggcgaaggtgttcggcaaggcggaaacgccgcgcatccaggaggcgcgcacgatcggcgccatgtcctcgatgctgacgcgcagcgccggatactcataaggtggcaccgaggtgcggtcgcccatttcataggccaccggcagcggttcgacccggccggtcagcagcagcgccagcgtcggcgcgccgttggaaggataataggtgcgaaaatcgtaggcgaccgggtgtccggcggcgtccagcccgccgtccacctccatcagctgcgccgtgcccttcggttcccacacatgttcttgttcgcgggtcagctgcacccgcaccggcctgcccaccgcgcgcgacagcaacgccgcgtcggcgcagacgtcatcggcgcaattgcggccatagcaaccggccgcctccatgcgaacgatctcgatctgcgcttccgggtactccagcagccaggccagatcggcgcgcagcaggtgcgggttctggctgcctga

SEQ ID NO: 452471 - DNA, 372 bp, Serratia marcescens
atgcttgcttgctatgaatgcggagtggacgatttatctgattttggctactacccaaccgaaaaaaaaggtgaatacattacttacgaaacaaactctgatctccgggacaatgagtctattccattgaatcaaagcatttatcagtactttctcgacgaaataaaaccgcatgtcgatgaagcctggattaacctagactccgtgaaaattggttatgaaatcagctttaacaagtatttctatcgtcataaaccgctacgaagcttggacgtagtagcaagagatatcattaatttggaacaaaaagcagacgggttgattgcgcagattttgggcacgaaagtagcagaagtacagagggataaatga

SEQ ID NO: 452472 - DNA, 903 bp, Serratia marcescens
atggtagccaattacttaattaactctaaaggggtgggaacaatccagcgcaatctgtactggccacaattaaagagagccttaatatttctacctactttcgaggaacaagtattaatctccaattttcttgacaaaaaaacaacacaaattgaccaagcgattgcgataaaagagcaggaaatcaatctgctgaaagagcgtaagcaaatcatcattcaaaaggcagtcacgcaagggattgatccaaacatcaagctaaaggactccggtgtcgattggatcggtaagatcccagagcattgggaaatccgtagaagtaagtttctatttgcacaaaggaaagaacgggcatggaaagatgatgttcagctttcagcaacacaggcttatggtgtaatcccacaagagcagtacgaagcattaacaggtaagcgagtcgttaaaattcaactccatttggataaaagaaagcatgtcgaaaaggatgattttgtaattagcatgagaagcttccaaggcggcttagagcgagcctggtcgcaaggctgtattcgatcatcctatgttgttcttaaagcattagaggaaattgaccctggattttatgggtatctattaaaactcccctcctacattgctgccttgcaacaaaccgcgagctttattcgagatgggcaggatttgaatttcgataatttttcacaagtagatttgtttattcctccaatccgtgagcagcgtgagattgcgaattacgtcagctcatttatgatatcttctgatgagggtatcgagttgttgttggcacaaattgagaaactcaaagagtacaaaaccacgctgatcaacagtgctgtgacaggcaaattaaaaattacactagagatggttgaacaatag

SEQ ID NO: 452473 - DNA, 123 bp, Serratia marcescens
atgttcacggtgaattatcaaaccagctcggtcaaggccaagaagttcaacgaacgtggctttcggagctctagcgcacgcaaaaatcttaggaaacggacggcggcagacctgaaacactaa

SEQ ID NO: 452474 - DNA, 834 bp, Serratia marcescens
atgtctgcgccagcgccgccagcgtcggcgttgagaacagcgtctgcacgttcgccgccaaaccggcacgccgcagttgagccatcaacttcaccgccagcagcgagtggccgcccagttcgaagaagttatcgtggcggccaacccgctccacgttcagcaactcgcgccagatctccgccagcagcgtttcgcgctcaccctgcggcgcttcgtacgccgcctggctctgtatcccctgcggctccggcagcgcccgccggtccaacttgccgttcggcgacagcggcaacgccgccaccaccacccaggccgacggcaccatgtagtccggcagcgccgcgctcacatgctgccgcagcgcgcccgccagcgtctcttccgccacgtccgccgccggcaccacccacgccaccagccgtttgtcgtcgcccaccgcgcgcgcatccaccaccgcttcccgcaccgccgggtgcgtcgccagcgtcgcttctatctcgccgcattcgatgcggaagccgcggattttcacctgctggtcattgcgccccaggtactcgatgtcaccgttcgccagatagcgcgctacgtcgccggtgcggtacatgcgcccgcccggcgcgaacggatcgctcaggaaacgctccgccgtcaagtcgggccgattcaggtagccccgcgccacctgcaccccgccgatatacagctcgcccaccgcccccagcggcaccggctgcccgtgctcgtccagcagatagatgcgcgtgttggcgatcggccgaccgatcggcaccgacacccgctccgcctcccgcgaacagtgccaggcggtga

SEQ ID NO: 452475 - DNA, 822 bp, Serratia marcescens
atgaaccgcacggcgctgaagtggctcggcagcaaagcccgcattatcgacacgctgcgccagcacctgccggaaggtaagcgcctgattgagccgttcgtcggctccggcgcggtttttctcaataccgactatgacagctatctgctgtgcgatatcaacagcgatctgatcaacttccacaacgtcgccaaaaaccatcccgaggtgctgatccgcgaagcgcgccatctgttcaacgcacacccagatcaggagggctattacggcgtgcgcgctgacttcaatctgcgctgtgacagcaatttcatctaccgtgcggcgcagtttctttacctgaaccgccacggcttcaatggtgtttgccggtacaacctgcgtggcgagtttaatgtgccgtttggtcatcgaaaagcgccctacttcccagaagacgagatcagaaccttcgcggaaaaggcgcaggccaagaaagccattttcctgtgctgcagcttccccgaggcgatcaggatggcccaagccggcgacgtgatttattgcgatccgccgtacatcccagccagtgcatcagccaactttaccagctatcacactgacggctttacaaacgagcagcaaagcaagctggcgcgcatgctccgtatcgccgccaatctgggccgtcacgtcgtggcctcgaacagcgagacggacgcagccaaagcgctgtactcagatttcgctatcacctcgattactgcccgccgctctgtcagcgccaaagcttccagccgtgcagacgctggcgagatcatcgcgaccatgagggcggcatcgtga

SEQ ID NO: 452476 - DNA, 528 bp, Serratia marcescens
atgagtgacaccctgctcccgccttcggcaagtacatggatgctccacaccgagacagccaccgcgcggctgtcggcgattaccgtggcgctccgcaccctctggacgccaaccgactgcccggtagatttgctgccatatctcgcgtgggcgctgtccgtcgatcggtgggataagaactggcccgaggccactaagcgcaagatcattgcagacgcatattttgtgcattgccacaaagggacgatcggcgcccttcgccgcgtcgtcgagccgcttggatatttgattgaagttcgcgagtggtgggattcaggagatccccccggaacatttcgccttgtcatcggcgtgcttgagcaaggcattactgaggaaatgtatcttgagcttgagcgtgtcataaacgatgccaagccagtcagtcgccatctgataggaatgaccttaatacagaatgtacctggaaccatttttattggcgctgccaccattgacggcgacgtcatcacggtttaccccggataa

SEQ ID NO: 452477 - DNA, 564 bp, Serratia marcescens; identical to SEQ ID NO: 436692

SEQ ID NO: 452478 - DNA, 1740 bp, Serratia marcescens
atgactgaaaaaatcgccaatgctgaggttgtcgccgtttatcccaacaaagtcagagtggctgtcgatgatcttttgaacttccaggcggctggagagtctcttcgtgttgggtcctttctcaaggtgtcggacaacgacaacgtttctctcatctgtatcatcgaaagcttttcaatcgagatgaaagaggtgaaaggcgacggcagcagtgactacaagcgcgtttatatgattgatgcgtatcctcttgggacccttaaagacggaaagttcaatcgcggcggtgacgaactcgccattccaccaaagaaggtcgtcccggcgacgaaagcggaaatcgcagccatctatgcagacagctatgctgctgaagaccgcttttgcttttcgtcattgaccaggcaacgtgatatcgctgtacctgttcatggcgaccggtttttcaacaaacatattgctgttgtcggtgcttcgggatcaggaaaatcgtcgagtgtgtcgtcggttctgcaaagggctatatcagccaaaacaggcgaataccagggcctcaacaactcccatatcctgatatttgatcttcattccgaatatgccgcagcgtttccgaaagcaaatgtcattaccgtcgatgatctcgtcctgccatattggttgctaaacgaagacgagatggaggacatgtttctggagtcaggtgacaataacaattacaatcaggaggcattgctgcggcagattgttactatcgcaaaaaagatcagtaatcctgatgtagagaaggttaattttgacagtccacttccatacgagatcaatcatgtagcgaatgcgttcagaaatctcaccagagagacaaagaatgctgacaattctttgctgatcaagttcaaggacaacacggaaatcgaattccctgacgtcgatgtccagatcgaacactattgcatggaattgcgcgatttcgcgccgacaaaacgtagtgagattaataaagggccgtatgccgacgggacaatcgacaagttcgaacgacgggtcagatcaaaaatcgcgaacacacgcctagggtttattttcggtgaaaaggctaagaacgcttctttggaggatgttcttagacagttcactggctacaacgcgggaggtgagtctaatgtcaccatcatcgaccttagcggcatcccttttgaactgctcagtatcaccgtttcgcttatctcacgtctaatgttcgatttttgctactatgcccggcgcgttgaaagcaaaaccgaacagccattcctgatggtctatgaggaagcgcacaaatatgcgccgaagagcggtctttcccgctataaggcttcactggctgctatcgaacgcatagctaaagaaggccgaaaatacggcatcagcctactgatttcgagccagcgaccgtctgaaatttcagaaactattttttcgcaatgctccaacttcctggcgatgcgtcttactaatcctgatgatcaaagctatgtccgccgactactgccggatacgcttggcaatttgaccgagggaatgcccgcgctagagcaaggggaggcgcttctgatcggggacgccgtcatcatgccgtgtgtcgtgtatgttgagaaatgcgaccccgaaccctcgtccagtgacgtgaaatatctcacgctctggaaagtggagtggaagaagatcgacttcaaaaagcgtgccgataactggcgagggtga

SEQ ID NO: 452479 - DNA, 1251 bp, Serratia marcescens
atgttggaagtcgacaaaaaacgcgaagcaacagcttcaattaggggctatttctaccagctcgatgcatcgttactcgaaatcctgaacgcgggcctgaacgagagcattgtcatcgagggcattgaagacttcgaccgttacaccgatgaaggcgtcatttacggccaggtaaaatactacgcggagcagaacctgacagactctgtactgcgtgatcctttgcataagctctttgttcatttccatggactcgaagacgcacagcgggcaggccgaaaatacctgctgtacgggcacttttcggaagttaagatcgatattggtgagctttccgtcgagcgctttaaatcggtgatggaataccgaaaggaagtgaaggccgctgacggtacaaaatcctacgaaaagaagtcgttgctcgacggcatggccgtgccagatgggctaattgaggtgttctgcaagagcttcagcatacaaatctcgacggaattttctgaacatcgcaatctcgtcatcgaggcaatacggaaaaaccaaaacgtctctaggcttgaggccgaaggttttcactatccaatggccttcgactacatcgccacactcgccactaaaaaagatcataacgaccgcaaggtcacccgtcttgatctgcaggaactgctcaaaggtactcaagccatacataatcgttggcttcttcgggagaaggatgcaagcgagtacgcgaagcatatgaaacgcctgtacttctcgctcacgaacggcgcaggaatcgtccgtgctttcatcattgaatgcaatgcggcaaccgacggttcggttgtctacgaccaactcagagcaatcggcaacaactggagttcggctaagcagcgccgcatccagaattccgagcgctacgcgccattcatcctgttacgtggcgcggatgaaaaactcatcatggaagtgaagaacatgcttttcgaaactggaacagttttcgtagatggtttcccatatcgcggatcgccattccgcatcgatcacgttcatagccagcagacccaagagcaccaaatcgaaattcgttttgttgacgacgttgaccagttgctggaggtcctcaatggggtggggcggaagttatgtcatatatacgacttcttccttgaacgccctataaccatggtgctgccgggtccaaagagtcggatgtattcgattcccatcagtagtatctccacaatcacgaaaattatctga

SEQ ID NO: 452480 - DNA, 240 bp, Serratia marcescens
atgaaagacagatcgcacgacacggcgatggttgagtgcttccgcgctgatccgccctatgcagcagagctgctgaccgaggtccgccgcgagggcaacccggccgagctagccattctgttgcgacagatggccacggcttcggtagatgttgcgggactggatgacaccgaaacgggccgggcgactagggcagattttcaggaagctacgagggccctacgtcaagcatgtggctaa

SEQ ID NO: 452481 - DNA, 1548 bp, Serratia marcescens
atgcagcgttcactaatgctgaattgtatcattatcggcctgcttctgaccgccggaagcgcctcggccgccggtgtcgatttggggcaaagcgacacttcaatgcaaagcctcttggatatgattctggagaaatccagcgagtgggggccaaagttacaagggtatgcccgaaatttgttgttcctgctcgctgggattcagttcgtttggacgttcggcaacttgctttggcaaagtgcggaagtaggagaaatgttccgcgagctgatcaagttcgtcatgacgataggctttttcctcgccttgctgacgtactccacggagtggagcacggctatcgtgaacagcttccgtgaagcaggggcacatgcttcgggatttgccaaagaactgatgcccggcgatatgttcgccactgctgtggaactatcagagaaagtgctatccagcatttctcttttctctcccgaaactgcgattgtcattgctatttcgggcatcatcattctgctgtgtttcgcgttcatcgccgcatttatgttcgtgacgcttgtcgagtcttacgtgctgattaatgcggccgtgctgttcgtcggctttggcggttcgtcgtggacgcgggatttcgcaattgctccacttcgctatgccgtggccgttggtgccaagctgttcattctgacgttgattgtcggtctgatcgtgacggtatcaaaggaatggttcgctcactaccaaggtgatattggatcaacgctaaccttaatgggtctgtcattagtgtgcgcctacctgtctcgctctatcccggatctgattgcgggcatgatcaccggctcatcgatgggcggcggtgcggcgatcggtggtatggcaatggctgctacggccgccgtcggtggcttggcagtgggttccatgatgtcaggcggcgcaaatgcagccggtggcgctgcgggtgcgttaggcggcggttctggtggtggcgctggaagtggattggccgaaagcatcaatgcgagtatggccggtggccagcagaaccccgcaccgtctgccatgccgtccatgaacagtacggcaaccacaggaacgtcgacgggcggtagcacagccgctcagtcggccggttctcgcgtcggtggctcgcaggcgggcaaatcgctgtcaggtagcggcatcaacagctcgatcgacactccgcgcagcagtggtctcagtgggccgcagcaggcggcgcaaacactgaaaaaagcggcctcaggcgctaacaacttggctagtgcggccacccgcggcctcgggacgctcgccgctatctctgtgccgggcatggaaggtgcggcgagtatgggtggcggcaccccgccgcaaatacctgacggcgatgagggtgacgaaaaacgcccacctaacagcggtgtatccgcagatgttgcggaagaaaccaacgttattcgtccagcacaagaaccgtccgccgccccggtacagccgaccggcgcggagaaatccaacaactcgaaacaggaaggtgaggcatga

SEQ ID NO: 452482 - DNA, 174 bp, Serratia marcescens
atgaacccctatagcaaaccaattcccggcacccttgctcgcatgaaggtgcccggcatgtcaacggaagcaacggccaaggctgacgcgctggcagcggcaggaaaccgcaagaacgatgaaacacaatcaactgctgccaaggcggccaatgcaccggagaccgatcaatga

SEQ ID NO: 452483 - DNA, 894 bp, Serratia marcescens
atggaaagggcaaaagagcgggacaaagcgttgtcacttgtccgcgagcctccacaaggcgacgcccagacagatttttttgtgcccagcctttatgacgtgggcggccgcgacaatcgcagcgtcatggatgtggccgtgttccgtttgtccaagaaggacaagcgagccggagaactgatccgctacgacctgaaggatggatatgtagaggtttccgcaggggcgcacgggatggcctcagtgtgggactacgatattgttctaatgatggtttctcacttaaacgaagctatgaaccgctatcgagaaggaaagggcgacaagccggggagagtgttccgaccgcatgtcagtgacattctcaaattcacccggcgcggtgacggaagtcgtcaggttgaagaggtggagcatgcgttagaccggctgcgaggtacgaccatcaagaccgtgcgtgagcacggcaaatttcgcactaccgaagcagagggccttattgcgcgttatcgtgttctgtcgcgcacggacaccaagaagatagcaaccgtcgaaatcgaggctccggagtggatttatcgggaagtggtagaggggaagcagccggacgtgctgactgtccacccggattacttcctgatcgagccgggaatcggtcgcttcctgtaccggcttgcacgtcgtgctgcgggcaagaacacggccaaatgggcgttcaagaccatttacgagcgcagcggcagcggagggactctcaagaaattctcgcaaaacctgcggcgcatcatcgaagccaacgacctgcctgagtaccacttgcgagaggaaattggccaaagtggaccgcagctcatcatgacgctccgccccgatctgccgtcaggcggtacctaa

SEQ ID NO: 452484 - DNA, 276 bp, Serratia marcescens
atgaaaaaagaaaataaatgtaatagtcagaactcagcagaacttacagcattgctagaatattctcgctttaccaagaaagtgcttgcgaagcctgctaatgaagtattcgatctatttactgacaagtattatatggaaactgtttacgatgatattattgataaaacgaagaagagtattgatcaaagtcagcatagattcatagattttgaagaggttagaataaatataatgtgcatgcatacagaggccattatgatttgttatatgtga

SEQ ID NO: 452485 - DNA, 843 bp, Serratia marcescens
  misc_feature (791)..(821): n is a, c, g, or t
atgcaatcaggaaaacgtgtacttttagtcggtgaccataaacaattacctccattgtattctgatgctcataaaagagctcttgctttaaaattaggtattgcagataaggatgttgacttagatgctattttacagagtgattttgcgagaggctttgaatctccgtatggaattcaagcaggagcatctctgctcactcaatatcgtatggcccctcagattggtaatattgtttctgcaactttctataacggcgagcttgaaaatgggtctcgttcaattcccgatatttataatgatgtcccagctgcattacatagtattgttacttggattgatacttctaagttgggtaagaaatgctatcacagcgaggataaaggtatcagtatctacaatcgtactgaagccgatatcatcatcaacttgctaaaaaatatatcctgtaaaccagatttcgttaactccttaaaggacatagtaaaaaaagatgaggctgctattggtgtaatttgtatgtatggtgaacaaaaaagaattataaggcaaaaatttaatgagattgattggaatgatgatttcaaatcattggtaaaaattgatactgtcgatagttatcaaggtaaagagaatagaatcataattctttctgtgacacgttctagttctgataaaaaacccagatttttaaaaacccccaatagaataaacgttgcaatatctcgagctatggatcgattaataatcgtgggttcaacacatatgtggacaggtgctaataaagatcnnnnnnnnnnnnnnnnnnnnnnnnnnnnnnnttatatcagatcgttcatctga

SEQ ID NO: 452486 - DNA, 1464 bp, Serratia marcescens
atgctgccgcagcgcgcccgccagcgtctcttccgccacgtccgcggccggcaccacccacgccaccagccgtttgtcgtcgcccaccgcccgtgcatccaccaccgcttcgcgcaccgccgggtgcgtcgccagcgccgcctctatctccccgcattcgatgcggaagccgcggatttttacctgctgatcgttgcgccccaggtactcgatgtcgccgttcgccagataacgcgccacgtcgccggtgcggtacatccgcccgcccggcgcgaacggatcgctcaagaagcgctccgccgtcagttcaggccggtgcaggtagccccgcgccacctgcaccccgccgatatacagctcgcccaccgcccccagcggcaccggctgcccgcgctcgtccagcaggtagatgcgcgtgttggcgatcggccgcccgatcggcaccgacacccgttccgcctcccgcgaacagtgccaggcggtgacgtccaccgccgcctccgtcggcccatacaggttatgcaactccgcctgcggcagccggcggtaaaactccgccaccagcgccgccggcagcgcttccccgctgcacatcacccgcaccacctgcccgcagcgcgtcgccgcctgcccgtccgccaggaagctttgcagcatcgacggcacgaagtgcagcgtggtgacgccatactgttcgatcgcgcggctcaggtagtccggatccttgtgcccttccggcttcgccatcaccaggcgcgcgccgaccatcagcggccagaagaactcccacaccgagacgtcgaagccgaacggtgttttttgcagcaccgtgtccgccgccgtcaggccgtaggcctcctgcatccacaccagccggttgaccaccccgcggtgttcgttcatcgcgcccttcggtttaccggtcgagcccgaggtgtaaatcacgtacgccagatgcgacgcctgcgcgcgcggtgccgggttctcggcgctcagcgtctccggcaacgcggcctccagcgccagctgcggcgtcacgggttcgcccagcgccgcccggccggcggcgtccgccagcagcagcaccgggtcggcatcctgcaggatgtactgcaggcgttcgcccggataggccggatcgagcggcacataggcgccgccggccttgaggataccgaacagcgccgtcaccatgttcaggccgcgttcggcgcacaccgccacccggctgtccgggccgacgccgcgcgctatcagcgcgtgcgccagccggttggcgcgggcgttcagttgggcgtagctcaggctttccgcgccgctcaccagcgcggtggcgtgcggcgtgcggcgcacctgctgctcgaacagcgccgccagcgtctgatccagcgggtagtcacgctcggtgcggttccagccatgcaacagcagttcgcgttccgcctccggcaccaccgccagtga

SEQ ID NO: 452487 - DNA, 513 bp, Serratia marcescens
atgccaaaagttgaaggcaaaattttgctgcaacgttcccctgacggtaatgttgcacctctgagcgttgcctctgatgggatcgcactttcccctgacggcaaaacgctgtattacagcccactttcgggacggcacctttactctgtgccaactgacttattacgtgatatacgcgtcactgagcaacagctttccaaaaaggtaacagattggggagagaaaggggcttcggatggattggaggcggatgctacgggcgcaatatatgccagcgattacgagcataacgcgattcgaaaaatgagcaaggatggacgttggaccaccattgcccacggaccacagcttctctggcccgacactctttcaataggttatgacggttatctttattttatcgtcaatcaggtccatcgtcagccaggtttccataaaggggaagataagcgacagaagccttatgcgctgctccgcatacgtatcgatgctgctcctgccgaaacgcggtag

SEQ ID NO: 452488 - DNA, 978 bp, Serratia marcescens
atgatagcgctccttcgtcaactatcaggtaaggcgaaaagaggccgtggcagtagtgagcagcgtttatcactaacacaattggaagcgatcatcactgtctctgctactcattttcctaatgcagatcgcgttgcaagaaacgactctaactcagcaaacaattgggagtatgctgattttatcaaaagattgattgatgacgtttcttccttttcctcatacgatgccggtgaagtatttgaacgtttattattactgccagaatgtacaagttaccgggattatctcttgcacgcccaaagcaaccagaaggtgcggtatcgggaatcacagtttcaacacactaactggaagcaagcgttgaatacgcttaaaaatcagaccccagctaatgtaatggatctctatgagttattgttagatcatttgcgggatatcgctaaccgaattacttatgaaaataccgatatttataaacagttctggaatgagaatggcaatggtcaaattttagtgcctaagcctgaagagagctgtcggaatttttttctggagctgcttagagcacgactccatccgttacaaataatctgtgagccagaaggccacatggtttcgagtaaaagggctgatatcatcatttcacttccaggaataaagatccccattgagataaagcgtgattatcaccgggacgtctggagagcacttaacgagcaacttgaccaactttatactaccaatcccgatgccgcaggctacggcatctatcttgtgttctggtttggtgcttctcgaccaaacgctatccctcgcccggagaaagacacaccacccccagtaaacgccacgacaatggaggacattcttaatgaagctgtgccaatggttaagcgaaaccgcctgtctgcgatagtaattgacgtatcaggtgaggctaattcgactattgaaacgcaaaaatcatctatgtaa

SEQ ID NO: 452489 - DNA, 426 bp, Serratia marcescens
atgcgcactcctcatcttgttcctttatcgcagcaagctctcgccattctggaaaagatcaaaagtatgagtggaaactgtgagctgatcttcattggtgatcacgatccgcgtaaacccatgagtgagaacacggtgaacaaggctctgagagtgatgggctatgacacaaaaacggaagtctgtgggcatggtttcaggaccatggcttgtagttcactgatagaatcggggttgtggtcgagggatgcagtagagcggcagatgagccatcaggagcgtaactctgtgcgtgcggcttacatccataaggcggaacatcttggggagcgtaggttgatgttacggtggtgggcggattatctggatagaaatcgtgaaagtagggttagcccattcgactttggtaaccatttattcagttaa

SEQ ID NO: 452490 - DNA, 2313 bp, Serratia marcescens
atggttgcagactatccgttactgccagtgcgtcgtcgtttctgggagcgagtcctacctgcgctggataaaaccggaaccggatctcaactacgaaatcagttacgtgtagtgcatgaggctacaaaatctacggcacttaaaccgttgggttctgttgtccctgccgattttatctatgaacaaattgcaatcaacttgctacaaacgggtgttattggcaaagagatctacgaaaagatagctcgcttcaaggctggggacgaagatgaagtcctccagggtagagtgctttcgttgatactgctcattagtaaactaccaacagatatcaatcacggtattgcctcaacggaagctttcctcgctgatttgctcttggaacatttaagtgatggtaagcatgaactgagagcaaaattgccacatttaattcaacaactggttgatgacggcgacttactgccaatgaatactggtgcaggtgttgaatacaggttgcaaacgcttgaaagccagcagtggcatgatactttcaaacaacaacaaaatgatctacgcggtaacccacagcgtttagaaacgttccgcagcctcgaaataaaaaaccgtgttaacactgccctagggtttggtagcgtgaatcaaggggtcagtaacgaaccccgtaagatcaccgtgtgtttcgatcaggatcttcctgccgatgctaaaaaaaatctctatgctcatgtacttgaatgtaaagaaaaagctttcgagggtgcagtgcgtagtgcgaaccctgatgacgccactattttcattcatgttccatccatgcgccgtaatgagctactgagcgcaattgtcgattttaaagcggcggaaacaactctggaagtgagtgggataccctctacggatgcgggtaaagacgctcgcgctgcaatggagcaccggaagtatgaagctgatcgcaccaagaaactgattcttaaagaaattattgatggtatccaggtacaaatggctggtgggagcgaagtactaggcgacacgctagttgagcagttccagaatgcaggtaagaaatcatgtgaacggctctatacagagtttaagcaagcagatcaaagaggttgggataaggtatttgagcgtgcaagtaaattcgctgatgccaatgctctggaagctgtaggccataatgatgaagtggaaaagcaccctgtctgtgtcgccattaaacgctatatcggtgttgcaaaaactgggggagagatacgagaaaactttatgtctgctcctttcggctggccgaaagataccgttgacggcgctctttttaccatgttggctgctggtgtattgaaagcaagcgactctcaggaaaaatcagtcgatgcgaaaagtttggagcgcagcaaagtctctcaaaccaactttcggcctgaaaccgttagcttgacgccgcgacagttggcgggcattagaagtttgatccatgcgcttggtttgaactgtaccaatggtgaagaacaatccaaattaagagatgcgatagaaactgctaagcaattggctcgtaaagcgggaggcgacgccccattaccattaccaccaaaagcagaattactcgttgaagttgaaaggctttctggtaatgaacagctaatggcagccttcgaacgacatcgcgatattatcgatgaagtggagcgttggaaagggcttgctgaaaaagtgttcgtcagacaagctcgctggggcgaactaaaatcggcgcttaagtattgccaaaatttagttggttttgacgagctcatgaacgaggtgcatgcgattgagcaaaaccgaagtctgttagccgatcctgatccagtacagccgttgctgaagcaggtaattgaaagaattcgcgttgcgattttgaaaaagtatgaagattttcaaactgaatataacgaatgtctaaaggaattgcatgaagatgcaatctggagccagctttctacagagcagcaggagcgattgctgacaaagcatcatctggataacctggaaatgtcaccattatctgataacgacagagtactcgattgtattgaaaatacctcgttagaacagtggagtgataaaacctctgctttggcaggccgttttagccgtatgcggcaggatgcggttgatatgttggtgcctaaagcaaaaatcgtacttttaccaaaatcaatcattgaaacagaggctgagctcgattcctggttggcaaaagttagacaagaagttatgtctgctttagctgagaatcgtcctgcatcgttgaaataa

SEQ ID NO: 452491 - DNA, 357 bp, Serratia marcescens
atgtcgccccatgtgtcaccctgcaacgttggcacctcgcagggcgtgaacaccgattcagggggaaacagcacgagcggcgccggcggcggtggtgtccgttccgcgcaggaggccaagaacagcaccaggagcagcgcggcgggcgcactcgtcattctggattgcttcacgatacttcctctggtagttttcgccctgctggcgcagctgctgctctctccgttgctgttcggccatcattgcgcgattacgggcgtcatccgcgcgcagtgtggtgatcagtcctgcctgctgcgccagcgtttttttctgctctgcaacctgctggcgtgccagatccagtcgatgcgataa

SEQ ID NO: 452492 - DNA, 918 bp, Serratia marcescens
atgattttcataaaaaccgataaaggtcatgaaaaatatccgcattgggatgatgtcgccaaaagggctaatttcgtcaacaaattatctaatactgaacacaagctttcgcatatttttggttattatgagttaaaggaagaaatccactgcgctttaacttcttgcaatcagccacacggtaagggttacctagtaacaaccgagagcggtcttgaaactaatattggtcatcggtgcggtaaaaaaatctttggtgttgacttcgaaaaccatgcgaatgaatttgacagattccgtgaaaacgaagagagaaagttaagtataaaatctgcaaaacaaaaccttgatgcgtgggaggcttcgctagagggtttacgctcaggaaagcccccgattcaatggttgataactagcattgagtaccttcaaaattcaaactatgtcgggcgcgcagccgctatggagttccgcgccctatcacgcactcaagatagcaacgtaacaattgatgttaccgtaaaagataaaaaatatgaggctctgcttttcaagttcaataagcactttagagagtctggccaagccctggaacaagagtcagttggtaaagtaagaaatctgcacgtgctcctgacagaaaaccacctgaaggttttgtttgccaccgcaatggcaaatatcaagcaagttcgggaatgtgatgaaaattcggttcccagcccaattttggcagacatatctagaaaggctaacgctttacaaacagaaattaataaagtactcgatatttataatgatgctcgaaattttttgacgaagaaaaacctttcacctgttttaagcaaaatacagcaaatggatacggtaaccaaagacgataaggaacgctttgcgtatttcctgactaacttctaa

SEQ ID NO: 452493 - DNA, 285 bp, Serratia marcescens
atgtgcctgggcgccgtatggggcaccggtgaaggtacccgctatatatcagctcttgccagtaacctgatcgtaaagcttctggagagcgctgataactgcgggaagatcttcagtcggtataaagaactcatcaccaagctcatcggtagttggatcgtttttgaaggtcatgtttacaccatcgctctcttcgttgtagctgacggtgatttcagatttatgaggtacggcaatgattacgttagacaagttaactccatgtattgcagttggttgaggtag

SEQ ID NO: 452494 - DNA, 696 bp, Serratia marcescens
atggctaacctagtttttgattgcccacgatgcggtgttaaaagagtaacgtttgcagttcgcgggattattctcgatagatctaccgaaaatgattatgatagttatgattatttttgtgagtgtggggtttgttactctgcagttgttctaaatgtccatagaaatctagatatgctttctcagcggatgtcaaaggatgagattttaaaggaaaagggaatggtggaccattttgtaactgtaaagggttactcaacctttatagattatacgtataaacgccctcctgaatttttacctcaagaaataaacgatgcgtttattgaaggggctaagtgcatgagtattggttgttataatgctgcggcaacaatgttccgtttatgtttggactttgcaactaaagaattattgccgaaaaatgatgatgacggattaaatcaaaaaataagaagaagtttaggttttagaatggaatggttgttcaaacgtaatattttacctgaatcattaaaagaactggctgagtgcgtaaaagatgatggtaatgatggtgctcatcaggggattttggatcagactgctgctttagatttacaggattttgctgaaacgcttttagagcggctttatacggaaaaagaaagattgagattggcaaaggcaagaagagcagaaagacacaaaaagtga

SEQ ID NO: 452495 - DNA, 639 bp, Serratia marcescens
atgcaaatcaccaaagagcaagttaaagcctggcacgcatgcaccgacggttaccgctggttccttgagaagttcccgcagggtggcgcgtacgctgccgttcaccaagcgttgaccgaagataaacgcttcgacgatgcgcgttggctggttagccagatgtaccgcactcacctcaataacgccgagttcatcaaggccgagaccgctgtcaccgacaagctggtgaccgacctcaccagcatggagcagcccgcggataaggttgaaggagagaacagctccggcgacgacgcgcgaatcggcagctccggctacaacgcgcaaatcggcagctccggcaactacgcgcaaatcggcagctccggcgacgacgcgcaaatcggcagctccggcgacgacgcgcaaatcggcagctccggcgactacgcgcaaatcgatgctacagggaaaaatgctgttgtcgccgcggctggatatgttcatcgcattgtcttgggtgaaggtgcttgtgctgttatcccctaccacgacggcacccgcacccgatttgctgttgcctatgttggcgagaacgacattaaagccaacaccccatataccgtgaacgaaaacggcgaattcgtcgaagccgactaa

SEQ ID NO: 452496 - DNA, 438 bp, Serratia marcescens
atggataaattcagcgaactgagtagcaatgccaggaaagcggcgaacacattttacagctggtcgcagctggcaaactgcacatcagagcgtgtgagctgccttacggtggagcatttgaaggatacatccgagctgttctcagctctgcttgcagatctggaagcgaaggataagcgcatcgcagagctggagtccatccgagcagacgcatcccaggtgctcaaagaaatcggcaacgagctgggctgcaacctcgacaacgagtcgatcatgatggctatcgatgcgcttaaagagcggctggctacgccggtgcggttgcctgaaagttcaggatgggccagcgacccattcaatcacggaagaaacaacgggatcaatgaaagtgccgctgccgttcgcgccgccgggttcaaggtcaagggggataagtag

SEQ ID NO: 452497 - DNA, 189 bp, Serratia marcescens
atgaccaaagcattaatcgaattcacccccggccaccacgaaaagcaacaagaggctatggctcgataccacgccaagcttgatgcgctgcgcagcatacttatcgaccgcggcggcagtgagagcaaggaaagcctggaaacgatcgctgagaacatcagcgcagcattcgacaaaattaaactgtga

SEQ ID NO: 452498 - DNA, 570 bp, Serratia marcescens
atgaaatatatgacaatagcgttatcgattgctttagctttatcggcatgttctgagcgaaagactgaaaagttcagttataactttggaggggctgatagtcagatttctgagagtaaaaatgactctttgccattggcattggggcgccctggtggcgatccactatcagtggataatccctcatcgtacaagtacttgcttaaaaatagctccaatgacaactcgctgcaaaaaaatagtcaatcgccttctaactctggtccaaagttagaacttatccagccagagaatggagagactttaaaggactctgagagatatctatcccagttctataactgtgcaaacactgaagcaaaaaaatatgctcgccttaacgaggcagttgagtcgatagctaaagttgcggtttcctcttgcgagtcgcttgtttacaaggcaatgaagtcaaatatttattggctaaactcttcaccaagcgggaaggggagcgcaatagctcaaataaagagaaatggggaatcggtagcattaaagtcagcaatggatgcacggttgcaaaactaa

SEQ ID NO: 452499 - DNA, 729 bp, Serratia marcescens
atgactgcattgaatttagcaaacaacgctggcgctgtcactatgtccagcctggaaatttctacgctggttggaagtcgccatgacagtgttaagcgcacgattgaacggctcgcagattcaggggcaatcactttaccaccaacggtggaaaagcctaccacagggcgcccgacgacgatttacgttttcgaaggtgagaaaggaaaacgagatagcattgttgtagtagcccaactctcaccggagtttactgcaaaattggtagaccgttggcaggagctggagcgtgtattaagcaggccgacatttgacgccgctgctgcgttgaatgatccggagttcctgcgtaccacgctgctcacctacagcgaaaaggtcattgcgctggagcacaaggtggttgagatgcagccggatgttgaagcattggagcgcatcgcaaaagccgatggcagtatgtgcatcaccaacgcagccaagcatttgcaggttcagccaaaagcgttgttcaaattgatgtcggaaaatcactggatctaccgacgtaccggcggtcgcgcatggcttgcctatcaagaccgaattcagtccggcgtcctggagcacaaggttactaccgtctcccggtcagatggcagtgaaaaggttgtcgaacaagttctggtcaccgccaaagggctgactaagctgtcaaaattaatgggtgtgagcggcgctgccgcataa

SEQ ID NO: 452500 - DNA, 249 bp, Serratia marcescens
atggcattaagtgtattaggtgactccttgcttgccaagagccgccaccgtgttgagggcgatagcgtcaccgctacattcactgctgtagcgtgcgagaacgaggaaggtaacgacgagttcatgtattgggttgagcttcttggtagcgctggcgagactattttgaaggagattagcagcgacttcatcaccgccagtgacatctacgagcgattgaagaaaactctaggaccaattgcaagctaa

SEQ ID NO: 452501 - DNA, 1278 bp, Serratia marcescens
atgaacatcatcccagagagcaagagcctcgaaaaaattctcacaggcttagaaacaaaatatactgttcctgattaccaaagggattactcttggtcagttaatgaagtagaaactctttggactgatatcgttatatctcacaagcagcaatcagaatatttcatgggtactattgtacttaaaaaacatgaaaaggatagtgatatatttgatatcgtcgatggtcaacaacgactggccactttttcgatgttatttcaagtttttgccagtctaggtgattctttttcttcaaatcataaagttcttgaacaggttgagcgaaacccgacatctcttgagttagcaaaaaaattatctaaagttgcccgtgctcgtttaagagaacccagtgaaccagataactattatttacgattaaataaaaaggataatgaactatttgaatatatagtgcgtgatgaaagcgtgacatcttttagtattgaggatgcccttaataagattaacaagagtgataaaaggcttctcaaaacgaagaagacattcactcaaaaaattattgaagaatatactggtaaagatgcgctacaggaaatttatagtacactcgtgcacattgtaaaaaggttgaaatttataacaattgaagttgaaactgattatgatgcttttctactttttgagtccttaaattcaaaaggaatggatttaagtgtggcagatctattaaaaaataaaatattgatgaaggccaatggtgatgagcacaccagcgaattattactaaataattgggaggaaatgatttcctctgtggaatccagtcgattgtcacctgttgattttttacgagtatattgggaggcaatacaaggcgctaatattacaaagaaagagttatataaaaacatcggcgttttcatagataagtctaacgatattttatctttttctagacagttaaaagatattgcttatgatttttcaatttatgcttctggtgatcttatttttcccactagtattcatcagacagggaaggataaatatcttgcattttgcggtgaaataaatagtctcaagtatacaacttgcctaccattgttgatgtatactcatcagcataaaccagaaatgcttggttctttagctaaaatgagtttatcgttcttattccggtggatcactataggtgattattccgttggtggagagattacaagcagatcaagatacagcatccattttagagccatttttatcccaaggtga

SEQ ID NO: 452502 - DNA, 216 bp, Serratia marcescens
atgatgttgaccatgaaatcggactttatcctgccgctgccgcgccacgtgctgcagggggtgagcaacatccacctgccgttggcggagatcgagctgccgctcgagctggaatcggtgttcatcgtgcaggcctggcatccgcgcctcgatcgcgatccggcgcaccgctggctgcggcagaccatcaagcagttctttttgcaaagggagtga

SEQ ID NO: 452503 - DNA, 849 bp, Serratia marcescens
atgagttggtacaccttctcgctcttgattctagttcaatcgttgagcaccgcggcgaacgctgtggcgtggccctacgttaataatccccggattatctcatgcacctctggcggccaaggcgaatgttcgaacagcgtattctacgatagtgatggtgtcatgttcattgacatcatgcccgtgggtcaacccgatccctcgctaggaactaaaatacgtgcgatgggtattcattgctactacgggaacagccttctcggtaacccctttggtggctgccactgggtccgtcccttgcccggcacaattaccaggcacattccaatggtgacgggtaagtgcgagctgaaaaacacaagctcgtgggagttgacgcctgactccacgtgcgccatcgcgggatgggacggtcacaacggcgcggggccgggtggcgagtgcgtgatcttcacccaggtaaagacaagtaccgtgggcaccctcaatacgccgtttggagtgctgcaccctgataccgtcgcgaactcgggcaatcggtactgtcagaaggccctaccaccggccgttcggtgtgacctcgatatcccaactagtatcgaccacaagacgatgccccagcagggctcgggttccgtcacggtgataggttctatctcctgtggtgccaagcccgttgtggagatcgtgggaggggatgtagttgtcctaggcgctggggtgaaaagccgtttgtctacgaacgttacgtctgcgacaacagtggcggtgacgtcgaagctgacagtgaccaacgccgctccgggggaatatcggggcgcggcggtcgtacgggtatccccatactaa

SEQ ID NO: 452504 - DNA, 1068 bp, Serratia marcescens
atgatgaaagaattgaaaatcgcgaccagcgccagcctggtcgctaccattgagacgctgcgtcagatcgtgcgcgtagagcagacggactacaccgacgtggcggcggtggtggtgtcggtcgccgacgtgaacgccggcattctggcgcgcttgcaggcgacggggttcaacatcccgaccttcgtggcggtggaaggggacgagcatctctcgccggactatctgccgttcgtcagtggggttttcgcgctgctggccggcgccagcaagccgttctacatggcacagctggaggccgccgccgacgcctatgagcaggcgctgctgccgccgttcttcaaaacgctgaagacctacgtcgagatggaaaactcgaccttcgcctgcccggggcatcagggcggcgagttcttccgcaagcacccggccggccggcagttcttcgatttctacggtgaaaccctgttccgttccgatatgtgcaacgccgacgtcaagctgggcgatctgctgatccacgaggggtcggctaaggatgcgcaaaagcacgcggcgcgggtgttcaacgccgataaaacctacttcgtgctcaacggcacctcggcggccaacaaggtggtgaccaacgcgctgctaacccgtggcgatctggtgctgttcgatcgcaacaaccacaaatccaaccaccacggcgcgctgatccaggccggcgccacgccggtctatctggaaaccgcccgcaacccgttcggctttatcggcggcatcgacgcgcgctgcttcgacgaacgctacctgcgtgagcagatccgcgaagtggcgccggaaggcggcggcggcgcggccgttccggctggcgatcattcagctcggcacctacgacggcacgatttacaacgctcgccaggtgatcgacaccatcggccatctgtgcgactacatcctgttcgactccgcctgggtgggttacgaaggctttattccgatgctgaaagagtgctcgccgctgctgctggagctggacgaacacgacccgggcattttcgtcacccagtcggtgcataa

SEQ ID NO: 452505 - DNA, 1272 bp, Serratia marcescens
atggctttcacgtcatcactctcagaaaaaatcaactatgagcttttactgtgcgtcgtaaaaatgggaaagagcatacataaatcgctaaacacagaaacaatatcccaaacatgccgagcgttggcgcaagaaatcagcacccactgttacgaaccttccatttattcacgtttcgctgtaacagatccaaaactgagagaaatctatgccccttcatttcgtgacagacttgtgcaatgctggcttgtgcaccacatcaatccctatgtcgagcgcatactcattgatgatacattcgcaaacaggaaaggcaaaggtacgctggctgccgtgcaaagagttcaacgattcatgcgtcaacctgaccacgagtattaccttcagttagatgttcagaatttttttaactcgataccgcgcaatccattacttgcccaatgtaaatctatcacgcagcgctacctatcagaaagccccctctatgaaacactgaattttattttagaacggtgtattcttcaccccgtggcgcaatgcacgtggaccctttctggtgacaggaaattactcagtacgattcccccgcacaaaaccttgcttggcgcagggcgtgacaaagggctcccgttggggtcttcagcaagtcaaatgttcgccaacttatggctgagtcccctggaccatttcatcaagcactcacttaaagctaaaggctatgttcgttatatggacgatttgtttttactcggccactcatcaaaaacaatgtcccaatggcgaacgcttattgcgtcatactgcacaaacgaattgaatctcactttacatcctacaaaacaaagcattcaaaagtgctgtcaaggcgcagattatttagggtatcgcgtttatccccaccatctccacatgagaaatcgtaacgttcaccgattcatttatcgactcgatttctttaatcagctactgtcggggggcctcactaagcactcgcgtacagattctgaaaccttcacgcgaaattgggcggtttatcatgacggtgtccccatcacaccgtcatatgcactgctcactcaaatccagtccgtcattaatagctatcttggtatgatgcaacacacgcaacattggcgccttcgcaagcaaatatggcatcgtcatgccggcttgctaaaaatatggcttattccggctgatgccaactatggtgccgtgcgtattaaaaaatactgtaaacaagactggattatgcagcagtgcagaaggtaa

SEQ ID NO: 452506 - DNA, 213 bp, Serratia marcescens
atgcagctaaccctcggtcggcacagttttaccctgagcgacaatgacgcccggtttgtggcggaagctattttgttgcagcgcaagcacccggatatcgttttgccggaccaccgcagcgataaacacggcgttattcgtctgacgaaccgcctgaccgaaatgagtcagttccatgttgatgacgtgattgatcacaatgcgatcgattga

SEQ ID NO: 452507 - DNA, 552 bp, Serratia marcescens
gtgaccccgaaaaaaggcgaaccgttcctgtgctgcgacattgccgcactgcggggcgaaaccagtaacgcggaacacacctggttcgactgccgcgtcagcggcaaggaagcgcagaaactggtgcgccgctgtatcgacgcctacgagcagaaacgcaaggtgctgatccaattccgcctcggcgatctgtatgccgacacatttgaattgacggtgaagaggtttaccgggcagaacgcgaagctgaatcccagccagcgccagccgcaccgccagcagagcctgtaccgcagttctgacgcacagcattcaccctgccggggaaattccccgtcggggcgtttccctggccttttaccggagagacgcatgatgaataccgtattgaactcacgcgaagaagcccttaaccgggacaaactgattatcccgccacgctggaaggtaaagtgcgtcttcaaagcacgggcggcgaggtcttcctgctggcgaatactgcgttcccgcccatccgcattcaactacgagataccggcagtggtgaactga

SEQ ID NO: 452508 - DNA, 240 bp, Serratia marcescens
atgcgaagctctgttctcgctataaatcatctccatcagcagggcgagggaaatcagagcttccgtcaccaggtacaccacagtggtatcttctgccagaccatgcgggctgagccagtcatgctggaacgcggcggcggtgaactgcccctgaagctcgtgcggatcgagcgtgatgcgttgcccgctgctattttgcaggcggatggcggtgacgatggtggcgttggcctgctatga

SEQ ID NO: 452509 - DNA, 1086 bp, Serratia marcescens
atgcagccttttgacgcagattattgttactcattccctgctgtgcgtgggattcaggcaggccgcccattttatatcgctacctgccctatgcgaatcatacctaagatcttcaacttcgatgagaatgaagtcccgccagagctaagggctcagcgtatcctgaataagtctcgaatccccgagatggtgagatatcttcttgaaaatccgaaagactatgttttttcagccttaaccgcttcaatagcaattgatgtccaatttgatgagtttcctggctcgaataacctcgggatgttacgcgtccctatggaagcacagatactcataaacgatggacaacatcgtcggaaggccattgaaaacgcgctggaagaacgtccagaattgggacaggataatatccctgtactcttttttgtcgacgaaggattaaaacgtagtcagcaaatgttcgcagacttgaacaaatacgcgatccgtccaagcccttcattatcaacgctgtatgatcatcgcgacatcagttctaaccttgcgcgttatctggcgatgtcggttgaaccatttatagggcttacagagctagaaaaatctagcatcagtacgctttcaaacaagctgtttaccttaagcagtatcaaacaggcgacacgagcgctgctaggtaaagatcccaaagatggcagtcttgaagaggatacaagtattgctacgcaatattggcaggcgatcgctcaagttatgccagattggcaacttgctgccagaaaagaagtttcacctacacagttgagacaagattatgtacacgcgcatggtattggccttcaggcactgggaatattgggccgctcactcctgactgaagaaccagaccactggcagcagagaatcgctgcgctcaagacttttgactggcgaaaaagcaacccagaattgattaagcgagcaatgcaacatggtaaactgagcaagactagcgtatcgattcagttaacctgtaatgcactaaaaatagcgctctcccttcccctcactcctgaagaacaggagcttgaagctcaaatggttgtctcatga

SEQ ID NO: 452510 - DNA, 423 bp, Serratia marcescens
atgcttcaatctctgaaccacttaacgcttgccgtcagtaatttgcaaagcagcctggccttctggcgcgatttgctggggttgcagctacatgctgagtgggatactggcgcttaccttacctgtggcgaccttttgatctgcctttcttacgacgtatcccgtaactacgtggcaccgcgggagagcgacaacacacattacgcattcagcattgcgccagaagattttgagccgttctcatataagctgaaacagtcggaagtgatggtctggaaagccaataaaagcgaagggcaatctttctattttcttgacccggatggacacaagctggagctgcatgtgggagatttagcatctcgattggcgcaatgcatggcgaagccttattctggcatgcttttcggatcggaaaaataa

SEQ ID NO: 452511 - DNA, 264 bp, Serratia marcescens
atggaagggctcagtcgacgccagggaatcttcgagaaactaggtacgatactcaagcaagactggggaagccttgaagaaatcaagcaacagcaggaagatttgcagaaacgaaatgagcgcgatgttcatcaagaagaagttgcaagactggaagccgaattgcagatgttgcaaagaagaattgccgatgtaagcgagtttttaatggcccccacattatcgatctggcccccaaaaaacgcgaacacgatgataatctaa

SEQ ID NO: 452512 - DNA, 444 bp, Serratia marcescens; identical to SEQ ID NO: 451405

SEQ ID NO: 452513 - DNA, 243 bp, Serratia marcescens
atggtgttggaatggcacctgacgagctgcaaagtttttatttggttgttgggaaagaaaggcgaagagacccaaaacgaggcgaaacatcaaagatatttcatcgaaaagttatggggagaaagggggtcggtaaacttgctccatttggtgtatgcaaacgagtggaaattattagtgcaggtggtgaagtcgtttgtcgaggagataagaaagggtatgaaattgctcatattctcttag

SEQ ID NO: 452514 - DNA, 540 bp, Serratia marcescens
atgtttttgtttttaattttttttatgacgactaacacagtattagctaacgagtgggtttttcatagtgatgaaaacactataagtgatggagtattaaagatttcggttcaggccgggcattataaaatttcatttccacccactgcgaacccaaactcaggtgctgtgttgattaacggcgagcgattttacggcaaccgttattttggattcgacggcgagcaagcggacagaatgattgataggttattaaaggtaaaaaatgctcaggttgaatatgatgatcgttttaaaacgaaagtcgttcgcaagttggttgatttctctgatattacatcatccctcgataacttgaaaaaaatcattgacgcctctcacataatcgtcaatggagcagatggctttactcgaaataggaatagcgctgccgcttggttgtccgacggtaagtgtaacaacgacggcgtgtcgacggtgcgctttcttgtgagcaagcagagcctatcattcaatggggggtggagattaatttgttaa

SEQ ID NO: 452515 - DNA, 987 bp, Serratia marcescens
ttgaacattcatactccatctgaacaaaacgagtcccaggagacggtgtcggtctcactcaagggtattccgaccgatcagggccaggcgctgaaggaagtggccaaagcacgagacattaaccagtccgcgctgctgcgtgagatggtcaatgccagcatgggcagcattatccacgtattctgcctcaagagtccgctggtcgcctccctggatcaggatattgcccagtataacggcagtcttgtcctgcccgcatggaacgctgctccgctggcccctcagttcgaagccgcctaccgcgatctgctgggtattcgcacggaagatgacctgacccgaattctgctccgcaatgcacagtacctccggatgcgaaccagccaggtgatgcagcgggggcaacagttctacggcggcgctgcgctgtattttgcgctgttctgtgatgtcgcccgtcgtgatgaccagacgattgaagcgttctgggccagaatagcccgcttctgggggcaatggtaccgccggcaggattattaccagcagatcaaccagctgcgcagtgttttagatcttgaacctgcagagcgtctttatcaggctcgggcgaaaggcgtttacagtcaggcagagatttttgagggcgaaaatggtgaaaaaggactgagacaggtcctgctgacactgcgcaccgagaacacccgggctctcccggctgatgcaatccagctgttcaccctacctgcctgtaatggccactttctgacgcctgatccgggctatggtgccccgattattttccccaacaatgccctcggcatggggttccgtttccgggaagagtcctgttcactgcactgttacagcgttgaagctccccagataggagacactcagacactgacggaagtggccgaagcgctcgtcaataacgttgatgcttccctgcgagcctatgcttcaacccttcctgtcactatttgctaa

SEQ ID NO: 452516 - DNA, 621 bp, Serratia marcescens
atgaccccgttacccccggacaccgtccgccgtattgaagacgccgccgcggccctcattgccgccggcaccccgaacccgaccaacgagcaggtgcgggcgcacctcggcggcggctcgttgtcccacatctccccggtgatgcgcgcgttccgcgcccgcctgcgcgaacagcgcgcggagcaggcgccggcgctgccggctgagctggcacagctgctgaccggccagctggccctgctgtggcaggcggccgtgaaacaggccgacgccgacaccctggcggcgcgtgagcaggccgacgcggatattgcccaggctgaccaggagcgcgacgccgcgcaggcgaccgtggcccggcttgagagcgagctggcggtgctgcgcgaggtggtggccgaacgtgaccgcctgctgaagcaggaactggggctgcaggagcggatgatttcgctgcgggaggaggtggtgcgccagcagacgaacaacggacatcttaccacccagctgcaggagagccgggaggaggtgaaaaccctgcgcgccagcgagaaggccctgcaggccgaactgctggccctggcacgtgcggagccgaaaggcgggaaggttacaaaatga

SEQ ID NO: 452517 - DNA, 807 bp, Serratia marcescens
atgaatgcggacacccgggcccgcgtggaggccttccgccacgcgctggagctggctgcttatgaacggtccggtgagccggtaccgtccgtctggcgtgactttttaagggcatttccggacggctgctgcgagctggccagccagacactggtccggtacctgagagatcacgacccaaacctgtttccctatgtcatcgccctgcagtggattgaaaatggtgacattcacggtcacgtctttgtcgccctggacggggactacatcgatctgaccctggatcagtttgacggctatgacgacaggattgtggcggaaccgatcgcgtccggcgggacgctggacgccttcttgcagaaggttcgccgtctggaaggcacgatcaccacgcgtgaagtgaccctggatgtcattccgggtgatggccataagctgtatggctggctgaaagcggcggcggacagcctgctggctgctgaatccaagaataggatgtcgggcagcctgccggcactggtgagtacggagatccttgcggagtaccgcgactggtcacctgctggaccgtccgctaaagccgctcatgtccctgaaatgaaaaaacggccgaaaatgacgcacgaagggacaatcactgaatgctacaaaccacgccatgtcaggctgcgtgaaaccagcactcagtgggtcagtgagtgcggaatccgattcagaaagtccaccggcgctgaggtcggaagcggcgtctggagtgcaaaccgtcttgacttgaagagtatccgggaaattcagcccggcgaataa

SEQ ID NO: 452518 - DNA, 789 bp, Serratia marcescens
atggatcttgcaaccacagaagatgagagaataaaatccgttaatgccatcattgaacaatttgtagattcatgtgatgcatatttattttgtcttaccttttcagtagcaggtatagaaagcaagggtaaagaatttaaaaaaatgaggttcagcaagggagagcgcctgtggctcggttccgatctggaaacggataagaagatgcatgcccgaatggatatccatgaattagtcaaccggtgtaataaaaatggcttgttcacaaccgagttaaccaaagctctgctgtgcatgatctatgttttatgggatgagatttaccgtcacaaacttgccgaggcttacggttgttgctcagaggagattttttgcccgcttatgggagatttacgaaaaatcagacactgcattttgcatgataaatctttcgtgaatgataacggattggcatttgaatgtcttaattgggcattgccgtccggccccctcattatcacttatgaaatgttccgggaatttaacgacgctgtacgaggaaaagggctgaacatacgcgcatgtattcttgcccctgaccttaaacgagtgcttccacttatgagtaataaagaaagaaaatcatttgatgaattctacaaagactttggcaccaaaatggaaggcaaagagtggcctggcatgaaaaagttcttggaaaataacacagggaagcctggcatcaaagaactgacagaccgttacgctggctttgctgtacgaaacaccagccctcatgcacgtccttga

SEQ ID NO: 452519 - DNA, 831 bp, Serratia marcescens
atgcgttatatccaaaccaccactgcagctgatgtcagaaatacactcagacaataccaggctgatttgctggccggtccttgctggatgtcggtatggccactgatagagcggctgctgagtcgtgagagtgaaatgcagtcggtctggcagaacattgcccggcaggcgttgacctggcagcaatgctactgtcttctggagcaaatcgtattggcgggccgtttcagtaggcctgagatcgtttcacgactgaaagatgattatcgtcagcttgaagaattgaaccggactatcagtaaaacggccggtgatctggcagagatgatattagcccgtgatgcgatcctgagccggaacgcgttcacacttgagagaaccacacacatcgtggaactgatggagatggctgatgataataatgggctttaccgtttttaccttcaggaaacgctcgatggcctgacctgtcgttatgaaaaaaaatactggccggggcttcccggtatcctgaaggttatagccagagagcacccggaaattgaatgcctgtcagaaagtgatcagaccattattaacggacgaggcaaagtgctccccgattatcttcgcgaattattcagtagcattgagaacgtcaggcagggttcatgggggctgccaaagggatttacgttaacggacagcagtctggcaatactggccaccgtaacgctggatcatactgaggtcatctccgctgatgcagtaaaagtacgccggagtgaattcagcaaaagaggagaacgtggagcatggccatttaagtcactgaaggcagccgatatgtag

SEQ ID NO: 452520 - DNA, 1050 bp, Serratia marcescens
atgacgcattcaccgcaagaaaaccgccaggggcaacatcccgatcgcgccatcagcaataaggatgaagactgctatggtttcacctacattgccaccgagttagcccgcgccattaaggagatcggccgggagggcagtgccgtgatcggtatcgaaggcgcctgggggacggggaaaaccagcctcctgaatctgctgcgcacggcgctggataaacaacaggaagcgcgaaccttcgtgctgacgatttccccctggctcaacggcagtgatacccctctggtggcgtccttactgcttccggtcgccggcatcattgccgcggaagaagaacgccggctgcctgcaaaaaaatgggcgttcctcagaaggaaaaaagcgctgaccgataccgcgcgggtactgatggactacatccgggccaccgcccggaatctggcacctgtcgctcatatcgccgcgctcattcccgacacccccgacgtcagcggcgcgctgggcgccgtggcagactcgcactggctgaaagaaaaagaaaaaaccacggccgacatgcgcgacgagattgcccggaaaatagaggagctggatctgagcttcattgtcctgctggacgatctcgaccgcctcgaaccggcccaggccgtggaggtgatccgactggtgaagtcggtcgcggattttccccgtttccgctacctgctctgttatgacaaagcggtgctgtcacaggccatcagccaggggctgggcgttgccgacgggagcctgtacctgcagaaaattatccagatcgccttcgccctgccgcgcccggaaacctttgcgctgcgccagcaatttcgtgatgacgccattgagttataccaaacggtgaataaatctcccccggagaagggcgtactggctgacctgacggcagtcgcgaatatctatggcgccacgctgaaaacgccccgggaagtccagaccgtcctcaatgcactgcggttccgttatgcgggcatgcgggactatgtgtatttccccgatctgtgcttcctgtag

SEQ ID NO: 452521 - DNA, 1173 bp, Serratia marcescens
gtggaagaatacctgtcggaatggaacgtggtacaagccgacgatggtcaggtcagtgacgaggagcaaaaagccctggtaggcagccttgagcaccacctgaagcgctatttgcctgcggcagcgcattccgtctcggcgctgagtgaatgggtcccggggatcgtcgacggactggcggatcacaaagtcaaactctttgcgcggaccggacagcaggaaagtgccatgcagacagcagggaagcggctgggcagccaggcatactggcgatactacttcgccttctccgcaccacaaaatgtcctgtcaccgcaggaatttgaggaaatcttcgcgctcgccggccagtacgaccaacctgaaaaacagcaggaactggcgcatcgcctgctcggtcatatccagaacaagaacctatcctcccggacctggtttgaacacattctgtcccagctgacgtcccgcctgattgaaggcagaacgccagccgaatgccgggggctgctggggttcttcttagacaacggggatgagatgatgagccgctacctggcccacaacgagtcgttctggttgcataacctggataccttcagtgtcgcagatcggctaacccaacggatactacgggaagatgctgcggccaccatgacgttcctgactgcgcgactccagaacggcaaagccaggtactggagcgcggaatatatcctgcatctaatgtggctgcacggaatgatcggagaccgaacggagaatcggcaggaaaagtggatggacctgggtaacctcgccattttaaaggacacccttgccacgagactgaacagtcccgccgttattgagcagctgccggccggtgaccggctgatccggtatttcattgtatggggtcacatcagcgggaaccaggcagtgcaggaatgggttcaaagtcagggggatgaggcttttctgaacctgctgctgcagctccgttctcatggcagcaatcgcgtgcttggggaatatcgcgcgctggatctggcagatgtgaaagaatatctgggtgagcctaagacagtgcaagcgcgtattgaacgcatcaagcaggccggccagctcgaggaactggttgaccaggtggaagagtcgctcaggatagcagctaatcgtcgcagaacgggttga

SEQ ID NO: 452522 - DNA, 1266 bp, Serratia marcescens
atggaaacgttccacaatccagatcgatttatgtccgatctgcggcaagtgctgtcacagggaagaaaacgtattgggattcttgttggcgcaggtgcgccgcttgcaatacgtgtaaataacaataatgagatagaccctaatggaaattcacttattccgggtgtagaggcgcttacacagcaggcaatttctgggctgtcagcaattcagacggaggcggtcgaagcgataaaagatagtcttggaagtaccgctaatattgagtccattctatcacgtatccgtttattggagcaagctctgggaaaaacggaagttcaggggttagactcagatggttataagcaattaggcaaggaaatctgtaaaagaattgctgagatcgtcggtgtttatttgccgaaagaccgtaacgcatattccgatttgatagcatggattactggtacggttcgttctaattctgtggaaatatttactacaaactatgattttcttttcgaagaggcatttgaaagagtcagaagtccttatttcgacgggttttcaggaggcagtaaacctttctttgatccggtctctgtagcaggtgatgatttgcctgctcgatgggcaaaactatggaagatgcatggctcacttggttgggccttggaagacggggccgttgtccgaggtcatggacgagaagctgctgaattagtttatccagaccatttaaaatatgatctaactcaaaaacaaccttattcagccctctttgagagacttaaacgatttttgcttacgcccgactccttattactcacgattggattttcctttagggatgcacatatatgcgcggttcttgatgaaagcttggcgatgaatgccaatacggctgttttggcgtttcaataccaagctcttgaaaaggaagaacctgctgtaaaattagcaagtgacagacctaacctgagtgtctacgcagcagatggtgctgtaataggaggagttccaggaaagtggcgtccgggggagcttcccaaaaactggggaagtatccgtaagagtttttgggcatcgcgatggcctaaagagccggctctgtttctattgggagactttgcagcttttgctcgtttctgtgcgttagctcaagctaatgacttgatagtgcagtccttgaaaagagatgagccagacaagcaggaggaggaagctggtagcagcagtagtaatgaggttgagctaaaggacggccaaaatgagtggcaatga

SEQ ID NO: 452523 - DNA, 1833 bp, Serratia marcescens
atgagtggcaatgatccgacatacttaggcgtcgttagtgccgtttcaggtgccacacttaccgtaaaacttgctgagtccctagactcaggttttgctgtcatcaatggccatacataccgtgttggccaagttggcagttttgtcagaatacctcagggctatcaggacttatttggtatcgtttctgaggtcggcgcgacggccgcaccatcacaatcagatatttccggcgtcgactcaggcagatggatgacggttcagcttgctggtgagacagtcggtggccaattcgaaagaggattaagccagcatcctaatataaatgattcagtgcatttagttaccgaagccgatctaagaagaatatacggttcggtcggtgacgaccaagtagctataggtcatctcgcgagtgctgaaaatattgaggtacgcctttctttggacgcacttgtaacacgtcactccgcaatacttggatctacgggatcaggaaaatctacaactgttgcaagtctcctacggtcaataattcgtaaagatgaaaatccgggttcacctggtgctcgcatactgatgctcgatattcacggtgaatatacgaaagcgctagaggatgtggcggtggttttcagtgctacccccagccaaggtcaagagccgttatttgttccttattgggctttagaggctggtgagcttttagatttcattactggaggattatccgatacccatgaaattgccttcacagataaaatagcggagttaaaagataagagtattatagcgcatccaagagcaggtattgactccagaacacttaccgtggacagccctgttccatttagtttgaaacaactttggtatgagttggttgattttgaaaccaccacctatgttggagtaaatcgtgacgaacctgcgctcgaagaagaaggagacgcagacattttagttgcaccaaaataccaaactcacgcgttgggagccaagggaccattcaccaacacagcagccaaaggtatccgaagaccgctaaatttgcttcgttcccgtttactagaccgccgctatgactttcttcttcacccgggagattgggagccagagcttacgggaacggtcaagaatgatcttgacaaactcttggaaggttggcttggtcacgataaacaaattactatattagatttgtctggcgttcccagcgcagttctaacacggctcatcggttctattttacgtattgtttatgaagcgcttttttggagccgcgaaaaatcggaagggggagtagaacgcccacttttagtcgtaatggaagaggctcatcgttatctagggcctgatgccgggacggttgcttctgaggtggtaaagcgtatagcaaaggaaggacgaaaatatggtgtaggcgctatgattgtgtcccaacggcctgcagaagtagatgagaccgtcttatcccaatgcggtacgatcatcgctcttcggttatcaaatcccatagaccgcgcgcgcgtgaaaggaactttgccagacaacctagctgggttgatggaccttttacctgtcttgcgaactggcgaagcaatcatcacgggagaggctgcccgccttcctgtacgctgtcgcattgctttgcctcgacgagttcacctacctaggagcaacgatcccaaggtaacccaagcttgggctaggaggcgctcagccgaaggatatgaccgagtggttgcctcttggcgtagtcagcagactaatgcagttgtccaaaaacttgaaatcacccgtttaccaatcgaagacgagcctgaggagggctaa

SEQ ID NO: 452524 - DNA, 210 bp, Serratia marcescens
atgcaccgcgacgccgtatcatcgtcaaatattatgtcagctggttatgactcagccagtgaaaccatggaaatcgaattcaaggatggagccgtttaccaatactataatgttaacgagcatctttacgagcaatttaaatcagctccctctaaagggcagttctttaatatatatataaaaaatgcggttcccttctcgagagtttga

SEQ ID NO: 452525 - DNA, 1380 bp, Serratia marcescens
atgaaacttcccaatcgtaatgatggaaatttggaaacacccccaccagcgtattactttttaccattctatatcgatcagatcaaaagctggagttcaccttgggattcatttgaaaacttaggtcaatatgctaaatggaagaatccgttaataaaatattttactggatatctgaaaccagagcattttgacattgaagaaaacatttatgaatacaatgaggtcaaaaaggaatctgcaacaaaagtagaaaaattccaaagcgcagttgaagttatagttgataattcagttgatttccccatagccttaaataatgaggaatttagcagaattcaggaagaaataaacactgagcttcacgagttgctcgactaccaagcgagactttatgatgctcaggctacgattaccgcaaatatatatgacctcgaaaggcagtatgagttagcaaccagttctgcaaatgagctggaagaggattataagtttgcggtagagtccatatctacagataatttagaatgtccattgtgtggcactcttcatgataactcactacctaatagggcattgcttctttcagaaaaggactcactactagatgaggcaaaatcaatagcatataaaattgcagaatttaaatcatcattagatgagttaaatgaagatgctcggtttgccactaatgaaatcgaaaggataaataagaagtatattgcagatggaaattcgaatgataaaagcttcattgcccaagtaatagatgttatatccactgagaacgtctcaaaaaacattcaatttaaaattgataatgaagagatgaaaatcagcaaagtcaacagttctatcgcggaattaaaaaaagaccagagaaaacttctttcaaccaaagagaaggacgaactgaactcttcctttatgtcaaaactattgggaaacatcgaagcgctaggttcaacaggaataaatcttagcaaagtaaaatccccaactgattataaacagttgcttggtggtggcgctgctgaggctgccaggggattacttgcttatcaactctctgtactgcaacaaatacatggtgccaaaacttgcatagtgccgccttttgtcattgacactcctaatcagcaagagcaggcgggacaccgttatgaaacagtcattaaagaactaatgcgcagtgtacctcatgattatcagataatactgtgtgcaatggagaataatgcattaaatgaattcaaacgcgatgctaatgttattgtgctaaataaaaataggcttttaatttcttcgcaatatgattctttgagggctgaatataaatccattcaagtgatggttggagggggaaatgaggagcattaa

SEQ ID NO: 452526 - DNA, 195 bp, Serratia marcescens
atgcgcaccgatttggtgcgcatcgcgtcgaaaaaagtgcagaaagggggcgtggcccagatggtttgcctgcttatggtgcgttggaaagaaagaagggccgcgagcgcggcccatgttcaggcgggttggctctcctcgcgcaccgcttccgccagttgttcgcccgccaactgcagctggtacatctggtag

SEQ ID NO: 452527 - DNA, 261 bp, Serratia marcescens; identical to SEQ ID NO: 449208

SEQ ID NO: 452528 - DNA, 1086 bp, Serratia marcescens
atggcgactatacgcaaacgtggtaactaccaatgggaagctcagatccgtaaacgtggttttccctctcaaaccaaaacctttaacacaaaagtggaagcagaggcatgggccaaaatgatcgagtcagaaatggcgagaggtgtttggctcagccggagcgaagcggaatctacaacactgtatgaaaccctgacgcgctatgaaaaagagattgttccccacaaaaaaggagcaatgcaagatcactccctggtgcggatactaaaaggtactcagctggcgaagaactatatggccagcatcaggagcgctgatgtcgccaaactcagagatgagtggttgaaaatctatgctccagcaaccgttttaaggcgtttggcgttactttctcacgtattcaacgtttcgcgtaaagaatggggtatggaaagcctgcttaaccctgtagaagccattcgcaaaccccaacccaagaacgccagaaccagacgcctggaaacgcagcctgtgctttctgagaaaaccagtgttacgccagggaaagaaatagtcaccgagatagaacatatcatcgccgcaacgcattcagtagtattgccagcaatcattcttctggcgttagagacagctatgcgccgaagcgagattgcagaactacgatggcgcttcatcgaccttgagaagcgagttgcacatttgccagatactaagaatggtaatgcccgcgatgtccccctatcaacgaaggctattacgatactgtccagtcttcaggaacattctaagccagctgctgataaggttttcgatatgcgtgccgatgcaattacgcgtgcttttgatcgagctgtaaaacgagccagagaaaggtatgaacaaactaacgaacaaattaactcacaatttgatgacaccttcctcagagatttgagatttcatgatctccggcatgaagcgacctctcgcttggctgaaatcttccccatgcatgaactgacaaaaatcacagggcataaagacccgagaatgttaatgcgttattatcatcccaaggctgaggatttagcactgaaattgaaatga

SEQ ID NO: 452529 - DNA, 153 bp, Serratia marcescens
atggagccacaacaggaagggagcacgcgggtgttaacgccgggcgaagtcaatctggcgcgttcggtgtttggcagcaccattttctatcgaagcgtggtggttcacttcgacagctacctgtctttgggccgcagaatcggtacacggtga

SEQ ID NO: 452530 - DNA, 3135 bp, Serratia marcescens
atgctgagtgaagacgatttagaacagcaaagcctgcagtggtttgctgaactgggttgggaggtgttatatggcccggatatcgcgcccgacggtgataatccgctgcgtgcttcgttccacgatgtgtttttgcgcccgttattgctggaacagctgcaaaaaattaatcctcatctcccggttgccgtgctggatgaggtgatattgcgtatcgcccatgcacaaagcccggacctaatcgtcagtaacaaagccttccatcacctgctgctcgacggcgtgccggtacagtacaagcaggacgataacgttatccacgataaagcactgttgatggatttttaccacccggaccataaccgttttacggtggtcaatcaggtagccatccagggaacgaagcaggtgcgtcgcccggatgtcatctgctatatcaacgggttgccggtggcagtgattgaactgaaaagcccaatcgatgccaatgccgatatctgggctgcattcaatcagctacagacctataaaaacgaactcagcgatttgtttatctgcaacgaagcgctggtagtcagcgacggctataacgcccgcattggttcccttaccgcgaacgaagagcgttttcttccgtggaaaacgctgtctaacgaagacgacaagccgctgtttgagtggcaacttgaaacggtagttaaaggattctttaaccgtgaattgctgctcgactatattcgctacttcatcctgtttgaaaacgacggcaaacgactgattaaaaagattgccgcttatcatcaattccatgccgtgcgagaagcggtggcagcgacaattgtggcctctaccggtaaacatttgccgctacgcagcaacatcacgccaggcagtaaaaaagcgggcgtagtttggcatactcaaggttctgggaagagtatttcaatgtgctgctatgccgggaagctgctgcaacaggcagaaatgaacaacccgaccatcgtggtagtgaccgaccgtaacgatctcgacggacaactttatgccacgttctgccaggcgcaagatttgcttaagcaggaaccgttgcaggcgaacgaccgcgaccaactccgcgagatgctcaatgcccgtgaatcaggcggaattatttttaccaccgtacaaaaatttgccccgctggacggcgaaaaaactcacccagcgctcaatctacgcagcaatatcgtcgtcatttccgatgaggcgcaccgcagtcaatatggccttaatgccacgttagatcgcgaaacaggcgcttataagtacggttacgccaaacatatgcgcgatgcattacccaatgcatcgtttatgggctttaccggaacacctgtatcttccgaagataaagatactcgcgcggtatttggtgattacgtctctatctacgatattcaggatgcggtggaagatggcgcaaccgtgcctatctactatgaatcacgtctggcaaaactcgaccttaaccacgaagagctggaaacgctctccgaacaggtggatgaactggtcgaagacgaagagaccgatcagaaagagaaaaccaaaggtgattggagccgcctagaaaaacttgtaggttctgaaccgcgtatcaatcaggtggctgccgatctgattcagcattttgaggcccgtaacgccacaatgaatggcaaagcgatgattgttgccatgagccgtgaaatctgcgtgaaactgtataatgcattggtcgcgttacgtccggaatggcacagcgatgatgttgagaagggtgaaatcaaaatcatcatgaccggctcagcctccgataataaattcctgcagccgcacatctacaataagcagaccaaaaaacgccttgaagcgcgctttaaagatctcaacgatccgctaaaactggtgattgtgcgcgatatgtggcttaccgggtttgatgccccctgctgccataccatgtatatcgacaagccaatgcgcggacataacctaatgcaggccattgcacgcgttaaccgtgtctttaaagacaaacctggcgggttggtggtcgattacatcgggattgctaacgagctgaagcaagctttgaaaacctataccgattcaaagggtaaggggcagaccactatcgatgctcatgaagctttcgctattctgctggaaaagctggatgtgattcacggcatgtttgccaaaacaccaaccgctgccgggtttgattacactggttttgcagaggtgccccaacggtttttactcaaagctgcagattacgtgctgggcctcgatgatggtaaaaaacgcttttttgatgtcgtactggcaatgaacaaagcctggtcactgtgcagtacgctggatgaagccaaaccattgcaaaaagagatagcgtttctgtcagcggtgaaagtggcgattatcaagctgacgacaaccgacaagaaattcagccagtcagagaaaaacacgctgctcggtaaaatccttgataacgctattattgcgacaggggtggatgatgtgtttgcactggcggggttgggaaaacctaatatcggcctactttcagaagagtttttagaagaagtgcgtgaaatgcctcagcgtaatctggccgttgaattgctagagaagttgttgaacgacggcattcatgctcgcacaaaaaataacgtagtacaggagagaaagtattcagatcgccttagggccgtattgcttaagtacaataaccgcgcaatagaaactgcacaggtaattgaagagcttatacagatggctaaagagttccaagaagccatggcgcgcgacgatgctctaggtctcaatccggatgagatcgcgttctacgatgcattagcagaaaacgaaagtgctgtgcgtgaactaggtgacgaaacgctcaaaaaactggcaattgaagttaccttgaaactgaggcaatctactacggtagactggcaagttcgagaaagtgtgcgtgccagactgcgtattttagtaagacagacactacgtaaatataaatatcctccggataaaaccgcaggcgccgttgagcttattttgaaacaagccgaggttgtttcgaataattggaccagctaa

SEQ ID NO: 452531 - DNA, 741 bp, Serratia marcescens
atgtttggaaatgcatttggcgttaaaaaacgccgcagtgatgaagcagagaaacccttctggatctcctatgccgatttgatgactgccatgatggtgttatttctggtcgttatggttgcttcgctgagttccgttacacagcgtattcaacgtgcggaacaaggtgaaaaaacaagggggcaggatatatccagactgtgtgagcgcctggaattgcatgcccgcaacgtgaataaaaccatcgtggtagattgccacgataaccgtatcagctttggcgaagccgggcgtttcaatcacaatcaatttttcctgaacgctgaggggcaaacagcgttgcaggatgttgttcctcttgtgctggaagcgtccaacagtgaagaaggcaagaagtggtttaagcaaattgtcattgaagggtttaccgataccgacggttcgtacttatacaacctacatctctccctgcaacgttctgagtgggtaatgtgtagtctgctcgatagccgcagccctctacaaaaaaatatatctgcagaacagcagctccaaatccgtaaacttttcctcgcgggtggcgtctccttcaataatgccaaggaaagcaaggaagctagccgccgtgtcgaattacgtatgcagttcttcgggcttaaagataaacgtgatgggaccggtgaggtggattttccccccgtcgtcaataaagaagtttgccagttggtgatgccgcaatga

SEQ ID NO: 452532 - DNA, 1005 bp, Serratia marcescens
atgcatccattattcatacacggagatgcactatccgtccttcagtcaattcccgatgaatcagtgaattgcgtgctcacctctccaccatactggttacaaagagagtatgaaaatggtgggataggacaggaaaagaaaaaagaagattatattgataatctcttgaaaatatttttagaaataaaaagagtgcttaagcatgatggttcattctggctaaatattaatgatacatatcataagaaaagtttgtctggcattccatggcgtatagctatcgctatgatggacgagcaaggttggattttgagaaatgaaataatatggaataagttaaagggaggaatggatagctctcgagatcggctcaacaatatacatgagaatatttttcattttgtgaaaaaagaaaaatatttttatgatatggatgctatacgaacgacttcacgaaaatcttatattaaaaacggtgctgtagtttctgcaacaggcattacaggtgtcagttataaacgaagaatagaattgtcaacatcattgactgatgatgaaaagaaaatagcatttgaagctctggaatcggtattgtcagatgtatcgaacaaaaaaatatcagactttagaatggtaatcagaggtcaacatcgtacaactcactctgacaggcccaaagtttctggacgtgcaagagagttgcatgaaaaagggttttatttcttaaaatatcaccctaaaggaagtaagcctagcgacgtctgggaaatacctcccgaagatgcacataaacgtggcactcattttgcgccttttcctgaagacatctgcgttattccaattctggctacttgtcctaaaaatggaattgtgctagatccttttgtaggtacaggcacaactaccaatgttgcccatagattaggatatagatctattgggattgatctttcagaaagctatttagctatttctaaaaaacgtattgagaagaaaataatataa

SEQ ID NO: 452533 - DNA, 978 bp, Serratia marcescens
atgtctgataacgattacgaagttaatagctatactttcagtttaattactcaagggcgccataaattttattcattaactttgtattcagatgtactggctgatacatgctttgtcactacaagatatgatgaccctcttgaaggattccagcgacgacttgacgaaaagagggctcaagagattgctgactatattgatagtggatttggaactatacccaacgcagtggttttatcagcccaaccagaagcggagttaaccgtcaaaaaaggagggcgagcccttacaataaaaatgcaccctaaagcatttttagtattagatggtcaacatcgtgtatggggctataaactagccaaaagtaaacttcgtattccggttgttatatacactggattaacgaaagctgaagaaacacgactttttattgatataaatacgaagcaaaggccagttccaagcgagcttctccttgatatcaagcagcttgctgaacttgaaggagatactgatagtttgctccgtgatttatttaatcaattccaaaaagataaatttagcgtacttactggcttgctcagtcctagcgaaaaagtcaaaggtaaaattagtagaactacatttaatactagcttttctaacatcttaggtgtgctcggaaacaaaaattctgatgagttatttgatatttttaattcttatcttggcgctgttattgatgtgtttgataaatcaggacttaaaaatgagataacaactcctaatatttttaaagggataatatccttctttccagaagttgcatcaagagttaaatataaatttgactcggaatacagtagtgataattttgcagaaattatcgaaccagtgtcagtagttttgaataaaggattgatcacgaaatcaaaacgatcttataaaattctaagcgaagcattaaataattcgttgacaaaaagtttccaactgtaa

SEQ ID NO: 452534 - DNA, 300 bp, Serratia marcescens
atggataagctacgcgaagagtttgaggaaaaattatcccatgattacggtgatgatgcgctgctgaaaaacagtgatggagattatgtcgattggcttactgcagatctttgggattattggcaggccagccgagcaagcatcgtggttgaaagcataactccatctgatgcgccttcaggcttgatttatcagattggcggtgccggtctcagtcatgacgaagcgatttgcgagggttactcagccggctttaatgaagccatccgctctatcggcctatcaatcaaaggggagtaa

SEQ ID NO: 452535 - DNA, 150 bp, Serratia marcescens
atggctgaaatgctgtgcactgtttgccaatcagaactgggtgctgacgaatgttacatctgtcagtcatgtaacgacgagatagaccgtcaagcagatgaggttatcggaaacgcggaggaaggtgatggcaacgacgaagagcaatga

SEQ ID NO: 452536 - DNA, 549 bp, Serratia marcescens
atggcaacgacgaagagcaatgaagcgctgatgaatgagtggagggataatcttatggcagctctccactatcacaaggatacaggtctgttcacttggagagaggcaaggaagaatcacatgaaaaggggtgatgtcgccggcacaccaaattcaaatgggtacatcaacattaactttaaaggaaaggtaattagggctcatagattggcttggatgttcgtttatggcgtctggccaagtaatagcattgaccataaaaacgggaatacatcagataacagaattgtgaatttgcgggagtgttcgcatggagaaaacatgatgaacagggggtgtcataaaaataataccagcgggtttaagggagtaaccctgagggaatgcgggtcaaaatggcgtgcatgcataagcctgaacggtaaacagatttcattgggtagttacagaaaggcatcacaagcttcatccgcatatgaactagccgagtatctatattttgggaagtttgcaagggaggtggatattggcaaagataataaaaagtaa

SEQ ID NO: 452537 - DNA, 1281 bp, Serratia marcescens
atgttttacagcccggctcactctgtgatttaccgcaccgctcgggagatgaactccaagagcaacgttatcgacctgatcaccgttgctgagcgcatggagtcaactggagagattgatcgagttggcggtttcgcctatctggctgagctgtcgaaaaacaccccgagcgccgcgaacattctggcatacgctaatcgcgtgaaggattgcgctttggagcgtttcgctatcgagcaggccaacaagatgctcgaggtgttctatcagccatcagcgatgactaccgctgagaagctggagcatatgcaagcgctggcgatgcacactgctgacaaatctcgatctggttctgttcgtggtgcggttccattcgctgaggctttcgaatcctgggtgaacattgtcgaaaagcgcctgagcagtgacccgtcagcagttggcatctcaactggcattccatcgctggatgaattgttggctccgaaaggcttggtgaatggttcgctgttcgttgtcggcgcacggccaaagatgggcaagaccacgctctacatgaaaatggccttgcattgcgcactcgaagagaacaagccggcgatcgcctttagccttgagatgccacaggagcagctcgtcgagcgttcgctttcccaggcatctggagtgagctcgtcaaacttctacctcgatggatacgacgacacccgattcgcaatggcgtcagcaaaggggctgcaaatcgctcagagcggcaatctctacatcgatgataccccaggtctatctctggctcatatcgtcgcagagggccgcaggattaagcgtgagcgcggaagcgtagggatgatactcgttgactacctgacgctgatgaaagccgagaaggcggagcgtaacgatctggcctacggcatgatcaccaaagggctaaagaacctcgccaaagagctgaactgcgtcgtcgttctgcttacccagctcaaccgagaccttgagaagcgaaccaacaagcggcctctgccaagtgattcccgcgatactgggcaaatcgagcaggattgcgattattggctggggatttatcgagagggtgcttacgacgaaaacgccaatcagcaagatacggaattgctcttgcggcttaaccgtcatgggcaaagcggcgttgtctttgtagagcaacgtcacggcgcaatttacgactgcgatcagcttcaggcaaaaatgcgcgcatctgaaactgaatcccgaccatcaaatcagaagggcggtttctga

SEQ ID NO: 452538 - DNA, 288 bp, Serratia marcescens
atggataagctacgcgaagagtttgaagagtggctcgaagagactcacggcctgtacggcgaagatgttgagtggcaagaaggcagaaactgctatgcgaagttcggcatccatctggcgtttcaggcatggcaggccagccgagcaagcatcgtggttgagtttattgaaccgccattctatgcggtaaaaaaagactctacaccgatagacaacattaggtttggagccaaattagcaatcgaacaggtaaggcgatccatcggcctatcaatcaaaggggagtag

SEQ ID NO: 452539 - DNA, 240 bp, Serratia marcescens
atgaaagacgctatttatattttagttattcctattgtggtgtttgcaatcttcatcctaggaacgatctttatcgtcgttcaagttgataagtatgactgcgatatctatgcaaaaaccacggaaagacaaactgaataccagttcatgacgtgctatgtgaacacaggaagcggctatgtcccgaaagaggaattcaatatgcgagccgtcacaaacgaaactaagggcaaaatatga

SEQ ID NO: 452540 - DNA, 183 bp, Serratia marcescens
atgagcaatcctgtaaaagtttacccattgtataaaacccaccggtctggccgatatcaacctgagctaatcgacatatttagcaccaaagaggcagcggacgcagaagccagaaagaagaactcttatacagagttgggcagggcgtacgactacaccgtcaaagccaagaaacttaaataa

SEQ ID NO: 452541 - DNA, 795 bp, Serratia marcescens
atgaaggaatcactgcagggtggcttaccactgagatcaattttagccgctaaaaaaaatctaacaatttttctttttgcatctttgatgacgatcgctgcgagagccggcatccctgtcattgatgggacaaacgtggttcaaaccactatcagcgccgtcaataacgttcaggctgttgccaagcagattgaacagtatcagactcagttgcagcagtatgagaacatgctgcagaatactgtagcacctgcggcatatatctgggatcaggctaattcaacaattaataagcttctgcaggctcaggacacgttgaattactacaagaaccaggcgggaagtctggattcatatcttagccggtatcaggacgtaaactactacaaatcatcgccctgttttaacagcaatatcagctgtactgcagatgaaataagtgctcttaacaacgcacaacagaacagctctgaagcacgtaagaaagcgaatgatgccgtttttaaagtaatagaccagcaacagggaaccttacagcaggacgctgataaccttgctgacctccaaactcaggctactggagcaacagggcaaatgaaggctattcaggcggcaaatcaacttgccagcgcccaggcgaaccagttattgcaaatccgttcgttgcttgttgcacagcaaaatgctgcggcaacattggcacaagtgcaagcagataaagaagcccagcaaacagttgctgatcagagagctttatctggtgttaacaccccaagtcctaataggaattggtaa

SEQ ID NO: 452542 - DNA, 1377 bp, Serratia marcescens
atgaaaataatcaaacaattgatatttttatctccaacgcttcttttttctctaaatgccaatgcaaatcagataaatagtagcggactgcttgataacttgttagataagtatcagcaagttgctagtacgtggactacagtgcttggtgattatgctaattggctattttggggattagtcctaataagtatggtatggactttcggcatgatcgctatgaaaggcggaggatttcaggatttacttgcagaagtggtaaggttcttcgcaatcaatggtttctttttctttattttaaaaaatggtccagctatatcaaaatccattattgactcattgagagaacttgctggtaatgctttaggttcagggaatggaatctcgccatcaagtatagtagacatggcttttgtcatattaacaaaggttagttcggctgcttctatctggtcccctatgatttccactattatgattactgttgcaataatagttttagtggtaatgtcacttatagcagttaatatgctgataatgttagtatctgcatgggtgatgtgttatgcaggtataatattacttgggttcggtgggtcaaagttgacttccgatataactgtaaattatctgaggacagtattgtctgttggcatccagctatttgtgatgacattaattattggtattgggcaatcattcatagatcagtatttttccgttattaaagatgatgtgccggaccttaacagccttatagtcctgctcctggcgtcaattgttctattagtgctaactaatagattaccacagctcttatcaggaattgttggtggtgcatccttacacgggatggggggatttggcgcaggtatgattgctggggcagctaccactgcaatcagtagtgctggctcgattgcattgagtgctacggctcaagccagcgggggggcttctgcattaaaagctgcatttgaatctgcacaagctgctatggctgaggaatccggttccggaggtggggcaggaagcagtggtgctggaggtgtttcggaagacactggcaacattgacgcttccggctctggcggtgattcaactgcaggcagctcaggtggtggctccagtggaggtagtaaaggatttgctcagttttccaaagctagtcgtatggctagccatatggggagtagtttgattaacggagctatggattatcagacgaccaaccaaaaagccaattcaactcgtacgcgacaaacgattggggaagaggtagcggatcacatacgtaaacggtcatctgctcaagcgggtaaccgtgaacataccgagtttgaaggtgatagcttatctggtagtaaaaactcttga

SEQ ID NO: 452543 - DNA, 228 bp, Serratia marcescens
atggtagattataataactttgttttagaaggaataaaaattcttttcacggataatgaaaaggagtttataaagagagatttttttgaagatctttatgacccattgattaatattctttgtatagagaattattataacgcaacaggtatttatgatcttgatgatgctaatgagcaagccagattattaaaggacgccatttctaagtatcaattgtctcactga

SEQ ID NO: 452544 - DNA, 1125 bp, Serratia marcescens
gtgattcgagtcatctccagtagaagaataggcttatcaatggaaaataatatcttaggtcatgcccaaagagagaattcaggggcaaccacattcgggaaatataattttcaatatcattgggctttatgtaaaataattgaaaaacataaatctaattctgattatgcattattgattgaacatcatgaggatgttgttatagccgactcattatatgggtgctcggcaaaatttgaacttttccaagtaaaaaatactggaaaacctttcacttttgacgccttaactaaacgagaagaaggagctaaggggcccaagagctcaattcttggcaagcttttaagctcatgcataggcactgattatgaaacacgcattacggaaataggtctagtatcttcaagtggtttctcacttgatcaaaaagataataagttaaagttagatattatatcttcaggtgatcttagcgtagattgtctatcaagattaactgggaagttaaaggatgagcttgggatagaaattctgccagaaaacctaaagttcatcgttccaaaaataaagctagagaatcaagaagaattcgtcattggcagatttgctgagttagtaaatgaaatattcccaagtagtcgttgtaatgctgtcaatatttatcgggcaatcattgatgagattcatcgtaaaggacagaatacttacgactttactgtttgggagaaaatggtagaggataagtctctaacatctcataaggtaaaggatgtcatagcagttaatactacaagtccaaaatttgaagactttgagaaagactttgagtatttagctaaaaatgatatgaaatggaacaccttaacttatagaaaaattaatagaaaaataaagcaacttttcttacgtcgtctcggacacgcttcagcttttgatatgaatataatgagaatagcccagcaagcgataagtagcgttccagaagaggactttatagaaaccagcggttacattgagtcagttattgtgaaagctaaagaactgaacattgaaagtcaaattccagaatatgacgatatactttgcgagataatttactgtcttttaaaggtgatgcatgaataa

SEQ ID NO: 452545 - DNA, 243 bp, Serratia marcescens
atggttgacgagtttcgcttctgctgcagtgattcgctgttcatggtcaaccagtttctcttctgcagcagtaatgcgaacttcgtgatcttccagcatcgcatcctgctcatcattctttttctgggcatcataagctccttgcccagcctcattagccttattggcaacaaggccgaagtccatgccctgctggattacataaagcaggtatggttgagagaatatattgcgtggaagtag

SEQ ID NO: 452546 - DNA, 228 bp, Serratia marcescens
atgccagcagatgaattgaagcccggacacgtttacatcgatgttgaccgtgggccagagggttactgcctgtgtatcggagatggtgaaatcggtgagagagtctccgggccaaagccgtggggtggtagcactaccgtccactcattccaggttaaggcagaggatttgattcgtctggcgaatgagtacgcaaaacaggtcagcgaggagtcccagcatggctaa

SEQ ID NO: 452547 - DNA, 1170 bp, Serratia marcescens
atgtacgtatataaaacaattgtatctctcactctctcagataaaattgatgcatttcaaaaaaataagatttggaatgagtttaaagatctaattctagcaatatccccagggaatataaattcatctatatcattgccaaaagttaaagggggtaaagtagttctttctaaagatccaaaattcgaatttgattttgaaatgattgataagaaaaaggttgttaacttttcggaatactgtaaggtttgtgatgagaaatataaggagttaatttccacatcaactagaaatatcatatttgtagatgaactcgaaattagggttttagatgacgcatctacaagtagagatattcatctggtaagagatctcattactagtatagatcgattaaaccaaataagcagaaagcaatcatttaatataaactttattttggcagttagatcggaggttatgcagtccgccagaagtattggcaaggaaattaataaacctctatttgattttggagatactctagcatggagtcgttattcaaaagacaaaaccaatcatcctttaattaaaattattgaatcaaggatactggccacagaaaaaattcatggaatctctgaacatggagatatatggagcaagtactttaaaggtaatttccatggtaaagactttagagagttctcattggctcagacatggtaccgccctagagatcttgtaagattaatggaagttgcattaaaatcctttaaaaatgtagatgtcttattgcaacgtcattttgatgagtcaaaaaaattatactcctcagagagttgggttgagataggcgaagagctatctgcatcaatgacagctatgcaaatagaaggtttgtcacgagtgctaagtaagtttaggaatccatttactattcatgaatttaaaaatcaaatgactgagcttgccggcatttattctgaagttgatagtttggaccaaagtcataaagccggtgaacttttaaaaaaattgtataccgtgggggttgtggggaattatataaccggaaagagaggaaacaaaatccctcagtacgcagcaagagataatccaatggtatatctcgaggaacaatttattgtacatcctgcggtgaagccattctttagctcaaatctttaa

SEQ ID NO: 452548 - DNA, 645 bp, Serratia marcescens
atgacactaacgactgagcagttgagagcgcgcgcagcagcatatcgcacagatgcagcgaccctggccgaacttggagacacagcaagctatcaacggttgaatgagtctgctaacgcatttgatgagttggcggctaaccgggaggcgcagtcggtggagattggaaagcgatccgttttcacttgttcatcatgcggagctcaaggtctggatgagccattagaatcaagatgccattgcatgggagacggtgcacattgggtagaatctgcgctctacaccgccccgccagcgccagcagtgccgtcggaggctacacccgagaacattgaaaacctgctggcagacatcactctgttttttaccgctggccgcttatcgcacggtggagcggtcatgtttgccgaagtgtggaacgcctgccgatccgcaatgctggaaaatatcgacaaaccagcaccgcaactggattcagtcgtgacgcgccatgccgatcaacctgtaagtggcgggtacaagttggtgccgattgagctcaccgatagaatgattgatgcctttaatgaaacgccacctagaacattgagcattgaagatctatggcgggcattgctggcagcagctccggagggtgggaattga

SEQ ID NO: 452549 - DNA, 372 bp, Serratia marcescens
atgaacgaccaagaaattgaaaaagaaatccaagccaaagggaaaaccgcaccgcgagtgacacctatccgcattgaaagcatcatcacaagtgagagctattttactgctgctgatggacgtctgggggcaagcattaacactaagtgtgatgagcatattgaacgagacgactttgatcagctcaagcttctgactttctgtgtactggtgttggaaaatggcttcacggtcactggagaaagcgcatgcgccagcccagataacttcgacgccgaaattggtcgcaagattgcgcgccagaatgcagtaaacaaaatctggctactcgaaggatacctgctcaagcagcgcctatcagaggctgattaa

SEQ ID NO: 452550 - DNA, 255 bp, Serratia marcescens
atgtcatacaacatagcggataaatcaccggaagagcgcgagaaagttaacgtagatttggctgcttcaggcgtggcgtacaaagaacgcatgaatatgccgattgtgcctgcgcaagtagaagaagagcagcctgagcatcttcgtgaatacttccgtgaacgacttcagcattatcgtggccagagccacaaattcccagggccgaatgacccacgctatcaacagatggcagaggccaacggtaagaagtaa

SEQ ID NO: 452551 - DNA, 171 bp, Serratia marcescens
atggacgactggcggaaatacctgggctacgttcgcgaaaactgccgctggatgttcgaagagcgtcagaaccagcagcgcgggactgtttggcacaagaagggattcgacttcctgctgaacgacaatgtttatctcaaagttcgtgagggcgatcatgatgaccgctga

SEQ ID NO: 452552 - DNA, 591 bp, Serratia marcescens
atgaaattaaaacaaaggaaagttggcagcaaagatactgaaaaaaaagttcttattgtatgtgaaggtgcccgcacagagccatcatacttcaaaaaatttaaagtaaatacaaagtgtgagatagttggtgccgggtgtaacactgttagtgttgttgagaaagcattaaaaatgttctctacaggaaagttcaaagaggcttggtgcgtctttgatagagattcttttactaagaaaagagttaaggatgcgcttacgttagcgcggaaaaataatataaatattgcattttccaatgagtcgtttgaattatggtatgtcttgcattttgcatatttagatacgaaaataactcgtagtgattatgtaaaagcacttactggctatttgggcaaaccgtacaaaaagaatgatgaagatatgtatcaaatattacttgaatatcaacatagggctattgaacgttcgaagcgactttattcggaaatgatgttacctggaacttgcgagtgcgactcttacccttatactactattcacacgttagtcgaaagattaaataaattagggcaagaaattggctcttaa

SEQ ID NO: 452553 - DNA, 213 bp, Serratia marcescens
atgacgcctttgctcgctttaaatcacgtcagcaaacgcttcggcggcctgacggcggtggatgacgtcagcatgagcatccgccagggggaaatctatggcctgatcgggccgaacggcgccggtaaaaccacctgcttcaatctgatcaccggtctgtatcgcgccgacgcgggcgaattccgcctgtcgggccagcgctataggccctag

SEQ ID NO: 452554 - DNA, 1617 bp, Serratia marcescens
atgaagaaaatagttgaaatgcaatattcctttcctgatgctgagaattatagacgtagggagtttaaagaaacttttaataaaacctttcttgctgatgattacattgatgagttgttaaagcctgaaaaatgcttcttgatgggggaaaaaggaactggtaagacagcatatgctgtatatttaagtaatatcaaatatagcaataatgactctgagttaagatttattagagagacagagtatcaaaaatttgtttctttgaagaaagatagacatttggatttgtctgattatactaatatatggcgagtaataattttattactacttgcaaagcaaattgcaactaatgaacctgcaatcctccctaggttttttaaattcaagtcactaaatgctgcaatagatcattattacatgaatgcatttagcccagaaataatacatgcgttgaactttgtccaagaggccaaagttgcggctgaaatcatgagtgactttgccaaagcaggaggcgaggctaaagaaacattttcttttacagagaatagatttcaaactaatttgctatatatacaaaaaaaatttgagagtgctcttcaagaaataaaactaactgacaatcatatactattcattgatggcatagatataaggcctcatggcattgaatatgaagaatatcttgactgtgtaaaggggctcgcaaatgcagtttggcaattaaataatgatttcttcccttctatccgtgactcaaaaggaagaatgaaagttgttcttctaatccggcctgatattttctcatcaacaggtttgcaaaatcagaacacaaaactacgtactaatactgttatgcttgactggagaactacgtacgaaaattacgcaagttcaaagctatataaattagctggtaagcttttacattcgcaacaagatttacctatcacaaagtcaaaatcatttaatgatgtttgggagcattatttcccatatgagctagaatcaaatagggaatataaagataaagcatttattggatttttaaagaattcattttataggcctagagatataattatgatgcttttctttttgcaggaaaactgcaaggaaaaagagcttttcggaaaggattcattcactctttcggattttgaaaacagcgatttcaagagaaagttggcagattatttattgtctgaaataaaggatcaaatatcattttattataacgaacaagattatgaactatttctgaagtttttcgagtatttaaatggaagtgtttcttttgtatatgatgagtatcttgctgcttataatgaatttatagaccacgctagggtatcagagtaccctgtccctaggtttatggacactgctaataagttccttcaattcctttatgagcttaatattatatgtttcatagaagatgttgaagagcataagcctatgatacattggtgtttcagagagagaagcttttctaatatagcacctaaggttaaaacgaatgttagatatgaggttttctatggtcttgctagagcagtaaataccggtaagaaacgtgttaaaaatcgtttcaaaaggggtagtagatag

SEQ ID NO: 452555 - DNA, 1122 bp, Serratia marcescens
atggaaataaatttactgataattgaagacgacattgaaataataaagaaatggcaagaaaaattagatttctatgctattgaagattcacctgcatataacatcaattcaacattttcaaaaacgctagttgaagcagaaaagttactgtcaaattcctattttgatgctgtcgtaattgatataaggctcgaaagtgaggatgcatctccaaataaagatggaaatgaaattcttgaaattgtgacttccagtacattatcagttgccgcagtttgtactggcgaacctagtattgtagagttgaaaaattatcatgagcagtctgttaaaattttcaccaagggtaacgagaatagtattgctcaagagatccttacttggcttgatgaaaagaaaagcatgatctctgctatccagaagatgagagcatcttttaaacaggaaatggcatcaatatttttcaaatcaatctggccaagatggagttactggatagcggaaggaaaagcagacgcaatttttactgaaaaagcactcaaacgacatatggcgactcatttgcatgcgtcattcttaaatttagataatcaatcggtacacccagaagagtattttttcattcctccattacaaaatcgtctcgatactggggatattatattaagcgaagataaaatagagataatagttacacctcgttgtgatatggttaggatgaaaggggttaatccaacatatcagctggttactttacttgacaaatctacgcattggtcaggacttgagcataaacttgaaaatgccaaagccgaaaataacacaaaaaaatatgatagtatcataagcgaaataaagaaatttacaaatcataacaatgaaacaacgtcccacttcattcaaaaatttcgagttaatacagcagagggttggaaggattttgggccatactatgctcaatttaacttaatccgatccgtgagtcgagaagaaaaaactgaagaagagttgttatcgaagagaatagccagcctctcaaacgagttcgtaccctctttagtggaaaggctaggctctttttttagtaggattggtactccagactattctcatccagagtaa

SEQ ID NO: 452556 - DNA, 1383 bp, Serratia marcescens
atgagtgatttaatgcctaaagaatggattttaggaaaagccagtgattttgtcgttagtcccaaaaatgacatagttgatggcccttttgggtcgaacctaaaagcatctgaatatcagctcagcggaacgccaataattcgcttacaaaatataaagcgactatgctttattaacaaaaacataaagtatgtttcaaatgaaaaagccattgaactatccaggcattcatataaaaaaggtgatattgtcataacaaagctgggagatcctttaggtttagcctgcataattccggaaaacttccaggatgggatcattgtagctgatctagtgcgcttacgtattaatgatcttgcatttgataaacggtatttaacttacttgttaaattcaccattggttattagtcaacttaataaacatataaaaggcactacaaggcctagaattaacttaggaattattcgagacttaaatctcccgatagcttcgatttccgaacaaaaaatcatcgccgaaaaactcgatacgctactggcgcaggtagatagcaccaaagcacgtcttgagcaaatcccgcaaatcctgaaacgttttcgtcaggctgcattacgtgcagcagttacgggaagactaatagataaagattttacaaatttagttacaaatattggctctcatgtatccattgatattggaaatgctttcaagagtgctgagttcagtgaagatgggatccctttattgagaggacagaatattgaaccaggcgcattgcgatgggatgatacaaaaaaatttcctgcagaaaaactagagctatttagccatttatttataaatgagaatgacattatcctagcaatggatcgtcctataatttctagtggattaaagcttgcaagagcaaaaaaatcagatttaccatgtgttctcgtgcagcgtgtcgctcgatttaaagattaccgagatcttttaccagagtatttatatatagcattgagtggtttagattttgaaaattatatccaacctaatcaaacgggaagcgatattccgcatatcagcgggaagcaaattttaaattttaaatgttctataccacctcatgatgatcaactcgaaatcgtccgccgcgtcgagcaactcttcgcttacgccgacaccatcgaaaagcaggtcaacagcgccctgacccgcgtcaacagcctcacccagtcgatcctggcaaaagccttccgcggcgagcttaccgcccagtggcgtgctgaaaacccggatctcatcagcggtgaaaacagcgccgccgccctgctggaaaaaattaaggccgaacgcgccgccagcggtggtaaaaaaaactcgcgtaaaaaagcctga

SEQ ID NO: 452557 - DNA, 273 bp, Serratia marcescens
atgcacaaacaactgctgaacattgcggaaaacgggagtctgcagggggcctgcaagcccgccgatatggtcaggatgcgcgtgagtcaggagaagggtatcaatctgaagcgggtcaatgcctgccgcggccagggctacctgaagccgaccgccccagccattgatacctccggcaccactgtcaatcaggatggttcgctcaggcgtctggataacgtagacgttgatattaatacggggtactgctggcacaccgcgcttctgcagtaa

SEQ ID NO: 452558 - DNA, 1305 bp, Serratia marcescens
  misc_feature (1271)..(1280): n is a, c, g, or t
atgagtaaaacactgttaccaatcccaatagtagatctttttgctggtcccggaggactgggagaaggcttttcctccctagaaaacggagaaacatttcagatcgcagtctcggcagagagagatcctattgcccaccaaactctccgcctcagagcattctaccggctgcttagccgtagtaaaccagacatgctgaaggactactatagtttctgcaatggcactgcaaaaaaaccctacagtgataagacaaaaggcctttgggatgaagctggcaaggaagccttatgcattgaaattggtagtattgacggaaatgctatccttgatgcttcaattcgctcagcactagatgaacgcggtgcggaacaaccttgggtacttattggcggtcctccatgccaagcttattcactagtcggtagggccagaaacaaaggcaaggcagactacaaggcagaagatgacaatcgtcattttctctatcgtgaatatttaagaatcatacaaaactatcagcctgatatttttgttatggagaacgtcaaagggattctctcgtcgactatcaatggtcagaaaatattccatgaaatcctgaaagatcttgccaacccagatgctgcattaggtgcgacgcaaaaaggacagtgctatcgtattgtctctttagtaagcgatcaggtgttttctgatggtgatgacccgaataagcttgatctgaccaagtatataattagggctgaagactacggcataccccaagctcgtcatagagttatcttgttagggatcagagaagatcgctacaaagaaaaattgccaaaactagctcgccaaggcacagtatcagtcaaagatgcgattggagatcttcctcctttaaggagtttgttaagtaaagaaaaggactccagcactctgtgggaagagctggttggcaaggaactacaaacactcgcagaagctgcatcaatatctgatgatactgtaagaaacttagcaccatacctacaaaaaacctctgaaaatatcggtttcatcttagcaacaggaagtgtcaggctacctaaaaagccagatagtattggaaatacaggacacgaccacctagataaatggctattggattccaacttgagtgtctggcttaatcatgaaacccgggggcatcgcattgatgatcttggccgttatggttacgcctcaaccttcgcttctgttcacaaaagatcaccaaagggacataaggaatttaatttaccagnnnnnnnnnncagggaagttttcagacagatttag

SEQ ID NO: 452559 - DNA, 1836 bp, Serratia marcescens
atggagcttattgccggagccactcatgaacacttcaggatagtggtgccctattcggcaagacaggtttcagcctcactttctgtggcgggtttcagcgggcgtgagtttattgcaaagcggattcctgtaagttttcaggttcctcctcttatttcggcaggatggcaggaagcgttaaggcagtactggaaagaaacagtaaatgaggatgcagggatagcgtgccgggaagcaacggtgttgcttgagcgctggaaaccctctgagtatcctcgtatcacaccgcgattaatgaagaagtttgttaatgatattcatattctgaaccttaccgttcctgcaacagaagatcatcgccatattcttattgctctctacttactggtggtcagatacggggagcgagatattaaagtattacttcgcgatcccaaagctagtcagaccgaacccggtattgctccggatgattttgacgagatgctctcgctaacttatcaacaaatatcccgaatttttaataacgatacagaaagatggagcgaatttctgatgagcatccactatcagtccacggtggagcttgccaggagcgagttgcttgatacgcctcttaaagacgcgattggtgctataaatatcccacggcttgaagaactgacggccttgtggggtttcgctgaagcatggcagcgagtggcaccacatattcagatgcgagactggctggtttcttatagccggatggatgagaagtgtcaggctctcgccgaaccgcaactcaaagtcgcagtgcaaatgctgaatcagagttatgctgtttcactcagagaaaagaatgatgaaggtttcgtattgagtctgcagaaactgatggctgacgggcggataagcctagagcctttcgtcgaaaggcaaatatcgtttattgtgagtaaacttgatgaaattcaggattcagaaaaattggaggctgaatccacgcagacgttgctgcaggaagctgattcatactctgttctggccggtgaatcactactgaataaaatggagaattttgtagatggcgtattttatgtggaataccttgtcaataatgaagagaccttgtcaaacctgaaaattggcacactagatatcggaaatcacggtcgggaggagatgttacgctatggagctgagcaacctcagatagacctttttaatccgggaattatccggcatatcaatattgcatcgaaggcggtacagaacgtaattggaaagaatgatggtacaggtggggctcaggttagctctgcaataatgacgcttaaaaatcgtcaggttgttgaggacgttatccatttcagaaaaattgttctgagcccggactggaataataatgttttaaatcaatattatcttaataatacggcgacgaggaatctcttccctgcggaatttgctgcacaggctgttgctcacatggtgctccatggtaactatgccggtatcgagtcgtacagtgaacatattggtgaggaacggtttgacctggctttggctgcatatcttcgttatctacgtactgccgagagtatctttatagcacttaaggataaaaatgttctgccgtacatcaaaaatgctgttggcaggattgttgatttaggtcttctggtgaatatacctgtcctgagctttgttaaaggtcagtatgacgtcatcaaagaagctacaaatgcaacctctcttttaatatttgtgcgagagcgtcaaaaagcactgtcagagaaaataattgagtctgatgtgaatgctatggaaggtgcgaacaagttcctgatatga

SEQ ID NO: 452560 - DNA, 564 bp, Serratia marcescens
atgaaacaacacagtgaagaactaacgcatctaaaaagatgcttacagcgcgaagttatgatttctgataaacctttctcttggttgagaacctgccacaaggcgttgaaatgccctgaccgcagatttcacttctggtggagacttgctaactatcttcatcacatcggaaaatttaagaaattttcaaaaagaataaacaggaaccttagaaataaatacgggttagatataaaacttggtgctcacataggcgaaggattgagcatatctcattatgttggaattgtaattgctgattgttgcataattgggaagaacttttatattaaacaaaactcaacaataggtgttaaacatactgaccaaaaagggaaaatcatcattggcgacaatgttgaaatatgtgctaatagttgcattattggtgaaaatataagcatcgggaataatgtgactgttggtgcaatgtcattcataaacaagagcattccagataattgcaccgtattttcagaaaaaaccaacaaaattattgttaagactcacgataccatgccatga

SEQ ID NO: 452561 - DNA, 744 bp, Serratia marcescens
atgacagttcaaaaagaaaccattgggaatgccgtgctctattgcggcgatagcttggaactcttgcagcatgacctagtagcagatgccttaatcactgatcccccatatagtagtggagggatcaatgcaggtactcggcgttgctcggcgcaagaaaaatacatagggaaaagtgggccacaatatgccgatttttatggtgacaatcgtgacgcaagaagctggtctctttggatgacgttatggcttggccaaagtatgaaaatattgaaggacggctcatacgtattgctgttcacagattggcgccaactgccagcaacgacagatgcgctccaggctgggggatatatctggcgaggcgtagttccctgggataaaacggcctccagtcgggcaccccatacgggatatttcaggcatcaatgtgaatacgttgtctggggtagcaaaggagggttaagcaagtcgggccatggcggcccgtggcctggttttatcactcagcgagttatcccgcaagaaaagcttcatatgactgcgaagccacttaagctgatgcaagagctggttgagccagtaatacctggaggaaccattctcgatccctttatggggagtgggactactggcgtagcagcagtgtcatcgggacggaagtttatcgggtttgaaatgagtaatcactatttcgatgttgcatgtaaacgacttgaggaggcgcaacgggattttaattaa

SEQ ID NO: 452562 - DNA, 435 bp, Serratia marcescens
atgtaccgtttttacccgttcaaacagtccagaattccccgcaaagtagtccggaaaattttgccgcgctacaatttcgagagccgcctgcagtttatggaagcttttccctcggtggcgttgcccgcgctgctggcgccgttcgatcgcggttacgcgctgccgggcagcgaagggcagatcgtgctggtgccgctgccggggcatgcggccggccatatcggcgcctttatcctcaccgacgccggctggacgctgttggccagcgacgccgcctggtcgccgcagagctaccagacgctgcgcgggccttcgcgtctggccaatctggtgatggacgacgcggtggcgtacacccgcacgctggaacggcttaaccaactgtgggcgggcggccaggtcaacattttgctgtgccacgagggggacctgtga

SEQ ID NO: 452563 - DNA, 522 bp, Serratia marcescens
atgtttgtaaaaaaattaacggtggcgtcatttgttacgcttggtgtaatgagttcgtcttgcttcgctgctaactatgggcaaggcaatgttagcatggtggggagtatcatcagtatcccctgtgctatatcccccgaaagtgtagaccaaacggttggtctgggtcaggtattgggggctgttcttgaacaggaagggaaatcaactccccgcgcttttgatattaaactggagaattgtgaggtcggtgatgggcaaagcgttaccgttacttttaatggtgttgcatcgacacataatgatagcttattggccatttccggcacagccagcggtgcaggaatcgctatcacttatgatggcagtgtagtaaaacctggcggaacgacaaaggcaatccctctggttaacggtaataacatgatccattttactacgtatatccaaggtgaaagtggtaaaaatatcattcccggtgatttcactgccgtcgcgaatttctcgctaaattacctttag

SEQ ID NO: 452564 - DNA, 1161 bp, Serratia marcescens
atgccgaataaatttaaaaccctcctcccgcccaatgcgatcccggaggagcgcgccctggagcgcgcgacaattgaagaggtgctctctatccctgacctgatcaggatagtgaagaacccggcgctatgtcctgttgaactgctgccgtggctggcttgggaatttagcgtagacacttggaatacggattggacggaggaggagaaacgggcagctattgcccgcgctgcttatatccaccgccatagaggcacgagggcggcgatcgagatgtcgctatcgtcttccccgttcgccagtgatgttatcgagtggttcgaaaagacgcccaagggggaaccttataccttctctctcgaagttacccaggacgaccggccgatcacgttgggggatgtgcaggacctgaaaagcgcggtgatgaaaggtaagaatttgcgctcctggttcgatgtgacatttaagggaagcctggatggaaaggtgattttagccggctacatggtggcctccgaaacggtttcaacactgccagtatttgaaatcatcggggtgcatgttaatggctggatgacttcagcgtttgcgccgaccacgacattcaagggggcggtttatacgattgcggcacagggcaatattggtgccattgcgtggcaggcggccgggccggcaactgttgccggtgatgggacagtcaccattaccgggccggggcgtgtcgtgataacaggggaagacaataaggggcgcgaaatatcgcacactgtcacacctgagcggtacttcattccttccgcggaccagatgttccaagctgacatgccggcctttgtggctaagcaaggagggcgcattcctcttcaagccgagttaaccagccagccaaaaggaagctctattttgcccaaaaggggcgtcgggacgctctggggggagtgggggagaatggcattttatggctggcgggaatggcgggataacgacgaaaaagagcaggaacactggaggacggattcgctgggggtgctaaatggcaaggatgatccctccacacgacggtttgtcaggctaggagatggatcggcaacaaacattggttcagtcaatacgaataaattttcggtcgcagccgtcattgatttggagaaaacataa

SEQ ID NO: 452565 - DNA, 777 bp, Serratia marcescens
atgagtgagattaaaagaattaatttgcctgaaagagattattaccctttaaataaagcgtctgaaatcttaaagtgtgacatacaagatatatatcattttgctgcaaggggacacttgacaattagcttgatgatgccactttatgtttgcgctagagtgtcagttcatggagatatgacattaaatgttttaagcgacattgatcttgaaaaaatagataaaggacaagttattgacgaggttaaattaacgaaccttgcaacgatatatgatgtttcaattagctctgagtatgatggttgtttggcggcaactatgggcggcgtatgggatttaaatatgggggcggctgaaatgcttgagtgttttggatatgctacaactaaaaccataggtgcagtctatccaactgggttaacaaacagtattgatttttatgcgcattttgaaagtgaaacagcaaaaataaagagcgagtatctgtgtatcacaaaagaaaatatttcgtatatattgggaggggaaaagtctactttcgttaatagagaagttcaaaggccacatttgactgagtaccatgctaaaaaaagagagtcggtgttaaaagcggctttatatatgaaggttcaccatccagatttatgcattaacaatactaaatgggccgagtcgatcaatgaacacgctcataaattttgggataatggagagccaccattagcggtagacacgatctgtgatttgttggggaaatcattatcagtatcaaagtag

SEQ ID NO: 452566 - DNA, 501 bp, Serratia marcescens
atggtcgattacatcaacgcggagcgtaaagggaaggcccaggcggaaggaatggatttcccctgcaagaaatatcgcaagcttcgccatgccgactttatgaaaaaagttccgcgtgtgctgggggaggggtgtgcgaaaaatttctcacacccccaaaggaatgagcagaacggtgaagagtacccagggtactccttccctaaacgcgaagcctgtttgatggcaatgagctacagctatgagcttcaggcggcagtgtatgactacatggaggaattggatcaccagaaaggcgggtatctgggctacacgattggcgagctgcaaaacattgtggcttctgctcgccagtattccgacgaggattcaagtgatgcaggtcggcgtctgaaaaagcggcaaggcgatcttattttgctggaaagggctgagcacttggttagcagcttaagccagctttcgctaaacctgccggggagcgttccagatgctgaataa

SEQ ID NO: 452567 - DNA, 195 bp, Serratia marcescens
atggcaacctctaacaagaatgcaaaatcacaactctttactgttcgtgtgccgcacgaggtcgtatcagaaatggagtctctgaaagatgaaggtgagagcagcgcaggatttatcgttacctccatgcgcggagagatcaagcgccgacagcgcaagcaggcccgccaggataagccgtcagactcggaatga

SEQ ID NO: 452568 - DNA, 195 bp, Serratia marcescens
atgcttaaatatttccgagtttcagactatgcggttaataagcgcggtaacaccattggtattttttacgatgtaaaatcaaccagcgccaagcaggcaactatcaaggctgagaaaaacgccgaagaagatgggttccgttatatccgcctgacaaaaactattttgcaggaggtgcgccatgaatcagcatga

SEQ ID NO: 452569 - DNA, 714 bp, Serratia marcescens
atgcctagtcagtttttaaaaaccattcttcgtaacaaaattcaacaagcatatgacaatgcagaggctgtttctaaaataccccatactactgttaaaggcgcatttagagagagttttctcgttccaattattagatcactgctaccatcccatttcggtatcggctcaggccagattgttgataagtgggatagattttcaccacaagcagacatcatcatttacgacaaaaggaaaataccaccaatcattgaagaaaatgggctaggcatctactttatagattccgtacatagagccatcgaaattaagagcgacttaaatacagatgggatgcatcaaactttaaatcttgcatggtcactacatcctgacaacccactagggttaaaaacggctaaaaaaggaaagcttgtagatggaaaatctaactaccctctggttagttgcttcagttataagcaatccataacagatttagataaagctctttcaaaatgggatgtcacagaaaatataccaagcgtgatgttctgcttacctgatactggtttttatatgtattgctctcaatcaaagaaatataataaattgattacaaatggtaaagttgatacctctgctacttatctcaccctgttcttgaattgtattgaagatgaagctgcatccagaggcgactactccttatttgaatggctttttgattaa

SEQ ID NO: 452570 - DNA, 849 bp, Serratia marcescens
gtgagagaggcattgcgttcattgttacctacgataattattttttttatatttatcgtaatagttatctcattatcatttttatggggatattataacaataaccattatccgtataattcaaactctttttataactttgatttccttcaaaatctcttaataaatcttaacgcttcaattgtggattttttggtattaggtgttattatcattttttttgaaagaagaagagaacacaccagtaagcaaaattctttgattgatgacttaaaggattatgcatcctactcttcggaggagattaatttaaaaaaagcagggctgcttaaaagattaaatcagtctagtgtaaaaagccttaatatacaaagaattataataacaaacacatcaatcaaggacataaaattcatctctggaaatatttccggttcaagctttgaaaaatcaaaaatgagaaaggtttatctaaaaaatatgatattgaagtctgtcaatttcaatgagtcgaatttagatggatgtcatttcaaaaattgtaatatgtacaatgttaaaatgaaagatgccagcgctattgggattcaacttaatgaatctagtttgattaatgttcagtttaataattcaaatttgaaaggctgtgatctaaggaattgtgacttgaaaaatgtaaactttgaagatgctaaccttagccgtgcaaatatacttggagcaaaaaatataagtatagatgcgttagtcaaagctgaaaatcttgattacataattgcagaagatcatgtactagaagagataaagaaaaagagaccggaaagcgttcaccaaactagacggctttag

SEQ ID NO: 452571 - DNA, 903 bp, Serratia marcescens
atgttcgatgaaaaaaaattcatgtcggattttgacgatttggaagatgatgaaattgactacataaatgctaaaatggaagaagagtccaatagacaatacactcttttcaaagaatcatacttacgcgatgaatgctacttatgtggtaaagattttaaaacaataagcaaagaaaacccttgcttgcactggttattacgccggtgtaagtttaagacaaaagattttcatttgatttacaaaaaatatgggtacacaaacatagctgcttttttaagatggtgtgcaaatatggagaaaccaatagtcaatataaatgatatgactattgaagaaaagaaagaaaaaatcatatcgaacactattaagtggaaaaatgtagagtggacatttgactgttcggagtcagattttaaaggtcattctggtaaagaagcggacttccctcattatcattttcaaatgcgtattgatgggtttcaattcataaacttcaacagttatcacttgcctctacataatgacgatatctttgccataactatgtcgagagctcatccagaaaaattccactataattttggtgatcatggtagtggaatgaattttgccatggaattaataagcgatgatccagaggttgctttcgaacacatgactagagcagataatgaggaggaagcagtttatcacatgtctaccactgtcatggcgaatgaaggtgaaacaatttcaggtgatctaattgctgacttaatagatatatcaaagaagactggtgagccactcggtagcttattatataaaaacatgtcaccatctataaaagttcaaacaattgtgtcacctagtgatcaaactccggaaattgcagtcagaactgaacacaagaagagatag

SEQ ID NO: 452572 - DNA, 1566 bp, Serratia marcescens
atgcctgtgaagccgatccctgtagtagacctttttgccggacctggaggattaggggagggtttttcatccctgaaaaatggcgacacgtttcaaatagctgtttcagcagagaaagatccgattgcccatgagactcttcgcctcagagcattctatcgactgttggtcagaaacaaacctgaaagcctcgacgactattaccgcttctgcaatggcgaaacaacaaaaccttatactggtgaaacagctgaactttgggggcttgctgctaaagaggctatgtgcattgaaattggtagcagtaccgggaatgctatccttgatgcatcaattcaagaagtgcttgaaaaacgctgtactaatcaaccttgggtactgataggtgggccaccttgccaagcctattctttggttggacgagcccgcaataaagggaaaacggattacaagccagaagaagatcatcgtcacttcctctatcgcgagtacttgagaattattcagaattatcagcctgatatctttgtaatggagaacgttaaaggaatactctcttccaagataaatggcgaaaaaatatttaatcagattctgaaagatctcgccaaccctggttctgcactcaaggctacacaagatagtccatgttatcggattgtttcgttagtcagtgaacaagagttttgtgatggtgaaaaccctgacttacttgatgcgacaaaatatattattcgatctgaggactatggggtaccccaagcacgccatagagttattctgcttggaatacgtgaagaccgctataaagagaatcttcctaaattgcagattcaaggtagtgtaagtgtccaagatgttattggaagccttcctaaattaagaagtcttctgagtaggcagaaagactcgagagaacaatgggaagttcaggtaagtgagcagtttaacagtcttgctgctcatgcatcaaaaactattgaacctgaaaaagtattatcaagctgtcttgcaaaagtctctgagaaaattggtattgtcagcaatactgggtccactaggatgccaaaaggcgactttactggacgtactcagcataattaccttgatgactggctgctcgattcacgtttgaatgtttggttaaaccatgaggcccgaggacatcgaattgacgatctcgctcgctatggttacgctgcatgtttcgcttctattcataaaaggtctcctaaagggcataaagagtttaacttgccaggcctcgcgcctgaccataagaactgggaaactggtaaattctcggaccgcttccgggtgcagcttgctggcagcccatctacgacaataacaagccatatttcaaaagatgggcattactttatccattatgaccctgtacagtgtagaagcctgacggttagagaggctgcaagattacaaactttcccagataactattttttccaaggaggaagaactcaacaatatcatcaagtcggtaatgctgttccgccatttttggctaagcagattgcacggattgttgcagatattttaatctaa

SEQ ID NO: 452573 - DNA, 2829 bp, Serratia marcescens
atgactaattacagtattgacccagcgtacgacaaatgccgcgctttcattgacagctggcgcctgaaaggaaagggctgggatgaaattgccgctcttggccggttgggggaatcactggagaaagtcgatacttggttccgtatgcaggaggaaatggaagactggccttcgttgggcaagagtccggaagaacgctatgaatgttggagagaaatcgtccgacataagaaacacgcagaacaacaatctttcgccgcggctagacccttgatcgttgtaggaccggaagaggccgagccaggattcacagtgccgcaagaaggacgaagtgcttggcaactctacaggaaatacctgctcaatcagggctggaagaaaacctcagtcgataatatccaagaatctgctttacgtgtactcaagcactttcgccagacaacaaaagatcgagtggctgtgaaaggtctagtggtcgggcatgtccagtctggcaaaacagctaacatggcgggccttatttcaatggcggcggactatcgatggaatttgttcgttgtgctcaccggcacgttggagaacctacgagtacaaaccggcaagcgacttgtcggcgacttgttccagcacgatggcaacctcagctggaagtcgattgagcacccgtcgagtaatagtccttatggagcgcgtgcgcaggacatgcagtttgacgctggccggagggatcgccacttagttgtctgtctcaagaacccatcccgattgagacatctcatagattggatcagcgcgcatccgcagggaatgtcgcagatgcggctcgtggtgattgatgacgaggcggatcaggcgggtatcaattcgaatgatgtttccaaggatgaacgtactgtcataaacaaccttatcttgcaattgatcagtttgccgttgcaaagcgtgaactacattgcattcacagctacacctgcagctaatttccttaatgaaggccccggtgaaaccctctatccaacagatttcatagctgctctaccgcaagctgatgaacatttcgggcctgtgcagatcttcggatatcctgaacaatataaggagccacttggaattgttcgcgaagtttcagatgtggacttggagaaggttagcagtattcataaaggcgatgacttgagcctgcctcaggcgctgagagaaagcctaatctggtatctgtgctgtgtggctgttatgcgatggtctggttctgccaaacccgtgagcatgttgatccatactagtgcaagacaaatccaccatgacaacatgagtagagcggtacaagctgcgctcaaaacatggtcgagatacagcaatattcagttagagcaagttttcaggcatgtatgggaaaacgtctcgtcaagtctggacgtcagccagttctctgcgcgttttcctgattacggacggctctcggagcttcatgagctgccggagtttgatagtttttttgcagaggtccggactcttctaagtatgataacggctattcagctcgacgcggatgccaagcgtacataccatcgcgggatccatatctgtgttgataactgtgctaacaatggggtcactgatgagaatgaagtccggcgcctattctaccctgaccccgaacaaggtcttgatttttgtgccgcttttattgttattggtggcggaaccctttctcgtgggctgacgattgaaagtcttgtcagcacctttttcttgcgtggctcggcccaagcggactcccttatgcagatggggcgctggtttggatatcgcagaggttatgaattattacccaggatctggatgtccaatgatacaaaagccaaatacgagttcatgacggttgcggaggaagaacttcgtgatgatttgcagcgtttcatgcaaggtggctctaagcctgaggagtacggaccacgtgttcgggttcatgctaggatggcttggattcgccctactggtgcgactaggatgcagcgcgcgatcgaggcagatttcgacttttcgggtatcaatcggcagactacggtcttccatgatggcgatgacgctaaagtagtacttaatggcaattttcattacaccgaagagtttctgaattcgcctagttcgaattttgaacagtctgaattgaagaggtctcatagccttgtttggcgtaatgttgatgtgagtctagtagctgaatatttggctcgcttgtcattccatccgggaaatcagtttttctccgacatcaacgcttttctgaaatggcttggtgaacatgctgcaaatgccggttatacgaattggaacgtcgttgttgctggcagctctccgaaaccggaaaacagatgggtgatcggcagtaatgcggttggccggatcaatcgtacccgctttgctgataagcgctcggatgatggggtgtcgattggtgcactgcgagatccaaaggatctgcttgcggatgttctctatattgaagacagtgatctttcgtatgcgactttcaccaattctaggatagctgagctgcgttgcaaaggcggtgtcggaaatacacctcaactgcttatctatcttatcgataaagtcagcaaatacgacaatctgtcaaaggtgaaggatgcaccgcgcagagagagagcatcgcttaatgccaaggccgacattataggcatcagtctttatctacctggctcgcaaggtaagaagcaaaactatgctactcacgtgactgtgcacattccagagcctctttctgtattggaggatagcctagaggaaaaggtaggagaaatctaa

SEQ ID NO: 452574 - DNA, 204 bp, Serratia marcescens
atgcaccaagatgtaggggcaaaggaaactgctagtgaattgcttgatgcgttggggttgagattgaccgacattaagttagcaaggcttctgaatgaattcccagagaagaagcgccaagagattttgtcaagctatgaagaggaaaaacataactccccctcggagtcgttgacaccgcgcaggaatgataaagccggctga

SEQ ID NO: 452575 - DNA, 750 bp, Serratia marcescens
atgacagatacagatttcagcaaactcaggctgtctcatgcgcacggcgtgatgacgatcgctatcgataacccaccggtaaacgtacttgatgtggcgctgatgtcggaaatcagccgtttattgctcgcggtgcgtgacgatccggatacgcgggtgttggtgttccagagcgtgaacccagcgttctttattgctcacgtcgacatgaccttgatcgatgagccgcacgctttcgacgaactggcgagcaacgcgccggaggggcttaatccgttccaggcgtttggcgaactgctgcgcagccagccgcaggtcactctcgttaagctggctgggctggcacgcggcggcggcgccgagtttgtggcggcggccgatatggctttcgctgcacgggaagcggcgggactggcccagtgcgaggccttgatgggcattacgcccggcggcggcgcgacgcagtatctgacgagccgaatgacgcgcggccgcgctctggaagtgatcctgggcgccgagcttttcgatgccgctactgcagagcgttatggctggattaaccgtgccttgccagccgccgagcttgatgatttcgtcgatcggttagcgcgcaatatcgcggcattgccagagggcgtgattgcggcggccaaacaggcgatgcctgcgccggatctgcaggccggtgcgcaaaccccggagggggagcgcaaccttgaaggcctgctgcggcatcttgcccgctaa

SEQ ID NO: 452576 - DNA, 2934 bp, Serratia marcescens
atgacagacattgcatcgatctccctgcgcgtcgataccagcgacctgcagcgcggtagcaccgagctagatcggttccaaaaagcggcggctgctgctggaatatcgacagataaattagctcaggagattaagaaaacagaaccttttgccgcacagatgtatgaggcatatgcatctatcgggaaagaggtgaaaaatagcgctcaagcgcaggatgcgttaacggagtcattttacaaacaattagacgccataaagcaaaacaacactgccacgaaagaacttgagagattgcgggcatcagtgcgttctgcaagaaaggcaggaaatattgacgaagcaagctatctcaatttagtcacggacgttgggacaaaaaccaaggaactagcccaggcagagcaagcggcaacggccgcccgagaagtgttcctgcgcaagttgaaagaccaggtggcgacccagagcctttcgcgggaagagctgctgcgctaccgtgccgcgcagttgggcgttggttccgcagcggacatttacatcaaaaagctgtccaccgctggcgacgccacgcataaattcagtttacagacgtcggccgcccgccgggagctgggcgttatgctcggagagctggcgcgcgggaacctgggcgctttgcgtggctccagcatcaccctggcaaatcggtccgggctgatagagcagatgatgacgctgcgcgggctcggtatcgctggcgtgctgggggggattgcagcagccgtttatggactcggcaaggcctggtatcaaggttctcaagaggctgtagagttcaacaaacagctaattttaaccggtaactatgcaggtaaaacatctgcccaattacaagatatggctaaagccatgtccggggatggcatcacacagcatgcagcagcaggcgttctcgctcaggtcgttggttctggggcttttaaatccaatcagcttgagaccgtagcgagagccgcagcggccatgcaagaggccacggggcaatctgtagaagcaaccataaagaacttccaaaaactatatgatagcccgactaaagcatcggaagagttaaataaccagctgcattatttaacctcggctcaatatgagtacatttcctcactggaaaagcgaggttataaagaagctgctggtgaagcggccgcgaaagcatatagcgaggcggaaaggcagcgcagcaaacaagttatagacaatcttggtttcattgaagcagccataaaatcagccacaaatcgttggaatgaattttgggatgccgcaatgaacgttggaaggccaatgacggaggcttaccaacttgagcaagtaaataaaaccataaaccagatttatgaggacagaaaaaaatccggtggctggtactcaaatcaggaagggttggacaagttattacagcagaaaaaagagcttgagttcgtaattaagtcgcaacaaggttatgtcgactctgtcaataaagccaaagaagccgacgaaggccgaactaaatcccttcagtatcagaacgaaattttatccaaaaatcagtcctggcaacaaaaacgcactgccgctttaactgaattgtggcagatggtggctaaggcacccaaggattggtcagataaagatcgcaagctcgctgttgctcaaattaatgctgataacaaaccatctgcgacgaaaaaaggcccccagtaccgggcgcctgtgggcgatctcgccgacgaaaaagcgcaggccgatttgttggcgctccaggcacagctaaaagtgctacaggaccaccgcagcatcaatgacaccatcagccaacagcgcaaggatttgtgggcggagcaggcgaaatttgccgtactggagcaggcagccgacaagcggaagctgactgcgcaagagcagtctctgttatccagcaaagatagcgtgctggcgcagaaggaacggctggcggttctcggcgacgagatcgccaagcaggagcggcttaacaaacttcaggacgcctcgtccaagtatgtcacccagatgagcgagaagcgtcaggcgctgcgtgaaagcgccggcttgagcgatcgggatgcacggcgccgcatggaagaggcgcagctcgcgcaggggtggcagaatcagggcggaagcctgcaagatgacggttacaagcggcagctgcaggcggcacgtgatttttacgccgaagaggacaaactgcgggccgactggaaaaaaggcgcattgaaaggctggaacgaatatctggactcagcgaccaatgtctattcctcagtcgccaatgtcgccaatgctgcattcactgggctgagcgacacgcttaccagccttgcgacaaccggatcggccaacgttaaaagtttcggcgtctctatgctgaaaatggtggtggacgtcatcaacaagttgttggtggcttacgccgttcaggcggctatggggtggattggtagctcgctcagtgcgccatctggcggcaataaccccggcgcagtcccgatggggctgcattacgacggcggttacaccggcgacggcggcaagtacgagccgaaaggcatcgtgcacggcggtgaatttgtgttcaccaaagaggctacgcgcaatattggtgttggcaatttgtacgccatgatgcacagcgcccagggttacgccgacggcggctatgttggtaacgcgccaatgcacgggctcacggcggcgggaggaagttcgatcgttgttcatgcgccggtcaccatcacgcaggagagcagcaacggcggcgacgtcagcgcagcgaataccgccaacacagcccggcagttgcaggggattgtccagaccgaaatcaccgatcgcctgaagcgcgagatgtcgccggggggattgttatattcaggacgcagataa

SEQ ID NO: 452577 - DNA, 225 bp, Serratia marcescens
atgtacgcactgaagaaacaaactaaccaaagcacccaggtaattctgcttggcaaccaatttactattaagcgctacccaccgactggtaacggcgcggtgggtagcgtgaccggtgaggatccacgttgttgctatgaaattggcgctgaaatgaatgcgtttgtgacaacagtggagggaaaaacggtggaggtcattcaccgcatgactaagcctgactga

SEQ ID NO: 452578 - DNA, 219 bp, Serratia marcescens
atgagctacaaatcttatagcattgaggtgatatcgataaatggcggcagcaatacaatccgtttttgccaagctgacgatggtgaaggacgccaccaagaggaaaagaaaatagacattcgggaatttgacttcattagtggtctgctctctcatatttacgctgcaaccactgaaaaggaaaaacttaaaggctttttcaaattcaccagtaagtaa

SEQ ID NO: 452579 - DNA, 3189 bp, Serratia marcescens
atgctatatctcgttacacacctcgccaccaagactggcggcaagatgcccttcaccattctgaccgatgcagacacggcgaacgaggcaaagtcgctcgctgctgctatcgtcaagtttcacggcaaagccaaccctcaatttagcttggatgggtattttaaacctttcattgtcgaagcacctgaggtcgatgatttgccagaggaagataccgttgattttagatggctcgaacgctacgaaccaacccaagacaaaaaaggattcattccgcgcagcgaaaagctgcaggagcagaaacctgcaggtggtgcaggaacggcagaagccaacagccacgaaacgccactagtggaacagcctgccaatgacggtgatcagcctgcgcacggccaggagccacgcgcgtatttcgcaaaaatgagccacagcaccaaagttgtcgccatagaaaagcacggctttggtgtgatcgacaccgtgctgacaaaagcacagatgaaagacgtaatcgacacagccattagcggcgaagatccctattatgccgatctgattaaagcaacacagacctccgccatcatgtcgatggaaacggctcgttatacggccttcattgccggcattgttcgccgttatgagcacgacgaccgtgagtcgacattcgtcaacatgcggaaatacgccgaatcgttgctggctgagcaagtcgagccactacgtaccacatccggcgcgctagccgttacaaatgcgcctacagctggtacgcctatcgcctcatttgaagagcttgagacggttgtttacctcgcgcactatccttctgacttcaacatcggcaacccgccctcttcgattgttaatgcgatcggcgaggcgaaaaagcggaaggacgaatcccctgctacctggtttggtcagttgcgcgaaacacccggcattcttaatttttcccgcgaggctgttggcacgctgatccgtaacgcgccggagaatatctatatgactcccggtgcgctgcgcagctacatcaatgccaatctgatcgaggtcgacgctaaaccggcgcaacagaacgcggaaaccgtgcaacagaatggcgccgacgtgcaacaaaccgccaccgaagcgcaacaaacggcctccaacgtgggtgaaaaagatgaagtggtcaccgagtttgagactgaacgctgtgcatggcttcgagctgaaatacgtgcggcgctgaacggaacaactggcgttatgggtgaaaacgaagttgctgaattgatcgctgccatcggagaagtttcgcacggctacatcgcacgactgctggccaaggagatcgagacgtgcgacccattcaagcaactggtcgctgacgacattcaccacatcacctgcgacatgttggaaaactggaccgatgacaaggatcagcgcgtcgcgtttcttgaccagcgggttgaatacaacctgcaggaggcgcgccgggcatccgagcagaaatgccaggaaatggccgcatccatcgacggagccggcagcggcgcgttgcagcaagaaaatccagagcccgcgcaggttgacgcctcaaatgagtgcgtaaaaacggaagtcgcgcagcagcaacccggagagctccgcagtatgggtggcgggcactttagctatgacccggccgaaatgttcgccgaatcgccgctggccaaggtcgacgccgcggacgccacaaccggcgacgatgttcgcgaattcctggattcgtcaacggaaacggccgatgtgtcaggcgagacggcgggattgtcagataagaacgtagataccgcggcgccagtcgaagtacagaacgaggctgccgcggcagtcgacgacgcaccgcgccgagaagaaccggccgccccgtcatacttcgagccagggcgctatctggatattccgaacgaggtctaccacagcgccaacggcatcagcagcacgatggcaaaggacgctcggatcagcctgatgtattaccatggccgccacgttatcaaaaccatacagcgcgagcgcaccgatgcgctgacgttcggctcgttggttcacgcgctgacgctcgaacctgaaaagctggacgaggaattcagcgttgagcctgtgatccccgagggggcattcacagatacagcatcgatgcgcgcatttatcgaacagcacaacgccaccctgccgaaacagaccgacgccgatacgctgcgcgccgtgatcgagaagcataacgccaccctaccggcgtcgtatgcgttgggcggcaattacgaagaaaccgcgcaattttatgtttcacttccggttgagtttcaaagcctggcaacggccgaacctacggcttcagcaatgaaggggtgcatcaagaagtacaacgccaccctaccggcgccgttgaaaaccaccggcggccgcgacgcactgctggaacagttggcgaccatcgatccggagtttgtcgagaaagagcgcgcgattccggcgccgttgccggtcagcggcagcaaagaggatatggccgcgcgtatcaaaacgattttgccaacggcggtattcgccgacgaagtgatcagcgcatggaaaaatagcaacgaccagcgccagacgatcacgcaggcgcagatgaaacacgccaaggcaattcagcgcgccctgttatctcaccctgaggccgggcaatggctgcaacatccgcagcgcgctacggaagtgagttacttcgggattgatgaagaaacggggcttgaggtgcgcgtacggcccgacctggaaattgataccggcgcgcgacgcattgccatcgacctgaagaccgtcagcttgccaaacgtcaaacaggataacctgcgttaccgcctgcaccgcgagatcatagagcgtgattatcacatgagcgcgggcatgtattgcgacgttgggatgttcgatcagttcttctggatcttcgtcaacaaagagcctggttaccattgggtagccgtcgtcgaagcatccgccgatgaactggcgtggggacgcgccatttacaaaaaacagttggcggcgatccgcaacgccatggataccggtatctggccggaaccaattaccgaggtatttactgacacccttaccgattacgaactgtcatgcctgaaagagctgaacggagagccatcatga

SEQ ID NO: 452580 - DNA, 1056 bp, Serratia marcescens
atgagcactgaaattatcgaacataaaaaaaacggcatcatcgacaatgtatccatcctgacaaacggcgatctgtttgatcgcctgatgaaaatttccgaagtgatggcgaagagtggcgcgatggttcctcaacattttcgcgatcaacccgatgcctgtatggcgatcacaatgcaggcagcccggtggggtatggaccccttcgtggttgctcagaagacccacctggtcaacggcacattgggttatgaagctcagttggttaacgccattatcaacagcatggcgccgactaaagatcgcattcactttgaatggttcggtccatgggaaaatgtccttggccggtttgaagagaaaacaagtaaaagcggcaacaaatacaccgttccgggctggtctctggctgatgaaaaaggggttggtgttcgtgcatgggcaacgttgaagggcgagagcgagccgcgagagctgctgctttatttgtctcaagctcaggtccgcaactcgacgttgtgggctaccgatccccgtcaacagctggcgtacttagccgtcaaacgttgggcgcgcttgtactgccccgatgtgatcctgggtatctattctgatgacgagctgttggagccagcgccgcgctccgagaaggatatcaccccagcagctgcagctgtagctgaactggctgcatcccctgcgacagcgctggatgaaactaaggccgccgagttggctgaggcacttagcgccgcgctggatgaagcggagactcaggaagaagcaaccgccattgaacagcgcatcgccaagcacaaagacgcgctgggaagttctctgctgttcagtctgcgcggtaaggcccagaagaagcgcagcggcttcaaggctgtgggagagatcgatgcagctttcagtcaactggatggggccaatagtcaacaattccagcaattggaaaccctggtagcgaatcgacaaagcattttaccaccggcggactacgaacggttcaccgtcgcgcttaacgatttacggccggagtaccagcaatga

SEQ ID NO: 452581 - DNA, 186 bp, Serratia marcescens
atgaataagtgggttctaataaaacgtgcatcagaattaacgggttacagcgaaaccgcgctatatgacaagatgcagaaagggaagtggccggaagggaaactttggcgccgtgcgccggacaacaaaagacatatcaatatggaggaatacgacagatgggtggaaagcaaaccgatccagtga

SEQ ID NO: 452582 - DNA, 1092 bp, Serratia marcescens
atggcgtatttcagcattgagaaacggataaaatcagatggcacaccccggtatcgttgcaccgttggcgttaaggaaaacggtaaatacatctaccgagaaaacaggacgttcggcaagcaatcccatgcaaaaacatggggtgtttcgagggtagcagaacttgaaaagaatggtatcccgaatagcaacgatgccgaaaaactcctcattaaagatttaattcagcgatacatagatgaccccgcaaccggcggccgttccggtgccagcaagctacacgtcctgaataggttactcaaagaagatgtttcagcgattccccttgcggatttgcggccgaaccacatcatcgatcactgccgattccgggcttcttccggcgcagcaccatctacggttgcgcatgacctcagctatctgagcactgttttaagctccgccaagccaatctatggcatcgaatacaccgataacccaatcattcttgcacgccctttgctacgcaacatggggctgataggcaagtctaaccgaagatctcgccgcacagcctcagaagaagtgtcaatgctaacagaagccctggaggagcgagcaaagcaccccagatcagtaattccctatgtggacattttcaacttttccattctgacctgcatgaggatcggcgaggtgtgtcggctaaggtgggaggatatcaacgaaggtcagcgttctgtgctggttagagataggaaagacccccgcaaaaaggccggtaatcatatgaccgtggcactccttggtgatgcctgggaaatcgctatgcggcaaccgaaaaaatcagcgcttattttcccctacagatcacgatcagtaagtgctgggttcaccagagtttgcgagagtctcaatatcgaggatttgcactaccatgacctgcgccgtgagggcgcgagtaggctgtttgaggcaggatttagcattgaggaagtggcccaggtaacaggccacaaatctttaaaactgctttggcaggtgtacaccgaactctacccgaaatcgctgcatgagaaattcgagcagttgcgcgcggctagggagaagtaa

SEQ ID NO: 452583 - DNA, 1632 bp, Serratia marcescens
atggttagccggttaaagcaaaagatgaacagtgaccccattggtgtcgataaggaaatgaaaatatctgaacttccatcggcagaaaattcgttaattgatgatcttcttgttatctctcaaaatgacgatgatggtttattgagaaccaagaaaatatcaatgtccttattgactaaatcactggtttcagagcgcgatggtaatttggtaagtctagttgatgggtttaagttatttgctgataagggcgttcttgatactgctgcttcccgagcagaagcggcagccgaaatcgcccaaaatatcgcagacgccaatacctattacacatcaccaacagaccctgacggtacgattgcgggcattgctggcacgccagacgggaaaatgttccgtgttgcaattcaagatggtgcaggcgttaccatttcatttaactattacaagaacgaatcagggctggctaaatttataaattccgacccaagcaagaggtttgttgagcacgtaaatgattctgttgttaacttaaatcaaagagtagggattaagttgtacgaccaaacaatgaatgtgcgtaattattatgtagtggcggccggtgtagatgctggaaaaattaaaccgactgcaactaccccaacaatagtaacttactacccggttgagcctgggcaaacatataggatagagtcaccagattttaggacggattattttgctatggctcttaaagtcgatagcaacgtaacaggcgacacgcttggactcttaaaactaagtggaacaggttcagttagggagtttaccgttcccgccgacagccccgctaaattcgcgttcatgaacgtgtatctacctggcccagcttgggacattcgacccacattatcagtcattgggccagtgcaaaaaatgtcggcgctgaaagcctatgggttagtggatacccgagcacggcaattaatttctgaaattgaggggcaaaaaaactcaccaatcaaggggagggcgtgggcggttgtcggcgacagcatcacagcaaaaaatttcaggacgaataaaaattaccacgaatacatttctgataatgtgggtgggatgactgtatataactacggaatcagcggtacaggttactatggacgctcaggggttgcagatacaattaccgaaaacccagattatttaactgtatttttcggcacaaacgattgggggcaggtgaataactcgaaaccacttggcgccttcctcgataccggcaccgcgacgatttctggttgcatcaatacgtgtctgctcggcctgatcaccaagttctattcgaagaaggttgccgctttcactccgttaccgcgcttagacaactggggaagcaacgcggcacctaatgccgtcggctatacgcttgaacagctttctgcgctgattcaacgatatgctgcgcactactcgatcccgtgccttgatctctaccacgagagcaacttgccagtgtacgtaccagcggggaattcctactatttcacgtacccaggcggctctgcgcccgatggcttgcaccctaacgatgccggacacatcgtgatggctgcaaaaatccaggcgtttctcgagtcgatgtaa

SEQ ID NO: 452584 - DNA, 741 bp, Serratia marcescens
atgactgatggctttgaattttctgatagcccacgctgggtatgggtttaccgctttgatgatgctggaatttttaccggaaccctcaacttttacgtggcgccgcataccggcttaccggctaattgcacgctgctgaagtgcaatccgaaatcaggccaggcgggcatatggaacggggaaaactggaaatatgttgccgacgtgcgcgggaccaaatattgggacaagcagggacggccgtttgtcatgatggaactggccgcacttcctgaatgggctgtgaccgacgcgccgccgacggctgatcctggtcatgttgttttacataccgacgcaggctggcagcaaattgaagaccgctcagggcagacgtattacaccgccgacgggagtccccaggtcgttccgaatccctatttcatcttgccggccgattgcacgtttactccgccggcaacgccatacgatcgctgggatggtcagcagtgggttactaatgaggagctggtgcgtaatgcgcagttggacaccgcacgggatgagttatctcgccgtaatcgtgaagctgcagatgctatagcgctgttgcaggatgccgtcgagtttggcgccgccacgccagcagatgaagccgcattaaccgaatggcggaaataccggttagcccttagccgcatcgatataaatgatgcgccagatatcagttggccaacgccgcctaaccaaactcaacgataa

SEQ ID NO: 452585 - DNA, 426 bp, Serratia marcescens
atggcctttcttcctggctgtggggttacttctatcatgagtgtttcattcggatttaactttcgcacgacgctgatctgtttactgctggtggcgctgattgttgctggcaggctggcgttttacttccacagcaacgcagtaaaggctggtgagcaggttaagcaacaggaaaagacgctggcgcagcagcagtcactgataacagcattacgcgagaacgccgcccggaatagctcgctaatggcagaacaacaacaaagagaacagcagctacgccagcagggcgaaacctatcagaggaaatatcgtgaagcaatcaagaatgacgagtgtagtcggcgtgttgctcctcccgctgttattggcctcctgcgcggaacggacacctccgccgccggcgccgatcgtgctgttaccccctga

SEQ ID NO: 452586 - DNA, 1218 bp, Serratia marcescens
ttgcctaattctagccaggctttattaagaaaatccttggccctgcttgaagaacctgcgagctctagccagcacttttctctattgattgagaaggtcctatcaaacgctactgatcaagattctgtcgcattgtcaataacacgaataaacgtttgtttatgggttttgttttcatggtgtcgtgatggtgggaatttagaagcagcatatctttcatcggagaaaacattgttgttagcttgggataaaactaaagagcattacactggcaggaatagaatttcaaagtcatttgatagtattttagatacctaccaacaaattactgattgctatacagagcgctgtataatgccatatgttggaattaaatatgctctttcccatgcggtttattcgccttgttctattgatgtaaacattaaactgtttgatgttttaggccgtttgtcagtcaaaggacactgggttttagattcactttcgaaaagttatgacaaaaaaccaccaatagaacgcgagaccgaagaacaagaaaaattacgaattagccttgaaaaaataacgaaatcaattaggttgttaattttgaataatcctatattactattaccatataaagactcgcaagcgattgatattggtttggcgttatcccttttttcaaaaaattcagatctagataagtttgctacaggctggatttctgaaattgtcaatagatgcatattttattttgagaccaatggtatgtatccgattgtgcatgaatcttatgaaaatctgcttgagcataggaagaatgataaagctgatagcaattataaaaataaagttactgaggctagtattctatacccaatgctagctgtatattgtgcgttgtataagttatcttcggtaagtcaagaattggaaaattttgccacagataaactatcgcattgtaccttacaatattggtatccaaaccaatacagtgagcaagccatgtactcaaactcagatatacatggttctgcgtcaactgattttccaatgaaccgaaatcttgtattagaacatgtagtacaagagtgcgaagaaaccgatttttttaaaaatatgtcagccgttattaaagataaggctccattattgctgacagcctgtcgttgttatcgatacccagttccctttcattttcttgaagattggttagtagaccctatttaa

SEQ ID NO: 452587 - DNA, 2466 bp, Serratia marcescens
gtggccagtaacttttccgtcggcgttgttattggtggcatgattggcagcaccttccgttctgcgatgagcggtacccgacgtgcccttgattccctcaacgacacttcccgccgtctccaggaacgccaggacaatctgacacagaaaattgcccgctatggccaccttggcacctcctccatgcagaatctgaacaatgctctgctgagggtgggccggactatggagcaggttgagcggcagcaacgccgtttgtcggcagcctctgccaccagtgatgcgctgaaagccaaccgcagggacctgtattctcagggggctgaaaccgccggtattgcgatgatgctaggtgccccggttctaaaatccgtcaagcaatatgcttcttttgaatctcagctccgagatatcggtgttactggcgatttgaataaatcacaagagctacagattggtaatattattcggcaaaaggctctggaaactaaccagtatcaggaaacattaatggaggggattggtaccctcgttgctgcagggcaggaaccattaaaagctgccgggaaaagcggtctgttaggaaaaacagcgacagcgtctggagcagacattaacgatttagccaaaatgagccttgcttttgagtcgcttcgtatcacggataatcaagagttagaaaaagcatttaaccgcgcggtatttggcgggaaagccggtcgatttgaattaaaagatatggcgcaatatttacctgaaatggcccagcaattcgccggaaaaggtatttttggacaagaagccttatctcaaattatcgcaagtcttgaggttggtcgcgagggggccggttctgaaggggaagctgcgaccaacatgcggaactggttagcatctatggggcgaggcgatattgccaagcgctatgcaaatgctggccttgattaccaggattcaatgagccactacgtctctgctggaaagtcgcaatatgaagcatccattcttatcgcagatcgttttattaaaagtaaagggaaagagttcttatctcagtgggagaaagctggagcaagaggagaccgggaagcgcagcaaacattaatggaatcctttggactttcttcaatatttacagatgtccaaacagtgaaccatcttttagccatgaggcaacgctggggggattaccagaaaataaaagaggatatgaatggtccaacagcgcagaactctataaatactgatttcgagaaaaaaaatgacacactagaggctcgatggcgtagaacgcagatcggttttaacgagtcggctatcagtattggcgagtctctgcgtcctgcgttgatccagttgggggaaacgttcatacccctgataaacagcgttggtaaatggattgcggggcatccacagctggtcagcggcactatcaaagtcgtcggcgcattgctcgcatttaagatggccaccatcggccttaagctggggctgaacctgttgctctctcccttcaccagcgtctggaaaaacttcattttattgcgaaccaactggctgcgtcttaacgttgccctggctgaaggcggcaaacttcggtggttggtgaccggatttagcgccgtcgccagaggtgccagaacactgggtggtgtgctctccggggggctggttcgcggcattatgatcgccgggcgtgccgttctctggattgggcgggcactgctgatgaatcccatcggccttgccatcaccgccgtcgcggcggcggcttatcttatttatcgtaactggggggctgtcagcagttggttcaaacagcgctgggctgacattaaagaggcatttaacggcggtatcgtggggattggtaagctgctgattaactggtcgccggttggtctgctctataaagcctttgcggctgcgctgaaatatctcggcgttgatctgcccgcgaagttcactgacttcggtggccatcttatcgacgggctgataaacggcatcaaaaacaaatgggagtccctcaaaaccaccgtcacggacatgggcgacagcgtcggcggctggttcaaggaaaagctgggcatccattcgccgagccgcgtgtttatgggctttggtgacaacatcgcgcagggtgccgctatcggcctgcagcgtaccacaccgctggccgcactcgcggggcaacgtcttgccaccgaaatgaccccggacgttccccgtatcccgtcgcccgaaatcatggctgcgggatattcagaccgtggcgcagctgcttctggtggcggaacatctggcggtattcaggtcagctttaatcctcagttttttctcaatggcaaagaaaccgcagcgcctgccggactgaccggcgcactgaatatgagcctgcatgaactggagaaaatgctggaacgtctgctggctcagaaacaacgtcgggggtacgaataa

SEQ ID NO: 452588 - DNA, 342 bp, Serratia marcescens
atgtcacagaccaacaccgaagccgaaatctttcccctgcagttccctttcaccacagcggcaggtgattccatttctcagctcgcgcttaagcgcctgacggttaaagacctcaagcaggtcaagaaaacccataaagacccggctgactgggatgaaccgctgatttcccgtagtacaggcctgctcccggaagacctggacaatatggacctggctgattatctggagctgcagacccgatttcagaaaatcacagggctgggcaagaaacccgaagacgatgacaaaggcgcaggggctactggcgaggtggttccggttccagccgggggaaattga

SEQ ID NO: 452589 - DNA, 912 bp, Serratia marcescens
atggcggtgttaaattgcttacctggtatgtcggtactgatagcgtttgagacaaccgtgagattaggtactatttctgctgcagctaggaagttaggtgtaacaaccagtgcaattagcaggtctataaatgaattagaaaaacaaattggctgtaaactatttgctagacatggtaggagtttaacccctttgcctagagctatcactttatctcaaaggatatctagtaatttggaatcgatttgtgaggcgattaaagaaaccaagagggaggttagaaatagaccactggtgctatcatgtgagcctactcttcttgttcgatggcttatacctcgtttagtttctttgcaaaaaatgttaggtgataatgaagtacaacttgtttctgcaggtggggaggtggattttaatcgcgatggcatcgactacgctttacgccgcaacgatttcgcaatcaatgaaaatttagcgaaagctgttttcatgcgagaaaaaattggtcccgtctgcaaaccagagctggtagagcggtttatcaaaaatggtatcattgtaggccctttactgcatactgcaacacgacctaatgcttgggataaatggactgaacttacaggtaatataatcacagcaaaacaacaagttaattttgaacatttctatcaaagcattcaggccgccggtgctggtgctggaattgcaataagtccgatctcgctttctgctgatgaaatatctagcgggactttggccgccccaatgggatttttagaagacggtactgaatatgtactaataagtcagaaggataaaggaaacagtccaatttttcttgccctacgggattggttaattagcgcgggaaagaaaactgtcattaaggagttaaattaccccaatggatag

SEQ ID NO: 452590 - DNA, 738 bp, Serratia marcescens
gtgagtggtacattaccttacttacaatattcggatgataatgggttacaatctaagttgaaagaagagctggaaaatttacgggaaaaagagtatttgtcctactggcctcgctttataattcgtagggtttcgctatatgctattccgtttctcatgttcttcgcttttttcttttgtctgggcttgacgaagaaaataggtatggagaaagtaaacattatactcgaagctcaaaacgtaccagctagagattatctactcttggtggtaggtattttggttactgtgttgtttgcacaatggtggtgtttcaacagagaatacattttaccggctgcgaaaaacgtggttgagattcctaaagaaaattacaagtttgttgctcatattgtattgattatttcttttgtttttttgtttttgtatatttataattctgaatataaggttttttatggacttctcacatttctcgtactaacaatttttccattacttattgatcgcacattagggttaactcgacaaaatgaacgtttcaaaatctatatcagaagattagagcgtcttgatgaattgaatactctccgggaaaaaatgaatattaaattcgaagaatcccactttatcgagtatatgaagcttgctgatgaagccgatcacagtaaaaaccaagatacggttagcgatacatcctattttatgactttgattgaaaataagctaaaagcgtaa

SEQ ID NO: 452591 - DNA, 1740 bp, Serratia marcescens
atgtttttagaagaggcgaaatataggctactaactgcaaataaaacggcagaaggattgctgactcagattcatgatttatatgtccaagaaattcgttcggaagagaaggttttaatagaggcactacgtgaacttcataactcaggagagattgacttagtagaaataatgggtggagttgataaaaactcccgtggatacgatttttacacgattctgcttacctttgaagaggtgctaccttcactagatgcaaaagcaagagatgttttgtattgcctcatgaaccttaagcaacaggccagtagggatttagctttcggtgggatctatggagcttttgaacgtttctgtagcatggacatatgtcgttccagagatagcattgaatatatcctgaaacaaagtgaaattgatttttatgcgccttttatttctagctcaattctcgcatgcggcatagattttatgatggaggctatacagaggacagagaacctgattgctcatagcaatgagatggtcagaaatcaagcctattttattttagggcgactccaggtcgatgacaatcaagcaaagattatatgggggctgcttagtgaaagggcctttaatgaggatgacaatgattgttgtgcttcgatattgagagcattactccattttggtgataaatttccatcttattggctgcagatagaagatctcttggctacgtttgttgagggggctcctacagaggttctttatataataacgcactttgttgcttctcaatatgttgttcttccagaaagtgttcagcaattactgataaagcagttgggcaatgtgtctcctgagcacgaaggtattataaacagtattgactatttattggttaggttggttgagagagggagatcttctattgctgtggagttactagaatcaattttatctgcaggagtgaaatttacatctctagactatttctccaacgagttattaagcaagcatcaagaactacgtgaccatatcattacaaagtggttcttacatggggaagcatcacaatgtcatggtatttctgacctactccataatgccacgggtgacgacatagagataaatgcagaaacgacattgcttgatgatgaagttaagaaagtatttgttagtcacaaggctatcggttggctgttcacacgccctattgcagcggcaagtttcatactttccatatctgaaatagcttcgaaaattacacttaaagaactcgagcgagttttgtacgatccattgcttttaagttatccaggtgaacttaagagattctttcagtcatgcatcgataaaggtgttcaagagcatctatgtagacttttgcttgaaaaacttatggcctatcattctgaaattgaaaaggtttatgagttgaaagagttaatggcacccagcgaaaacgtaaccacctattggaaggattttgacaaaggtatgcaggaggctcacgagaaagcgtcaaaatcttctttaattgggatgtttgcgacacatcggttattgtacggcaacagctctatatattatcaatatcagggaggtgggaagcctgtaaggcaggagatgaaaatgcactctttttcccactcaactgaaatgccaaggttaaacgttttagatcccgaatcgttagattatattttgcgagtttatcgttgtgaggtcataaaaaatgaaactaattcttaa

SEQ ID NO: 452592 - DNA, 165 bp, Serratia marcescens
atgctgcaaggcgcatcgataatttcaccgctaaaggtcacggtgccgctgccctggttcggggtcggcgccgcatgtgcaacggaggcggtagaaaaagcaatggcggtcgccagcattaatttattcagtttcatttctcaggttcctgtagagagtatttaa

SEQ ID NO: 452593 - DNA, 279 bp, Serratia marcescens
atgaaaccactaagtcaacaacttgacacggtattacctcaattagtcgagcatgatgatattcttgataaagttctccccttttatcttgcagtcaccgcaaaattatccggcaagagcacagaggaagtgttcggctataacgtcaaagcgttagaggcaatatttggctcttcaaaagcagggaaaaacccaaaagagctggcggagtcagaatatgcatatcatgttagcgtaaaggcgcgagaaatattcgataaattaccaaacatcaagtaa

SEQ ID NO: 452594 - DNA, 291 bp, Serratia marcescens
ttgatccgcaaaaatggctgcagcgacagcttcgccctggacgccaattttatggtgaaaagcggtacgctgaccgacgctaccggtttgaatatggaaaatggttcaacattgcgcatccacgataataccaaccccaagtggattaaatacaatcagttcgacagcttcgccgatatgaatggtcgcgatcaggtgcaaaaatcctacagcgcctcattgcaggctagcggggaaggacaggaaggcaatttccgcaagaccgtaatcttgctgattaattatatttaa

SEQ ID NO: 452595 - DNA, 186 bp, Serratia marcescens
atgaccgtagcggtacaacgttttgatcaacaccgtatccatctcgacggtttggtgaagagactgcgggtcgatattgcaggcctgcttaccacggaaccgaaaaagtctatttccttattttccgccgcgactgcggaggaaaatagaaaaccgatgccgcacagagcactgattgtccgatag

SEQ ID NO: 452596 - DNA, 870 bp, Serratia marcescens
atgggaccttaccatatgggaaaagtacttgattataatacatatatgcttgctccggggttgggtataatcccgcgagcctccgggagtgccacttttggattatacgctggggggacaggaacgctgactgggaccatcggattgccggagacggcgggtaaaagctctacagatggtaacatcagcgatgataattcctataagtggtgcctcgcgccaactaattttgctaattttttctattataagagaggctcgcagtacatagcgacaatgtctgggacatgggtgattattgctgatgggagccagaaaaacagcgaaataagcctgcttcccatgtattttggaagttatccctacggcggcgacaataaaacagtccagatattcccctcgaatctaaccctgcgcatttcgacgctggagtgcacggtcaataccccgaggatcattgacttcggaactgtgatgcgcgatatcaggccggacgcggagctggcatccaggtctgtaccgcttatcacgacatgcgggcagccatcgaattttatcaatgccaatatcaacgtgcagttccgcgccctgactggacagtacgaaggcgcaccttcccggctggctcttaaacagggcggcgggtatatcaccggggagatagataacgccgctaccggcagcggagcctgcacgtccacctccggcgtgagctttgatagcaagccgataaaactcggacaaatcagcagcgcggaatcgagtaaagcgcttaacaaccaggtcacgtggagactgtgctccgggggccgcagcctgccgaccggtgcggtggacgcggcggccgaattgctggtgacgtttaactga

SEQ ID NO: 452597 - DNA, 2571 bp, Serratia marcescens
atgaatttttaccgctttgccctcgtcattcccccgctgattgccggggttgggttgatgacattgcctgcaccggtactggcgcgcgactactttgacccctccctattgtcgctggctggcgggccggacagcgtcactgatctgagcgcctttgagctctccggccagacgccgcccggcacctacctgatcaccttgtgggtgaaccgtagcgaccgcggccaacatcgcatcacgtttcgtcagggcgaggccgggcaggtcatccccgagcttaccccggcttttctgcaggatatgggggtgaacacccctgtgctgccggcgttctccggtctgcctgcagagcagcctgtcggcgacctggcggcgcttatcccagacgcccgggtcgagtttgattttcagcagcagcggctggcgctgagtattccccaggtcgcgatgaagcccgcggcagacagcgcggtggacccaacgttgtgggagcagggcatacccgccatgttgctgaactacactctgaacggcggacaaaatcgtcaagggggcgaccagggtcaggacagtcgcgagcagaataacctttttgtcggactacgcggcggattcaactgggatgcttggcgcctgcgcagcaacatgatctggacccggaatgaaagccggggtggacgcggagaccggcttcgtaaccaggaccagagcttctccagtacctacctccagcgggatatccaggcttggcgatcggatattctggctggggagaacagcaccggcaatgacgtgttcgacagcgtgccgtttcgcggcgtgaagctcagttccagcgaggagatgctgccggctagccttcggggattcgcgccggtgattatcggggtggcgcagagcaacgccagggtgacagtcacccagaacggcagtgtggtttaccagacctacgtggccccggggccattccggctgacggacctctaccaaagtggccaggcgggagggctgacggtgacgatcaccgaaagcgacggcagcgtgcgcagttggctccaggctttctcggctctgccggtgatgcagcgcgctggcgggctccgttacgaggtgaccgccgggcgctataacggcggggtgacgcaaggctcaaaaggggcccccttcaccctcgcaagcctaatatacggcctgccgcaagatatcaccatctacggcgggagcctgctggcggagaagtactcctctttcgtcgccgggagcggtgtctcccttggcgaatttggagccctgtcggcagatatcaccacctcgtcggcggtactgcaaaatgaaaagcgacatgggcagtcgtaccgggtgcgttatgccaagagtctgctcagcaccggcacgtcggtggatctgacggcctaccgctattcgacccgagactatttcagctttgcggacttcaacagcagcggttacccgctgcgtgagggcgaggtgccttggcggctggctcgccagcgctcagacttccaactgcggctgagccagcagttgggaagctacggcgccctgcatctgtctggctcgcgtaacgactactggggccgcgaaaagagcaatacctcgctgtcggtcggctataacggtagcctggctggggtcagttacggtctgaactacagtattgaccggctcaggtcaggcggggactggccacagaaccgccagctctcttttaatatgcaggtgccgctcagcctgttcagcaggggctcggctttgagtaggagctacgccagctaccagatgagccatgacagcaccggccgggtgagccagcagttgggcttgaacggtgccgccgctgaggatcggctctcctggagcgtggcccaagggtggagtaatacaccggagcagggggacagccggcgcagctttaacctcggctggcagggcagtagtgggggggcgactgcgggctatagccaaagccggcgcgacagcgcccttaacctgagcgctagcggcgggctggttgtgcaccccggtggggtgactatgagtcagtcgctggggaacaccgtggcggtgataagcgcgccgggtgcgggcggggtgagcgttatgaacggcggtatctccaccgacagccgagggtatgcggtggtgccgtacctgtcgccttaccaaagtaataccataagtctgaacccgacgacgctgccagaggacgtggacttgccgcagagcagcacccgggtctacccaactaaaggggcggtggtgaacgcggcgtttaaaccaaagaccggctatcaggcgctgctcaccctgaccctggggggccgtgcactgccgtttggcacggtggtgactctggccggggacggcgggcagaacagcggcatcgtaggagacgcgggacaggtctggatgagtggcctgccggagcagggcgccctgatggcggcctggggccagcggcattgcgaggcaaccttcaatcttgatgaggcgcgggtctcaacgaataacccagttcgcacgctaagcgtgcgctgtgaggagaaataa

SEQ ID NO: 452598 - DNA, 735 bp, Serratia marcescens
atgaaaaaattactttatgtactggtggccctgagcctccaggggggacttttgcctaccgcctgtgcagcaaaggcctcgccgccggggattacgtttcatgttctgcgggtcatttattccgaaagtgaaaaaaatggggccacactgaccgtccgcaataacagcccagcgccgtacctgatgcagtcccaggtgcggcaggttgacccaaccactggcggggtggacttgacgtcgccatatagccttgcaatgccgtttattgtcaccccgccgctgtccagactcgaggcgaacggcgagctgacgctgcgtatccggcggggtgatgtagcgctgcctgcagaccgggagtcggtattctacgtctcgatgaaggccctgccgactcgcgcggcggaaggacagaagatggcgatgaccgtggtgagcaacataaagatgttttatcgcccagctgggctaattaagcgggcggtagcggagatggcgccgaagctggcgttccggcaagaagggaatacgctcacggcccgcaaccccactccgtactggctgacgttctcgcggctgtcggtgggcggggtggcgctggagaagcctgcgttgcgcatgatggtgccgccttttggccgccagcgctacaccctgcctgcaatagccaccggcaaagtgacctggcagctgattgatgaggacggctggaacaccccagtggccaaccaggactga

SEQ ID NO: 452599 - DNA, 702 bp, Serratia marcescens
atgacaaggttattgcacgccatggcgctcgtgatgctgcttaccgccagcttgcccggccaagcagcgggtggcatcgcgctcggccagacgcgggtgattttttcggcgacggatagggcgcaaagcatcactgttcgcaacagcggcgagggggcttttctgattcaggcccgggtgcaggccaacccagacgagggggcggcggcaccctttctggtgacaccgccactccactcattaaaaggcggcagccgtcagctactgcgcattctgcgccaggacgcgacgctgcccgctgaccgcgagtcgctgttttatctgtctgtcatagctattccggctcattcggtgccgctgactgctcgcgacagggtgtcggttggggtgaggtttgtggtgaagctgttttaccgccctgccggcattcggtcctcggccccggagatcgcatgcaggctgtttttccgacgagcagtcgacggagtccgcatcgacaacccgacggcctactaccaaaccctaggccggctgacgattaacggacagaaggtggcgctggcgcagcatccggtgatggtgccgccgctggcccacctaatagtaccggcaggcaaagtaccgaatgccttgacttggcaaactgtaactgacgccggcggcctgtctactccctgcaatcaggctgtggccgttcattag

SEQ ID NO: 452600 - DNA, 270 bp, Serratia marcescens
gtgatccaggacgggaagtggctgttccgccaggcggactcagcaaaaaatgtggggatcgcggtgattaaaagcgacagcgtgcccggttatgagcagacagaggtgcgtgacggcagcacgtttgcgctagggggctccgagtcaacgcccgcagaccagaaccataccttctatgccggcgtcagctgcggtggggcagcgggctgcgcctcccccggcaccggggaggtcaaagccacgctgatgttcagctttgcctatcagtga

SEQ ID NO: 452601 - DNA, 264 bp, Serratia marcescens
atgcccacagcgttgccttaccgtaaacgggcgtgtgccctgatcctctcgttgggtgccctgaaccctgctccgttgcaggcggatgtgttgcggctagatttcgccgccatgctgataaacggcacctgcaccctcagcctggataacagcacgcttgccctggaccgggttaacacctcccagctcacgccgaacgtgttgctctccccccgggcatttactctacacgtaagcgagtgtctaagtgggggggggggctga

SEQ ID NO: 452602 - DNA, 750 bp, Serratia marcescens
atgggattaacgcgggcctccggtccgctttttatggtgcatggcatgttgcgcattctattcatttccctactgatggcagcccaatcgggttgggccgcaggctttggcatcaatgccacacgtctgatttacccgcagggagccggcagtattgcggctgagttacgtaatacccattccgacgagcccctgctggtgcaggtcggtgtcagtgacagtccggaagtacgggccaggggcacgttcgccgtgacgccgccgctgtttcgccttgagccgcagagcgtaaaccagattcgaattgcccaagtaggaagcgaacttcccgccgaccgcgagtcggtgttctatttccatgccacggcgatagcggccagccagatggctgccaaagcgcagtcacagggagacgccctagcccgcgcccgctttggcgtcggcagcgtcatcaaactgttctaccgcccgaacggactgcgcggctcatccgctgatgcgcaaaaagggctgcagttttcccgaacggccagtggccttcgggtgaccaacccgtccgcctactacgttagctttgccggtctgcaggtcgagggcaagtccctgccgctcaacacccccgccgagctgatgttggcgccgggtgggagtcacacctggcccactggcctggctgctggcagcaaagtgacttggcaaacgattaacgacaatggaggtcacaatgcccacagcgttgccttaccgtaa

SEQ ID NO: 452603 - DNA, 546 bp, Serratia marcescens
atgcataaatctgcattcattctctcaccactttttgcagccctgttcgcagtggcgggcgcagccaatgcggcagataactcacagattacaatcacatccaacgtggtagcagccacctgcgacgtgtctgtctctaatcccaatctagatttgggcaacttctccagaaccgcttttgaagcagtccgcaaaccggtggctaaaagcgtcaaaaagttcaccgtaggcctcagtaactgtgatagcccagtggcgagcggcctagccggcattaaagtctcgggccaaacattgggtggtaaccccgacatcttcaataccaccggcaccaacaccggcattatgctgagtccgcagaacaaggcagacgagtacatcaaagccggtgatacccttacggtcgccaccgtcagcgcaactgcgaagcccggcgatttaaacggtcaaatgctgagcctgcaggcaggcctggcctctacgtccacttcaccggaaatcggcctggttagcgctccggtgctgttcagttttgtctataactga

SEQ ID NO: 452604 - DNA, 975 bp, Serratia marcescens
atgagggaaggtatctctccgacttcccgagaatgggctggcacaccaatccttcttaataaaaatggtgagattgatctctattatacctgtgttaacccaaatgcaaccattgccaaagttagagggcaagttgttacttctgatgctggtgtactactgcaagggtttgaaaaagttatcccactatttactgcagatgggttttattaccaaacggaaagtcagaatcaatattggaatttccgcgatccgagtccttttgtagacccaaaggatggaaagctctacatggtatttgagggaaatattgccggcaaaagaggttctcataaaatcagtaatgccgaaaaaggaattcttccacctggccacgatgaaatggggggagctcgatatcaagccggctgtattggtattgcggttgcagatgatggaaatggcgacagttggactctgttacccccccttatatctgctctcggtgttaatgatcagacagagcggccgcattttgtttttaaagatgataaatactatttgtttactataagccatcaatttacttatgctgatgggttgagcgggccagatggcgtatatggttttgtcagtaatttccttggaggcccatacgaaccattaaatgcttcgggtctagtactgggaaatccaacctctcgcccttaccagacatactctcactgtgtgatgccgaatggtcttgtgacttcattcattgacagcgtacccaatcctaacttaggtgatggtaatggtgagtttcgaatcggaggcacagaagcaccaactgtacaaatcaagatcgaaggtagtaggacctttattgttgacacatttggctttgggtatatcccccctatggaaaatgttatcttatctaaatgtaggtatatggatgaaaatgatttaaatattactgtgtttaagagaaccacctgtaacgataattag

SEQ ID NO: 452605 - DNA, 204 bp, Serratia marcescens
atgccaaattttggccataagatagcggacgagctccggcttatcgctagttttaaagtttttttggataatggttttcagtgcacgacatttaaggttaagattggcaactatctgtttgagaagacgattttcgtccttaatatctttcatctctatatatcagaaaattacataccgccgcactttgcttttcagctgtag

SEQ ID NO: 452606 - DNA, 159 bp, Serratia marcescens
atggggccgttcactgttatattcagccagccagcacacggtgatttcccgtacttcattcagtgttttgaacaggtaaaaatccaggatttctgtctagtaagtctggtggaaacgttcgataaacgcattctgtgttcgcttacttggtttgattaa

SEQ ID NO: 452607 - DNA, 1143 bp, Serratia marcescens
atgatgaaagatgcaacatactattcacttaagcacgccatcggggccacgcgaaaggctttttttatcgcaggctttacactggccgcctgggctcctttaattccgttagccaaagaccgaatgatggcagataatggcacgatgggcctgatgctactggcttttggcctcggttctctgctgatgatgcctttatccggcatgatggcagcacgttttggctgccgcctgattttcactaccaatgcgggactggcgttggccattcttccgtctctggtgctcactaacgagcccttctctctggccacgtccctgtttatttttggtgccagtatcggcgccatggatgttgtagtcaacattcacgcggtgcgggttgaaaaactggctgagcgtcccatcatgtctggctttcacgccctgttcagcatcggcggtatcaccggctcgggcattgtcagcctgctattgagctatggctttacgccgctgcacacgataggtctgctgatcgctggcgtgctgctgttgctactacgcaccgctggccgcctgcttccggaggcggaatccaacgacgctccgctgtttgtgttaccaaaaggaatagttattctcctcggcttcctgtgcttcattgcctacattatggagggggcgatgctggactggagcggtattctgctgattagcgagaatcacgtcaccgcccaacatgcgggtattggctatattctttttgcctgcgcaatgacggtaggccggctgtccggagatcacttgattaagggttttggtcgttttcggatttttctcttcagctcactgatcgccacattgggctatacctgcgtcatagtcggcggacacctgctaattatgctggctggtttttccctgatcggctgtgggttatccaacctggtacctattctctttaccgcggcgggccggcagcaggtgatgcctggcgcgttggctgttgcagcgatctccagcattggctactccggcattctgctgggacctgcgctaattgggaccgtgggtcatatttacagcctcgccggagcgttcatgctggtcactatactgtccctctgtttgccgctatgcagcaatatcatgcgccagtga

SEQ ID NO: 452608 - DNA, 639 bp, Serratia marcescens
atgaacactctgagtgtcattttcgatatcgatggcgttgtggtcgacagcgaacagctgcactttgacgtcctcaccgagctgctccctgaccacacccgcggggtgacagctgagcaactgatcggcctcagtctggaagagactctattgaagatcggaatcgaagtcgcacagcatagcgatctgacacgccgtattgtcgcggtgtatcagacctcgctggggcctcactatctgcgaccgggaattcgcaacctggttcacggactgagcgaacagggtatcccgttcgggtttgtctctacagcgcctcgagatatttgcctggctaacttggccacactggcgctaccacaggagccagcgctggttgccggtgacgatatcacccgcaccaaaccttggccggacccctacctggccatgctggcacaccttgaggttactgccgcacagacgatcgtggttgaggatactgacttgggaattcaggccgccatggcagctggcattacgcaagtctatgcctggccgcacgtactgtctgggagcgagcactatcagcaggcacacgcaataatccgcacgctgaacgatatcgctcccttcagggcaatacagacggcctccgcctaa

SEQ ID NO: 452609 - DNA, 1074 bp, Serratia marcescens
atgaaagccctgaaatttaacactgtatgggatattactcctgttgaaactccttcgcttacatgcattgatactgatgatgtgatcgtcgctattgaagtttgtggcatatgcggtaccgatgtggggatcatcaccggtgactatccggtcgctgtgtccggcaccacgttggggcacgaatcaaccggcacggtcttggcggtcggacgcgatgtcagccatttcaaaccaggtgatcgggtggtgatcaatccaacctactcctgcggtatctgccgcatgtgccagattggcaatatgaaccactgtgagcaaaaacacggtacggaggccggggtgtcttacgatggtacatttgccgagcagtatcgcactaaagaaagtgccttgctgacgctggatgataacgtcagttttgaagctggcgctttgacagaaccccttagctgtacgctgactggcgtggataagttgaatatcacgcatagcgcactgcgcgccgccgtcattggtgctggccctatgggactgctgtatctctggagtctgcacttgcgcggaatcactgcctttctggtagaaaaaaactcccatcgcctcgcgtttgctcgcggtgttttaccagagggatgccgcgtgtatacggactttgacgaagcagtgacctgtgaatatggcaacgacgcgctgttggatatttgcgtcgataccacgggttatctcgctgaaacagtgtttgcccgactggctccgggaggaaaactactgaatgtggcgctaaaagactcgatggcaaaactggacgttttgaaaatcgccgataaaagcctctcgataattggatcgattgattctctgaataacagttttgaacgcgcctatgcgttaatccgtgacggaaaaatcccggcagagaagctggtcagccaccagtttacttttgatgactatcgccaggcttttgccacagtgggatgcgacatcgacggaaaaacgctgcggccgattattgagccgggatgcaaggtgatgctgcgcattcgttcccaagcaaaggaggaaaaagcatga

SEQ ID NO: 452610 - DNA, 444 bp, Serratia marcescens
atgaaagataaactggacgtgttagctgcttatgagcactcgaatacctccggtgctaacccgctgtcgctgacggcgctgcatgaaaccattgcgatcattgaagacgagcagctgttagagaatgtgcagcgccacgaggcatatctgcgtaatgctctgcttgatttacagaagaagcacccgttaatcagccgcgtccggggacttggatacatgtttggttttgatactccaagcccggaagtcgccgcacaggcaattgagctggctgccagcaagggattgatcattcggggatcgcgctacggtaaaggcagcgcgattaaagttcgcccgccgctcatctgcgaacgccgtcatctcgacgaaatcattcaaaaactggacctcgctttcaccgagttggaaagcgcggatcacgctatgctggagcccatttga

SEQ ID NO: 452611 - DNA, 879 bp, Serratia marcescens
atggaaaattctaacagctataattattcaagaaatagagaaaagttattgataaatctgatcaacataattgaggggcttacttgcgatagcaaaattgatgaacaagaactgctctatttagatacgtggctattagaatcagaaataattaaagataattatttttctaaattgattagagaaaaaatagcacgtatccttgatgatggaataatagagaaatctgaacttgataagttcaaaagtgatttgattgaaatccaaacaaaaatgctagatattccagacattgatctttattcaatagagtcagataaacaccttctagagggattgtgtaaaggtgttgtcgccaatcaatcattaaatgatgcagagataggctatcttaattggtttcttacctctaatggcgctttgaaaagtaattatccgggaaaagatttatacaagctagttaaagatatactcgatgatggagtaatcactgaagaagaacgattgcagcttatgcaggctttatcttcttttgctggagttgaaatgagttcaggtattgttgacggtaatgcgacacgattgccagttcagcatatcgattctttagagcttaaaggagcaactatttgttttaccggtagatttctttgcggcagtagggatgaatgcaagtctgctattgaaagtgcaggtggtatagttgtcgagcgagttactcaaaatttagattacttgatcattggtgctctaagctcgaaagactggcgatacaaaagttatggaagaaaaattgagttagcagttgattatcgagataatagaaattcgccaataaaaataataagtgaggaagtttggaaatatttttacatgtag

SEQ ID NO: 452612 - DNA, 846 bp, Serratia marcescens
atgcgtatagaaagcgctgtggcgtcagaagttttagaaagaatcctttcttcttatgggtttaccatgcagaaagagttggctgaaaaactggagatttccagcagtaatgttggtgggtggcttttgcgtgggcaggttccgggtacggtaattgtgcgatgtgcattggatactggagctgatgttacttggttggttactgggaaatttgcaaattcgaatattcatattggcaaatccacactacgtggcaaggccttatatgaaaaaatccaagccgcaggtgggaaaccagtactacgaaggatgctagatgcgtacgggtttcgaactcaaaaagagctcggtgattttttggacatttcaactgcaacaatcagtacttgggttaggcgtgaatattttcccggcgatgcagttgttgcgtgcgcgttagataccggcgtgtcgttattatggttggctacagggcaaggtaatcctggcaatccagacgctgtatcttatgaaagtgcctatgcttctattccccgaatgtctattgcctctggtttgttagtagaaatcggttcttgggtatgtgatccgtcctttatccctgacagtgcggacatgatacggttggttgaacgttctaacgagtcttggctggttgattttgggaaaaacaccataggtaacggtagctggttgcttagtatagatggggtacatgatatttacttaatttctcgtatacctggtaataggataaaagttacaggtctatcatcaaattttgaatgttctgttgatgacgttaagtgtattggtgaagtaagaaaaacaattatagcaagctaa

SEQ ID NO: 452613 - DNA, 264 bp, Serratia marcescens
atgaaagcagcagagcagcgtgcagaacgcctcgacgcaatgctgagtgaatcagtccaagcgctgaaatcggcagagcagcaaatcgccgtgttggaagccaagctggcactgagtggtgatgttcgtcagcactatctggctggttacgatgccggccattctcgcggcctaaatgctggcaggctctacaaagaggactcaggcatggttatgcatcggcatgccagtgctaacgcgtacgcctccgagggggatgaataa

SEQ ID NO: 452614 - DNA, 180 bp, Serratia marcescens
atggaattttcagaacaagttgcaattgcagctattaaggccgcaggcgatatcaccgtcgcgaaaattaacgccaaaggccaaaggttcgatggttatgcaaagcccatgaactggttcaagcaatcacttggtgaggtcattgaagcgatggaaaaagaaatgaggatgaagccatga

SEQ ID NO: 452615 - DNA, 258 bp, Serratia marcescens
atgacgcagacactaccgaataagagactccgcgaaatagcggaagacggattcttagaacacggcgacgccaaaacaatggccgccgaactcctggcgatccgccaaacaccaaaagagataccgaaggagatcgctgcttttatctatgaacagtgcgatggatacgtgaatgtaggagctgatgcacaagctatatggaaaacctgtcgagccaaagtattggcggcagcagcagaggggccgtcgaaatgctga

SEQ ID NO: 452616 - DNA, 1083 bp, Serratia marcescens
atggttaacctgtctaatgatgtgttcatcgatgtcattaatgacgcgctttcagggagaaaagatagccttgtaatgcgtttgcgtataatgtctaaaaaattaaaaaaagagtctccagacttagcaagcaaactagagaacatgcttatacaatctgaggctggaatttctgcagcaagagctcagcctgtagcgccaagggtaactcctgttgatgcagatacaagacaaaagctactagtagaaacctacccagttgtcatggatgtggagccggtttggccatctaaaacagctatatctcttaatagatttgtatctgaatgggagatgaaagaacgcctgcataaggaaggattgaatccatcacgctcccttttgatgggaggccctccaggagtggggaaaaccttagcagcaaaatggttagcttcaaaacttgaaatgccattattaacacttgacctcgcaagtgtgatgagcagttatttaggcaaaacaggtaataatattagagctgttctcaattatgcatcttcatttccatgcgtattattacttgatgaatttgatgctatagctaagaaaagagatgatgccaccgatgtcggtgaacttaagaggcttgtcactgtacttttgcaagccatagatgaatggccaagcacgtcgattcttatagcagccactaatcatgcggacctcttagaccctgctgcatggcgacgctttgacagagtcgtaagttttgaataccctactacggagctgctcaaaacttttcttctttctaaagacataccagaaagcctagcttcatatatagctgaaaagttagataaagtatcatatgcagtgatagaaagagcaattcaccaagctaagagaaactctatcattgagcaaatacctttgagcatttcattgattgaagaaatgattccagatgaaacaattgaaaatgtaattatatcattaatagatagtggtgtttcacaaagaaaaatttcatctgatttggaattacctagatcacagattaggaagtttaacaaagtagaaggtgaagacaatgaatga

SEQ ID NO: 452617 - DNA, 978 bp, Serratia marcescens
ttgcgtgcggtgatcgtaggcagacggcttgcccagcgccacgttatagcgcacgtagccggggcgggtcagataaggaatactggcggtatctacctgaaaagtggaaacgctgccgtcttgttcttccactttcacatccagtttgccgcgtaccgagctgctgagatcctgaatggcgaacggcccggcgggcaccgtggtttgatacagcgtgcggccttcctgagagacggtgatccgcgcgttgcttttggcgatgccgcgtacttcaggcgcgtaaccctgcaggttgggcggcagcatgcgctcgtcgctggcgaggttgaggccggtaaaacggtaggcgtcgaacaccggcgaattcaggtaggtttcgcccagcgtcagcctggcggcctgcatcggcagcgcgcggtatgcgtagatctgattccagtcgaaattgctgtcgcggcggccgtattgttggttgaaatcggtctgataatcggcgcgcaggcgccaggcgcccaggttggcgcccaacgtaccgtagctgctgaggctttcggcggtgccgttgtcgtggtgctgtttaccgatttggccgctgagattgtaatccagcagcacgccggggatgccatcgtcccactgctcgggcggcgtccagtcgggatcggagtatttcatccaggcctgcggaatggtgatcgccagcacgccgccgctgatgcgatcggaaaccgttgcgcctttgatgccgcgaatgtcggcacactggttgtcgcgccacagggtgacttttttggccgcttcttctttcagcgccattttttccaccaggtcaggcggcaggcacacctggctgccgctcttgttatccggcgacgggaaatactgaatgctgcgctggggcagcgttttctggttgattttgatatccagcagataggtgcccggcatgacgtaatcggcgtcggaaaagcgggataa

SEQ ID NO: 452618 - DNA, 990 bp, Serratia marcescens
gtggcgtatggcctgtggatgaatggcaaagagctggcggcggttaatagcatttcactattagccaacgataaagaaccctgggcggatggcaataaacaaaagatttatactccgcctgattacgtcgtagggaacccggtttttctggttggtcagaccgggtatatattcggcagtcagacgacacccccattttacggcggggtgacgggatggcgaactgatgggggaaggataattgttgacttctccagtgcaaaccaacaagcgttctttaccgaattcagcatatatcaaattcagccaccgcaatccgtttccggtacgtatgggataatgattcaaaactcggtggactggatgagcattaacagttcgtccaggctgggctttgttgcgtggaaaggggaagtgacgattaacggcaaatggacattgccggtcgttcaaaacgataacaccaaggttgtttttgttcggtgcgatgatcccggcgtttctatttaccatgctgtccaatataacgaattaacggtatcgcgtgataatggttcaggtgaagcgatgttaaccacggccaatgtgaaagtggtcattatgaacagcggttattacccacctacgccaagcggctacggaatggtgattaagaacgccgccggtaataacacattcaccagtgatacagagccgttagtctgggatgggcgctcggttaatgtcggcagaaatccagaggatttagtcgatacagggatagccaggccaatgatcccactggcagttaatgcatttatgcgcggtaattctcaagggagcggtggggtttataactactacagctgcggctatcggtttaacggcagcgccgtccaattctggcgttctgaatcagggagacgaatacagacccagtggaatacatcaaacagatggtactcgtcacagatgccgctcatggttattaacgctgatcattacttctga

SEQ ID NO: 452619 - DNA, 609 bp, Serratia marcescens
atgacgcaggcaaaattaaacagcgaactaattgccacggtggccggtgatatgactgtgtttaattacgatggtgagacgcgagaatacctttcttcatccctggaatttctggcggtgggcgttggtttaccagcaaattcttgcaccgatgcgccgggcgaaagtaaaccgggttttgccatttgtcggacagctaattctaccgactggaaatatgttgtcgatcatcgtggtgaaactgtatacagcatcataaccggtgaagcttgcgtcgttactttacctggcgattatcctgacgataccaccccgatggaacctgctactccatacgatacgtggaacggtaacatatgggtgacggataaggacgcgcagcacgctgcgaacatggaagcagcagaacagcagaaatcggcattactggctgaggcacaggcaacgatcagcctatggcagacggagcttcaattaggcatcatcagtgataatgataaggccagcctgatactctggctgacctacataaaagaattgcaggctgttgctcccgaggccgcaccaaatatcaaatggcctatgcctccggttgagcaggccagttaa

SEQ ID NO: 452620 - DNA, 291 bp, Serratia marcescens
ttgatccgcaaaaacggctgcagcgacagcttcgcgctggaggccaatttcatggtgaaaaacggcacgctgaccgacgctaccggcttgaatatggacaatggttcaatcttgcgcatccacgataattccaaccccaaatggattaaatacaatcagttcgacagctttgccgacatgagtggccgcgatcaggtgcaaaaatcctacagcgcctcattgcaggccagcggggaaggacaggaaggcaatttccgcaagaccgtaatcttgctgattaattatatttaa

SEQ ID NO: 452621 - DNA, 375 bp, Serratia marcescens
atgtctggcaaaataacatctgcggtggtgatcctgctggcgctgtcggccattgtcggcgctggcgcctggctggcagggcaacattatcagccgacgattaaccggctcaacgaggcgctgacgcagtgcaaagacagcaacaaacaacaggcggcagtgatcgccagccagaacgctggtattgaggcgctgcagcgtaaacaggatgagctggaaaccaaggcaaaggcagcgcaggaaaaagcccgcatggaggcgcagggcgactatgagatggcaagcgaggttatggcagagcgaaccgcaggcgaagcgtgcgcggcggcgtctgctgcgtttgacgcagagctgcgccgggagcgtgctcaatga

SEQ ID NO: 452622 - DNA, 1617 bp, Serratia marcescens
atgattaattattattttgactcaaacgcaactggcggcggtgacggcagtaaagacaagccatttaatatgatgtcgtcaatgaatggccttgcgtggccattcaacatcctcgttaagcgaggtagtcattttatagacaattttacgcttccaacaatgacaggaagcactcagctttgtgttatggataactacggcgaaggccctgcacccgtttttgagccagccgattattccattccggtaatggactccgtgattgttcggaactttcacattaacggtgagttcgacacgattatcagtgggtttgcatattcggctcacaggatttggcaccttagagtcaacagcgaaggggctaacaatgctaatgttcatgtcgatggtaagtttaatttcactataaattcaatggttcgctatgaatgcacatccatctacatggatggtcagggaggcgccaatataacgtacagaaacgacaatatgctcgtcaggggggttactcagcgcggaggtgacacggcagtgattatgtggtgtggctcgacctacgaccttagcgccggtcaggccaatgcctttaaagggcgccgctgccgaattgagaattgcaccgccattgggatcgccggtgatggcttcaggctgtcaaatgccgagggtatggtaggccaagaaacttacccggactatgaaacttcatcaaggattgttaattgctattcttcccaattagggaaatataaactctatgactctagtacagcatttgatcgggcgcgatatcacgtaggtatatggatatatggctgcgataacgttgcaattgagtattgcatatccgacggtggtgcttggatgcatgactgcatgggttttgatattgatggaaagtgttctggctgcgttgttcgttactgcatatcaacgaataataatggtggatttatgatgttcacttgtacagagtcggatagactcaatccggtgacaaattcactagctgaatgggaaaataaattaatgtctcagaagttaggaaacgtaaataatcagtgtatgtacgtgcttagctataacgatggcatcggacgaggccgttacgccgggcggtggacaacatttcaatttatagggaatgttattaatgctgcaattaaaaattgcacagttgtagatatgctgtctagatttcctagtcacttctatttatgtacgccaacttcaaaagctatgagtgctgggttgatgggaaaatatccttcgttagttgacagcactatattttatcatcgctacgctcacatgaccgcgggggatgcgggtttcgcaaataatggtggtgataccaaaatagtgtggaggaacaacattttttattgcccggaagattcaggagcccgaatgaatccaacaaagggtgttcttgtgggaaatagaaacgttgacccgggaatatcaaacttaaccaattccgcaccggcgggattcaatgctgctcggttggttgggcttattcaacgctcacaggctaaaggtattggaacaccgaataacatacctgacatatggggtaaagcgggaaacaatgccgggtggaaacaatga

SEQ ID NO: 452623 - DNA, 690 bp, Serratia marcescens
atggctacccaattcccttgcggcatcacacctgaaatcgttgttcgtagcggccgccctatcactaccacaaagtcagttgcagctttctttgccaagcagcaccagcacgtcacacagaaggtagaaaaccttgagtgctctgagcaattcttaaccagcaacttttcgctggttccctatgagcacaacggtaacacctacaagatgtacgaaatgaccaagaacggcttcgtcttcctggtgatgggcttcaccggcaagaaggcggcacagttcaaggaagcgtatatcgcggagttcgaccggatggagagtgagttagccagccagcgctatggccacaacacgcttggtgatctgaccggtaccgctaacctgtctgccctggtcgacaagctacaacagatcattcatgaaggtgagttcatccccgctggcaagcgtccgaactacagcctgccagcgaaccggaagcacgaagcgacaatcatccgcgacttcctgagcaaggatgacagcagcaccctgctcactctgctggaatggctgcgcgccgatgggttcgatgtgtcggcggcggatcgagaactggacgtgatacgcggctacgtcggcggcatgcgccgcgcgctgggtgacatccaaacccacgcccgctacatcgaccacgcgatcgggaagatgtga

SEQ ID NO: 452624 - DNA, 198 bp, Serratia marcescens
atgtttatgaaattgatggttagagactttgtgtcagccgcgtcgtgcggacggcttagtctgcctgagatcaagcgctcatctgacgtggttaggatcccgcagcttagcaaagaagagcgccatgccttgtcggtgaaacttttcaatgataggcgtaaccgcgctgttgaagaggattttgatgtagccgaatga

SEQ ID NO: 452625 - DNA, 513 bp, Serratia marcescens
atgaaaaaatatcaaggttcgatctaccctgctcaggcattctctaccaacacagcaacagacccgtacctcataaagctcaaagatgcgtttatccagcattggaggtacggacatcatccagaccttggaagagatacactttttgcaaggccagaagaaatactaaattaccatattagaaaagttcacataaaaaccccagactatagcgacaagcatggatttaacggaactaaaaaatgctgggatgagtgggagcaaggaaggctaaataaatatggtaaagtaaacaaaataccaaccagtgacgcgtacttaatatacgcagtatctgaccaaagacatgcagcactccttgctttctgggagcctccagctcatacaaaagccgatattatccaaaacactataaccgttatcgatcaagctgatgagttctatagaaaaaagaagttcatttcaatggatagaattgagcacccatgggactataaatgggaaatgccgtga

SEQ ID NO: 452626 - DNA, 474 bp, Serratia marcescens
gtgaacaataagctgagcgaactgagcaagccggtggtgtggcctaacggctgcaatgaaaccgccgtgaatgcactgcgttacctagctgagaataagcgcccgatcggcggctcggatatgtacaacacagagcatctatacatgatagcaagtgagcttacgcgcatagctaacaagcccctctactcgcaagagtacgtatccgccctgttggcagagctggaagcgaaggataagcgcatcgccgagctggaaagaagcctgacagatgcttggcgagaacgtgatgattgggtggagcatagttcgaaaatggaacgacgcgccattgaaactgaaagaaaattggctacgccggtgcggttgccgactacctccggtcgccttggcgttgcgtacacccgggtaattccagaagttatcgaatcaatccgcgccgctggcttcaccttcaccgtagaggggggatag

SEQ ID NO: 452627 - DNA, 336 bp, Serratia marcescens
atgagcaagcaaacctacatcgaagatttgcaacatgcatacctcaatgaactacaggctcgtcgcattcgcacgttctcgccatacaaaggcatgtgccaagagcgctggcttgaagtctgcaatgcgtacaacagaaaccagacgcgcaaggctcgccgcggcattgggaaaagcaacaagattggtggcagaaagactggtaaaggcatgtgcgggtttttgcttgagttgaaaatgtggtcagggtttaccggcagaaatcgtgaatcacttggcttgccaaagcgagtctaccgcatcagccataaaggggtaatttcttgtgaacaataa

SEQ ID NO: 452628 - DNA, 264 bp, Serratia marcescens
atggctaagcgtaagagcaacagagcggcgcgtcggttgttgtgcatgcctgtttggctgagcaacagaaagcagatgtcaagttggccatcaacaatctacacggtctatttctccgacaaagtaaaaccatcacgcagccagcggagagcaaagcgcatcattgaagagatgcgcattgagcggcatttccagcagaactgtagcaatgacatgagcgcagaacaggcgtgggatttggccgtcaagactgttaagggctga

SEQ ID NO: 452629 - DNA, 306 bp, Serratia marcescens
atgaacacacaacaggctatcgatattgaaaagatcgttgccggcttcacggagcaggacaacgaagcagtttatgcagaggttgaggcgctggataagaaggtgccgatccatggcttcaccgcattcctcaagcagcatttgccgtcggacatagacaccgaagttttggaactcggcaccgactcaaccgattaccaagagctggccagcaccgcgatctgggactgcctcacggagttggttaaacgtcagcgcgctgctgagatttaccgccgtagccaccagttcgatgaggtggcgtga

SEQ ID NO: 452630 - DNA, 834 bp, Serratia marcescens
atggagaagttaattactactggaatataccacgatattagtaatcaggaatatcacgcggggcctggagtaagcaaatctcagttggatgatatcggcattaatccggccatttaccagtggaggaaggacgccccggtagatgaacagaagttatctgcattaaacatgggtaccgccctgcactgcgcgctactggagccggacgaattcaaaaaacggttcatcatcgcaccggagttcaatcgtcgcactaccgtcgggaaagaatcagaagcggcgttcctgaaggattgcgagcataccgggaaaacggtcatggacgcagagcaaggccgaaagctggaactgatgcgagatagcgcttacgcccaccccgctgcgcgctggttgcttgaggcagacggccattgcgaatcatcgttctactggactgaccctgaaaccggcgagttatgccggtgccggccagaccggtacctgagtaatcacccggtgattgtggacgtgaagaaggttgcagacatggaccgtttcgcacgccacatcgaggaattccgctatcacgtccaggatgccatgtaccgcgatggcttccagcaagtgaccggtgaaacccctggatttttcttcctggctgtcagcgagacgatcgactgcggccgctacccggtacgcgtttttgaactcgacgcagcagatgtagacgagggccaccgactctaccgccgggatctgaatacctatcaccaatgccgcaccaccaaagactggggcggcgtcgaaaaaatccagcgccctgcatgggccagaaaacaggatcaatacgcatga

SEQ ID NO: 452631 - DNA, 252 bp, Serratia marcescens
atgaaagcagcagtagataaaaaagggcttctcagcatggtgccgatgtccgaatcgaagattaacgctatggagaaggccggggagttccctaagcgcttcgctatgactggccgtacggtggcatggaaccgggatgaagttgaggcgtggctcgataaatggcaggaagaaaacacagggaaaaagcctgaccattgccccgacgttcgccagcgcaaatacagaccagtccaggcaggtgcagcatga

SEQ ID NO: 452632 - DNA, 129 bp, Serratia marcescens
atgaatattaaacgtcacctgatgcgcaatgtgtgggcctacatgttggccggcctgttcgttttctggttcttattgatcggcatggtagttctcgccgttaagttggcggaggtgatcagtgggtga

SEQ ID NO: 452633 - DNA, 138 bp, Serratia marcescens
atggcgtttgaacaacgaagggacaaggcgataaccgtgtggaaattgaacagaaaagaaagcgaacactcactagagaataccagcccacatacggggcgccagtgcgccattctgagccgcttttcaggccggtga

SEQ ID NO: 452634 - DNA, 186 bp, Serratia marcescens
atgaaagtatccattaatgacagtctcggctttagcctgtattccagcgtaacgccggacattatcaaccgctccgccctgtgccggatcatggggttcgacgagaacgccttctggcgtgcagagcgtaagctaggctttgaacgtgcattgaagcagtttaaagagaaagccaagaagaattaa

SEQ ID NO: 452635 - DNA, 1041 bp, Serratia marcescens
atggctaagaccgttaaagaattgaaagctacatacgaatcatatgattttgtggcaccattcaaagaagtgcgtccgggtaactacctgctgcaagagttggatctgttcgcaaccactccaagcaaggcacctaccgcccgcatttctgacatcgtggaaagcgaagcctcagagctgcaacaaaatgaccgctacggcaccgataccaactcagtgaagatcgacaaggccgcgatgtatgaagccgaggtcccgatcgtccaccagactgcctctatccgtcctcacgattggcagggtaaaatctccgccatcgacggcaaagagatgacaatcgaagaatgcgtcgccgcacgtgctgagcgtttccagattgattaccttgagcgagtggaaaaagatctggctcaagccatctttaccaacaccgccgaggcaacgcacacggacgcaggcaatatcgattttaccgctgtaaccggtaaggctccaatcagtcaagatattgattttggccagatgaatcacctagacatcatctctcaattcaacttggcacgtcgtagcctgaataaagagatgcgtggcgctcgtagcttcaacgaaggcctgatcgtcttctgtggtccagagttttacgacactgtccgcaccaatagctacaatacgcagctgactcagtacagcgtgccgggcgcacctcgtaacgccttcaccaaccaactgatcgccggattcgagttcttcgactggtccaatatgcggtttattttggttgacgacgatcgctatgagattgacgacaaagcgggcttgatgattcctaagttcagccgcaccgacgttaaccccctgcgcttggtacaaggcccatgcagccgcaaccaaatcattgcacagggcggcgtacaggcgcgttatggttggtccaacgttgacgacaacggcatgatcaccatgaatcaggaattcagtcacctgccgctgaacctgcgccctaacttccaaatgaagttgaagatcaaagagaaagcgtaa

SEQ ID NO: 452636 - DNA, 360 bp, Serratia marcescens
atgcaaaagtttgtagagcaacctgtaactatgggtgacgtactcgtagacacagccgccgacctgttcagccgcacagaactgaaaggcgtaaccctgcctaaagacgtcttctgtggcgacatcctgagcaaggcaactatggaactgttcaaggctggcgacgctgatccaatcatctgcctatctgaccgttccgccggtgaaaagaaaacaatccggatcgtagatcgccacgtcgtgatcaccgatttccgcctgaccgctgccgacgctgccgccaagaaagaagcgctaacccagctgaccgcctccggctctatccgtctggcaaccaacgctgatttttacaaagcgtaa

SEQ ID NO: 452637 - DNA, 909 bp, Serratia marcescens
atgaccacagcagcaccagcagcaaataacgtagtaaccctgaataccgatattcaaagcggaaacgtcgcagcattgaacaccgttatgatgttggaatcatacaagggggttaagttcacccttgaaatgaaaatgacttacaacctgatcctaagcttcacccgaaccggcaagcgtgccgagtttagtcagtcgtatcttgcagcctatttgtcatgctcactctctacggtgaagcgtgcaatggcaactctgaaagaattggaactgatcgctgccgacccagaaaaccggggaaggggagacgtagacttgctagaagcgctgccgatcgtggtggagttcgcgaagtctgccgaggtgaagagagtaaataaccgtaagtcaaaggggaataaaaatgctgcaagccgtccaactagaaagagcaagcctcagctgtctgttgtggaaaaccaagaacaacctaacgatgatcacagcggcgacgctggggatcatgtacagcatgatgttactgattcagaacagcccgatgtaatgccagaaccaaccgaaacaaccgaaccacaagatgaaggggaaaccgttgattgcattcttcctattgatgacagcgatcgcaatgatagcgacgcggtaaaggagccagagcctgatcagttggatcagcaaatgattgaagccgagaaggttggattagtgatcgacatggtggaggtaatgcgttattgccgtggagaccgtgagaaggccgccatgcggttgaagggtgaaatcagggcaatgcatacccgagccgaattagaagcacagggggccgcacagccccaatctgaggcatctaacgacgatggttacggcatcgatgacgattggaacccggaggacggcgacgcttactga

SEQ ID NO: 452638 - DNA, 2067 bp, Serratia marcescens
atgagcaacagcaatgtaatcgtgactaaaacagtcaatcgggttggctgggaaatcgataagaatagcttctccaaggccaaggaagctatcaagagcattgggaaggagtgggataagacagcggccaaaatgaagcccctagccgccaaggtcaacccgaaaggaagcgagcgtttcaaacagtccgagtacacccgccgcactaaagccgcacgtgcagaggcagcagcagccaaacaggcagcacgtgagcagctgcaagcagagcgcaagatccaacaaatccgcgccaagtctatccgcttctctacggccgccagcaactacaacctgaccggcaaacagcgcactgagagcctttctcaatttggcgatctgactcgcaaattccacgccggtcagcttgccgtcagtgaatataacgccgccgtgagcaagcttcagacgaacatgcggaaacagggccgtgtagggatgaagggggcaacgctcccagtaacggccaaggtcaccaagttggacacctcaatgattgaaggtgcaaagggtgcaatcaccattgccgccacggttgccgtcgggaagtctatcatgacagccgggcaagacctgcaatcgatggagtcgggccttacagctgttaccggctcagccgataaggcagcgaaggaaatgcagtatcttagagatcagtcgaaccgtttgggccttgacctaatgaaaaccggcaaggattacaccaaattcctcgcagctgttggcgataaggcgactcagaagcagaccagaacgctctttgaaggtgtagccgaatattcaacggtccttggcgcttcagctgaagagcagagccgggcactgttggcacttaaccagatatactctaaagacactgtgcaggccgaagaacttaagcaacagttgggcgatgcagtaccgggcgcggtaagcgtgttcgttaaagctcttcagaaggtgcaaggcaacgccaacctgacagagaaagacctgtttaaaatgatggaacagggccaactgttggcgaaggatattctcccagcggtgggggatgaattcaaagcactagcccgcaatggtggcgctcttgataaagcggtgaacagcaaccgcgctagcttccaaagattgaagaccgcaatgcagaacagcatgggccaattcttcgatggtggtttcggtagtgctctaacgagcgcctttgataccatgagcgcagccctgaacaacaacgccgacacgttcaagttctggggtgatttggccgggaacgtgatcgagggagccacagacgccttcgcatacctctacgacacaatcgtatttgttgcatctgttggtggtcattacctcgaaagtatgggcgtctcatttgaaggcctgaaaggctggggagagatggcggcctacgctctcggcgtaacagcgtttgctggggcaatgttcaaactcgggggtgcgctgaagtggatcatcggcttcctaaatcctctaaccaagctgttgggcgttatgcaaggcatcgcagccctaggcggcattgaggcagcaacctccggcggcgtctcaggcaaacagcctaaaggcactccaaccaagcaaccgggcaagctcggcaagctgggcaaaggagccttggcggtaggcggtggcatggttggcgcagccgctatgaatccatacacctacccggcattgttgggcggttatgcggtagtctccactgataacgccaccagagaggcggacggtctgggtattctggattctatctcccaacgctggaaggctggaggatgggccaacaacgcacataacaaagcagcagaggcggcacttaagccaattgttgatatgagttccgtgtactccggatcggcaatgatgaataattatcgctacccggtggcaccacctcagacgcataagcttgaagtcacctcaaccgtcaaagtacaagatggcgctgtgcgtggactcatcaagcaagagattgaagagaacgacggtcattcaattaacatgcttatccaaggcggtcactaa

SEQ ID NO: 452639 - DNA, 570 bp, Serratia marcescens
atgccagcagtagccgcccctgtcgtagcttcaggaaccaccgttaacgcctacagcaagaacccctccactatccgccactaccggaccacggtcccagccaatggcaagccggagattgaaaacttcacctatgatcctgaatgccgggctttcctgcgccgtaaggggaaagaggtaggctcactgcgtagcgatggttaccaccagatctatttccggggccgctcttgtgccttggctcatcaaattgtgtgggagctgcatcacggacctatccccgatggtatgtggatcgaccatatcgacggtaaccggtctgacagtcggatcgagaacctccgcctagccaccccaacgcagaacggccagaacaagcgcaagcagtttacccgcaagtatcagctacctaagaacgtgcaccgccacagcacgccgggcctgtatatgggtatcgtcacctctaagggagtgcgtcatcagaaatgctctaagagcattgacgagcttgtagaatgggtgaagatgaagaaagaagaattgcatggtgattttgccaaccaccactaa

SEQ ID NO: 452640 - DNA, 240 bp, Serratia marcescens
atgaagtggaaaacagataactcagtgacccaccataaggacggatcaattaccattgtggagagctaccgagggggccggatgatcatcaccattggtaaggaaaaggacagaaaaggccgccgcaaaaatatttgcatcgtttttggtgttgcaacgtatccgcgtataacttcagcctctggacacatcctagccaagattcttagcctgcttaatatcaacggtgttcactactaa

SEQ ID NO: 452641 - DNA, 465 bp, Serratia marcescens
gtggcggatatcacctacttgccgctgagaacgggaacggcgtatgtcagcctggtaacggatgcctggtcgagaaaaatcgtggggtatcatgtacatgacagtctgcatacccggcacgtcgcctgcgcgttcaaaatggcgctggccggcagacgcacgacgttgccgctggtgcaccactcggacaggggtatccagtactgctcacaggaatatcaggcgttacatcagagatatggcatcacctgctcgatgacggacgggtatgactgttaccagaatgcgctggcggaacgggtaaatgggatacttaaaacggaatacctgctcggcaggccagaagacatcgtacaggcaaaaaagatggtcagggagtcggtgaacctctacaacacacagcggccgcacctgtcgctgaaatacaaaacgcccgatgaggttcatcgggcgttatccggctga

SEQ ID NO: 452642 - DNA, 561 bp, Serratia marcescens
atgaacggtcagcgaattggctacattcgcgttagccactttgatcaggatcccgagccgcaactggagcaccttcgggtagacaacgtattcattgataacgcgtcaaacaaggacgtgcagcgaccagaactagatgctctgttctcgacggtacgcaacggcgataccgtggtggttcatagtatggatagattcgcgcgcaacctgaatgacctgcagcgccaggtgcacaggctggccgataaaggcgtaacgattgaatttgtaaaagagagcttaacgtttaccggtacagattcatcagcggataagctgatgttttctgttatgggggcattcgccgagttcgaacgagctttagttcgtgaacgccagcgcgaaggcatcgcgctggccagactgcaaggcgcttaccgcggtagaaaaaaattgctgtcctcagaacaacaggctgaattacggttacgcgcaacaaacggtgagacgaaagcgcagcttgcccgcgaatttggcatcagcagagaaacgttataccaatatctgaaacggtgcggctaa

SEQ ID NO: 452643 - DNA, 789 bp, Serratia marcescens
atgatttatatcattgataaagatattacatttaacactgaaaacggttcattaaagagcataacgaaagggcgggaagttttcttatccagcataaatgcaagggtattcaaatgcttgctcgaacacagccatgaggcggtgagccgtgaaacgctcttgcggcaggtgtggaccgatcatggattgagcgcttcttcagcgacgctaaaccaatatatctgcttgacccggcgtgcattggcgtctgttggtttcaacgagcggttgattgtcaccctatccaaaaaggggtatagactaaatagaattattccgatcaataggcagtcggttgatttccctgagccgcctgaaaccgccgaggcgcccgtttctcccgtcacggagccgccaaaaaacagccactatctttttattttgctgcgcagcttatcgatcgtcgtgcctttgtccttcttggtgctgtgcttcatctattacaagcaccaccgcgacggcgaaagaaagcaggtgctgtcgtatcttggcagcattaacggttgcccgatctactatgtcggcaatttcttcgggcataggcaggacgattatttccggcttttggccaggaacgatctttatggccagcgttgccgccccggtgagattgtcattaccaaggttaaccgttctcataatgccaatgaagacagcggacgccagtttatcgccaaatgcacgaaggacagtgcggccgttttgcataattgtgagagcgagtacatccgggcatggaaaaaaagttaa

SEQ ID NO: 452644 - DNA, 363 bp, Serratia marcescens
gtgacccgcatcggcgcgggactggtcctggccgccttcgccctgatgtttctgcttccgctgttgccgctcccggcgcagctggcgctcattgcgctgagcgccgtcggattcgatctgggcatccaggcgacgctgatcgcgcaccaaaccatcgtctacggtctcgatccggcggcccgcagccgcttgaacgccctcttgttcaccggcgtattcatcggcatggcgagcggcgccgtcctcggcagccgcattctggcaagcgcgggctggccgggcgtcgtggcgctggcgacggctgcgggggccgtggcgctgtggatccgcagcgggcgcaaaacggcgcgcgtagcggcctga

SEQ ID NO: 452645 - DNA, 558 bp, Serratia marcescens
atgcgagtgactaaacttgctgacgcgagagtagattcaaaatgtctcatatggagcgtggccttacagtggtcaaaattgcacattcagtgcatgaaaaaatccctaagaatacagtttggcgagcgggtaaaagaactgcgcattgccaccggattgagccaggaagcctttgccgatcggtgtgggttcgcacgtagctatatgagccgcattgaacgtggtggttctaatgcgtctcttgatgcgattgaggtgctggctaacgctttgagtgttgagccgtggcagttattagtgtctgactcatctaaagatgacgatccggaactgttggttccatacgcggccgatggctcgtgctttaatcctggactggcgagcacccgcgatggttcgtttggtgtcggtgataaaacggctcagaagcgttttagcacgttttccgaagctcttgagtatctccgtagcatggagacagcaaaatggcgtaggcccaattccagtggcaactggggcattgtttcggcagtgcggtgggacaaactgaaaaagtag

SEQ ID NO: 452646 - DNA, 573 bp, Serratia marcescens
atgcaatgtaataatgttcagaaattatgcaatgtcattagaaaaagatcagcagagcatgctcttgctatatcacgaatgaatgatctaccgggtatgatggtatcgattttaaggcaagagttagattctatggttagagcaatttacctgttatctgaaaaggatgtcacaaacagagaacgattagcgggtcaaacattgacgggaggaaagtggactgccctcactgtaaataataagatgaggacaataacagataaggaaatggttgatctggctaatgaattgcaggggtggtccaagtcagtttacaaatttggatgcgcttttattcatctttcaatttaccatgattattctgaaaaaaatccttttgattcattggattttaatgaaagaacagatattttgtcacatttaagacactatcatggtggaccttctaatgataatccatcattttcagaattagcagaatactttcctaatgtatttgaaaaaatatcagataatctggatttttatttagaatgtttggaggggaatgaaactagtctggctgcattgtga

SEQ ID NO: 452647 - DNA, 540 bp, Serratia marcescens
atgccgtttacatttaaatatagttacccaagctttccttcgagcatctttctaaatcatttattctcaattggttacaatatccctgcaatcgtcgctctggaaactccatattcacgcgccaatgagctgacactgattccagccgctttcttgtccagaatcgtcctacgagcttcagctcggattttcgatggcctgcccaacttcttaccttcagcttttgctcgtgacagccccgcttgggttcgttcaatcaaaagatcgcgctccatctccgcaaccgctgccagcatcgacaacagaagcttacccgctgcggaggtgagatcagtcgtgccaagctggtggacaataaccttgatattacggtcagccagcgctcttaccgtttgcaggacgtcaatcgcatcacgtcccagacgatcaagtttcgctaccaccaacgtttcaccatcgcggattttattgagcatttctgaaaacgctttacgttgcattgccggaaccttcccgctaacaacatcggcaaaccagtaa

SEQ ID NO: 452648 - DNA, 468 bp, Serratia marcescens
atgattaaagacgcgatcttttcaccgtgcggccagtatcgctactcgttatcacgagtctgggacgaatcaaaaccatatgcccttttcatcgggctaaacccttcatatgccgatgctgagaacgatgatcgcaccttgagccgctgcatatcgtttgccaaaaactggggctacggcggggtatacatggccaacctgttcgcgttcgttcatacccagcgacatgaaatgatgaaagcacctgatcccattggtatagataacgatagccatctgataaggcttattgccggtgccggtctggtagtggcggcatggggcaacgaaggcagacatctcaagcgctcaacagtagtccgacagttgctaccagaaaccacaatgtgctttgtcttaaacgccacaggtgaacccaaacatcctctgtatatgaaaaatgacagtgttctcatacccttaagttag

SEQ ID NO: 452649 - DNA, 1014 bp, Serratia marcescens
atgaagagtcgaaaatacgtagctgctgaagcagaccgcaaatcctttaaggtttcagccgggatcgattggctggacttaaagatcagcttctccagactgacccagcatcgctacgttcaggatgaattacttaaaatcaccggtttaaaactctgggttaaaccctgcggtctacgtatctcaaagttgtcatcatgcgccccccgtcccgacaacaacgttaaaacgtgggtaaaacctacgataagcagcactaacgatacttttcggatttgcttccgtgatctactggcaaaccatggcgggaagctggaagctgcactcaagcaattgcaaaaccgtttcccatttgcgtgtgagccacaaatcgtgggagtcgaagttttctgcgatttctggcataaacaacggtcagtatcagcgacacgagcaatgacctatcggcttcagacaagcctgtttagtaacggaacccgaccaaggcaattcaatcccgcttcgtggaaaaatgtctaccttttccccggaacacgtatcactccatatcgaaacttcaggacaggtaacaagtgggacaacatctcgtggcaggtctatcacaaacgcactgacaacgatcagaaactacctttagaagagcaacgcgctcgtgttgaagtcacgttaaaaggtgctgcgctcactcactactctcttcaccatcttagcgacatacagcgctttcgatttgaaaccctcgctcacctgttcaaatttcgcaaaccaattgagcctgaaatgatggctgacggtgatttgttccggtttaccgctgtcaacgcagttcgtaaggtgaacgacgcaacagccgagcgcgggttgcattctttcaataacatcggacgtagggataaacgtagctggatgatggttaacgttgacaagcgcctgcggaaagaaagctcgcatctggcggttgttagcgatctgcaaaacgccgttaagggtgctttacggcgcctccacgtttaa

SEQ ID NO: 452650 - DNA, 573 bp, Serratia marcescens
atgcccgtatccaatcattaccaagcccaaccggattgttatgtgcgctttgattggggtgggatctcccttgaaggcgagtttttcagctatgaggagtatggtcgagatatcgatccgaaatggggatacatccgaccatttgatagagccatcagacaacaactaatcgataatttacaagcaactcacgggattgatctcctgacattcacctctcaaggcgacctgatcacctgtgatgcttttgtcacccataaagatcttcaggcagcacaccaaattctcatagagtcctttgatttcgttgatgaatcggagcttacaactgaaagggaacacatcggtaactgccgtatcgatttgataagacgccaatacattgtcggcagcaatcttaaagggcccaaagagtctttggacaacctcaatgcagagtttcttaaatgggtaacacctttctacacgccgttgcgttacgagcggaagtggttaaccaagcatcgtaatgggttattacgttttggcgcgctcgttgctgtcgctgtttttgcctatatccactacgggtga

SEQ ID NO: 452651 - DNA, 1842 bp, Serratia marcescens
atgaagacaaggtctttttctatttttttgcttaaagctggctacaatgcacagaactcccttaagctgaaccatcaacttatcggtggctttcaggctctaaatctcccacaaggcgcaaccttgtttatttccgatagggttagaacaaccccttggtgggttgactacttctcaattggtggaaatttaaaacaagaaaacaaaggggcattaatttttcttccggtaagagatcgatgttttgctctaacttttggccatatttatcacaacttgctagatgtttcctacgagtatgattttggcttaaaagttactttaaacagccttgaacctaatgagttaaaaagcgctgatatagtcgatcccggagcatcaagaaggaaaagaatgcaagtccctgttatgtctgacttaacctatttagattttgatagtaatagcgagatattaaaaagcctgacaggaaaagtaaaaccacaatatattgatctcttcaaaaatgcgactggttcaaccagcttaaaagttggacttaaagtcgagccagaacaacttaccggattgtgcgaccaactactagatttatattccagtgatgaatacttagagtctttccctaacatacaaaaaataacgccagaaaaagaccctattaaaattaagcgtcttgatgattctcttttagatgctttcattaataaaaacaatgaattagccttatcaatcccggacatcgtggattatagtgataatatttactgctcctttaaaggaaggaaaggcatatccccaatatatactgacattagtcttgaagagttttatgactatttaggagaagttgacttaaatacgttcaatatagacaaaatcaaagatttctcgcttaacctctgcaatgaagaaggtgttataacgaaagcatataacatttacagaagttttatctatgatattcactttgataacgaggaagttgtttaccatctctgcgaaggtgaatggtataaagttgaccaagaatatttgcagagtttgaaagattatatagatgcaaggtgtgaagatagccaacttccctcatatgatcatgacaacattaaggatgacataagaaactatagtgaagagaactataatgaagatgtggcaaacaactcagcatgccatatatgtttagatcagaaagacataagtcccgatggatactcacaaatagaaccatgcgatttaataagttaccaggataattactgtatttttcatcatataaaaatatcttcaagatcatctcaacttagccatcttttcaatcaaggtgtcaattctatagaattactcattttggaaaagagcagcaaagaaaaacttaagtcattaatcgaggaaaatattcaaggtaaagatttggatagtttcaaccgcgtgatagatagtggtaattataaagttgagtttggcataataaccaagaaaccagcggaactgaaatctgaaaacctccctcttttttctaaaataagtttaatgcgaagcttaagaacactttctctttatcgaacagagggtgtggttagctttataaaagatattagcccttctaaagaaggctatagtaaacacccgcgcattacagtgattgtgtctgccggtgcaaatggtaaaaatgaagttattgttgatcacagccaactttttcctcagggaacaaaagtcgcaagatgctcacaagaaataactaacagccctatcggctcgagatttatgattcatgtaaaagctagtgaacacgggaagttaagcacgagccatgcttgggagagcgaacgtctatag

SEQ ID NO: 452652 - DNA, 870 bp, Serratia marcescens; identical to SEQ ID NO: 243874

SEQ ID NO: 452653 - DNA, 1950 bp, Serratia marcescens
atgtctcagcgatataaactctatcgtcgaacgagcggcatttatgttgtccgcattagcgttccccaacgttttcgtcgatacgcaggacagtgtgagattcacacttcaacaggcactcacgatcttcatgaagcaaagcagaagtccgcgctcctgttggcggtctggtatcagaccttacaagagtatgaacaattggattatcgaactttaagtgactgcgccccactgcttgctggtgagggtatgatctcgatttctaactttgctcagtcaatcgagttgcctgtatcgcaattgattcgagaggtgattaatcgtaacctcccggtattctggctggcgactggtcagttcggtttctatgttgatgaatttaatgcagtagagcgggaacccggtgcaaaacgagaaaaacagtctgatgatgaaaaggatcaacctaaagaagtcatcattctcaatagcgcgtttgagctgggtatcgagagcttcgcaaatggttatctccgccccttcaatccccggcatactttagattgtctgttgagcgctggagtatccgaaggagaggctgcatttcgaactagtggtgataaccaaagtggaggttggttcttcgatttacccggcgtagatataactgctgatagcctgttgattagcaaagttcatgctgaaggccttcgacttacatggctggttaagaccacgccaccagcagttagcattcaccctgcagtgcctcttgtcgctcctgttatcgctaacgaatatgttcaccgcaaacattacaatgaaaacttgtcatggcttcgtgaagagtatttgaaacatcggcgtaagggcaaggtatcagaagcggcgctccgcgatattcgctattacttcgatttgatgattgaagtgatgggggatattcaattggaagatttcgaccgtgatttcctccgggcttatgagagcaagttgcgcacaattcctgctaaccgtaatttgatgaaaggtaagcacggggttaaaacgctggatgagttaatcgccaaagcggcagaatgtggcgataaactgatgacagaagagtctgtcaaaaagtatatcaacggcctttatggtgcaatggagtgggctgttgatgatggtaagtttctgaaatcgccatgcgacaactttttccctcccgatgataaaggtgagcgagagcaggatcacactgacatatttgaaccgcatgaaattaaggcaattttttcgcaaccgtggtttgtggctggaactgttgaacgtaatgcgcaagggcgattccatcaatattgcccgtttcactattgggcgccgttgttgggcttgatgacgggggcaagggttaacgagattgcacagttaatgctggacgatgttctggcagatgacggcgtttattacctgaaccttgaaagcgatagcgaaaacggaaagaaactaaaaaacgccaattcccgccgcaagattccggttcattctacgctgattaaactcggttttatcgagtatgtggatgcgttgaaagctgccgggtatgaccgtctttttcccgagcttaaaccacataaaactaaaggctatggtaggccagtttccgcatggttcaatgaatcattgcttgcgggtcgattaaaacttgaaagagacagaagcaaatctttccactctttccggcattctgtttcaactttgcttaaagagaaggatgttagttcggaactgcgtgggcagctacttgggcatgtgcgcggcaaaacagaaactgaagtgcgatacagcaaagatttaaaaccggttcacatggttgaggttgtcgaaaagattgatttttctttgcccgagatagcgagattcaacattcctgatgggctggatgctgtaagagatgcgctgcgaagaaagcgtggcaaacaaacaggttga

SEQ ID NO: 452654 - DNA, 159 bp, Serratia marcescens
atgccgattatcttcagacgctataaaagctcaccaaccgggaagctcatggactcgcatgactatggttacgccgcctggcctctcaaggtgaaagagccaaccaggaaacatccaaacaagcgctcccctgccagcctgaaagggaagaaacggtag

SEQ ID NO: 452655 - DNA, 165 bp, Serratia marcescens
atgctccatccaaggccgaagattacgatcgatgcggaccagacagtgttcttccaccaaatcgttgatagtttcccgaatggagtgttctcctccctgaaaggcggtatcaaacatcgcactttagatggcatacatattcactccaagcatatatacaagtga

SEQ ID NO: 452656 - DNA, 687 bp, Serratia marcescens
atgtctagggatgatgtttcagtcacaaatagtccaaaaatttttgaaaaattcatggcttttgttgaatccgactcgtttagttgcataggtgcgaaaaccgcgtcttacctgaaaacattgcttcatcgggattgttgcttcgacaataaagtgacccttgaagatgcatatggctttctacaacaattcgccggtattcgtgaaacgctgagcaaaactaacgccacttttgttctaaccttcagcgatcgggacatacagtccgaagctgaatttgaagactttgtctggacaacccttactcgactgcatgaacttgatattcaggctggatatgaatggagtaaggagtcttccgctgatccatactctccagattttggtttttctctggtcggggaacctttctttatcgtgggcttacacccttactcctccagaatcagccggcaagccccctttccagctctcgtgttcaacgcccatcgtcaattcagacaccttaaggttgacggcgcattccagaagatgcagaaggaaatacgacggcgagagatgaaaattcaagggacactaaatccaaatttaagtgactttggtgaacaaagcgaagctaggcagtatgcggggaacgcgactcagcaagtttggtcctgtccttttagcaagaaaattaacctctaa

SEQ ID NO: 452657 - DNA, 630 bp, Serratia marcescens
atggattttcctagaaaagttcacgcactagcaatggatatcaccgataaatattcagttgatgaatgtcttgataacataccggaagagttcgagaacattatagcactgataaacaatgcaggattatcattgggatttggcccagcccaagataacgatatcagtgactgggagactatggttaacacaaatatattggcccttttacatatcaccagacgtatgctggagattttcaagataaaaaaccaaggtcatattatcaatatcggttcagtagccgcttattacccttatatcggaagcaatgtatacggtgcaactaaatcgtttgttcataattttaccctcaacctaaaaaccgatctggaaggcactaacatcagagcatcctgcatcgctccgggcttatctaaaactgaatttgccatcgttcgattcaaaggggatgtggaaaaagcggattcactgtatgaaaaaaaaacatatctcaccgcagataatattgctgaaaccgttttctggacattctcattaccagccaatgtcaacatcaacgttctggaagtcatgccgacaggtcagtctttcgctttgggtttcacaaaaaaacaggatggaaaatga

SEQ ID NO: 452658 - DNA, 1026 bp, Serratia marcescens
  misc_feature (975)..(984): n is a, c, g, or t
atgaatatcattaacagctacagcgattggggcaggttagaagaaatcattctgggcagccctaaaaatctcaccttgccagatttagatatttcctccagaaatttctttgatctgcaggaggattttgttcagcaaaaaaatccaacaccaattatcgaacgcgtaaaaagcgaaatggaagaagactttcaggagttgacgtccattttggaaggttatggggtaaaagtaagacgacctgaagctatcaacctggatgttgtctgccagactccgcattgggcatctcaacaatcccatgctctaatgcctcgagattgcatgctggtacttggcgatacattgatcgaagtgcctatgccgtcacggaatcgatacttcgagagccagtctttccgcaatatcactcgggagtatttttcaaaaggtgaaaaatggctctcagccccaaaaccaattttaactgatgatacttatctttgggatggtgcaacgccttacctggcagagaatgatcccctgttcgatgcagccaacataatgcgttgcggaaaagatattttctataacatcagcaatagcggcaatcgtgccggatttgagtggctggaaagaacctttggcgataaatttaacttccatcaaatgtcaatttgcagtgatcatgttggaacaactatgcaattactacgccctggattagcattaattaatgcagggagaatgactccagcagatatcccggcccaatttaaaaattgggaactcattctatttaatgatcccgaagatatcggttattcttttgactgggctagggcctccgtctggatcgcaatgaacgttctttctatcgatgaaaagacgattattgtagagaggagccagcataaattagccgagatccttgaccgctgtggattagaggtaatacccgcatcattccgccatggcaggactgtgggaggtggnnnnnnnnnnccattgttgctcactggatattcgtcggcagggaagtgctga

SEQ ID NO: 452659 - DNA, 675 bp, Serratia marcescens
atgagtaatagaacactgctcatcaagggagctattcgacatgatgacgatgttgcagaagtattgacactgaaagtttcgagatatgacccttatggatatagtgaggaatgctccatatttgaagttaactttcaagatgataaagggactaaaaccctgtctttagagtttgtcaacctttatgagacatgctatctcagagacataaattacatcgaaaaagaatggagtgataatggactcttgatggccatatcagtgtcattccatttgaccaagtttgagaggttcattattattggtaactaccttttcgaaactattacgcgtattttcagtaagaacagtatttacccagaaattgtgctgaaagagtccgaatacaataaaaatagctcttattatatcaactacttaccacgagatatcatagtaaagcataatgatgacgttttcgggattatacctgaggataccatcctggattcagctctggagaataatattgaactgaaacatatgtgcaaagctggcatttgcatgaaatgcagaaaaaaaattcagtcaggagcctgcatggctatttcttcaaatgaagaaaataatatggttaagtctcaacacgtactgacctgcaactataaagcattaacatcacttgtgataggataa

SEQ ID NO: 452660 - DNA, 642 bp, Serratia marcescens
atggaacatactagtattctcgcattcgcattagccgcacttttacttaatttaagtccaggtccctcgttgctgtttgtcagtgccagaggtatcagcgaaggaaaggctgcaggggctgtatctgctctggggcttgcttctgggagttcaatccatgcgcttctagccggactaggggtgacagctatcgttgctcagaacgcacatgtggccaatgctgtcgcactaattggtggcgtctatattttatatcttggctgggatgcattaaaggaggcaaggaatactggaggcccccaatctcttagtgtggataggaaaaggaataaattatccaaattgtactttcaggctgtttcagtcgagttcttgaatccaaaaactattcttttctatctttctatcctaccaggattaatcttatcaggtggatatactcctctagaagccttactgatctccctgattgttccggcaacagcgttgcctatcgatttgaccgctggattgacgggaggaatgctagcaaaaatgtcacaaaaaaaccaacgtgtgactgtaattctgaattatatatctggagcagcacttttgcttataggaattttgttgctgtataagaattttatgggggggtga

SEQ ID NO: 452661 - DNA, 693 bp, Serratia marcescens
atgtatttctctataagcgacgaggcctcaatagctggcgttacgcatgccctatttcttgttatgcgaggagtcatctgctctccaagcaaaatagagttcatttctcgttgcaacgatctcgtctcaacagatatttcaggtgacctgcaacgctttaacgatggctttaaaaaaataatagcaaacaccacaggtaaatgtaatttaaaaacagcaggagaaaaactcagggagaatttttcctcacgtggatttcgttctatcaataacgttattgatgcatataacgaagcggcgttccattacggtattggcattggcggacatgacttattctcagtagatcctttagcaaaggtagaggtgacgttagcttcagatgatgaatgcatcattcctcttttccaaaacagtgagaaaaaagtgaattacggtgaattgatctacaccgcaaatgataaagtaatggcttgggttggctcaaaagatgttgattctgattgcttcaaaatatcagaaatcacgaccgattgtctttttgtcattctcggtcatgaacttgttaagcctgcagagctctatgccgttagtttgcgtatccgaagaaacataatagacgcatcatacgatattgatgcaggccgcttagttatcgaagagtattactattcaacgagaaaaaattcatga

SEQ ID NO: 452662 - DNA, 765 bp, Serratia marcescens
atgagtatcatttcaaaaataatacattacccactaaagtccggttctggaatctcgtcaggtttttgtactgggagcatgaatggtatcactggcgatcgtatttattgtctttttgattctgaaaacaataaattcatcacattaagagacacccctctactaacggatattttaatcactgaaattgacggtaggctatcagtatctattgagggaaaaatcagtgagtttgacaccccaccacctcttgatggagtcataaaaatatggtcaagggaggttgatgtgacagtttttcgaggaaacatttcagaatttataagcacctatttgaaaatcaatgtgatacttgcgaaaattaagcacattaatgatttctcccattgtttcatggatacaggtccgatacatattatttcgcagaattctctcgagaaattaaaaaaaacctgtggtttagatgagatagatcatgctatttttcgtccaaacataatcgtttctgaattcccatatcctaacgagaaagatattaaaaaggtgataataaatggcaatgtatttagagtaactgaaatgactgagcgttgcgaggcgatatctatactccatcgcaaactactatcagtttctgactcgcaaattttggaaactttggatgagttgaatgagttcgatggtgctatttttggaatttacgtacgcgcagattcagattttttcattagtatcaacgatataattgaaatacaaactaattaa

SEQ ID NO: 452663 - DNA, 753 bp, Serratia marcescens
atgacttcataccgtagaatgcttgccaatttcgggcaccgattacccgtgacctcagaacggatactttttatgaaaaaactaacttctgatatgacagaactacaatcaatgaatatcactgaagataatatctgtaagctcaaatcattgtttccagaagcttttaatgaagatggcattgattttgatgttttaaagcagcttttaggtaaaaatatagacgataaagaagagcgctacggcctgaattggcatggtaaacgacaggcacgccaacttgcgctcaccccttctagtgggaccttacgtccatgtaaagacgaaagcgttgattggtataacagcaaaaaccttatgatagagggtgataatctcgaagttttaaagcttcttcaaaaaagctattctggtaaggttaagcttatttacatcgatccaccttataatacagggaaagatttcgtttatccagataattttcaagataatatgaaaaattatcttgaaattactggtcaaatagaaaatggcaagaaaataagttctaatattgagaaaggcggtagatttcatacaaactggctcaatatgatctttccaaggttacaccttgcacgtaatcttttgacagaagacggcgtgatttttatttctatggacgattcggaaatagataatttcaaaatgatgccacttattttagtgatatgcatgatcatatcttggtatatgctaaaaatgccaaattag

SEQ ID NO: 452664 - DNA, 1248 bp, Serratia marcescens
atggctctcactgatgtcaaggtaagaaatgccaagcccgccgacaagcctgtaaagctcactgacggcaacggcatgcatcttcttattcatcccaatggctccaaatactggcgtctacaataccgctttgcaggaaaacaaaagctactggctcttggggtctaccctgctgtctctcttgctgatgcccgtaaccgtagagatgatgccagaagattaattgctgctggtatcgacccctccgaaaagaaaaaaatagaaaaagtagagcaaagcggcgctcttgcttttgagtccgttgccagagactggcatgcaagcaacatcaaatggtcagaaacacatgctgaaagggtaatgaacagccttatcaatcatgtgttccctgttattggtaaacgaaacattaccgacctcaaaacccgtgacctactccaaccaattaaggcggctgaaaagtccgggcatcttgagattgctgctcgtctccagcaacgtatcaccgctatcatgcgatatgctgtccataacagtattatcgatagtaatcctgcacaggacttagcaggtgccattgcaacagcaaaacgagtccatcgcccggctcttccatttgaacgcattacagagcttctcagccgtattgagagctatagaggaagacagctaacccgcctcgctgtgcgactcactttactaacttttgttcgttcaagtgagatgcgttttgcccgttggtctgaaattgatttcaaaaatgcgctctggacgatacctgcagaacgtgaagaactacaaggagtgaaacactccagccgtggctctaagatgaaaacccctcaccttgttccattaagcaagcaggctctagccaccttgagagaaattcagaagctcagtggagatcaggaaatcatcttcattggtgatcattatgcctataagcccatgagtgaaaacactatcaacaacgcacttcgtaaaatgggctatgacaccaaaacagaagtttgtggacatggtttccgctctatggcctgcagtgccttgatcgagtccggtttatggtcaaaagatgctgttgaacgtcagatgagccatcaggagcgtaataacgttcgcgctgcttacatccatcttgctgagcatctcgatgagcgtaggctaatgctacagtggtgggctgattatcttgatgccaatcttaacgatatgatcaggccgtttgagtttgcccacaggtga

SEQ ID NO: 452665 - DNA, 798 bp, Serratia marcescens
atgtcgacattgaacactgaaaataaaatcaagataactgaattaacaatggtttttattgcaactctcccaatgggaatggcaaatatttggataacaaaaagtcaaaacgatgaaagacttgctttcgagagacaaaacgcgcaaagtattctctccattcaaaataaagagttattcataaagagtgcagagcaaggtttgaattcacagaaacttgatattgattttttaagaacaagctatgaagaatgccaaaaagatggagagttatcaattgggaaaataaaatcttatgctgatgcttactattcttcatcagaaaagaaaaatatcatgattgcaaaggttcaaacaaactgcttatcaaaaaacaaaaatcaatcagtaggtagccaagataagccgacttacagcatcgagcattacaagagtcttgggttcaactatttgcaaaataaaaattttctggaggcagcagagtcattctcccaggcaactaaaatgacacccgtagatgcttctttgtggaatcaaaaagcttatgcacaatttagagcaggaaattatactgatgcaatgaatagtatttccattgcgcttaggattggcagtgataatgataaagtaagaaaatacatggccattaatgcggctaaaatattatgtgcgcaaggggatgtaaatgatgggagaaattacatacaacaatcaataaatgccattccggatttaatgctaatggttaaaaaagattcagagctgggtggtatttgtaaaattgatctcagtaaataa

SEQ ID NO: 452666 - DNA, 1248 bp, Serratia marcescens
atgaaggataactacaaggttacaacatttgtcatggacagtggcgagcgatactgcatggtggtggatcgttcttcttgccttcccgtgtattacccgactctttttttaacaacccaaatccgcaacagaggggatgctttttcaactatgctagcagcagctagcaaccttgttgtgctgctacgcttcttagataatcgtggcattgacctagaacagcgatttttgaccaaaaatttcttcaaaccttacgaactggacgatctgcgggattttgctcagcgcaagcagggaaagaagctgttagttgcttcttctacatcttggttggaagatgcgagtagcgatactgttgataacggaacattgcattcccggctgacaacatatgccaaatatttaggttggtatgcaatgcatattttaaagacggcagaaccgggcgttgtcgaacagatcaatgaaatgttgcagcacattaagatacgtcgaccgtcgaaaaagcgcagaaacagtgaatggcaagacaggtcattgaatgatgtgcaattggatacgctatttgaagttatcaagccgggatcagatttaaatcctttctcaatagatgttcagcgtcgcaatcggctgatgatcttacttctgttttatcttggtattcgaggtggggaattgttaaacatcagaatacaagatattgattttagtactaacaggatccgtatatttaggcgagcagatgagctagctgattctagaaccaatcagccccatgctaaaacgagagaccggctcttgccattggctgaatccctagttcaagaactacatagttatatcatccaagatcgccggaaagtccgaaatgcaaagaaaaatgactacctctttgtcacttataagctagggccaacagttggaaaccctatctctaaagggggatatcataaaatcttttccgtggtcagggctgtatcaccacaattgtatgcagcgacagggcattcgttccgccatacatggaatcgaaagttttcagaaagaatggatgccatgaatgagcaagtcagcgaggaacgccaagagcagctccgttcttacttaatgggttggagagatggttcgggaactgcagcgacttacaacaagcgtttcattcagcaaaaagggtttgaggccgctttggcattgcaggaaggtaatggcactcgcttgccaaaggacatgaagaatgatgacgagtaa

SEQ ID NO: 452667 - DNA, 1563 bp, Serratia marcescens
atgatgacgagtaagttcctaccggcattagtgtccgagcgaatctgtgctagggccaatggctacttctttcacttatatgatacatcgtggatattggataaaaatacccacgccactcttgtagatattcaccattacttgtcaggtgaggggctcaatggttgcctacgcacgctagcattttatgcttctactcaatctgctcctcatactctgaacattattatgcggtttcagcacatgctgcgagagactcatgcgagagaaattactgatacggtattgattaattatcgggcgagactattgcctgcgacggaatggtatctggcaactatacgtggctttcttcgaacttggcaccagcttggttatcccggtatcagcaaagatgtgatcagtttgttggatggctggaggctgaagggtaatcgtaagggagatgcggttaagcgtcaggatcctcaagaagggcctctgacggataatgagctgacagcgtttaacgagggggctgttcgggcttatgaaaagagcttaattaccatagcggagttggctttggcacttagcatcagtcatacaggacgacgacccatccagatctcgctgcttcatgcggtcgatgtgctttgcggtaaaaatgaaaagggagagccattctatgttttgaatgtgccgcgagccaagcagcgcagcagttcttttcgaataaacttcaagctctttgcgatatcaccggaactatgggtaattctgaacactcaggcaaagaatgcaattgcaatggttgagaatcgtctggggtttgaattgcaggaagatgaccgacagcaaatccctctgtttccagatcttgatgtgttagctaccgtccagtctccttatgaattccgccaactgtttgctaccgacaaactccacattcccgcagcaaagataaccaacacactccagtacatcatagaaaaatctgatatccggtcagaacgtactggtgagctattacatatcaatgctcgtcgttttcgctataccacgggcacacgagctgccaaggaaggatttggcgaattggtgattgcggaactacttgaccatacggatacccaaaacgccggcgtttacatcaagaacattcccgaacatgtgaaaaagcttgatgaggcggttggcttccaactagcaccatacgcccaggcctttgtcggggtacttgtcgattcagagaggggcgcgcatcgaggtaacgaccctgccagtcgcattaggaccgagataggccatggtgtaggtacttgtggggagcatggtttttgtggtgccaatgttcctattccttgctacacctgcatgcatttccagccttggctggatggctcccatgaggatgtctatcaggggctgctcaacgagcgtgaacgggtgaaagagataaccggcgatatccagattgctgccatacttgatcgcagcattatcgcggtggcagatgtgatcatgcgttgtgcaaaacgtcgtgaagagcttagtccacagggagcaatcgccaatggctga

SEQ ID NO: 452668 - DNA, 2034 bp, Serratia marcescens
atggctgagattttccagtttaaaccaaaggcaacgctgacagcagcacaaaaccttggcgtattcatatccaagtgccgagtacaattgattatattcggttccgatctgaattggggagctcctgtttggccaaacataacagtgtttgccaagctaggcattattacgcgaacacctatgcagggagaggtacaagaccctgcgttcattgatttcgccaaagcctattttcgttaccagcaggggcatcatcccacagggacaaagaatgaaagtaaggccctccgtgcgattgaggcggctttaattcaagtaaatggaaatgcaaatattgatggtctgtcgatttcagtactggatgaagcatctgaattggcaaggcagcactactctgatggtgctgcatatcattgtggccgagagattgagcggctggctaaatttgtcgttgaaaatcgacttgtatcaagtgctgtgcaaaattgggttaatcccattaggcgtgcagaggacaaaaacaaaacaggcagagaggctaaaaaaaatagggaaaagaaactaccgagtgatatttccctcaacgcgcttgcggaaatttttgcaaacgatccaatggatgaaagagacatatttacaacatcggtgtttgctatgctgatgtctgctccttcgcgcatttctgaagtgttagcacttcctgcagattgtgaggtgtttgaaaccgatagtgaagatatagaacgctatggttggcgtttctttgcaggtaaaggctatgaagggggcattaaatggatacccactgtaatggttggcgttgctaaaacagctatcgctagaaccaaaatgttatctgagaatgctcgacagctggccaagtggattgagatacacccggataaattttaccgccatgctaactgtcctgatgtcgctgatgatgagccgttgacaatggaacagtcttgtatggctctcggtcttgcttgtaaatccaaaaaacaatgtcgttcttctctctttaatcgagggttagctcaagaagatggttcgcacacactaaaaagcctgtggcgccatgccatggcgcgattgcctgatggctttccgtggtttgataaagacaagggaattaagtacagcaatgctttgtttgcacttaatgtaaatcagttccacgggaatcgccgatgtataccgattgaattgtataaaccaaccaataacttctttaataatgatctgacgcctcgggagactttgaaaggaaaacatgccagtatctttgatcgctataattaccatgctgaaaacggtgaacgggttaaattaacctcgcaccaagctcggcacctacttaacaccatagctcagcgtggtgggctctcaaacttggaaattgccaagtggtctggtcgggcagatatgaaacagaatcgagcttacaaccacatgactgaatatgagttggttggcatgtctgaacgcctcgatccctcaaaaggtctatttgggcctgctggagatgtggctaagcaccttcctgtgactattcaagagttcaatacgttagatcatgccgcagtccatgtgacggagtatggctactgcgtgcatgattacaccatgggcccttgcgagaagttccgagattgcgtcaattgtactgagcaggtttgtatcaaaggcgaggatatagaaatattggatcgaattaagaaacgtttggtgaagtcggaacgaatgttttgtattgctgatgcagcggtagaaagcggcgagacgggggctgatcgctggtatcaataccacaagaaaactgtcacccggcttcgtgagttagtcgctattttagagaatccagacattgaaaatggtgcccagattaagctccggggcaatgatttcagccagcttcgccgtgttgtcgcaaagacgtctattgcggccatcaagcaaaaaggcaaagaaagtgaagaagctgtgatgttagatgatttgacaactttgttaggaggtggccttggctaa

SEQ ID NO: 452669 - DNA, 144 bp, Serratia marcescens
atgagttgcacggcggaaggaatgaaatgcatgttatgcggcgtgagctgccgtttttgcaccgaaaagcgcgtgaaatgccgtgggtggcacgtgatctacatcaaagatatcaacgatttattgttaactgccggtgaatga

SEQ ID NO: 452670 - DNA, 633 bp, Serratia marcescens
atgagatttatacataaaggcggggagccgcgtttgcttaccaattatcgtgcagcaggaggtgggtatgacgggcataatttcactcctgtaaaggattcgattcgattgtctttgctacaagagcaaggtcatctttgtgcttactgtatgagtagaataacgattaataatatgaaggttgaacattgggcatgccaggcagataatccaatgcgtcaacttgattattcaaacttgctaggttgttgcaagggggatgaaggagagaggtttgtaaaccagacatgtgacagccgaaagggaaataagccacttaaatttaatcccagtcgcctacaagataggattaatacaattatagtatacggtgggcaagggaatatatattcaacagacaaggagttctcagagcaaatcgacactgtattgaatcttaataaggcgcggcttgtggagaatcggctaggtgttcttcaatgggtacgtttacaactttcatgtaaaacgggaaagcgacgtactaaatctgaaattagacgtttattaggtgagtacatgcttgttaatgcgcaaggacagttgaaagcctattgtggtttggttgaaaattatctttcatccaagttatga

SEQ ID NO: 452671 - DNA, 1602 bp, Serratia marcescens
  misc_feature (755)..(764): n is a, c, g, or t
atggaatcgagaatgaataataagtttagtaacctcatcttgcggtctcaaagaggagatatcaatgcggcttatgaattatatgtaaattacagtagtggacgctttttggaaaaggatactaataaagcagaagagtatctcagtttagcattggagaagtttaagagtcagaggattgagctttctcaattatcaatcattaattttagaatagtagatcgtctgaatctagcactaacagacaataaaatacaggtgcttgtcggtaataatggagcgggtaaaactacagttctagatgctatttcacaaagccttagttggctgattctgcgcattgttcacaaaggtgggaaagcgaaggatattgataaggcagatataaccattgagaataatgatggttatagttcaatcatagcaaaaattaaaatcaacaaaaaatatagctcaactctcgaattgtgtgaagttgaagatggaagtgtagcaaataagaaaagtttttacgctgatttcaccaagttgggacatttatataagttagcttgtgaaaaagatgcaagtttcgaactccccattttagcgtactacggtgtaatgcgagctaccgatataaattcaaaagatatagctgattttgatgaaacttcttccacagagctttctaatcgttttgatggatatgccaatgcccttgttggcaaggctgattttaaaagtttctttcgttggtataagcgtcttgatgnnnnnnnnnntgatgatttggttaagcatgaaagtaccggccaaattgattcttctgtgctttcgtcacttgaaaagttagcggaaacagatgaaaagtctcgtaacatactgaatgatataattaataacatcaagaaaaatcaggatatagaagggagtagtggcgccaaaaaaatgcaagaattaataaataatgctgtgtcattatttatggaggatttcgaaaatcttaaaattgagttgaaacctacgctacatatttctgttgagaaaaacaaaaaaaagattaatgtaatccagctctctcaaggggaaaagtctttacttgctctggttcttgatatttgtaggcggatgatggtgcttaatccattgtctgaaaatccgctgcttacaccaggtgttattcttattgatgaagttgatttacatcttcatcccgaatggcagcgcagtatactgaataagctgagtgctgttttcccgaattgtcaatttattgtttccacacattcccctcaaattgtaagcgaggtgatgccaaatcaggtgtttattctcgggaggggtgatgatggtcgttttaattgctcatctcctaagcaatcttatggtttaacatcaaatcaagttctcaatgaaataatgagaactggtgagctgtacttagaccgttcacctgagattcagaggcgaattaatggggtgtttagtctaattaccgagggtgatcttgataaagcacaggacgaaatttctgctttggaagaagaacttaatggcgaaatccctgagctaattagtgctaaaattgatattgaaatgcatgggtgggatgaggaatga

SEQ ID NO: 452672 - DNA, 963 bp, Serratia marcescens
atgcgtcttcatctatatgctaaactgaccgaaattcagtcacgtaatcgcagacaaatcgacaacttcctttacaacgcacctaaccgatataaggtttatagcatccccaaacgtaatggtggggagagagtcattgcgcagccatcaggtgagcttaaggatttccagcataatctaattaatatattggaatccaattttctaatacattcgagtgctgtagcctataaaaaaggttttggaattaaacacaatgcagcaatgcattctggtaatccttatctgctcaaattagactttaccgatttttttaatagcattactcctgagctatttttcatggcatgtgtttggaatgggtatgatctatctactgcggagaagagagttttcacaaaaggcttattttggaataaagccaagagtcagtcaggtaggctttccttgagcgttggcgctccgagctctccgcttgtatcaaacattattatgtatttttttgatgaagagtttagtaggcgttgtgaaaagcgtggaattgtttacacccgttatgctgatgatcttacattctcaacgcatcataaaaattccttattctctttacccgatgaagtgagagtattcctaaataagaattatcataatagaataacattgaatgaacgtaagactattttcacttctcgagctcacaatcgtcatgtaactggagtgacattgactactcaaggtggattatcagtagggcgagagcgaaaaagatttatttcttctttgatccataagtatactttgggcatacttgaacctgatatggcttactatcttcaggggctattgtcattcgctatttatattgagccagaatttagaacaaggttgtcgaagaaatactctcaagagactattttggaacttttaaagttgaggaaggaagatggaatcgagaatgaataa

SEQ ID NO: 452673 - DNA, 573 bp, Serratia marcescens
atggaattcaatcaagatgcaaaagctgctatcgaaaggatggtaaaggcctacggagtcaagactaaactagctttgtgtgaggccttaggcatcacggcgagtgctcttgcgaacaggcaaaatcgcaacgcttttcctgcagagtacgttttgaagtgcgccttagatacaggtgcttctgtacgttggttaacgtatggtcatggcgacatgtttgaacaaacggtggtttcggctccgaatgcattagcggttcctagcaaaaaacttgccgccagaaagttgcatgagggggatactcttttattagataaaaactttctccctgaaaacataaaaaatccgattgtagtcattgacggatcaactcaatacatagcaacgcgtgcatatgctgaaatctatgatggtacatggttggtcgacattgatggtgatataagcatccgcgaattggttcgcataccgggaaataaagtaaatgtatcaaataaaaatcactcatttgattgcccagtagaagaattaagtgtagtagcaagagtaatcaccatttgcagtcccacataa

SEQ ID NO: 452674 - DNA, 1464 bp, Serratia marcescens
ttgaagactactgaatgggaatttatagacgaaattcagaataattataaaaacctcgtaaggagtgattttgtaaatgcaaaaatttcttcttacactctaaatcgtgatgaagatctagaattaatgagtgaattcacttatcaagattctgcaaaaaatttgcactcgcaactaaacgaaaacagaaaaaaacaccctgtagggactgttagaatagaagaatcagaaatagaattagctagtaattatctcactgacagaaaagtaatattcacaggtgtttcatccaatggttattcaataataacctcaaccaatggaacctgtgagctcaaagaaacctataagataaatacaataaaaagtgattataaaaaccaaaaggaaacagaatttctaattgagtgggtagcaaacctaaacatctctcaatacatatggcccgactcaataacaaccaaaaaacaaaccaagacaacaaaaacattctctagtaaaactcattctatattactctcagatgataaagaaacaaatggttcttcaagtaaatgctgccatataaacatccaaggatttaacatatactttggcatcgcggacaacgggaaattaaataagtcacaaaacccaggatttattttttatgaaggtaatcctgaagagaagttaagaattaaaattcgccatgcactatcatttatcattggtagtaatattttatacttaggtcactccgaactagacaaagatttatatatcgtaggctttgaagcacacacgccaaactctatgggtggcctattcatacaaaatcaacaccccccctcttctcgtttaatgagtagtgagtcacgccattactttgcagatagcagcataataaatgagatggtgaataatttcgtgttaaattacgacacatatgatttaaatcacatattatggctgtattggcatgcagtgatagcaccagcacaccttaaagccgtttgttttggtgctgttttagaatttactcaaaaaacactaattgataaagaaagtgttaactttaaaaaatcattaatagataaaaaagactggaagcttatcgccaatgagtttcgtgaaatcataaaccgccacggaaacattgatgaaaccagtaaaaaagtcctactaaacaaaatttcaaacttaaactcaacaccacaaagcatattaacggagaagtttttcgagttattaggtttaaaactcagtgataaagagcttaaatcctatacacgtagaaatgatgcggcacatgggaacaaaacacctgataatgatttcatttctttaattagggatagcaaactacttcatattctatgtaatcgagtgctaataagaatattagcattggctgataactataccgatttctatacaattgggcatccttatagggaattatcagaaccagtcagtgagtaa

SEQ ID NO: 452675 - DNA, 702 bp, Serratia marcescens
atgctcaaatatattaatagacacggacacatccctatccacgactttagttttaatctcatgttactacatgggtttatcaatcaaaccgaagattcaataagagatagcataattaaatacaaaaatgaaggacctgaaacttttgttgtagaagaacatcccgaagataatatttacatagccattgatagttacatgggaattgacgaacaagcagttgaccttgatgatatattcaagaaatactatccaagtataatgaggcgctctgcccttttaactatcgttggattattagaacacgaaattgagaaattttgtcacagctattcgaaaagacacgacacagatattagtcttactgacttaaagggaacaggctttgaaagaggacacctatttttgaaaaagattgtcggcctgaagcaatctaaagcttactcagaagtacagcgaattattaaattaaggaacacgtgtgctcataatgatgctcgtttagtgaataatgacggccaaccaattaaagaaatatttatgctactggagcagtatccagacattattgagagggatggaaatcaagttatgtttcatgaaggtgctttacttgcgtttctaagcaccttcgcagcttacatcaaagaaatagaaaccataattaacccccctcatcagaaaaagaaactctttccttaa

SEQ ID NO: 452676 - DNA, 351 bp, Serratia marcescens; identical to SEQ ID NO: 449360

SEQ ID NO: 452677 - DNA, 822 bp, Serratia marcescens
atgagtgctatagaaaaccaagaaacagttatacaagcagttaatagtttacatccaacaacgttgtttcactttactaaaaatgaagaggcattctatagcattttaacagaactctattttaaacctttccttgcccgtgaacgcatagtcggagtaaaaggaagaagaaatttcgcagtaccaatggtttcattctgtgacatcaagctgtctcagattaaagatcatagtggaaaatatggtgaatttggatttgggttaacaaaagaatgggctgagaaaaatgatctccatcctgttctatacatgaatcaaggcagtgaattattttcaaagtataataaaagaattagaaaactaaaggatgcgttaattcctctatggtcgaaaaggcatatccttgataataaagagcgtaagtattttgaaagccttaaagaagagtacgctgacctttataatttattacgttatatgaaaaattataaaggaaaattagaaaggtcgaacgaaaaacctattgagaattatatctacgctgacgaaaaagaatggagatatgtaccgcatccgtttgttggcgatttatggcctagcctaaatttagagcgagtggtggaacctaaccagaaggccgtcttaagtaaaaagttctctgaatttggtattagtttttctttcgatgacattaaatatatacttgttcctgatgatagccacacttccaaattgataacttgccttatgagtataagaaattatgatccttatataataagtaaagttttaacgatggataaggtaaaacaagatttttaa

SEQ ID NO: 452678 - DNA, 291 bp, Serratia marcescens
atgccatacccgcccgaaccggcgccgataccgacgccgacgttgccgcctttgctgctgttcttgccgacggtgctttcgctgttctgcaccgactgcagggtattgtcccgcgctgcatcgagcgacaggtctttgcccgccttcaactggctgccggtgatggtgatatcgccgctttgcgcattgtggttcttgccggtcgccgttatcgacaggttttgcccggcggtgagcgtgctgccctgcgactgtcggctgtcggtgcgggtttcgcttttcgacgactga

SEQ ID NO: 452679 - DNA, 819 bp, Serratia marcescens
atggcggctttgcgcggcggtgatggtcaggtcgttgcgcgcgctcaggttgagcgtatcagtcgcatcaagcttcgcccccgtgagcgtgatatcggtgccgcgcaggcgaatgtcgccggcgctcatcgtcgcctggcgcagtgcgtcctgcaggttagtgctcagggtcagactgtcggcctgcacgtcgatgctgccggctttgatgtcgccgccctgatgcaggaactgcccggcgtcgaccgtcagggctttgtcggcaaacaggttgccggcattggtgatgctgtttgccgagagctgcaggtcgccaccgccaatcaccgcgccatcgccggtcaggcgcagcgtggtctgtgccaggtacaccttcggcacccacaccgtttgcgggccgccttccgtttgcaccgtctcgctcaccagccagacgatatcctgttgcagcgccgcaatttgctccggcgtcagggccacgcccggcaccagatggaagtcctgggcgactttgctgccgttgttcatcagttgctgatactgctctatcgcatcccagcccttgacggacggtttgccggtcagcgccagcacctgctcgcgcaccagacgctgctcgtaaaagccgtcgcccaggcgcttatgggcctgcgcggggtcataccctacgcgttcgagcatgtagtcgctgctgataaagttgtcgcggcgggtaaaacgctcgtcggtcaccaccaggaacgggctgccgatcgccgtatgttgactaaacaagccgttattggggatggtggtggccacattgcccagatgctgtaa

SEQ ID NO: 452680 - DNA, 423 bp, Serratia marcescens
atggatatccagcgccttgccggcaccaatgaggccgcgttgattatccaggcggctggatgtcagatcgagattgccctgaccgatgacctgcccctgcatgttatccaaccgctgcgccaccagacgtacgtcatcaccgctcagggtgccggacgcgttattcagctcgctgcccgcctcaagcgtcaggtcgttcccggcgagcaggttgcccccggcattattcaccgcgccatccgcatggagcgtaagccccgcctgggtttttaccgtgccgctctgattatcgaggctgccggcttccaggcggagatcgccgttgctgcccaccgtcccaccggcattgtcgagcaggccgccgacctgccagtgttgcgccgcgccgcccagcgccaccaggcggcctcgctgattgactaa

SEQ ID NO: 452681 - DNA, 657 bp, Serratia marcescens
atggtaccgtcactgttgtccaacttgcccgccagggtaacgcggctctcaccgtcatcggtttgtgaccaagtggcctgttggttgaacaggttgtcggcatccaccgtccagcgcccagccttgactttggcctgctgtgcatccacatttcccttcgtgctcacggccagctcaccgctatcaacggtggactggcgtaatgccacgccgccttcacgtgccgtcagcgcagtacggccggctccgacctgcgcgccgctgatatccacccggtgcccggtcgcgttgacgttctttttagcgagcagactgccactggcgcggatatcgccctggctatcaagcttcaggttggcttcctggaccagggtgctgtcggcattactgcccgccagcaggtggccgctgctctggataccgcgcgtggcgttcagctgtacattcccggccgccgccagcgtcccggactgcgttaacattccctcacgactctgcacggccagttggccaccgctatacactttcccgtgcgtctcaatgtcaccttttgccgccagttggatatcgccgccggcctgcgtagccgcatccggcgcatcagactgccaactgagcttaccttcgctgctgacggtgagcgttttgccggcctga

SEQ ID NO: 452682 - DNA, 267 bp, Serratia marcescens
atgcgcccggcgttgatggtgccgcagccgttgcagacgatgccggcggggttggccacaatcacctgcgccttgccgccggccacttccataaaaccgcgcaactggctgggattgttgctgttgacttcgttgaggatgacgcgcgccggcgcggaattgggattgaggttagggttaccctggatcatcccggccatctgggtcgaggtcatcaccgccgagttgttgaggatggcgcctttggtgtcgacatcgaactgctga

SEQ ID NO: 452683 - DNA, 765 bp, Serratia marcescens
atgaatacgtttatgcaatataatgttacgcgagccgtatcggcaatggcattagttggcggtgtctttttgtcgatgccgtcacaggcggccatcgctttggatcgcacccgggttattttcgacggcggccagcaatcagtgagcctgagcgtcagcaatcagaataaacagctaccttatctggcgcagggctggctggaagatgagcaaggcaacaagattcaaagcccgttgaccgtgttgccgccggtgcagcgtatcgaaccgggcaagccaagtcaggtgaaaatccaggcgttgccggcggccaaacagctgcctcaggacagggagacgctgtactacttcaatctgcgtgagatcccgccaaagagcaataaaccgaactcgctgcagatcgcactgcagacgcgcatcaagctgttctatcgccccgcggcgatagcgccggagcgcaacgctgcgccatggcaggagcaattaacgctgaccaggcaaggcgataaatacatcgtcaataacccgacaccgtattacgtcaccattatcgatgcggccggtcgtaaaggcgtagcgggcgcgcagaactttgaaccgtttatggtgccgccaaaggggcaggtgccgctgacagcaagtgctaccagcctggggggcagccctgtgttgacctatatcaacgactacggcgggcggccgcaactgacgttcaattgccataccggcaggtgcaacgtcgtaccggagaaaaataactcgtga

SEQ ID NO: 452684 - DNA, 606 bp, Serratia marcescens
atgtttaacctccagaccctggcagcaaaagcacacgagctgcgcggtaacgtggtaaaagccactaccacgaagggcacccgcaccatgacccctgtttacgaacgggaagagcagcgcaaactgcgtgaacgcatccagcagactcagccggactgggttttactctggtgggatattgcgaccgttaccagctggcgtaccagcgacgtgtgcaacttccgttactcctgcatcaactgggaaaccggcattgccacaatcatcgtagcgaagcagaccaaagcagcggaagccagagcgacccgtaaggggatcgagattgttcgccagcagcgcaaggacgctgcccggcttgctggcgatcacattgggtacatgcactgggatagcgtgagctgcgacgaactggccgccggtatgacggaagaagaacaggcgatcgtgtttgagctggtggcaaaggctgaagtgaagcacgacaccaaacagctgccgccgggcatcatcaaacgactgcgtgaacgcatggagcgcaatcttatcggtgacgacctggtattttcccgcagccagattgaaagtaaccgttgcttcattgagtga

SEQ ID NO: 452685 - DNA, 189 bp, Serratia marcescens
atgaagaacatttatgcccatctggggcagggcttcgctcgcaccgaaagcagccaattaattattccccgtagcaagggcgaggctctctccgtcgccccctgcgataatcaatttttgtttagtaatttttcgcaactttgcttcagtacgtctttttcgttacttccgcaagcgctctcctgctga

SEQ ID NO: 452686 - DNA, 612 bp, Serratia marcescens
atgactaacaaaaatgccctagccgggcagggtttcgctcaacctgaaaacagcagcgatgatatttcggtcattaaatttgaggccgcgaaagtccgtattgttaagatcaacggtgaaccgtggttcgttgcaaaagatgtttgcgcggcgctggaactatccaattcacgcatggcgttgcaggctctggatgatgacgagagaaataccgtaactttaacttacggtattcgcgggaacccaaatcatagcgctgtctctgaatctggtttctacaagctgatcgcccgcagccgtaaagctattacgccgggcacattcgcccatcgtttcagtaattgggtatttcgtgaggttatcccttctatccgcaagactggctcttatggtgtgccgttcgcgttcctgaacgactttagccggcgcatggcggcttatcagcaggaggccagcaaacgcgggtataagttgcagcagtgtaaggcagtaaaagaggctcttgtgcgggaggagagccagctatggcgtaagtatcagcccgagctgttaggcgaagatggtcatgagccgtttactgaagttcgccctttaacggatgaaaaaaattga

SEQ ID NO: 452687 - DNA, 960 bp, Serratia marcescens
atgtctgaaaatatttctatacccttttcattttgtcgattaaatagagctgctgatttcttagggatgagtaatgaggatctacttagccttgcattatccgagaaaataatcctttgcgttaggttagatggtttaaattcagtacttttggtcgacggtaaacccgatgagttggatgaatggtatttatctttaaaaaatgatggcagtgtattagctgctgcattttatttatcgaaatacacatcattttccattgatcgactttcttacgatgaagagaatgaacaatgtatctttcatccaaggttttatcaaagtttagatgcaaagggcaatccattaggcaatcaatcccaaagtcatagcggaagagcctatggtctctgggttcctcagttgccggtaataaattcgataatgaactatggacgttcttctcttttatgggggtctttaggcctttatcgtacagatgaaaatacacctggtttatgcttaattcctttgccgatacactccgatagtaacgatattgatgatgaggatgatagcgatgaatgtgaagaaaattatccagatgtcgaaatagctgcaaatgacttgtggataacatcagaacaggtgagaaaattactaaaccataatggtgactacagcgatctacctcagtgtagtgataatgagactttcctgactgccgatttggtgaaaaaagtaaacaaaaacaaccaaagcgctgaacgtcatgcaataaatcgggagaaactatacaaatatgcgataagcttattgtcgaaatatcctgaggaatgtcgaggtgaacgcaaggaaataagtcctgaaaaatggcgtgattgcattattgctcgtcaaaatgagatacctccattaccaatcacaaatgaagatgtgatactaagacatctgagagctgcagcaaataacaaggggtag

SEQ ID NO: 452688 - DNA, 1656 bp, Serratia marcescens
atgttatctaagaagacttcagcacaagtttgggatacacgtcgtaccgagaaaaagttgcgtctggcttccttacctattagggacaaggtattgccaactgcggatttgaccgcaatgttggaaaaactgatcaggccgggtgaccgtgttgtgttggaagggaataaccagaagcaggccgatttcctatcacgcatgctatcaaaggttaatcctgagaaagttcatgacctgcatatgattatgccaagcgtcgggcgtagtgagcatctcgatctctttgagaaaggcattgcccgcaagctggacttttccttctccggtacgcaaagcacgcgtatttcacaattactggaagatggtgtgttagaaatcggcgccatacatacctacattgagctttacgcgcgcctttatgtcgatttagttccaaacgtggcattgattgccggttacaaagcggatcgctatggcaatctgtatactggagctagtaccgaagataccccggcattggttgaggctgctgcgtttcacgacggaattgtcatcgcgcaagtgaatgaactggtggatgaggagtgtgacctgccacgtgttgatatccctggttcatggattgattttgtcgtagtcgcagataagcctttctttattgaaccgcttttcacccgtgatccgcgtttgatcaaacaggaacatgtccttatggcgatgatggccattaaaggcatctatgcggagcaccaggtacagtcgttaaaccatggtatcggttttaacaccgccgccattgaattactgctgccgacttatggcgagcagcttggtttgcgcggcaaaatttgtaaacactggacgctgaatccacatccgacactaatccctgcaatagaaagcggttgggtagagagtgtgcactgcttcggtggtgaactagggatggaagagtacatccgtgctcgtcctgatgtgttctttaccggtgctgatggctccatgcgttctaaccgtgcgttctgccaactggcaggtcagtatgcggtagatatgtttatcggttccactctgcaagtggatggcctggccaactcttcaacagtgactcgcggtcgtctttctggcttcggtggcgcgccgaacatggggcatgacccgcatggccgtcgtcacgcaacccctgcttggttgaacatgatatccgaacctgatccgatgcagcgaggcaaaaaactcgttgtgcagatggttgaaaccttccaagcgggcgtgaaaccgaccttcgtggaaaaacttgatgcagtcgatgtggctaaggccgccagcatgccgttggccccggtgatgatctatggcgatgatgtcacccatgtcctaactgaagaaggcatcgcttacctctaccgttcagaaaacctcgaagaacggcgtgcgatggtagcagctgtcgcgggcattactgacatcggcttgggtactgatgttaaacgtgttgccgaattgcgtcagagcggcaaagtcgtttacccggaagatatgggcattcgtcgtaccgacgcgacgcgttctctgttggcggctggtagcattgctgatttggttgaatggtctggcggtttatataacccaccggcgaaattccggagctggtaa

SEQ ID NO: 452689 - DNA, 855 bp, Serratia marcescens
atgagccttttccccaagatgcaggttgaaggcgttgccgagtggttggcgcaaatcgctacggagtgcctgattgatgaagcacgactgagcccgaaaccaggtctggtcgacagccggggtagcggtgcacatcacgatttatcgcttgtgttgatggaacgttcggcgcatagcctgacccctatgtttcaagcactggcgcaacaaagctggcggcgtccagcagatattgctctcagacaaatcattggacgacttggtcgtgaaggggagcagcagatgatggtggttaccaggggggtgaatacccatcgcggcgctatttgggcgttgggtctactggtaagtgccgtggcgatgcttggcggaaatgggagagcgcaacagatagtaaccatcgctgccgaactggcgaaactgcctgatgaagctgccacaaagatcttcagtaaagggtcatgtgtcacgaatcgttatcgcgttccaggtgctcgtgaagaggcgcagcagggttttccacatattatgcaaagagcgctgccccagttgagattaagtcgactgaattcaggcgaaacacacgcgagactcgatgcattgatggcaatcatgacctcattaaccgacacctgcgttctttcccgtgccgggatggaagggttgaatatcatgcagcgtggcgcacgcgctgtgctgcgtgcaggcggcactgctcatccggccgggcaggcggcattagccatgctcgatagtcacatgcttgcgctgaacgcctccccgggcggcgcggcggatctacttgccgcaactctgtttctggatcgcgttgaatcactctacttaaagcattaa

SEQ ID NO: 452690 - DNA, 300 bp, Serratia marcescens
atggaacatattatgttaaccgtaccagccagccgcattttaagcggcaaagcacaggttggcgttgtaggctccggggatatggaagtgttatttaccgccagcccgagtcagacgttaaccattgatattactagttctgtagataatagccgttcccgttgggaagcgctgttcagccgtctgcagagggtcagtagtttgcctgctggcaaactaatcatccacgattttggcgcaaccccgggagtggcgcggatccgtatcgaacaggtttttgaagaggtgagctatgcgtga

SEQ ID NO: 452691 - DNA, 834 bp, Serratia marcescens
atgcgtgatgattgtagtttcatcgaattaaacgcgcgtcagcgtgctcatgcgctgctggatgaaggcagctaccgtgagttactcgacccatttgagggggtgttctcgccgtggttggaagctcaggacattgttccgcaggctgatgacggcatggtggtggcaaaaggcaccattaacggcaaaccgtcggttgtggtggcaatcgaaggcgcattccagggggggagtatgggcgaagtttccggtgccaaaatggcagcggcgctggaacttgcagcggaagataaccgtcacggaatcccgatgcaggccgttctgtgcctggaaaccggtggcgttcgtttacaggaagcaaaccttgggctggcggcaattgctgacatccatgccgcgattgttgacctgcgtcgctacaccccggtggtcggtattgtggcggggaccgttggttgttttggtgggatgtctatcgccgcggcactgtgtagctatctgattgtcacccgtgaagctcgcttggggctaaatggcccacaggttattgaacaagaagctggccttgaagagtacgattcccgcgatcgcccgtttatctggagcatgaccggtggtgaaattcgctatcaaagcgggctagtggatgcgttagtggatgacggcattgacgcggtgaaagcggcgatgaatgatgcgctggaaaaaggtttgccggcaaaacatcgtaccgacagctatgactggtatcttgaccgcctgatgaatttcgatacatgtaagcaggttgatactgaacagattagcatgctctttgccagagaggtgaaatga

SEQ ID NO: 452692 - DNA, 801 bp, Serratia marcescens
atgaacaattctataagtcgtggtgaattatggctggaagctctcgtacctaacggcaaacgtttggaaggaatgtgcccgtccgtacaggtagctgacggtgagctgaatggcgaaacggtgcgttttattgctgtggtacaggatgctaacaatcattacccgcgcgcgactaaaggtgaggtggggttgctggaaggttggtggctggcgaaagtcgttgcggaaactgtggctgccgatgctgacaaaaccgttaaacgcccgattgttgcagtgattgatgtgcctagtcaggcatatggtcgacgtgaagaagggttcggcattcatcaggcgttagctggcgctgttgcagcatatggaaatgcacgtctggcgggacatccagtgattgcgcttatagtgggtaaagccatgtctggcgcgtttctggcacatggttatcaggcaaatcgtctgattgcattcaatgataaaggtgtgattgttcacgcaatgggaaaagagtcggcggctcgaatcaccttgcgtagcgttgagtcactggaaaaactctcagccacgataccaccgatggcgtacgacattagtaactatgcttcattgggattgctcagcgatctactgaatattagcaacccggatatcccgtcggccaatgatctaacgcttgtggtgaactcacttcaacaagctatcgacgatgctcgtcaggatccgacactgaaatgtcgtttaggcgctgataatcgccgtagctcttgtcttgtgcgtgaacgtatacgggcacagtggtaa

SEQ ID NO: 452693 - DNA, 870 bp, Serratia marcescens
atggtcaataatcaagatgtttccatgatcaatacgtttgtaatggattttgctcttccggcggcgctatttatcgctacgatacaaactccctgggaggggatcgtggcacagtcaacattgatactgatacttatgttggtgatgtggattactttcgctgccatctattttcttgcaaccaaagtctttaataagtcgccgcaagatgcagctgtgttgactttaaccgctgctatgccaaactatgccgcgcttggattacctattcttagtaacgtattaggggagagcccttcgactactttatctgttgcggtatctatagcgagtggttccgttttgctgaccccactttgcttgctgattttggagcgtgagaaagcatgtgaagaaggtaagtctggttcaaatttgttaatactgatgtggcgttctattaagaagccgattgttatggggccagtactggggattgctctctctgctataggtatcaaaatgccggaattaatcttggtggcaataaaacctctgggattgtctgcaacggctactgcgcttttccttaccggggttatcctttctgcccgcaagttgcaaattaataggatggtgagtgttggtgttatgaccaagttattacttcagcctatgattgcctgggggtttgttctggtattcggtttgcatggttctgtggcgatcaccatcattttaatggttgcgttatctgctggtttctttggcgtagtatttggtaacacctttggcgtgcattcgccggatgcagaagctgtgcttttactgagttcggtactgtgtatcctctcattgcctttgtttatatttctgacttcagggatctaa

SEQ ID NO: 452694 - DNA, 618 bp, Serratia marcescens
atggtcgcaactgtacgcccacatgatcttatctggcttacccagcgtggcgcactggaaggtgtggtcgatgcttgggtaagtgatttctggcatatcggtttgcctgtggtagttcggcgtgatactgatgctaaggggcgtatcccaatcggagttcgaggtctacgccgtgaccttcgggctgcaggatggattaggcctgatatgattgctcatatttgtaagcctgaatccttggtcaaaacagatatgttacttcgctcgccctttattttcttggcacctgttcggagcgctgtgttgctgtcgcaacataagtggccatggacatggggaattactggtagcactggttattcattggctacagggatctcggttaaccatgtgaaaagcgatcttgatttgttgattagagcacctcagcccctgccgcgtgaattgctggtgaaatggcagatattgttaatgaggggcggctgccgggctgatacccagcttgaaacactacacggagctttcgctctcaatgaatggctacatggtggaaaagtactgttaaaaacttcgcgaggtcctcgtctggtaagtgatccatggagagaggataaatga

SEQ ID NO: 452695 - DNA, 903 bp, Serratia marcescens
atgaaaattatgtttacttttccagggcaaggaacgcagcacccaggtatgctgcaaaagcttccaggaacagagttaacgcaggcgcgagagattttggggaatattgtggatattttagattccccagaggagttgcaacatactcaagcagtacaactttctttactgattgccggggtggcatgggcgcgagaactacaacgtaggggaatacatccagatatagtgtgtggtttttctattggcgcttacccggcagcagtaatcgctggtgcgctggactttgccgatgcgttggcactggtctctttgcgcggggatttgatggaacaggagtatccgagtggctatggcatgatggcgattgtggggcttactcttgcgcaagttgaatcgttggttaaagagagcggtacgtatattgcaaacctgaatgcggaaacccagattgttattgccggtgctgatgacaaaatggagtatgtcgcgaatcaggcccgaaaaaaaggagccagaaaaacataccgtctgccagttagcgtaccgtcacattgtgcgttattggcagagccagcgcaaaaaatggtgcaagcatttaaaaatgtggtgctccaccgtccttgctgtgcatatctcagtggaagtagtggacgtgttttatggcagccggaacgaattgccgacgatttggcaatgaatatggctcgcaaggttcgttggcaggaggctgtggtttcggcgaatgaacgtgatgccaggttggcgattgaaatgccccctggaagaatattgactgacctgactcggcaggcagagtgggttggggagtgcgtctcgctggaacagagtggagtgggcgctgccgtatatctctcgcagcgacttggtatgcatgagtga

SEQ ID NO: 452696 - DNA, 975 bp, Serratia marcescens
atgccgcaggtaattttgccattcgcgcgcatgttatctgcagtgatgaaggttcggtcacccttgactccgataatgccgtcaccagaaaaagaactcctctctccaccagtgccgtcgattgatttgcaaagcgcagtcagttccccgtccattgtggagcctgcgagggaggacgaactgaattcgcccggagacatccctgcattagcaaccgacgtgttactgagttcggcactggatgcacctatgaacgacaaaccgctggcagagatggagatagcgccggagccggttgttggcacgggtgaagatatccaggcgttgctgtcgttgatggaagtgtcggtgtctgctccggtgaaccagacagaacaggcgttcggagacgcccctcacgaagatgaaggccctatgcctgctgataatcctgtgcttacggctgaagcgactcaggaggttgacgctgtcgaagtaaacctggagtcagacggggacgatgatatcgcttccgaagtggcgttttcaacacccgagcttggttttgctcagtttccttctcaatcactaaaaccggctattgaaggcgatggcggggcaacgtctggagaaggggaggccttttggcgttggttagccgatggactcaattctgatcaaatcctcatcaacactgtcgaggcgagggttcatcttgtttctggttttgtctttatcactgtccctggaattttttatttgtatttgaagcagactggcctggatagctctcaacgcgaagcccttcaggaagattttgaacgactggaaaaacaccgcaggggaaaaggtaaacgattttattttgctcacctgtatgaaacatcagagtgttcaggtgcgtttaaacgaaccaaaggttacctcgttaaagcaagtttgctctatcgaggaaaaaaactacctgacgacagtccggtattggtgatcccttaa

SEQ ID NO: 452697 - DNA, 408 bp, Serratia marcescens
atgaacagaatgaaccttctctgcatcgttgtttcatttgtgaaacatcagactgaacaacgtcttcctcacgcgcctgtcggagcaaccctggccaggctggaagaggatgccttgtttttgcaacgcattcttgccgaacttgaacaggcaactcggtacatccggagcatgtgcaattctgaggatagactggctattgataaaaccgtgttctataccgcacaggcgctggggcaccgtcaattttatgaccgtggaaaccagcggctcctgcgaatgggattgcggcaagcgattaagctgggtaaccaacttgatccggaactgtggcagtgtggttgggacatcggctataacgatgcttacgtcgatggcatagaatccagtcacggcggcatttattga

SEQ ID NO: 452698 - DNA, 1089 bp, Serratia marcescens
atgaataccagagcaaattcacgaagaaaaaccggcttaactattaaatatagaacacaattagatacagcttcaaaagcagtaacattagtgacgttcacttcaactgtttatggctcaatgcttttgtttttcttctcgataaaacacaacatcaatttcatcgaccttatatctccaggcatactaatcagtgctggcactctagctcttttcatgctgactatgatttccgcactcataatcgccattttatatgtaaacaaagagtcgattcaaaattcatttctttgcctaatctacataactccctacaaaaaagcacacaaacacaaaaaaacaattatggcattctttaacttattaatatgcctgtggcccttcattcttatcaaaaccagctccgtaaatacagtactcatctacttaatagtaatagaatgcatagcgcttaccctatcaattgcaacctcacatatatgttccttcagcaaagcaataaataacccacctataaaaatcagaacggcaagtattaaagcagcaacactctttgtaagagcgctgttattcgtaataattccattcatagaactcatcataatattgtcattaattctttttctgtcgttcttattcaagtctgagcttacttctatcgacgatggtacatttgcaatcacagtcgctgtagctcactttcttctaaaactaccatctttatcaacatccaaacgaagcagaaatttaagcaccctattctttgccgctattattattgccgagacggctatgttgctatcattcactttctcacaaaatttagctcaagcagcatcaaatagaattggtataacattagacaactcctgttttttacgcaacgaagttctcaaaaatgggatagctcgaacttatataaatgaaagcgaatccaataacgatctcgtcaaattgaaccttgttactaaagttaatgatatttactacttatcgatagaacctggcaatgagattgaaagaaaagcaaacatcaggataaaaggtttaaacttaacagaactagactgtccgagaaaaaaagagtaa

SEQ ID NO: 452699 - DNA, 2079 bp, Serratia marcescens
  misc_feature (1010)..(1019): n is a, c, g, or t
atgaagtcttttgctgatattgacatggcacagagagggatcttgggttttcttaagcaggagttgtctattttccctggtcgttataatgcgatgctgcgttatatgctatcatcaaccattgtgattgtaatatcgatggctcttagtgttcctcagttagcttattcattattgatggttttttttgcaacccagcaaaatatcgtattaactagaatggtttttccaatgctaatgcttgttaatgctatgtcagttctttgcgggatagttttgttaaaattcaccatcgattatccgatgcttaggctaattttagcggcagtaatgttgattgtactactttacttgatgcgctcatcgcaaaaatggggaatccttttctttgttgttgctgtcatgattgtttatacccaaagttttgttgatgttacctcaaatggtgagatgctactgcgtaatcttatgtggacgctagttgctggcggatatgctattgtagttgcatttatcgtcaatacgattgtcttgccagttgaaccggctaggcagttgaaaatggaagttgaaagagttctgaatattatcagtagtatgttgaattctgctgcttctgggaagcccgtgaataaaatagaatttggagaggttcagcgtagtgtattgaccctacataaatatcttaaattttccataatgcgagatattaaatttcgagagaataaagaactatatttggcgcaaatagggacgatcgaaaggatttatttcgctacatgtaacctccataatctaacctccatgaagttgtcgcccgtggtagttgaacattgccataagttgtctcaaaaatgccaactgcttctgcaaagtataatcaaagatcaaaagtattctcttattttgcaggataaagaacgtgaagagattatggctctccctgattgtctgcgtgagatgtatagctcgttactcagtctttcacttcagatttttcacgatgaacnnnnnnnnnntgaaaaaaaagatgattccagagaggtggggggggtaaaagggctctcatacagatatattaaatatggaatcaaagttctgttgtctgtggcaatatgttatgtgttttatactagtgtccaatggcctggcattcacacatctatgttgacttgtattatagtggctttacctgggctaggggcttcgatacaaaagagtcttctgcgcattggaggttgtctgtttggtagtgctttagcgttgttctcaactgtttttattctaccctgcgtagatactatcactgggttattgttaatggtcataccggtaattgcctttagtggttgggtggcggcagggtcggaacgtagcagctatgcgggtattcagatgttgtttgctttttcgctggcgatgtttaatgattttgcacccaatccggatttgacagaaatccgtgatagatttataggaatcttattgggtatagttgtatcaactctggttcacagtatcgtctggcctgaaagtgaaggcaaaacattgcgtgaggcgcttggagggattttcaattactttgcaaacagaatggtatcgttgatgccagagcagcattctcaagccctgggttggtcgaaactcgattccacgcaaaatctacttgcacaggttgcaatggaacctaactggcgtactgtcgataatgaacaactgactctacactgtcaaattctactgagtatacttcgagagttgcatgtatcactttatcgactggagaatgagtttgcgatagccatgagtaggcataacaaaaacgatttatttatattcattgaacgcgcgatgcaagcgctttcagcagatatgcgtgactacgcagaaggaatacaaactgaacctgttacaaccacatctgttggtagacggattaataatatattggctgaacgggggcctaaagtggcagtatccgatgcccaacttaatcactgggaaaaattgcttttactacgagttgaggaggtagttacgatctgtggttctattccggtatggaatgctgaggactga

SEQ ID NO: 452700 - DNA, 1035 bp, Serratia marcescens
gtgactaatcttattaagaggcggtgcttcgtaacgttactgacattattaacgttagttgcattattatggataattaaaacgttagatgaggctccgagaacggatgatgcttacgtgtatgcagataccattaacgtagcgccacaggtaaacgggttgattatcaaaatgccaattagggaaaaccagtgggttaataaaggtgatgttctatttcagattgatccccgtccttaccaagactcgttaaaccgtgcggtggcaagtttagctcaattggatcagcagattactctagctcaacgcgatgttaacgcacagaaatttaacgcaaaggctgcggagaagcgcgttgaggttgctcgagcggccgctgaacaagatgcgaatacacttcgccgcttggaggcgcttcgtcccctgaactatatatctaaagaagacttagatcgagcacgtgcagcgcaacatgcctctaccgctcaacttcaatcaagtcaactgcaggcgcagcaggctaacgcagcagtaagtagcgttgccgctttgatagcagaacgtgaagtgatcaaagctgatatctcaacggcacagttcaatctagagcatacaatagtcaaagcaccatttgatggacgagtgactgctttaaaaactacatccggacagtatgcaagtattgggaaacctgtatttactctgatcgatagtactgcttggtatgtggtagctaacttccgtgagtccgaactggaaaatatccataataaatccaaggttgatgtatatctcatgagtaacaccagtaaacattttaccggtgtagtcgattcaatcggttatggggtatatcctgacgatggaggttctactcaagatggattgcctaacgtatctcgtagcattaactgggttcgggttgctcaacgtttccctgtacgtattcggatcattaacccggaacttgatatttttcgtataggtgagtcagccgttgtcaatatacttgcaggtgaaaacaataacgattaa

SEQ ID NO: 452701 - DNA, 927 bp, Serratia marcescens
atgattgatgatatcagtcaagagataacgtttcgtaagctcagggtttttattacattcatgaagctaggtaatattgctcgtaccgcggagatgttagaacttagcgctggcagtgttcatcgggccttgcattcattggaggacagtataaattgtcccctttttatacataaagggagagctcttgtggcgttgccatctgcctggactttgctaaaatattgtactgatatggctgcgcagatgaatatggctattaaggaaactcagaaagtcgcaggggattggaggtgccgccttaggatcggtacgttatattctcttgcacttgagacaattccagtattaattatgggaatgaagcgtcgacgaccagaacttgaagtggatcttactatggggtctaatcgagatttgctcaatatgcttgaagagaatacacttgatgcaatattgatagtcacaagtgataatgaatttagcaagtctaaatttgatattgtgcctttgtttgaggatgatatatttttagcattatgttctagtaaaaatatggatataaaagaccactctgacttgcgtaactatgttaattgcgattttatcactttagatgaaggttttgctacttatacatcttttaaagaaatgtttcgtttagcaggcattgagcctaaagcaatcactacagtgagcgatattttctcaatgttaaatcttgtgcaggcaggagtatatatatcgcttattccggcaagagtgaagagtttctatgataaaaacattcactttatcaagttggcaaagtcatatcaggcaaggcaatctatttcgattgtctatttacatcaacgccaacatgataagaacttgctagcgttagcagcggaagggcgggtgtatgctcgtgagctcaataggtaa

SEQ ID NO: 452702 - DNA, 912 bp, Serratia marcescens
atgaataagaactattttgatgttgtgatcgtgggtagtggcgcggctggttgtgtcgttgccgattatcttgctacaaatacgcaggcaagtatcgctgttctagaggcagggaagactgacttggatccaatgattcatatcccagcaggttattctgaaattcttgcaaaggataagcatgtttggctttacgagacagtaccccaacacgggcatgttcaaaagttcagaatgggtaaagttgtggggggaggaacatcaataaatgccatgtgttatgtcagaggacaaaagcgtgactttgatacctggcaacaatctgttaacgatgaagaatggtcctatgattcgttatggaaaacatttattgaacaagaaaataatgatactttccataataaaactcatggtattagcggaaatctgtcagtacagcttccccatggcattaacaaatcaaatcagtactgtatgaaggcatttcaagagtttgggctgccttataacccagattacaatggcgatagccaatttggtgtgtctcctgttcaaagtaatataggtgatcagaaacgttgcagtgcagttgttgctcatctacattcacccttggttattgttttacacggttcggaaatgaatggtgtaagtatgagggaaatgaccggttatgaatttgactggcttgccgatcaacgtaaatttgctgttgtatatcctgaaggctacaagaataactggaatgattgccgtaagaacgcgacattcccagcaaatgcagtttatggtggtgggcacgttgttcctcagcccatagttacttttcctaaaatgttgggctctgttactagtgcattgaatgctcctcaatcgtctttagatttctttggtataactgcagatagataa

SEQ ID NO: 452703 - DNA, 231 bp, Serratia marcescens
atgaaactaaatagtcctaagaaaccgatatggacattgttttttatgtgtttattaatgtgcatggctttaattatgataggaactttctcctatcttctaaaaggctggttaatctgggattttgataaatctttcccttttggaagaaatgagattattacgatcttaaggatcagtctgttaggtattcctgcgggcttcgtattctggatcttcgatgttcgctaa

SEQ ID NO: 452704 - DNA, 210 bp, Serratia marcescens
atgacggacgggtatgactgttaccagaatgcgctggcggaacgggtaaatgggatacttaaaacggaatacctgctcggcaggccagaagacatcgtacaggcaaaaaagatggtcagggagtcggtgaacctctacaacacacagcggccgcacctgtcgctgaaatacaaaacgcccgatgaggttcatcgggcgttatccggctga

SEQ ID NO: 452705 - DNA, 1521 bp, Serratia marcescens
atggctatttttcatcttgattttaaaattgtgaaacgaagtgagggcagatcttccgttgcgaaagctgcttaccatgctcgttgcagaataatagatgaaagaacaggtgatacgtatgattatagccgccgtaccgatttatacggacatgtcatattagcacccgttaatgctcctcaatatattgtaaaaaactccacagcattgtggaatgaagttgaaagagtcgagcgtcaacaaaatggtcaaacagcccgttatttcgatgtttccattcctaccgagttaaataatgatgacaagaaaaaacttgtccttgagtattgccagaaaaatttcgttgataaaggcatgattgccgacatcgcttttcatgatcttgatagtgacaacccacatgctcacgttatgttgacattaaaaactataggaccagaaggttttggtaaaaaggaaaggagctggaacgacagaaaaatgtctgttttatggcgtgaatcatggtcagctatggctaacagctaccttgctgccgctggttcgtcagaacgtattgatcatcgttcccttcaggcccagcacgaggaagcgttagaaaaagccgcagttgctttggataatgaagaaaaagcgctatggcttgctaaggccgctgaaacaaaccgtcctccaatgaagcgtatccatagtgccaaatggcgtagtaaagcagcacaagagcaaagagcagcagaacaggctgttcgtgatgctgccaagcaggaagcggttgaagtctacaagactttcagcgaacttgacctcgaaatcgtcgttgatgtcagaagctttacgattacacatcttgctgaatcagaagagatcgtattacctgaaacacactccggctcttctactgatgagaatcaaagacctgtattggtagcaccagctcctcatactcgtatgcgtggcgttaaatcttaccgtgataaaacaaaagtcagtaaagttgttgctggtaaaaaaccatcggtcagtatttctgattctggatcaaatactattctgcaaacatcctcctctcaaaacccaaacagggcatccagaagcgcccctgaacgtgttaaaaggaaacagactattccacgtcaggataatgtctttaaacgctttacagcccttttggttgattttatcaggggtaaatttatatgggctaaaacaggcaaaactaaagttgatattatcagtgaagaacatgataagcgtattgctgaaaactacgtctttgatgaggtattaggccgtcatgtgtcacgtaatgaatatgaacaacgtgataaattcaataatgatgaaaaacaacatcaaactgagacctgtgtccttaaaccaacgggaaaagaaattagtcgtttcccaagtcgtgtgaaaaaatctgaacaacacaacaacgaaccggagtacagacctacactctcatctggtaagcgcagcgggcctaaattaagaccgccgggctttccgctaaaatga

SEQ ID NO: 452706 - DNA, 213 bp, Serratia marcescens; identical to SEQ ID NO: 84052

SEQ ID NO: 452707 - DNA, 552 bp, Serratia marcescens
atgcgtaaatttttactcgtggcgggtcttgctgctcttgtatcgggatgcggtgaaaaaggggattttgagaaagcgatcaacgcaaaaatatcacaatcaaagctgtgctactccctgcaggacaacgacattgtatttaataaaggttttccgattaaggttaaccgtggctaccgttcagcggggtatagtgccagtgatgaaatattgaaaggtctggctaatcaggggctgcttgatgtttctcaacaagctaatggtttcagtagtgtcgatgttctggaagtaacagacaaaggccaagcggttgagttttgggatcgtaaagatggtgcctgtattggtcatcgtgcggttgctgagataaaggaatggactgaaccgggaaacggtaatcagaaagttgttcgcgtgtcatatacatggaagttggcggatgttccttcttgggtggacaaaaaagcgttctccagcgtcaagggtatgaatgaacctgaagagagcatgattaatcttgttaaaaccagcaatggctggaaagcgatctaa

SEQ ID NO: 452708 - DNA, 567 bp, Serratia marcescens
atgaaattacggatagtgatgccactggtactgtctgctgccgcactaacaggttgccagcagctcaacgatggcgtgaatacagttaatggagcaatcagttcttcgttgtcttcagtaggtaaagcgctggggggaactgccaccactcaaagccttggcccggtatcgtctgtatctggccttggtgctgtctgcaaagactatgaagaaaacgcaatggcagcagagaaaaaatggacgggaaaacggatctcaatcgcaaatgcgactgttcttgaagttacgaaaggcagaagtgccagcgatatgatgacggggatgcctaaatcagcccctaactattatctgctctttaaaacagccgatacaagctactgcggcgggatggtctggctggattactactccggtattgataatgcagttcttacttataagaaaggccagaaagtcagcgtcaccggaactgtaaacaatttcgaagtccgtggattcgctaccgtcaacaatgccgatatgccagttcgtctggttgttctgagaaacggcacaatcaaccattaa

SEQ ID NO: 452709 - DNA, 333 bp, Serratia marcescens
atgaacaacattaagattattacgctctttcatacaaatagaaaaataccatttatgacttgtattgttaaagatgttgaagagaatgaacaagtaataaaactcactttgcaaaatagtgataatattcatgtcaaagattatgactatttcttcttatcagaatcagcacatgagtgtgatcaggaacgaatgattaatacatatagaagattgatttctgaactgagccaagttagcgaagaaacaatagagtccttagttccgaagatatcgaataatatgaaaaccaatttcccggcaagcggtgtgagtgctttggaagatgattga

SEQ ID NO: 452710 - DNA, 237 bp, Serratia marcescens
atggagacgattttctccatcagcgagcccggcgtggtgctgccgaacgagccgttgaacaacgcgacaatcatcaacagcaacagcgaacatttggccaatgcaatagtgatggtcgacatctgttccaaatggcgatccttgaagctgagcgttttcttcagcatcttgccgctgacggtctgcggcgaaaacagcgcggcgcacaaatcggtggtgaacagcaccataaagtag

SEQ ID NO: 452711 - DNA, 267 bp, Serratia marcescens
gtgcatatccacgtgtccgtcacccgcggcggcctcgacatcaaacacggcacctggcggcagctgttctttaaaaagaaagaggtggaggccatctggcgcaacgccgtcatttacctgctgcgcgacaactacgcgcaaatcaaccccggccccctgccgggcctcggccatatccgtaatgaagagcggtggcaccgttacgtgaggcatcaggataagaaggaccaagagatcgaacagcagatggagttgttgcaggattaa

SEQ ID NO: 452712 - DNA, 228 bp, Serratia marcescens
atgcacggtaatttcagaacgatttacccccccttttttatcggctatatcaacaataacagttgcgctaatgctattcttcttactgttaatactgaccagttttacataggggctattgcttgcattctggacttcaagcccggcaacttcaatttgtttgaccagtttctcatcaatggcatcgaggcgatacaccatatgatgtttatgcacatgtgtcgctga

SEQ ID NO: 452713 - DNA, 1074 bp, Serratia marcescens
atgcctctggttacacgaaacgtttttatagatactgaattttttgtaaaggctagtctcgattttcattcaagaacgattaagtatttcgaagaattgtgtggagataaagaatttaagcacgtgacaactacaattgtcgttaatgagattgagagaaaagttactgataatattagagaggcaattaaaggggtgaatagttttagacgtaaagcttcagctttgaaagaatttgatgacgagaatatcaaaggcctctttgtagagattgatgaggatgatttagtagctaaagcattatcagcatttacggattttcttgacatgtcggaagcctcgattgtagacatgaagggtgttgatggcgacgaaattattgatatgtttttcaaacagaaaagtccattcagcacaaaaaagccgaatgagtttcgtgatgcattttcacttcttgctattagatcagcattaaaagggcaagaaaagatttacgttgtttccgctgatccagaccataaatcattttgtgaggaaaatgagcaatttgtgagtgtggaaacacttagtgctcttttagatatctataataaacatgataatcaacgttcagagttcgtgggacagttcttgcttaacaaaaaagaagatatcaagaatgccattaaagaacacttagaagatgctgatgcttataataactctatttgggaagattcagagttggattcatttgaggtgattaagattggagattttgaacctaagataatccatctggacgatgaaagctgtcaaataacattcgatgtcaatgtgaactttcttgcgcatgtaaatgggcctgactatgtaaatggaatttatgatcgagaagacggtactatttatgcatttgatactactcagcgtgaggaggaggaagaaaaaagtttctcagttgaattggaactttatttcgatgctgatgctgaagcgtttataaatgatgatttcgatctgactattcatggtataagcggcgggattgaattttctgtcgaagagactccatgggaagatccgagaatgtga

SEQ ID NO: 452714 - DNA, 888 bp, Serratia marcescens
atggcagaccctttgtcaccaatcataagccagctagctaatttggttactgtaaaatcgagcttacgcttattattaatttgttgttgtataattttatgctgggtatttatacaacccaaactattgccgctagcattgccaagtgaattgacagttacattgataactatcatcggtttttccataggtgctttatttgcatcagtactcttttctattactgactctatatttaagacaattgattacgcgtttaaaaaaagaaatgaaaagattaaggaatacagtgatgtattagccagaagtttagaaaaagaagaaaagctaaatatcttcaaaaaaagcttagaagattaccctcaaccagcaaaaaaaatactccttgagctgacaataaaagactctgccatcactgagtctgacttcccgacagatcctcacaacaaggcatttcttggtttgctgagcaataaaacaatattaccgctaaatagaattgataaatcaacagtcttctgtactatcaaccctatatataaagactatttgaggaattactttgagtccattcacagaagtgatgttgaaaatctttttagcaataaacacatcttcggtttgaatttacttttaaaaaaattcaccgatacagctaacgatgaaaactatatttttagcattgatgatatagtttattctgaaaggtatctatattctcctgtgattcgattcgaagaatatgaggaagatgaatttttagacaattgcaatattcaattttatattacagaacatcactatgaatatttttctgaaaaattttcagataaaattagagagtatgttctggggcattataatgagacaagccaattggaggactaa

SEQ ID NO: 452715 - DNA, 144 bp, Serratia marcescens
atgaaacgtagaagcgcggacagaatgggcaacttttttatggggctggggctggtcgtgatgatcggcggtgtcggatactccattattgctgaagtatcccagttcaatttaccgcaattttcgcccacggcgccatcatga

SEQ ID NO: 452716 - DNA, 321 bp, Serratia marcescens
atggcacgtaaagcgcgcgcagaaatgattgaagaaacccgacaaaaactggtggcggccgcccgtcagcagttcggcagcgtggggtatgccgagacggtgatggatgaactcaccgcgcaagccggcatgacgcgcggtgcgctctaccaccactttggggacaagaaaggtttgtttttggccgtcgtgcaagaaatcgacgccgagatagatgcgcgcttggccgacattaccgcgagtttggcggatggctgggaggcaccgcgagtttggcggatggctgggaggcgtttgcggcgcgttgtcgcggttatttga

SEQ ID NO: 452717 - DNA, 1338 bp, Serratia marcescens
ttggaaattaataattttcaagctgagtcagtatatggatatttaaattttaatattgattttaatgatgacctatcttttttagtaggcagcaatggcagtgggaaaagcacagtcataaaactaatccaggcattgataacagttgatatcaaagagttattgacgattccatacgagcaaataatgctcacatacaccaataaaaatgagaaatataaaatagtttcaagaaaagatcgtcaacacatcagaatagttcatacagatattgaagaagcattaatcatccctatacttgccaaagaagaattcattggcagcgatagagatgttaaagttttcagtcacgctgagagagatttagctactaatgccacacttagaaaaataaaatccatagtcccacctgtatttttagggctagatagaaaaaccttcagttttgatgatcttgatctagattatgaaacgacaatttctcgaagaaatgatattttgatgcatagaaaaatgctagcatctaagaaaagatcaattacaggaagtttaggggaggctttattatctgtcgaaatgatcattcaagataaatacagaaaaataagggaatttgaagacaagcaagctatctaccttagagacagaatattaaaatcctcgtttaaattcaatagttacaatgaagtgttctctaatgggcgagatcttgtttgggaagataaacaaaaaatactcaaaagaaaaaaagaaatcaccgaagcagttaaaaaaatcggtagcttagataaatcattaatgatcgatattgagaagtttttcgataatttgagtgacctatttgaagaattaaaaagtagtgatggcctccatataaactggctacttaataaagttcagattgatagaatatctgacatccttgatgtgattgacgaatataatgaaaaaatagcccgaatgtataggcctattaataactttctgaacacaataaactccttcttgattgactctagaaaaaaggttgaagtaaatactgttggcaggcttgttgtttctcgcccagacaacgaaaaatgtgatattgatattttatcttctggcgagcgccaattattggtaataatagcaaatgtcatgcttaacaaattcacaaacatcagtagagtcattattatcgatgaaccagaaatttcgctacatctaaaatggcaggaaagattttcagaaaccatattagcaattaatccagaaacacaatttattatggcgacacactcccctgatatcgtaggcgacttaactgataaatgtattctggtgggagcgcaataa

SEQ ID NO: 452718 - DNA, 846 bp, Serratia marcescens
atgttagaacgtagtttagccgcacgtaaagcaaaatcagtgttctttgaagaaagaaacactatagatatatacatagaagacacggctattggatataagaaaatctataaatgcatactaaatagagtactaggtgagaagtatctcatcaatgatgttttccctttaggtggtaaatctgcagttattcactcatgggaaaacaatgaaaacaagcgcaaccggccacaactccacatcatagatggagacatagatttattaggcggcattcgaaggtgcgaagctggactttatacgctaccgtactattgcatagaaaacatttttctttgcgaaaactccctgcttaatatactcgttgaagaggatccagagagagagagagatgaacttagtcaactattcaatttctcggaatggaatcaattaaatatcaaacctttaattgagctttttatcgtatatttcctcactaaaaaatacattccggaaacacctaacgttcattatcaaataagtaagcttgttagtaataattctggtattgttgacaaccaaaaagttagagcaagaattattgaacttgaaagtgaaatacaaaaaatcatatccaaaacaaaataccttgaagagaaaactagtattcatgcaactattgatggtgatttcaatattaagaaatatatctcaggcaaagactatctactcccattaataattactcgaatgaaaagcattgttaatacacgcatcagtaaccttaatctgaaacatcgggtaagtcagtattgcaatactgatgatataaatgacatcgaaagttacatatttcttccataa

SEQ ID NO: 452719 - DNA, 522 bp, Serratia marcescens
atgatttgcttagatgttgacattgcacaatttatgacttataaattctggaatgaaagagctgatattattacgggttgcattgccgccattgctcttttattcactataatacagctaagagcaaacaaaagagaagctcgaagagcaaccgcatataatacgtatcaagaatacctaaggctgtgctttgacaatcctaaactcgcttatggtaaagagaatgagataagaaaatttgatggcattgatataaaatacccttggtttatatctcaaatgctgtttgcatttgaacaaatattagaaaatgatatgtgtgacccagagtgggaaacatctattaaatctcagttgttacgtcattcttggtatcttaaaaactctaaaagtgctaatcgtaatgaatggaatattaaattaaaaagtataattaaagaagtatccgtaattgccaattcatcgagttcaaaagaaaaagagtcccctgacattagcaccacaaattacaattcaaattag

SEQ ID NO: 452720 - DNA, 1317 bp, Serratia marcescens
gtgctgatagtccgtgacaccgataaacagcagcaggatgtggcgcagctgaaccgggatactgagcatgccaacgacggcagcatcagcccgatattcaacaaggagaaggagcaaaaccggctcaaacaggcgcagttgattggcgagattggcggccaggcgatggacgtcatccgcacgcagggagatatcgccgggctgaaggcgcagaaagacccggcggcgctggcgcaggcccgggagcagcttgagaagagcggcaaaccgacgaacgatgcggcggtgatgaagcaggcgtacgacaacgcgatgcggcaatacggcaccggcagcgacctgcagaaggcggcgcaggcggtgacgggtgcgctgacggcgctggcgggcaacaacctggcgggtgcgctggcaagcggtgcctcgccgtacctggctacggaaatcaagaaactgaccaccaatccgctgaccggtgaagtcgacgttgctgccaacacaatggcgcacgctatactgggcgcggtgacggcgcagttgaacaatcagtcggctgctgccgggggactgggcgcgggtggcggtgaactggcggcgcgctatattgccggtcagctgttcccgggcaagacggcagagcaactgagcgaaagcgagaagcagaaggtgagcgcactgagccagttggccgcagggcttgcaggcggcctggcgacgggggatactgcgggaacggtgaccggtggacaggccgggaagaatgcggtggagaataactatctgagtgcgggtcagatagatgactttgcggcgaaggccaaaggttgtgaggcccgtggtgactgcggtcagatcgtgaaggaaatggaagacctgagcctgaagcaacagcaggaactgatcgccgtctgttcgactaatccagcggcctgtaaagagaagtatggtgatataccggctaacgggatgttggtacgtgaagcgatagatcgtgtcttgggtgatgatgtgccgtcgaagatgaagaacgatatgtcttcattgctggcgcagcagatcgaagccgaaggcgttgtgtctagcaccgaatttgcgaataggctccagagtatttacggcatcgacaaacaacaggccgaactgttggcgggagccgcgctgggggcagttaccagcggaatgagtaaagggggcaagcctgcttcgggtactgaaggtaagaacatcgttgttgtagactccggtaagaaaggtgcctggaacaaagcgatgaataaaccggaaccgaatacggtttaccaagttgatggaaattaa

SEQ ID NO: 452721 - DNA, 129 bp, Serratia marcescens; identical to SEQ ID NO: 235309

SEQ ID NO: 452722 - DNA, 2469 bp, Serratia marcescens
atgacgatgaataacaaggccaccaataaaacatcggtgctgtttttttgtgttctatcttcacctgcggttttagctgaagactactttgaaccctcagcgctgaacagagattaccagaccataactgacttatcccactttaatagtgcgcgcagtcaattgcctggtgagtattgggttgatatctatttgaataatgtatttttcgctaataaaaaagtgtctttctattatgtggatggtactttgcagccccgagtctgtcgcagcgctctggttaacctcggtgttcgcatggacaaactggaagtaaacaatgacaccgaccttgcctcaacgcctatcagcaagattattcccggcagtcaggccaagtttgattttaatcgacaacgattggatttaaatatcccgcaggcttatatcgaaaatcttcctcgagactgggttaaccccgcactttgggatgatggcattcgcgcatttttaatggattacagttttagtggtaccgagtcatggaaaacgaaaaataaaaaagataatggaaatcaatatttaaacttgcgcagtggttttaactatgatgcctggcgcttcagaaactactctacctattcaaaccaaagcagtactaaatggaaaggtatcaacacctatgccgagcgcagctttcgggacagcaaaaacacgctgaccattggcgatagttcaacatcgggcgacgtttttgacagttttcaatttcgcggtctgaaattagcaagcgatcccagcatgtggcccgacagccagagagggtttgccccaacggttagaggtatagcgcaaagcaatgctgaggtcactataaaacaaaatggctatatcatttatcaaacacatgtacctgcgggaagttttgaaataacggatatctaccccaccacctccagcggtgggctgcatgtgatcatcaaagaagccgatggctcagaaaggagtttcttccagcctttttcctctgtccccatcatgctcagggagaacatgataagaaatgaattcacaatgggggaatatcgctctgcgcgaagcgctaaccaaaagtataagtttctacaggcatcgacgatttatggccttaaagatgataaaacactctatggtggcgccattatttcggaaaagcaccagggaatttctgccggcattggcagcagcctggggcatttcggctccgtctctgccgatgtcactcacaccaaaagccgattagccacagggcaagatcgtaaaggacaacaataccgtatccagtacgcaaaaaatattgaagcaacgggtaccaactttacgctggccggctatcaatactcgacgtctggctacttaagtttctcgcagctcagtgatatgaatgccaacattgaaagaaactggctggcgcgcggcgtgaaaaaaaatcggctggttctcaatattaatcagcctatccgtgatttcggcagtctatacatcaatggttaccaacaaaactattggcacagcgatgccgttgaacgaaattttctcatgggattttccacgaaccaatctggagtgagttacaatattggattgggctacaacagcggccgctatacggacaagcccgacaagatcgccacgcttaacgtccagattccattaagcaaagggcaatcaaacagctggatgaactatacctcgagcaagagcagcaaaggcaaactcaatcagcaattagggctaagcggtaccgcactggaaaataaccagctcagttataacgtctctgcagctcaaagcggtactcgtgacggctattctggcaacagttcggcttattatcgcagtagatatggtgaaataggcgccggatacagctttgataaagatgtgcagcgaataaactacagtttacgaggcggcgccgtggttcatcgaaacggcattacactatcccaatcgctgggtgacactattgctttagtcgaagtgccaaatgcagacaatgttgaaatcatcaacagtaccggtgtcaccacagattcgcgaggctatgccgtggtgccttatatcaacagttatcataagaatcgaattaatttaaacccgcagtcctttgatgactcagtagaaatagagaacaatagccaaaccgtcatcccgacgaaaggcgccattgttgtcgccaactttgcatctaacataggaaaccgaattattttcaaagtacatcatcgtgggacggaaattcctttcggcgccgttgccacattgcgcggcgacccagcgaaatcaggtatcgtcggcaataataacgcggtctatatgagcggcatgccagacgctggaacaataacattgcgttggggagcgggaggaagctgccaggcaagttacagtatagagcctaacgattctgcctcaagagttaagcagattagcttgcaatgtgaataa

SEQ ID NO: 452723 - DNA, 270 bp, Serratia marcescens
gtggggataggatacttactctccgcgaaggtactgtttgccatatcgaccggtagtgtgctagttatcgtgctgcagtttattaatcagcttaaagtgcattattataaagacaaattgatgttctccgatctctttatgctgaccgacctctcaaatatcggcacgttgtttcattatccggaagctgggttggccttggtcggattgggagggatgcagtaccccgtcgacgtggggttacgccgagagtcgttgctctttgtatga

SEQ ID NO: 452724 - DNA, 1590 bp, Serratia marcescens
  misc_feature (1049)..(1058): n is a, c, g, or t
atgaataagaactattttgatgttgtgatcgtgggtagtggcgcggctggctgtgttgttgccgattatcttgcaacaaatacgcaggcaagtatcgctgttctagaggccgggaagactgacctggatccaatgattcatatcccagcaggttattctgaaattcttgcaaaggataagcatgtttggctttacgagacagtaccccaacacgggcatgttcaaaagttcagaatgggtaaagttgtggggggaggaacatcaataaatgccatgtgttatgtcagaggacaaaagcgtgactttgatacctggcaacaatctgttaacgatgaagaatggtcctatgattcattatggaaaacgttcgttgaacaagaaaataatgatactttccataataaaaatcatggcattagcgggaatctttcagtacaacttccccatggtattaacaaattaaatcagtactgtatgaaggcatttcaagagtttgggctgccttataacccagattacaatggcgatagccaatttggtgtgtctcctgttcaaagtaatataggtgatcagaaacgttgcagtgcagttgttgctcatctacaacgccatatcgattcagaacgtgtggttgtgctaacaaatcatacggtaacaaagatattgtttgatggcgatgatgctaatggtgttgaagttgatgtacaaggaaagaggaaagtcatttcggcagggcttgtgatcttatctgcaggggctgttcaatcaccaaaaatattgatgcactcaggtattggtcctaaagaagaacttaataagttctcaattcctgtaaaggtagatcttcctggggttggcaataatcttcaagatcatccagtggtaactgttagtgcctatgtgaaaggaaaattaggctaccaacaatctgctgttgggtttggtatgataaatacaggtataaagtatattataagtaaagatggcccggcagccggtaatggtcttgaatctgtatcttattggaacccagtggggggaggtactgnnnnnnnnnngcaatgttatcacgagcctattatatctacaaatagattaagccctacaggaactcgatctggaattacatttgcgttgatagttctccagcctcgtagtaaaggctgggtcagattggcggataatgatccactgtctatgccattaataaacccgaatttcatgatggaagagtatgatataaataccgctgttcaggctgtgaaagatataagaaaggtaatgaagcaacaatctttatgtgatttgatagaagaagaagtaatgccgggaagcaacataaaaagtgatgagcagattgcagattttgttaaatcggtggcaaccacgatgttccatccagttggtacgtgcaaaatggggacggataaggattcggttgtggactctaatttaaaggttcatggtgtgaataaattacatgttatcgatgcatcaataatgccagcaataactagtgggaatactaatgctccaacccaagcattggctttaattggggcaaaaaaagtaaagaatacttatttctaa

SEQ ID NO: 452725 - DNA, 465 bp, Serratia marcescens; identical to SEQ ID NO: 452641

SEQ ID NO: 452726 - DNA, 219 bp, Serratia marcescens
atgggattgttgagatgcccaatgcggagtctggcagacaacatccaggttgatagcttcaggtcgtcttacttttaccccataaccttccaaaatggacgtcaactcctgaaagtcttcttccatttcgctttttacgcgttcgataattggtgttggatttttttgctgaacaaaatcctcctgcagatcaaagaaatttctggaggaaatatctaa

SEQ ID NO: 452727 - DNA, 210 bp, Serratia marcescens
atgacggacgggtatgactgttaccagaatgcgctggcggaacgggtaaatgggatacttaaaacggaatacctgctcggcaggccagaagacatcgtacaggcaaaaaagatggtcagggagtcggtgaacctctacaacgcacagcggccgcacctgtcgctgaaatacaaaacgcccgatgaggttcatcgggcgttatccggctga

SEQ ID NO: 452728 - DNA, 237 bp, Serratia marcescens
atgcataccaagtcgctgcgagagatatacggcagcgcccactccactctgttccagcgagacgcactccccaacccactctgcctgccgagtcaggtcagtcaatattcttccagggggcatttcaatcgccaacctggcatcacgttcattcgccgaaaccacagcctcctgccaacgaaccttgcgagccatattcattgccaaatcgtcggcaattcgttccggctgccataa

SEQ ID NO: 452729 - DNA, 612 bp, Serratia marcescens
  misc_feature (596)..(605): n is a, c, g, or t
atggagcaggtagacaataagccgtggttaggcgaagcgatcgatcgccgcaagctgagcgatatcgccaaactttggtacaacctgcacggccaatccctcaccgctggtgaacgtacctacaaaaaactatgccttgtcattgaagctctgggcgatccccctgctaccaccttcaccgcaaaagacttcgcgcattatcgtgataagcgcctgtccggtgaaatctacttttccgagaagtggaagagcggcgcagaaccagtcaccgtcaatcttgaacaaagctatctaagcggcatgttcagcgagctagcgcggctaggcgaatggaaccagcctaacccgctagagaacatgcgcaagtttaccattgcggaaaaggaaatggcgtggctgacgcactcacaaatcacagagttgttcgcagcctgtagcaaaggcgatactgatttgccgcttgtggtcgaggtatgtcttagcaccggcgcacgttggcgggaagcggaaaacctcacccggtcacaggtaacgccccataaaattacgttcatccgcaccaaaggcaaaaagaaccgcagcgttccgatcagtannnnnnnnnntttatga

SEQ ID NO: 452730 - DNA, 231 bp, Serratia marcescens
atgacggcgctagaaaacaccagcattcaattgcccaaaggccaactgacccatgtgttacgccatacctttgcggcgcactttatgatgtctggcggtaacatactggtattacaacgcatcctcggccaccatgatatcaagatgacaatgcgttatgctcatctggcatcagaccatcttgaaacagccctgtgctttaatccattagcaactatgccagtaatgtag

SEQ ID NO: 452731 - DNA, 744 bp, Serratia marcescens
atgaaagctaatggttattataccgtggttctcactccctttaataagtcagcttataacgccggccacgcctataccatgatgggagtcgataaaattatccaaccccaggaattaggttatcctggtagcttgcaggataacctgtggcatatcagcaccgccgacatactgcattacatcaaaaaaatactggatacccatactgacaagccagtgtttgtttatgcgttgaccatgtatgagcatgggccttatgacgctagccacaaagataactatcaactgaggccagtggtaacaaacaaaacttccgcagctaagttcagccactatatggaaaaaatacaaacctccgacgcagcgatgtcagaatttttccagtttatcgatcagcgtcaaaaacccacaatgtttatgtattttggtgatcatcagccgaatattgattgggagaatgggtattcgacatcactaccagatgccgcacatttgacgcagttcagtttgcgagacaatgccaatatgcagcctgttgcagacttggggtcgataactgatatcgcctttttaggagggattctgcttgaacaagccagactaaaggtgtcgcccttctatcaggctaatatcgacatgcgacacttgtgcaaaggggctttgaacgattgcgaagatcaatcgctttttaacagctataggcactacatttataatattcttaaggtggcttctcaggactga

SEQ ID NO: 452732 - DNA, 789 bp, Serratia marcescens
atgatctgcctggcgatcggcatctatattttgcgcgcagtgcggcgctggctgggttctgaactgctgccgaaaaccatctcggacgtcggcattcgcgcctcgctggtgacgctgttcagcaatatcggctatgtgctggtgattctgatcaccctggcggcgctgggcatccagtggagcaacctggcatggatcgtcagcgccctgtcggtcggtatcggtttcggtttgcaggagatcgtgaagaactttatttccggcctgatcctgctgaccgaacgcccggtgaaggtgggggacatgatcggcatcggcggcgtggaaggcgacgtgcggcgcatcaacgtgcgcgccaccgaaatccagctcagcgaccgttccaccatgatcgtaccgaactcgcagctgatctcgcagaacgtgcgcaacgccaccatgggcaacgcgcaaggggtggtgaccattgcgctgacgttcccgacctccatcgatccggagcaggtgcgcaatatcttgctcagcgcctataacgagtacgaaactattctggaaacgccggcgccttacgtgcgcttcagccagctggggccggacggcatcatcctgagcgtgaccggctacgtgccgagcccgcgcatggtcggcgccaccaagagcgaactgctgttcaatatcctcaagctgctgcgcgcgcaggaagtgagcctgtccagcccacaggaagtggtgtttatgaagcaacaggcgacacgataccaggccaacgaagaggagcactcctcctag

SEQ ID NO: 452733 - DNA, 1755 bp, Serratia marcescens
gtgttctgcagcggtgaggcgctgtcgtgtgaactggcttcccgctatcaggcgttggttaccgcgccgctgcacaacctgtatggcccgacggaggcggcggtcgatgtcacctaccaaccggcgtccggcgcggcattggcggcggtgagcggcgccggcgtgccgatcggcaaaccggtctggaacacccagttgagcattctcgacgcgatgctgcggccggtgcccgtcggctgcgccggcgatctttacctgcgcggcattcagctggccgatggctatctgcatcggccggggctgacggcacagcggtttgtcgccgatcccgccggcaacggcgcgcgcatgtatcgcaccggcgatatcgcccgctggctggaagacggtagcgtcgagtatttagggcgcagcgacgatcagctgaagatccgcggccagcgcatcgagctgggggaaatcgagcaggcgctgctggcgcagccgggggtagcgcaagcggcggtgcacgccatcgagctgggcgagggcgcgacggggcttggcggtgccgatatgcgccagctggtcgcctggctgatcgcccaaccgggcgtgacgctggataccgccgtgctgcatcaggcgctggagcagcgtttgccggcgcacatgatgccggtcagctatgtcatgaccgacagcttcccgctcagcgccagcggcaagctggatcgcaaggcgttgccgcggccgcagctgagccaccaaagtggccgcatgccacagagcgacagcgaacgcctgctggcggcgctgttcggggaactgttggggcgcgagacggtgtatgccgacgacgacttcttcgcgctgggcggccattcgctgctggcgatgcgtctggcggcggagctgcgtcgccgcgtgcctcggccattgagcgtcgggcagatcatgttcgcccgcagcctggagaagatggcgcacctgctcgatgacgcgcaggcggccaactcggccgagagccgcggcgtcggcgaatgcctgcagctgcgggccggccaaggcccggcgctgttctgcctgcatccggcttccggtttcgcctggcagtactcggggctgagccgttatctgccgggcagttaccccattatcggcctgcagtcgccaagaccggacggcgccatcgccacctgcgaggatatcgagcagatggtcgatcgtcatctcgccaatctgcgccgcctgcagccgcaggggccttactacctgctgggctattcgctcggcggcacgctggcgcactcgatggccgcgcgcctgcagcagcagggcgaagaggtggcgttcctcggcatgctggatacctatccgccggaaggccaggattggaccggccccagcgaggaggacgcgcagaaagaggtggcgcaggagcaggccgagtttatggcggaagatcatggcgatccggcgctgatggcggagaaggcggcaatgttcgacagcatcgtcgccaactaccgcgacgcggtgcgcattctgtctcaggcgcgcagccggcgtttccacggcacggcgacgctgtttgtcgccgaccagacgctgccgccggagatggacatcgacgccgtgtgggcgccgtatctggatggactgatctgccatcaccagcgctgcgaacacgcggacattctgtcgccggcttcgctggagacgctcgggccgctgttgcattcgttgctgacgcggcaatacgggctggtataa

SEQ ID NO: 452734 - DNA, 645 bp, Serratia marcescens
atgaagagcacggtatatccaatcataaataaaaaattaactatcgccatcatagacgatgacaatttttacatggcaggattgatcatggcgttatccacctactttaaaagtaaaaataggaaaattaaatttattcttggtcgttcaatgacggaacctgcggatattatctttcaggccatccgctgtggtaccttcatcgccccgcgtagccaatatcatgccaacagcggtaaatcgcattattttgccatcgtggataatagggattttcacctgcaacacctctatcgcgacctggaaaaaaacaatgtcttttaccggcaccagtcggtgaagactttactgcaactgattgaaaaaaaaattttcctatcgcaatcattacccgggaaacatccgcccgaagaacaggtttttctccgtgaaccgctcaccctgcgcgagcatgaagtgttgtgtcacctcgtgcagggtaaaacacatgcctgcgcggcaaattgcctgggcatcaaagtgaaaaccataagctctcacaagcgcgcggcaatgaaaaaattaaatttcagacgcactaacgaactcttccattggatgctgcaggggggtttatcccgccaccagccaataaaaggacattaa

SEQ ID NO: 452735 - DNA, 744 bp, Serratia marcescens
atgcttagaaataataaccaactaacagtagggttatctaacccggcaacgcgtttgttaagtgagttgataaaaaataataaaatcgaattgccgcgcgaaacgctaatcaagcacgtctgggaggactatgggttttccccctccagcgctacgctaagtaatcatataagcgagttgagaaaagcctttgaggcgcttggggtaaacaaaaatattctggtcaccgtgccgcgaataggtttcaaaatggaagcggaaatccaccccgagaccaagggaccgaaagaacctgccgcgattgaaaagagcgagaatgcccccacaccccgagagccggagccagaaagaaatgccggccctttattaatagacgctgaatcaaagaaaacaccgcgcaggacaaaaaagccggtgttttttctcggccttgcgctgataaccattgcaacagcggcaacattcgttgccctgaccaaggatgacaaaccaacgttggtcggtgttcaggataaatgtaatatttataccctggatgatagtaaacaaggtatcgaacagtccgatagggcgcgaaagatgctggccagagagaagatagattgcacacagagagctcatgatatcttctatatggaagctcgccccaccaacgagttgttcaaagttcattttatggccgcgtgcaccaaaaatgacaatgtgaattacaaaaactgcaacaactacaaatcggtcgagtaa

SEQ ID NO: 452736 - DNA, 870 bp, Serratia marcescens
atgaagcatgctttatgcgcatgtgcgatcaatatctgtatgagtgtatacccgtcagtcgtgacggcaacgtccggcgttgtctctccaggatacatgagtaatccccctgcaactgggtacgtcaacaatgcagttggaccgtacacttatggcaactatgttcctggtgcgtcgacgacgtgcggagggggtatatgggtgtatagtggtaacgaaaatgggaagtattacttcaatacttactacgaatccaacgccggcaaacctgcggacggaggggttaattgttacggcgaattcattagtactaagatgaccaagaatgaggcgacggaggcaatgacgagaattttatcgcggccggtttcgtttccactcaacgcacccaatctccctaattattacccagcacgggcaaacacatgcgcctttaatgtgtctttccgttatgggcctaagtatgggtacgtcatctccgcgtacgctaacacatactacacacgtccagatgagtgtcgcatggaaagcaatcctgaacccgtgcattgcaacgtctacacgcctgggacgatcacgcatcgcactaccaacgtaggatcggtccgagcaacagcctacggtcaactgaacatcgaatgtaatagagaaacagatgtgaccatatctgttggcgacacctatctggacctcgcatccgccgacggactgcttgaatctcgcatttatgtggacgaaaccggtcaacaatcgacacgtttacatgcaaatccgcgagtggatgtaaccctgatcagtttcatcgacaccgtaactacccggcccggggtctaccacggggctaaactgataacagtgacttgggactga

SEQ ID NO: 452737 - DNA, 1524 bp, Serratia marcescens
atgggcaatatgatcgatcaggaccgtatcaaccgcgtgctatggggcgtatgtgacactttccgtggcaccatcagtcctgatacttacaaagattttattcttactatgctgtttctgaagtacatctcggatgtctggcaggatcactatgatggttacaaagcccagtatggcgatgaaccagagctgattgaagagatgatgaagaatgaacgctttgtgcttccgcgcaatgccagcttttatgcactttatgctcgtcgcaatgagccaggtaacggggagcgcatcgaccaggcattgcacgcaatcgaagaagccaatggaactaagctgaaagatggcgggaaaagcgtgttccaagatatctcttttaacactgacaagttgggcgaagaaaaacaaaagaactctattcttaagcagttgcttgaagactttactgaccctgagttgaatttaaaaccaagccgcgttggcggtctggatgtaattggtaatgcttacgaatacttaatcggtagattcgctgctaacagcggccagaaagccggagagtactacacgccgcctgaagtgtcagatctgctcgcagcgttgcttgacccacagccgggggaatctatctgtgacccaacctgtggttctgcttcactactgatgaagtgtggtaagtgggtcgctcaacaataccacagtaagaattatgaactttacgggcaggaagcgataggttcaacctggtcgctggctaaaatgaacatgtttctgcacggtgaggataaccacaagatcgagtggggtgacacgatccgcaaccccaagctactcgataaaaatgccaacctgatgctgtttgatgtagtcaccgccaacccacctttctcattggagaagtgggggggggatgatgtttcttcggatccttatggtcgatttcgtcgtggcttaccgcctaaaacaaaaggcgactatgcgtttatcttgcatatgatcgaaactatgaaacctaaaaccggtagagtcggtgtcgttgtgcctcatggcgtattgtttcgtggctccagcgaagggaaaattcgacaaaagttaattgatgaaaatttattggatgccgtgattggcttacctgaaaaattattttttggaaccggtattcctgctgcgattctaatttttaggaaagataaggtcgataaaaaagtattgtttatagatgcaagtcagaattttatttcagggaaaaaccaaaacaaactaagcgaaaaaaatatagaggatattgttggcgcttatagaaatggtgatgacattaaaaattatgcgtatctttcctctttggaagagatacatggcaatgactacaatctaaatatctctcggtatgttaacacttttgtaacagaggaggaaatagatttacccacaataattaatgaaaggaaaaacatcgacatccagataaatgaactggagaaagaaatggaaaaatatcttaaggagctgggatatggtgcctga

SEQ ID NO: 452738 - DNA, 1209 bp, Serratia marcescens
atggtgcctgaaaattgggagaaaaaatatctcaaagatattttgtccgaacctataaaaaatggctactcacctgttcctgcagaaaatgcaactggtttttgggttctaagccttggtgcgcttggggataatggcatcaaattatcagaagtgaagccggtgcttcctaatttaaaaacacatcagacacaaattaagcgtggtgattttttagttagcagatctaatacacctgaaaaagttggtcgttctatattgtttaggggggaaatagaaaattgttcgtaccctgatcttatgatgcgttttcgcgtggatgaacttaaagcaaacccattatttattgaacaaaaattaagaagtcatgaagtcaggaactattttaaaaataatgcagctggtagtagcagtacgatggttaaaattaacaaaggtgttctagaaaaaacacctttactacttcctccgctgaaagagcaaaataaaatagttattattctttcaacttgggataaaatcattagtttaactgaagagttattgattaatacgataaataaaaagaaatctttaatgcagaagttattgacgggaaaggaacgtctaaatggattcagtaaaaaatggaataaaattaagatggaagatattttttatcctgagtccattaactcattagaaaaagattatcctatttactccgttacaaaaaacggcctggtaaatcaaggcgattattttaaaaaaaatgtagccagtgcagatacatcaaaatacaaagttgtaaaacccggaagatttgtaatgagtggcttgaatttttggatgggtgcagtggatgttaacatggcatgtttccctgttactgtatctcctgcctacaaggtttttaaaatatctgatggcttctcagtagcatttatttatcatttcattaaaagtgacgttttttcaagagcgcttgaagattcctctattattggcgcatctatagttagaagaaatttcagcaaaaatattttttttaattaccaattttctttgccaaatatagatgagcagaaacatattactcaaattctggatttggctgataatgaaattatgcatattcaaagaaaattggaatatttaaaacaagaaaaaaaggccctgatgcagcaactgcttaccggtaaacgccgagttaagacggaggccgcatga

SEQ ID NO: 452739 - DNA, 210 bp, Serratia marcescens
atgaacacatcacctgctctgctgaatgatcagcttgttaatatggcattcataactacctacaccaactgcagcgataaatggttctacaaactcatcagcgaagggctgttcccgaaacctatcaagctggggcgcagctcccgctggcttaagagcgaagtggaagcctggatgcagcagcgtataactgactcgcgtggtcactga

SEQ ID NO: 452740 - DNA, 660 bp, Serratia marcescens
atgtatgaagatgcattatattcaatagcggaagcacttaggcttgcagctagtcgccataaacaactagatcttgatcctgctgagtttggctccggtttcaggattttacccactataggggaagatactcagacattggatctctttctatatgatactttgtctggcggtgcgggttacgcggaagtagctgcagcgaatctagatgacattcttactgcaacactcgcattattagaaggttgtgagtgtgacacatcctgtacagattgcctcaatcatttccacaaccagcatatacaaagccgcctcgatagaaaactaggtgcatctttacttcgttatgctctgtacggaatggttcctcgttgtgcttcacctggtattcaggtggaaaaattgtctcaattaagggcaagtctggaattggatggtttccaatgtcttattaagggaactcaagaggcacctatgattgtgagcttgaatggccgttctgttgcagtgggaagttaccctggccttattgatcgaacagactttcaacacgatgtatataaggctaagaagactaatggtcatatagcctttaatgaataccttcttcgttcaaatctgccacaagcacatcaaaatgttaggaaattgttgcgctga

SEQ ID NO: 452741 - DNA, 1050 bp, Serratia marcescens
atgagcgagtcggttaaacttagtttttatcgagtacatgaatgtggttactactcatggggtaataatactcctgtttttggctcacttcaggagctcctgacagatcttcacctttggagcacggataagagcatagaaaacactaaactttatgagccacaggttggtagtgattatcttgccacttacttattggatatcaatagattaggcgatgattggttagttactacctggaatgaagttccatcaaccgaagcgggagttgcttctgtgattagggattcaagtgttactgcgcctgatgtagttatgaaccagatacaagataactctattcctggttacgccacatatttttggattttacctagttatggcttatttgccagtttgcggttcaaaaatagaactcaaacagggcaacctccgttcaggaaatatattgaacaagctctttcattgatatcttcttatgtgagatatggtgaggatgaagaagacggttccagacgggtgattggctatgcaccaaccggagaggatttaatgagtccaggtccttctccacgttttaagacatctctggcatatgatgttggtaatcgagagtacattagggaaaatgctaatcgagttagcaaaattattcgtaaagagacattgaggttaaaccatgctgatgaacgacagtggtggcagtcagctttaagccgccttggcattagtagtggtcacgattaccggagaatggatgaggtgaatgtaaggtatgaattgcgtccggagttttttggtttacaagatgttgattcaatgatgcaggagtgggatgattctgaacatgtgcgttcagaatgggatgattatggctttacgtttaaaggtaattccgctaaggttcattggttgagccatagtacactgacagcattcactgaactaaatgttgtttgggataataacgaagtcgtcaatggggaatcgttattatcacttttaaccgctggtaaggctgtgcttctacaacaaatacgcgaggagtaa

SEQ ID NO: 452742 - DNA, 546 bp, Serratia marcescens
atgtttcggaatatactaaagtcgttcgtcatacttttactcatcgggctgatcagttcggggttttggtatggacgaaatattccgtttgcccagcagtccccactttttgaagctcttcgcacaacagcatctatcatatttgctgttgtaggagcatggatggcaatcatctatccagaaagattacgcttcacattcaaaccaagcagtagtgaaaacacttccatgccagtgaatatgggaaaattactacatcctgctgtaaactcaacatttattttgtgtattgtcctctttgttggagttttagcgccagtagttaagcaaatcccctatttacttccttataaagaaccactacgaggtttgtcgtttagtctgctcatgatgctcacattttggcaaatatggacggttattttaaccttggttcctgctgatatgatcaaaaacaaagtggatcatgaaaacgcaaaagttacaggccgaaagagttttttctcgcaaactcaaaaagttagtgataaacgtaataattcctaa

SEQ ID NO: 452743 - DNA, 510 bp, Serratia marcescens
atggctgggtttttcgctttctgggtacggactctccatcgaactgcgttcgattattcggccaaaggcctcaccctgcgggccagcgctgaagcgctgttcaacgcggcgcagacgccggttgtccgtccggtcgccctattcagaagaacccgcctatggcggttttttgctttctgggatacggactctccatcgaactgcgttcgattattcggcctctcgtttcctcggcggaaccagcccaatcagtgccagtacgcaagatttagcgaccaacaccagattgagatgtccggggaaagcgacattaacaaaccaaaagaccaagaagaccgccagagaaatcggccaagcgagcacaaagagccgggtatcgcaaagccgccgggcgcaaaacaacagcgtcaacacgatcgccaacagcccgaaaggcagatacagaatcagcctcaggtaagaggcgacgacatcggcgaacgaggtgttattgatgacggaaatcgttaa

SEQ ID NO: 452744 - DNA, 153 bp, Serratia marcescens
atgacaggttactcttcattccgctacttctacggaggaatgaatttcagccgtcatgtttcaattttcagcttgttccagattgttaaagagcaatatcttaaacatgactcgaaagtcatctttaagatatggtgtatcgtcagatactga

SEQ ID NO: 452745 - DNA, 135 bp, Serratia marcescens
atgctcacgaaccttctttttaagtttggcttcgcgaagattcacattaactattatagagggatctttgtgcattcttatctcacgttccaattagtatttagtcccactaaatttcacttagagctccagtga

SEQ ID NO: 452746 - DNA, 714 bp, Serratia marcescens
atggaacaatctcttgaagatatggaaataccatactttgatggatttgttggcgctaaaaatcctttttttgatctaagggctcttgaagataatttaattccgcaacattggtctagactttggaaattacatggatcaattaattggtgtcagaaatcatctggaaataagaagagggtttttagatcgaatgcggagttaaaagaattatcacatttaatttatccttcgcatttaaaatacgaggaaagtagaaaaatgccatacttggcactgatagatcagttaaatagatttattagaaagaaatcttcttttcttatcctttccggttactcatttaatgatggtcatataaatgacgtcatagtcaatgcgttaaagtcaaatccaaccgcaatggttcttggattgctttttgatacatatgattattctcagcctgatagtgacgaaaagattgagcgatatcctgaggcttatagacttgcaaaaaaccagcacaatctaaatatatggacttatgaccgcgcaattataggtacaaattatggagattggagaaaaccactaaataatgaagatgacgataaggagattttgaattttatcgatactactaaagggacagccccgttagtaaaatttggcgacttctcagtatttactgattttttacaaaaaataattggttcgcctaaggagttataa

SEQ ID NO: 452747 - DNA, 156 bp, Serratia marcescens; identical to SEQ ID NO: 439881

SEQ ID NO: 452748 - DNA, 729 bp, Serratia marcescens
atgaatagagaaataaacattttcaataaaaaacttttatgtgttgctgctttagttttaacactccctattattgctttcatcgctaaatttcactccctgccattttcagaaaaaacccaagactggtcaagtttcgcctcttatattggtggggtttatggagcattatttgggtttttaaccacaataaccatatgcgctactctttactttacaataacattcaaccagcaacaaataaaccaattaagaagacaacaccattcagccttaatgaatatatatgccagtaacttgaatgaaaaacttgataataaaaagtataaaatatttagtccagacagtgggaagaacttaaatttagatgaaaaagaatttttggattatgcgaagaaaagatataatctaaattacaaaatctccctatccaataataatagagaacctcacatgcttatatctgggcataaaaccatagatgaattaaaactaagctatccgaatgagattgcaaacttaagtatgattctagagttaataaacacatgtccagataaagaatcacgagaacaattgattaaccaattacacgcgataacatacccagataggatgttctgggtgatgatctatgcctattttcaggtacctaaagcccgagagtgtattgcatttaacggtgaactattagtattagctgagggtttacagccaaaaaatccatga

SEQ ID NO: 452749 - DNA, 1023 bp, Serratia marcescens
atgactgttaaggtgatagaccttttttgtggcgctggcggattgactcatggcttgcaactggctggcttagatgttgtcgctggtatcgatcttgagggggagtgtcggttcccctatgaaagtaacaataaatcaaaatttattgaacaagacattgctagagtgacaaaagaggatctccttgaactgtatggtgatgcttccattaaagttttagcaggatgcgcaccttgccagcctttttcgaaatatacacaaggtaaggacaaagagggggatacaaaatggcctcttctttacgagtttgaacgtttaatccgagaagttaatccagacatagtgacgatggaaaatgttccggatgtcacaaaacataaagtctacgatgatttctttaattcattgataggtttgggctataaggtttgggcttcaagggtggattgtgttgagtatgggatcccacagaatcgtgcacgccatgtcttactagcctcaaaatttggagatattgagttagtaaagcgtgaagatatccagcttcgaacagttaaagacgttattgggaatttacctccattgaaagatggtgaagctgacaaaacggatgctttacatcgggctagtaagctaaatccaattaacaaaaagcgtattattcattcagtcccgggggggacctggaaagactggcctgaagaactagttgctgcatgtcatctaaaatcaagcggtaaaggctatgctagtgtgtatgggcgtatgtcttgggataaacccagtccaacaattacgactctttgttacggttttggaaatgggcgttttgggcacccggaacaagacagggcgatatctctgcgcgaagccgctctgttacaaaccttcccaatggattatgtgtttgtagaagataagtcgaaatttgttatgaaaagcatcgggaaaatgataggcaacgccgtacctgttgagctgggtcgagttataggacaatctattaagcagcatttgagataa

SEQ ID NO: 452750 - DNA, 684 bp, Serratia marcescens
atggacagttttcgcgaagattttgatatcaggtcgggagaaatcctggcctatctagatcttttaaaattcattgagcatgctggtgctgaactgttatcttctgacgatcacaaaaataaatttgccattacggctcagtcacgtaaaacattaaaaggaacagtatatatactattgtataatttgattgaatcgactatgagagaagctatttgctttattcatgatacaatatatgatagaaatatacatttcgatcaacttaagaaaaacttaaaatcagaaattctaaaaagattaaaaaatgattcagtaagtgttgaaaacctgattactggactaacagcaaagggaatatcttgcggtatttcctacggcactttcaataagaaaaaattattttcaggaaatatagatcgcgaggaaattaaagaaaaatcaaaaacctatggattttcaacaaactctgattacactcatactaaacacggtgaaaaattggcaacagttaaacaacatcgtaatgacttggctcatggcaatgtttctttcgccgaactgggcaaaaatgtttcatacgaagacttagaaaatgtttcactagaagttattgcatatttagattcaatagcaaataacatcgaacattatattaacactaatggctatcttgcttcataa

SEQ ID NO: 452751 - DNA, 1143 bp, Serratia marcescens
atggacattcttgagttgaaatcagaactaaaatccgaagaagattccaagagaagagcggacctgcttgctcagttagaagtatttaagcaagacgccgaagaacaggttcgtgctgagcaaaaagatgtagatttcgaaaccaaagaatttaccatagaacttctggttaacaagtatcacagtggattagaagacgacactaatgaattgtttgttccagattaccaaagggattttgtttggagtgaaaagaggcagtcacgtttaattgaatctctaattttaggatttccaatcccgtatattttcacagcagatgttctttctgaagatcccgaactggatggtcgcatagaaattgttgatggttcacaacgagtaaggacaatacatgcgttcattcacaactcattgacactacaagatctcaaatctttaagtgctcttaatggatttaattttcaagatctgcccttgtcaagacaacgccgttttatgcgaattccggtccgtgttattgagttaagttcaaaatgtaacgaagaaactcgccgagatctttttgagagaatcaactcaggtagtgatattcttaaggatatggaagtccgtaaaggttctgaactaggttcaacgacattatatacagaagtaataaaaccgtgctcagccataccacagtttaaggttcttgctccattatcagaagcaaaagagaaacgtgatgaacgcctagagttcacattgcgtttctttgcttatttagataattatcgagactttgatcattcagttcgcgatttccttaatgaatatatgttcaaaaacggagatattgacattgataaacaaaactcaatgaaagaagagtttattaatgttttaaattttgctgaaaaatacttccctgcaggatttagaaaaaccgtaacagcaaaatccacaccacgcgttcggtttgaatcccttgctgtcggagctgctttagctcttcgtttagagccacaactagcccctatgaatctcgactggattagctctgatgaatttaaagagttaactacttctgatggcgccaatagtcgtgtgaaagtaattgagagaatcgaatacgttcgagaccaacttttagagggataa

SEQ ID NO: 452752 - DNA, 1029 bp, Serratia marcescens
atgttaggtgcaattcaggcgcaccttgagtcgatcaaacaccctgttgctgaaaaagaaatactactaaacaaattaaagcttttcataagctcttttcattcagaaccggaaaaatgggatgaatacacccctttaaatatagagaaaataggagaggaaatattaaatcatgataatatcggtggcgatgttaatgtagacatatacctgcttcatgcactttgctttcgttttctcatagaacggtccatcacagacccagatggtataaacgaatcacttgaatcagtaaaaaaatacactattgaaaacatagagcagttccctgaaaaagctaaaaaccacataaagtatggattgctagcaatgccaacagacatatttaaatatcgaattggcagcagcgaattagcattaatgagagtgtttatagactcagaaaaaagtagtaaagaaacgttcaatcaatggagcgcggttctatctgacaaagaaaagaaggttgaggaattaaagtcagcattagaaaatcacgaaacagcatttaatttcgttgggcttcatgatggatttcaaagactgggtagttcgaagacaaaagaactaagaacagcaacatggatcattggaattttggctatattaatattattcccagttgctggcgaattcctttttatttacaataaaggcgagagcctcaatataactcatgcattaatatccgcagtgcctgcctcatccctaattttaatactgatttattatttcaggatagctttacaagattacaaatctattaaggcgcaattaaatcaaatagaattaagaaaaagcttgtgcatgttcatacaaagttacgccgactactcaatgaaaataaaatcaagcgacagtaacatactggataaatttgaaaatattatattttccaacatcctaatgtcagatgaaaaactaccatctacttttgatggtttagactcaatcgcctctatagtaaaagaaataaagataagaccgtaa

SEQ ID NO: 452753 - DNA, 237 bp, Serratia marcescens
atgtctgaaatgaaaatcaccggcatcgatctggctaaaacaaacttttatcttttcagtattaatgcttatggaaaaccagctggaaagataaaactttcacgcagcaacttactcaactggctcgcccaacaacccgcgatgactgttgctatggaagcctgcggagcatcgcatcactgggcccgggagatacaaaagcttgggctgaaccgtaccgggtttcttggagactaa

SEQ ID NO: 452754 - DNA, 519 bp, Serratia marcescens
atggctgacaacagaatgacattcagcgacaccatgatgcaactcggtggcgaggactttctgcgtgaactcaccgaatttatgctcaaccgcatcatggaagccgatgtcacacaacgcatcaatgctgagcaccatgaacggactgatgagcgtgagacctaccgcaatggctatcgcgaccgccagtacaacacccgcgtcggcacgctggatctgcgtatcccaaagcttcgggaaggctcttacttcccgtcctttctcgaggcccgcaggttgtctgagaaggcgttcaatgcggttatccaggaagcctggataaatggcgtctcgacccgcaaagttgatgccctgatccagtcgatggggatgaccggcatctcccgcagccaggtatcatccatctgtcgcggtatagatgaacgggtgcaggcgttcatgaacagaccgctggtaacactgctgccctggggctggttccccggcagttcagtaccggtggcaaacaagttttgctga

SEQ ID NO: 452755 - DNA, 420 bp, Serratia marcescens
gtgataaacaaattcaatggaatgactcgctcagcggtactgtgcctgttggcattgagcgccgccgcctgtcaaaaccaaaagtcgggcaagccggctgtaaacacccaaaatcaggctgtgcaagctccgtcagaagaggctttgcgcaagcagcgtgaggccgagcagctgcagcagtgccaagagcaactgggtgcattgcgcacgatcaacgagaaacagtatcagcgctataaacaggctttcgacagcctgatgagcggcgcttcgcagtacgccaacctgcgcgcccgggtaaacggtgacacgcaggagacggtggatgcgctgtatcgctacaaggtcaactatctgtgcgccggggtgaatcaggcggtgttgaccggcttggcggatcgcggggagcaggttaaatga

SEQ ID NO: 452756 - DNA, 1356 bp, Serratia marcescens
atgaggctgcgtctgctgggctgtgtcgctttgctgttcaccggcgccgcgcaggcggacgacggcgtgccggcgctgctgcagtttgccgagcagtatcaacggcagaacaccgggccggcgagcgaaaacgcggcgcccgccgaccgcggggcggggcaaaaaaagcgtgagccggcaaagcgtccgtcggatacccacccgccggcttcaccggccaaagcttttacgctgagccaggaattattggcgcgtgaccaacagctggcgcgccagcgaatggaactgacggtgttgcgccaggaactcaccgcgctgcgggcggagaaagcggcgccaccggtcgcggcgttgccggactcgtcaacgcttcaacagtggatcgccgggctgggcgccgcctggcgtggttcgcccgacgcgcagcgcgccgaggcgctgttgcgtcaggcgacgcaggaaaccgccaaaagcagagcgacggcggcgcaggccgaacggcgcgtcaccgaacttgagtctgccgcgcaggcatcggcacaaacgcttgcacaacgccaacgcgagcaccaggaggcgttgcacgctctgcgcgccgcgttagaagaaagcgagcagaagcgggccggtgagcagaaggcgactcagcaggcgcgcgaagacctgctggcgttgcgtaagcggctgcaatgggagatgacgccggagcagttgaaggatgaacgcaagcgtttgtcctatgcggcaggcagtgcgctggggcgggatattcaggggttgatgacggagcgtcaaagctggggcgtgccggtggagcgcgacagcctgttggcgggcgttatcgacagcgtgtcgggacgtttgcaactgccgccggatgaactgaatacgctgacggtgcaggcggatgccgccgccgtggccgcacgtgagaaacgcgttaaccagcagcggcggcgtgatgaagattatctggcgcagtttagtcaacaaaagggcgtaaagcagtcggcgatgggcttttggtatcgggtggattacgccggggagggcgcgctggcaccaacggcggtggtcgaggtggtcgtcaaagagaagctgaccgacggcacggtgatccaggatatggatctgagcggcaaggtgctgtcgcaaccgctgtccgaatacccgccgctgttccgggaggcgataagtcatctgcacaaccacggctcgttgacgatggtcgtgccgccggcgctggcctacggtgaaaccggctatccgccgaaagtgccgcccaacgccaccatggtttatgaattgcgcatcgacaacaattatatctcatcaaaaaagagtgatgaaaaatga

SEQ ID NO: 452757 - DNA, 123 bp, Serratia marcescens
atggtttatcccctgccgccccagtactggcacggcctgctgccgttcatgcaggtgcatgaaaagcgacacagaaagcgcgcaggcgaggcggggttagcattgcgcgccagggggttttaa

SEQ ID NO: 452758 - DNA, 555 bp, Serratia marcescens
atgattaaatggatgtggaaagttttattgtcagattgcaccccctcagttatatgcttttttttactattaaaaatggattattcaatattatctagttggccgcagaatcaatcaattgataatagagttaagctagctttgttatttatacacttgattatgatatttgcaattattgccccacttataagtcggttattatcacgtgtaggtaatgaaaggttaaataaatttatcgctctaccaaaatcggataaaaacatcacatatattgatttatatgactttttaagcggccttgctttatctgcgttttacttatccatcctactttttacaatgaaggaagtttacgaggtaactggatgggttatttccggcatatatgtttttttaatgtttatttctgccatttcaattgcctcactttcattaatgagatttatatggctgtttgttaaatataataaatatacctattcagttgttgctttacttgcgagtagtatgtgtatggcagttctaggtgtagccatgagaatggcctcataa

SEQ ID NO: 452759 - DNA, 1176 bp, Serratia marcescens
atgtcagccgcaccattcagtcttaatagtgaccttaagcgcttgcgtgaggaaggatactacgtacaaatcgtgggtggtttcttggtgatgcgtgaagtgccgtatgttaacgcgcagttggaagttaagaccggcacgctcatctcaagtctttgcatgtctggaaacgttactcaaaagccagagccgcatacgattcactttgatggagactatccgtgcaattcccagggtgcgcccatccaagctattgcacatcagagcgttgcggtggatctgggacatgggttgagtgctcaacacatgttctccagtaaacccgggccagagggttacagcgattatcatcagaagatgacgacgtacgcgacaatcatttctggccacgcagcgatcctcagacctgaggctactccacgtgtgtttaaaaatcccgacgaggaggatggctgtgtatttaactatctggaaactgcttcagaccgagtgggaataggggcgttgaccgcacgacttgaaggtcaacgtatcgctatccttggcactggtggaacaggatcctatgtgctggaccagttggcgaaaactccagtgagtgagatacgcctcatcgacggtgatgattttcttcaacacaacgcttttcgtgccccaggcgcgccgtcgatagacactctccgtgaggtgccaaagaaagtggattacctagcgggtatctacagtaatatgcaccgccatatcgtgccacatgcagtgcaaatggacatagataatctcaaccttctggacggaatcaacttcgccttcctttgcatggacgctggcgagccgaagcgcttggtggtgcagaggctagaggatatgggagtatccttcgtagacgtgggaatgggcctcgagctagtaaacggctcgcttggtggtatcctccgtgtgacggcaagtacccccaataagcgcgatcactttggcaagcgcgtgtctttcgaaggtgggggagttgaaaatctttacgcgtcaaatatccaagtcgcagaactaaatatgatgaacgcggcacttgccgtaattaaatggaagaaactcctcggcttttatcgtgacctagaaaacgaacatcactgttcctatacaaccgacggaaatatgctgctgaatggtgactcgctatga

SEQ ID NO: 452760 - DNA, 1014 bp, Serratia marcescens
atggataaaagatatcaggttttcgttagctctacttttactgatctcgaggatgaaagaaaacacgtcattcaaacactaatggaaatggattgcattcccgctggaatggagctatttcctgcaattgatgaggggcagtgggagtttattaagcgtataattgatgattgtgattattatcttttgataattggtggccgctatggttctgttgctgacgatgggctaagctatacagaaaaggagtttgactatgctgtatctaaaggactgaaagtaatagttctggtgcatgaaaatccgggtcagttaccagtagataagtcagaattaaatccagactcgcgagagaagcttgctagctttatagctaaagcttcagacggccggttacgtaagacatgggccagtgtaaaagacttgcccgggttagttgctctcagtatgactaaaacaataaaaacgtatcccgcaactggttgggttagggcgaacaaaattagcaatgaagatagcttacaggagatacatcggctccgcaatgaaaatgaaaatttaaaaaagaaattagataaagcaaattgttatggggagcattattcagaggggcttgatttggttgacctagatagtgatttttattttacatgtacagggaatttttctgatagtccgtttgaatataattttcaacgtgttgatgttagaatgtcttggggtaaaatattttatataatatctccatttctcattgacggaattagtgagtctgaagtttcaataatgattgcaaaaaatgctatgagtaattttgagacatctatttacaacgaagcggttgaccatcaggatataaaaacaattagtattcaactaatggcttatggattgattgatgttgaatccagagcgcatcaacctttttggcttctgactgatttcgggaaaaaagaaatgataagattaagaaccatcagaaacactcaagagtctttagggggaaataactga

SEQ ID NO: 452761 - DNA, 846 bp, Serratia marcescens
atggagatatttaaatattttcactccgatcgtatggatgttttgagaaataaaagcatcaggttgactcaaccattggctttgaatgacccttttgagttaaagccacatatttcagctattgcttcagacgggatgataactgctgaaattgatagggtaatgaaggaaagagctgctgttgagtatcggaagctaccaaaagatgtaaggagaaagtttacaatagaatgttttgaggcggtgttaaaatcaaaaattgagagttttagccctcaccggatgatgtcgtctattactccaggtataagtgacatgcttcttgataaatttgaaactatgattggtattctatgtgtgagcacctctccggataatttattaatgtgggctcattatgctgattctcataagggatttgtaatcgaatttgactcggattccgattttttcaagcagaaaagatctgatgttgatgagtttggttttctaagagaggttaaataccagaaggttcgtccttcagtggtgcttacggatattaaggatttcactatttttctaactaaaggtatagagtggtcatatgaaaaagagtggcgcatgatgttgccaatagataatgccgatactgttgtaaatttaggttcgggaacgccttcagtgaatctttttaactttccctccacagcagtaaaaagcataattatggggtgtagaatggatgaggaaaagaaagaggaaataaggaggtgtgttgagtatgatgaagattacaaccatgtaaagttgctaaacacaaagatagacaataaagaatatcggttggtaatagagtctgactag

SEQ ID NO: 452762 - DNA, 1152 bp, Serratia marcescens
atgccctggactgagactgttaccatgcaacgccttgaattcatcctcgcctgccaggcaggcggggaatccatgacgcagctgtgtcaccgccacggcatcagccgcaaaaccggctacaagtggctcagccgctttaaccccggcgagctctcctcgcttgaaaatctctcccgcgcccgccatctccagcccgataaaatcgcccccgacatcgccgcgcgccttgttcagttccgccagcagcaccccgactgggggccaaaaaaaatccgccactggttcctcagcaacggcgctgacttcatcgtgcccgccgccagcaccatcggcgacctgctgaaggcggcgggaatggtgcagccgcggacgccgcgtaagcgaacgccgggcaacctgcgcagtctcacgacgcccgtgaggaataaccacgtctggagcgctgattttaaagggcgcttccgcctgaaagacggcagctggtgccgccccttcacgctcaccgataaccacagccgctacctgctgtcatgcgagccgggcacgtcggagaccacggtgttcgtgcgcggctgcatggaaagggccttcctggaaggcgggctgcccgacgttatccgcaccgacaacggctcgcccttcgttgcgccgggcatcctcgcgctgacgcagctgagcgtgtggctgataaagctggggatacagccggaaagaaccgcgccgggctgtccggggcagaacgcccgccacgagcggatgcaccggtcgctgaaggtcgccatgagccatcacgacgtctttggttcgctgccggagcagcaggcgtggtgccgcggatggcggaacgagttcaatcaggaaaagccgcatgaggcgcacgggcagcagccgcccgcgaaaatatggacgccttcaccgcggaaatgggacggaaaagtgccggaggtgggctatccggagggggcgaagctgtacaaagtcggcgaaaaaggcgacctgaggctgaacgggcgaaccttcctgagcgcggcgttacggggcgagtacgtgcggttcctggaagtggacgacggcattgacgtcatcctcttcgacaggctcatccttgcgtattatgaccgggcagaaaagcgtattatccggatcgactga

SEQ ID NO: 452763 - DNA, 2034 bp, Serratia marcescens
atgaaaacattaatccatgaaatgggcgtcattgacaaaataggaaataagcatcccgtttatttcaaagaaggagttaatattgtaacaggtaaatcatctaccggtaaaagtgcattaatagagatatttgattattgctttggtagtgatgaatatactgttcctaagggagtgattactgatagtgcagccgtttactatattttcataaaaatagacaaacaaaatatagtcatggcgaggcgtcctgatattaataataaagctttttttagaagggaagagcattattctacggaaataatcaatgctgattactttgttacgaatctttatatcgacatagaaagatataaaaaattcattactggtttctttctggacatagacgatgtcgatgtctcattaacggctaagtctaatcggaagtttaatcggaaggcacctactccatctattaggagttttacctcctttatgctgcaacatcaaaaccttgtggctaacaaacatgcattattctatcgttttgatgaaaaagaaaaaagggatcaagttatagaacatacaaaaatttttctcggtttagtcgaccaagaattttttattcaatcgcaagaaaaggaaagactaaccttagagttaaataaactacttcgagaaaaagaaaataattcacgtgtctctacaaagcaaaaacagcgcctttcccccgtgcttaatcaattgtatgctttaatgggttttgaaagcgaaccaatctcactgaatgtaattctgctcaatccacgtgatgcaaaagaaaaattagacaaaataatagttcctgagaaaataaattataactccaatgcaaccactgagttttataataacttaaaaaaacagcttaacttaaaagtttcagaattaagaaaactccaaaggcaagcatcttccattgctaaaaatatagaagaagaaaaacgtttatttgttaatggtagcaaattggaatggaaagataaaatacaggtggcttcttctgtctgtccattctgccatacccaaaacaatgagttattacatagtgcaaaaaaattacaggatgcaattactaaagtagttcataatctttctcatattaaacctataaaggcaaaatttgaatcatcgttagtagaagtaaaacgaaaaatcgaagaattaaaaaatgagataacaccgctaaatgaacaaatcttagttatagaaacatcagagaaacaaatatctgcacaaaaaagtctatatgagaacatcctcataataaaggcaagattatttatgttattggagggaataagtttaggagatgatattgaactagacaggaacattaaaactgttaaaaatgatatttataaaatagatgaaaaattaaaaggttatgatataaaaaaaggaattgaaaatgcaaatactaaagtaaataactacatgaacacaataggcaaaaactttgagtttgaagaaagttacaagccaattaacttgcacttttcctttgagactttcgacctctatcatttaactgagaaaaatgaaaaaatttatttaagatctatgggaagtggtgccaattggttatatagtcacattagtttatttttagctttacatcgtttttttgctgagctgggaaatctatgttcgataccatcaatattattcttagaccaaccaactcaagtctatttcccaaattttagacgagacgaatcggtaacatttaatgaaacaaaagcagcagaaaggatcgaccgaggaaaaaacgaacgagacctagatgacgatattaaggctgtggaaaatttattcagccagttatcttcttattgtaatgaaattaagatcgctaatggattctcacctcaaataattgttacggaccatgcagatgatctaatcctctccaatggaactgaatttgaatcattagtcaatggaaatcgatggcgcagtagaggtttaatagacccagtaccaaacctagatgtgtctacagagtaa

SEQ ID NO: 452764 - DNA, 162 bp, Serratia marcescens
atggacggaccccacggccgtagacaaattctgtcctcacgacgaggcctgttcgaaggtctccggactgacaccgccgagatgattgtggcgctgggcccggttgtagaacacttcaatgtgatcgaagatatccgccgggccagatcccaggtttcatag

SEQ ID NO: 452765 - DNA, 2292 bp, Serratia marcescens
atgcttgaaagaattcatcaaattactagcgtaggtttattccaggatatccgtcctgctggtatgtcctttaaaaaaatgacctttgtctatgctgataatgggcgtggtaaatccacccttgcgtctattctgcgttcctacactgaattaaatccagatattgtacggcacaggaaaacgattggggaaacaacccctcaaaatattcatctgcagttttctcagggaaatcgtgcgatattcgataacggcacatggagtggtaagtattcagatgtgcacgtcttcgacctagattttgttgatcgtaatgtttactcaggtggtgaaatcagcgctagccatagaaagcgactgctgagttttgcgctgggcagtgatgcggtagcagcgagggctgcttttattgatgcatcagacaaggcagaggaggccaagagagttacgagactggcaagtgaaaagctgacggtggcccggggaaatgtaacgctagcaagatacataaagcctgttcaggaagagaacattcaggaaaaaattgcattagtcgaatcagaactggatctctgcaaaagaacagagacgatccgcaaccgtacgggctatcttccgttacctctttacgctcctgatttcagttcttttttttccatacttgcatcgagttatgacagcctaagtgcgggtgcagaagaggtcgtctgtgcgcatattgaccatatcaatgtcgaaggttttgagcgatgggcgagtagcggccttgattatataaaagacgaatattgtcctttctgtacgcaaagcttggagggtgttggactgatccggtactaccgggagcggtttaatcttgcatacaaagccttacttaatcaggttacaggcctcgataacgttgtggcgacaaccatgcgcgttttcaatctggccttacttgagagcaagattgagcaggcggggttagtgactgaaaactggaaagattgtctccagttgaacgtgagtctccctgatttagataaaattaaagctagtttggaaggtcttcagtcatctctgagtcgcttaacagaagccaagaaaagcgatccgctttcaaagacccaaggcgactatgaaaaagaaatcgctgatgcagtaactgcaatcaatgatgagctttctgcctttaattcgggcgtggaaactgccaatctggatattcaggcttataaagaggcgcttgaaaccaaaaatgaagaaaccctgcgggttacattatcccagcatgaagcaacccgacttcgtctatcacctgaggtagtaggttttatctctgattatcagaccgctaaaacagctgaagtgacggcctctgaactaaaggaaacacggaggggtgaactgaatgcgatcatggactcgacccttggaaagtatcagtcctcaattaatgatttattgatgaagtttggtgcaagctttcgcatcacagaaattaattataactatgccggcggtggtgagcctaaatctgaatatgcaattgaacttagaggggaaaagatttcgctaacgggggaggaatccagttttcggagctcactcagtgaaggggacaaaaggacgctagccttcgcattcttcatctcagtcttgcttcatgacgttgatcttgaaagaaaaattgtcgtgattgatgatccgatgtgtagtctggacaatcatcgcaggaaccacacaatcaccatcattaaacagatataccttcgcagcttgcaggtaatcatcttggcgcacgacctgctctttatccgtaccatgcgagatgagttcctaaaaatacctgctactcaaatgcaggacatttcagccttacgcattgtccacattgctggtgatttcagtagtttggacaaactagatgtcgatctggaatgtgaatctccctactataaaaatcatcggctggtgagcggatttgccgatggtgctcatcatcagcttcacgacacggcggtggcaatcagaccgcttcttgaggggtatctgcatcgacgttttccggggcgaatttcaccgggaaatctgtttggagaggtagtaatgcagattgcgcaagcacaaccgaacgatccgttattcttcgctaaatcactggtacctgagttgaatgaaattaacaattatgctggtcgctatcatcatgacacgaaccctcaggcatcatcagaacccatcacggcaggtgaactgatgtcttactctcgacgggctttgaatgtgatttatcgcggaaacgtatga

SEQ ID NO: 452766 - DNA, 918 bp, Serratia marcescens
gtggaaaaaatcagccctgcaacagttcagtttatcaagcttggtgaggccggtgaatgggagcagcagtgtctgtcggagggcacgcttcggtttggttatcatgaaactccgaacagtctttgtgttgaggggcaatgggccgacgtgcacgagatatggcttaacatccgcaaggggaaaaaaggcaatgcgagcagtgacgttaggcagatcaagaccttttacatggcggactcagagacgctattcattaccttcaggggtgggtttctgtactggtgtcgacccgcgggtccggttaaggtgctggcggatggtagtcgagtccgaaaaacaatggaggggtggcagaacaccagcattgggggagcactgttaaccacagatcacctgagcggtgacctgttaaaggttcagggataccggggaacgatatgtaacgtaagcgcacatgattacgttgttcgtaaaataaatgatgaagatctccctgcggtatctgatgcgaagcagtctgaagagacttatctgaaggctataaaaaagctttgtcagctgctgacctggcaggatttcgaactattggtagaccttgttttttcaacaagcgggtggcgacgcaccagtattgtcggtaaaacacaaaaaacgctggaccttgagcttgaatctcccaccaccggagagaaagcgtttgtacagattaaatcacatgcggacgcatatgctttcagcgagtacgaaaagcggttcagagaaaccagtgcctatgaacgaatgttttttatctggcacagcgggtcgttatcggaaaatatcaaagtcgatggcatcacgttaatcggcccaaataagttagcagggcttattctggacagtggtttatcaaggtggcttagaaaaaaagtttcgtaa

SEQ ID NO: 452767 - DNA, 435 bp, Serratia marcescens
gtggtggatgactttaaccgtgaagcactggcgatagaaattgacctgattatcccggcccaacgtgttgtgagagtgctggacaggatcgcagcaagccggggctatccgcttaagatgcgggtggataatggccaggaactgatctcagtggcactggcgcagtgggccgaagaacatggggtaatgctggaatttatcaagccgggtaagccgacacagaacgcgtttatcgagcgctttaaccggacgtaccggacagaagtcctggatttttatttgttcaggacactgaatgaagcacgggaaatcacggagcgctggctggccgaatataacagcgagcgacctcatgaatctctgaataatctgacgccgcaagaataccggctgatggctgaaaccccggaagtctcaaaaagtgcgtggaactaa

SEQ ID NO: 452768 - DNA, 216 bp, Serratia marcescens
atgttatcgctgaacaggacggtgtacttttaccagcccgacgcccgacgtgatgaaccggtgatccacgcgttgactgagctggcggagcgctacccacgatacgtttttaagaagctgttccagctactacgcaggcaaggcaacacctggaaccacaagtgcgtgcatcggattaactgtctgctgaaactgaattttcgtcgtaggggatag

SEQ ID NO: 452769 - DNA, 378 bp, Serratia marcescens
atgcgcaaagcccgattcatcaagcaccagatcatcaccgttctgaagtctgttgaagcaggacacaccgtcaaagatgtctgccgcgaagcggcgtattacaattggaaagaaaactacggcggtatggaagcctctgatatcaatgagatgaaagatcttgaggacgaaaaccgccgactcaaacagatgtttgccgatctcagtctggaatgccgggcgctgaaacacatcattgaaaaaagctttaacaccagcgataaagcgggagctcgtcggttatctgacctcacaatttacgatgagcactcgccaggtatgcaggatgttatcgctgaacaggacggtgtacttttaccagcccgacgcccgacgtga

SEQ ID NO: 452770 - DNA, 819 bp, Serratia marcescens
atgaactcttcaaaaaaaactttcactcagtctgtatcttatgtgaaatttaaaaaacaaacgcaagacacttttgatttttctgttctggtctgttctgcggttccagtattgaaaagaaatattatccttttcgaaaaaggagttataaatgaaatcaccaaagcagactattatcagcctaagggagatataagcagtgagaaacaaaagaatataaacactgatttaaagcgacgggctcaagggtacaaaaacaaactgtgtaaatatacactacttagtaatttcagtttttttgaatcatttatttatgaaataatatcagagctaatatctttccatggtgggatagatgaattaattaataagtccaagtgcagaactcttaaaaatataaattcagatgatagctcagtagaaaaaaaccgacgacgattaagaaaaatatatgatgtaaaagggcacgccattggtgtatgtaaaactgcaactaataatcttaaaagaggagattataggttccctagcgaaatgttctcagcattcgggttgagagtaatatcagagaaaaactcaaatataaaatcatttgaaattcctgattttttaaccaatggattcgcattcgagttaaatgatgactcagttgaaatatttcacaatataagagagttaagaaataaaattgctcacggtgacactgtcaatttggacttgaccgacataacagaaaaatgtaaatttctttctagtttagcgaaggattttgatcaacatctgtcgaaacatttttttatttcggaaaaatttgtttaa

SEQ ID NO: 452771 - DNA, 1134 bp, Serratia marcescens
ttgttcaaatctgaaagcgaaatgcaaatgtggttgagttcagagctaaataaaacagaaggattagctaacttaataattccattttcagacgaagagtactcttatgttgataaaaaaatttcagacagttataattattgtttgaagacattattaaatactaaaatagtttgtgagaatcaagatatatcacaattctcagatgagattctacgtccggattttctattatattcagttgactatgaggcatggataattattgaaatcaagaatataccaaacccaaccagacaagccggcaccgaactgggagcatataccaatgccttgaaaacttactttccaaatatgtccgatggggatgtgataaatgtagtcatatctaatgactggccaactttaatcaaaaattatatattcaatgagattttttggctaaacaggagtattctttgcttacaaccagtaaaacatgagtctggaattaaacttgagtgtataagacctgcgattttaacaaaagcttatagcgatagaaaacttagaccaaatgactttagtggctatcaattttgtatttatggaaaggatatctattctggaggcgaggtaagtgatattgaaaaaaacatagaacaaattaagtcatcatttcaaagaatggttaataaagcatcaaggctccactcacatggtttcgcatttttgtggagagatttcagaaagtacagtcttgcagcatatagtattacaattgtagatattaacccgttcaaaaataacttgtattctacatgtaatgaaaaaggcatagcagcagaactacagcatataatatgggagtacgaatccacaggtaatacctattcattatgggaaatcataaatgacgcagacttctatttgcgtgaaatcagctcaacttggcctgaagcgccatcaaactggataacattgcgtgaatttatggttgaagatgctgaaattattgaatttaaatgctgggggcgaatatcagaattatatgagaatgagttagctaatgagtacaataaaggaagatttgatctaaaattcactgaccctggatttggattttattttattaataacaaactattcacgtaa

SEQ ID NO: 452772 - DNA, 852 bp, Serratia marcescens
ttgaacaatatccccacctccactcaatggactttagatgctacgggtgaagttggcctctcatcagtaaattctgtttatatgattatatgtcctgcgacaggctcgaaaggatccggttttttaatagataatgggctaatagtaacgaatgaacatgttatcactagttgctctataaatcagatttttgcaatttcagcttatggacagaagattccaatttctcaaaaatggatagattctgatcgcgatttagctgtgttaagacctgccattacccagactggtgggctaagtattgctgaggataatgatcttaaagttggtgaatcagtaacgacttgggggtatccattaggatacaacggtcctgcaccgttattatccgttggttatttagcagggtttaaatcatatcaaaccgccaagggacaaaaaaaacatctagtggtaaatggggcgtttaactcaggaaattctggcggagctcttttaaaaggttcagataataaagtaatcggtattgtggtaagcaagcatgcccctatcagtcagtaccatcaagcagctattgaagctttgtctaaaaatgaaagtggcgtcatctataccgctactaatgacaccggagaaactaagagttttgtagaatctcaaattgtagcagagttattgattcatatgagaagtttaactcaagttatgattggagaagcgattgcagcagaagaattactttcgatgcttagcgaaattgacttgagcccaccacaatctatgtcaagaaatgcgttatgttattgcgggagtggggcacgctttaaagaatgccatggaaagatagtctag

SEQ ID NO: 452773 - DNA, 951 bp, Serratia marcescens
atgtcgctagatattgcctataacgaggaagttgatgattatatagacccttatcgcgcatcagacttgtactggtctggtgttataactaacccccgcggttttatgtgcccagggactgggtgctcagcacaagtcacatgtgccaaccttactgaagaaaaacaaaatatcaaagtggttgtccattatcggatttatggcaagactcactctgatgagtgtgaggtattcaataaaaaaccattgaatttaaactatgaaacatctcttactacatcagaagaaaagcctaatttagaccagtcaattgtagattcctttattctaaataggccggattcatactatgatgataataaaacctctaaacaaggaaaaaatacaactaaaaaaataaacgcgttagcagcaaaggcagttgctaggctgagagaggttggttatgttagtaatgtatactcagtccgttctatagtgagtcgatacatttcgtatagaaaagatggtagtttgaagaatagaaaaataaatatatcaggtaaggatattgcatacggggggatatttaaatgtatctgggaacagaattttagcgatttgccaaattatcccgtaatatactatggttgggcctacgttgatagaactaaagataatggtgggtacaagataagatttaaaaaggatttgatatataatggagttaaagccaatgcgtcaatttttgtcactgaccgtctaattaatagctataaaattaaaaagctggtgagtactcgactgactaaaatacttgaaaaccctaagcatactgccttcgtttttgtgtacgcaaaaccaattcttaaagaaaaaaatgggagaaagtatgtgaatttcaacatatcaaatctggatatgctcgatataaactatgactgtccattacctaaagaatataataaatga

SEQ ID NO: 452774 - DNA, 705 bp, Serratia marcescens
atggctaaacttgaagatattgagacaaagggattatctccaataatttatattgacgaccctatatctagtcttgatagcaatcatatatttttcatttatagcataataaatagcaagataattttagaagggaatttcaagcaaatatttatttccactcacaacttggattttttaaaatacctaaagcggatacctaaaaaagataatctaggcaataaattacctcaagaatttttcatgatcgaaagggctgaagaagaaagcaaaataaagttaatgccgaattatttaaggaactatgtaacagagttcaattacttattccatcaagtattcaagtgtgcaaatgctgatttacagaacgtcgataatagtcatgattgttattataattatgctaataatgcacggaagtttttggaggcatttttatactttaagtatccaaatgctttggaaaatgacaattcgaaattatctaaattcttcggaggtgatcctctttcagctgccttaacagacagaattaacaatgaattctctcatcttgctggtgtgtttgagcgcagcatgactcctattgatgttcctgaaatgaagaattcggcacaatttatactgaaaaaaatacgagaaaaagatcctgagcaatacgattcctttataaccagcataggtaatccaatacaaacattttga

SEQ ID NO: 452775 - DNA, 465 bp, Serratia marcescens
gtggcggatatcacctacctgccgctgagaacggggacggcgtatgtcagcctggtaacggatgcctggtcgagaaaaatcgtgggatatcacgtgcatgacagtctgcatacccggcatgtcgcctgcgcgttcaaaatggcactggccggcagacgcacggcgttgccgttggtgcatcactcggacaggggtatccagtactgctcgcaggaatatcaggcattacatcagcagtatggcgtcatctgctcgatgacggacgggtatgactgttatcagaacgcgctggcggaacggataaacgggatactcaaaacggaatacctgctcggcaggccagaagatatcgcgcaggcaagaaagatggtcagggagtcggtgaacctctacaacacgcggcggccgcacttgtcgctgaaatacaaaacgcccgatgaggttcatcgggcgttatccggttga

SEQ ID NO: 452776 - DNA, 465 bp, Serratia marcescens
gtggcggatatcacctacctgccgctgagaacggggacggcgtatgtcagcctggtaacgaatgcctggtcgagaaaaatcgtgggatatcacgtgcatgacagtctgcatacccggcatgtcgcctgcgcgttcaaaatggcactggccggcagacgcacggcgttgccgtcggtgcatcactcgggcaggggtatccagtactgctcgcaggaatatcaggcgttacatcagcagtatggcgtcatctgctcgatgacggacgggtatgactgttatcagaacgcgctggcggaacggataaacgggatactcaaaacggaatacctgctcggcaggccagaagatatcgcgcaggcaagaaagatggtcagggagtcggtgaacctctacaacacgcggcggccgcacttgtcgctgcaatacaaaacgcccgatgaggttcatcgggcgttatccggctga

SEQ ID NO: 452777 - DNA, 2673 bp, Serratia marcescens
atggctaaatttattacttggcttgacgtcgagcgagaagttaaacgaaaatttaaatataaaaaaggcttcgataatattaaagctatatattgttattcctcaggaatggaggtcgaatttgttaataataaagaggctgccatttctgatttacaagaaatatttaatgattctattagtcaaaaagatgatgagttattgttaactttggaaatagggtgttctgagtatactattgagctcattcctgctctgggtgagaggaaagaaaataatatagtttatccattgtggcgtgaacatgtgtatgttgagaatgcaagtttcaaacagccagaaccatggggggatggccctagattttgtgcattccattcttttaaaggtggcgtagggcgaacaacatctttaatgacttatgctagtgcggcgttagataataataatattaaaaagatattacttatagatggtgacctagaggcaccaggcctaacgctatggctagatactgaaaatttaggtagagtaacatatactaactttttggaagcaattcaattctcagagggtcagtttgaggagacaatagatttcttctctagagagctgaagaagagctcgattaatattgatggtaattctaaagagattttcgttcttccttcatctttatctttagaaagtataatggatatgcctgtaactccagatcatatctctaaaaacatcgataacccatatatactaagtgatttattaaggctcttaggagagaagcttgaggtggatattatctttatcgacctacgagctgggcttagtgagctatctagcccattaatttttgatccaagagttgaacattattttgtctcaactattgctaagcagtctgttgtaggtattggcgaagttctgaaaaaaatccataattctattaaagacatttacgccaaagaaagtgataagccaaccgtaattctaagcatgcttacaaaaatgctaagagagtcttctggttataccgaggccattcaaatagttaatgaatcatatcctgctatcggaggtgaggatttaatttctcagtcaattgagttattggagtttgattttgatgataacttaatgagtgtttccaatataagggatgcactcttgttgttaaagagatcaagtatttatgaagatgctaaggtttgggttgatgattttaaagtgattgaacccattgatgttaatcaaggggctctcagtaacgatagcggattgcaaagactatacgatacttgtcaatctttccaatttgctgagaacactagtgaagatgacatgctagttatcgacccaattcgtaatctagcaaaaaattatgcagattcacttcctaatgcagtctcaataggagcgaaaggtgcaggtaaaacgtttacttatttgcaagtgtgtaagtcgaaaacttggagcgattttatcgtcaaggtaaatagtaaagttacttccgacattcatgcaaatattcttccttggatatcatctaccaaccttaatgaaaaggttagggagcaagtggctattcaacgagcggattgtttaactgatatatcagctaaaaatccggggagtttgttttttaatatgaaaaaaataggtgaagcactatcaagtgatagcactaactgggatgatttttggcaaaacttattggtttcagaaatagtaggtgacaacaaaacattaaaagatttgaatgaatatcttgtttcaatcaataaatctatagttttattagttgatggtatagaagatattctttttgcaccagaaaaggatgcgaatcataacgctgcaattagatctttgttaaacttccccaatgcaatttcagagctgcagaatagaagaataggattggtgtgttttattagggctgattatgttcaatctgcaattaaacaaaatgttaaccagtatgtctctaagtatcaacagtttaggcttgagtggactcctgagtcgtttttaaggttagcatactggatcagtgctaagtctgaagttatcgatgctaatgagaatgatgcggaatctgggagtctcaattttctcctgaccaatcttgaacgcctgtggggtaagaagttgggccgagataattctaaggaagccagttctgcaagatgggtgttcgctgctctgtgtgatttgaatggccgtcttcaagctcgtgatcttgtcaggtttttaaaattctcggctgacaatatgctaaaagcaccatctaatggaatcaaagttgagttttggctagataggcttttagctccagaggcgattaggcgttccttaaattcatgcagccaagaaaaagttgatgaagcagaaaaggaaattaaaccattagagcagtggatcaaaaacttaaaaacgatatcgcctgactttaaaaaagtaccgttcaatcctgaagaggttggattagatttagctcttttaaattcactaaaagagttaggtgtaatttatgaagatacagaccaaccgaatgacgagcgcttttatttgcctgagatttatcgtacaggcttgcagttctcttcagcggttggcggaaggccaagggttcaggctctattaaaacgtaatttgggaggcatacctttctaa

SEQ ID NO: 452778 - DNA, 636 bp, Serratia marcescens
atgaagaaggaattatatttcaagttggatacagcccagtgtgactgggcatttaaggctattaggcaaaaatctgatgtgatagaaattttaatgcgtgccataaaaactatgttgatatatgaagaacctaggaaggaggatgttgctggtatacttaagcttcatgttgaaaagatgaatagaatatttttcttctctaaagataaatactattcaatagcctttccatttagtgttgaagaggttgaaggtcgatgtgtatttagaagcaaagatgtagatgatattaacagtcagttaacttcacatgttatttctattttaaatgatgaatcttttcgtaacgaatctaatatttatagtttcctcgaccctcttttagatgtggttgaaggaaaggacatgccatttttctggccattctttaaagcattgctaacttatgaagatggatatattagatatgatgtagaccacgagaggtgcaatggtaagttacacccgctctatcactttgatattttttattcaaataatacaaccttcaaggtaggatgcaatgtgcattattctgatgaatcaatgatagatgttttaaatattaaaactgattgtcattttataaacaactga

SEQ ID NO: 452779 - DNA, 864 bp, Serratia marcescens
atgaaaagtgctcttttatttttaatcgtgtttttttgcagcgtcagcacggcgaatgccgcataccacaacgccaccaccatcatacgaaaaggggagatcccggggtctttccttgtcaccaccacgctacatgatattgggcagatacccgataggaatctatgttacggtattacaactaacacttgtggttatgctttcgttatttaccctattatgtcgaccggcgctgtggcttcccccatgttgctccagagcttggttaaccgagacccccctaacatatgttcgtacagtacttgcaatacaagtttagcgtcagccacaacccttttggatctggtgccattgatgaaacaccgtggcgcttttggaaacaccaagacggagttgcttcgcccttggtttacacttatcggttttaaatcatgcctgtatttttcttatactacgtcgattgggaatgggtcttcggggcgattcgattgcagcgaacttatccctctgacgacaagctgcgatattctggatactgatgccctggtcaattttggatcgttcggcaacgacgtggtaagccggcaagccagtggttcatttaaaattaactgctccggtgacagcagcgtgcgggtcaagtttgcctccaatgtgacgaatatgtcactcagccaggatggaaagctgacggccagcctgaaagtgaggaattcaaccccgggtgagaacagtttggaaagttttgttaacgtgctggccggtacgcaagagatatttatcgatggcgatcttaaaaataataatacctcacatacgggcccgttttctgcctcggtggtgctcatcgtagaggtggcataa

SEQ ID NO: 452780 - DNA, 363 bp, Serratia marcescens
atggtgctggaggctgttgccaccggtgcccgacagcacgaagcctgtcatcgtgtcgttataagcgaacggacgttccagcgctggcaacagataccggatgaccggagaacctcgacgccacgaccgcccccgaaaaacaagctcagtgcagaaaaggaacagcaggtgctggccatctgccatgaaccgagattcgccagtctgctaccgtcgcaaatcgtgcctgcgctggccgatgagaagcgctatatcgccagcgagtgggtgctgcggcgggcgggtgaaacgacgcaccgtagccgacagaaggccccgcagagcaagccactgtcgacctggaaggcgagggcccccaggtag

SEQ ID NO: 452781 - DNA, 465 bp, Serratia marcescens; identical to SEQ ID NO: 452775

SEQ ID NO: 452782 - DNA, 900 bp, Serratia marcescens
atgattgacccgcttattagaaatctacaggctgacattgcattgcttcagctttacatcgcccaacgccaaaagactggttttcacgatatggaaagaatggtggaagcgttgaccatctttatgtttcgtgcactgcaaatgggtgagttgaaaaaccttaatcagattaaagctaactttccagccattgatttagctgacaatcaaaaaatgatagcggttcaagttactactaatgcaagcccggcaaaaataaataaaaccattgaagcttttgaaaagaagaatgaatcaggcgtgagcctcaaagataaatactctgtattatatattttcggtttttgtaaaacctcaaaacactctgttccaagttattgtaaattaattgacaccaactatcttataggcgaactgtgcgataaagcagatgaagacatgatccaggatattcttgatgccattagacgccatcgggattacacttcattacacccttgggatgataaggattcacttgaaataatccttgacgtcattaatcgcaacgcaattaagcatagaatgatttgcgaaggcagcctctctgatatggttataggcttcaaggaaataaatgaagtaattggaaagggaacaatccaacgtaagcaacgttccaaatctatagctgatttcaaagatcaaagcatggttgtattcctgagaggtgtaacggatgatctatctcatattcaagctataataaataaatcaagagtgtgtaatgacgattttgtctgcattagccatgaagacatggctagaattgatcagttaaaaattaaaatagccaatgattcgtcaaaaattgcaaagctataccatataaaaatggaaataaatgtaatcaatctctaa

SEQ ID NO: 452783 - DNA, 333 bp, Serratia marcescens
ttgagaaccgtcgaaatactgcaatacaccttacgcaaaggcagcggtgccgcttttcacgccatcatgcaggaaatcagcgttcccctacaccagcgccacgggatcgacgttgttgcgtttggtaactcgctgcatgaccctgattgctactacctgattcgtgcctttgacagctctgaaagcatggctacggttcttgatgctttttacgcaagcgatgactggcgcagcggcccacgcgaagacatcgttggcagcatagagaccaatattaaaacagtgattctcctaccatcggaatgcgttgacgggctgcgggtgcaatcgtag

SEQ ID NO: 452784 - DNA, 858 bp, Serratia marcescens
ttgaacgaatccgctccacgcttaaaaccgcgccacacactacaagttgtgcgtattccttcttcagaagttcagaatttgggttttacttcattttatagctggctcaatagcttagggtatgacacgaccaatcatagtaatcagcgagctgattgggcgagagatggtggctggcacttgaaggcatgtaagaataaggtcagtaaccaagaagatttctggttaatttcatttgatggaaaaggcggtgttttactttctgaaaagtcccaacaagactaccgaagtgcttatcgtcgcttgattaaagagggctatcagcccgcacgaatcgaagcaatgacgagaggagagctttactcgacttacaacgaggttagaggatcagcacaaagccaccctcacttaaaaccgagtcaggttgatcaagctgatttcgagctacatcccgatcagatacgggatatggtgaatagctcaatgactaagacctataacacatatagtcgcttcggtcaggctcgcttccgtaatgcagtattgctgaattccctgaatgtgtgtgctgtaactggtgttgagtatcgtgccgcattggatgctgcgcatatacacccgcatagtaatggaggtgcgatgaaggtagcgaatgggattgctcttcgaaaagaccttcatgctgtttttgatcgcggtgatatggcagtcaacccggaaaccctcacgattcattttagtgagcgagcaattgatagctacctcgattttgaaggacacgtaattcaaacagtgctgtcacttgataaaattgccttggtcgctcgctgggaagagttctgttctcgtgtaaagtaa

SEQ ID NO: 452785 - DNA, 1047 bp, Serratia marcescens
atgcttgaacactttagcgaacgaatcattgagttaatgaaaattctggattactcatgggagtacggaattatctcaaaaaatgattatagccatctaaccatgaaattaaaagaaggtgataccgacatagtcgagaactacttaataagtaaaggtatagacgacaagataatagaagatttgccatccaaaaacaataacatcaagtccgaaaaaaaacattataacggttattcatatcaaaaagagacatccgattacagttactttgaagataaaatagacaaatggaagaacttatgctatgacctggaaaacaaaaactcaagtttaattgaacagctaaaaaacctgaaggaaagccatgaagatatgcgtagaaagcataatatactcataaaaaaaatccaaaaaatagaaacagaaagaggttcaataattgaagaaataaatatcttaaccagtgaaaacaacgaattaaagaataaatttcaacaggaaagaatcgacgaaaaaatacctgtctatgttgaggatgttggtcgaaaacttgatgatgcggaccagttttttaccatgatgtcaaaatactggtcaattgcaggatttgttttagcagtgttagccgtaattgctgctttctgtactttcatctatggtctagaaaccgtttctgatgttactacgttaactccgatttcaatagcgtacacttttgttaggggtggactcggcattgccctactatcttggctgtcatatataagtttatcaaatgccaggaattatactcatgaatcaattttaagaaaggataggcaacacgcactcactttcggacgtttatttttacaaatttacggttcaacagcgacaaaggaagatgcaatcaatgtatttaaggactggaatatgtctggagatactgctttttctagtaaaagcaaaaccccaccgaacccacttagcacgcttaactcattgaaaaactacgtatttaaaaagaatgacacgaatatcaactcatctaaaattgcagattga

SEQ ID NO: 452786 - DNA, 573 bp, Serratia marcescens
atggaattcaatcaagacgcaaaagctgctatcgaaaggatggtaaaggcttacggagtcaagactaaactcgctttgtgtgaagccttgggtatcacggctagtgctcttgcaaacagacaaaaccgcaacgcttttcctgcggagtacgttttgaaatgcgctttagatactggtgcttctgtacgttggttaacgtatggtcatggtgacatgtttgatcaaacggtggtttcagccccgaatgcatttgcagtaccaagcaagatattgcaggaaagacaactgctggccagtgagactcttttgcttgataaagcattcctaccggagggtataaagaccccccttgtagtgatagatggctcaattcaatacattgctactcagacttttgatgagatctatgatggtacttggattatagatattgatggtaatatcagcatccgagaactggtgagaataccaggtaataaagtgaacgtatccgatcaaagactttcattttgttgtccaatagaagaactaaatatagttgcaaaaatcatattaatctgcagcccagtataa

SEQ ID NO: 452787 - DNA, 510 bp, Serratia marcescens
atgtttgattttgaagtttcaaaacatccacattttgagatggcgtgtcgccagtttgctcttcggcaaaaccttgtgcgcgttgctgaacagattggaatgaagccgcaaatgctccgtaacaagctgaacccagaacaaccgcatcagctgagttgcaccgaattgttggcaatcactgatgcaacagaagattccagcttagtagatgccttgctggcacagttgaactgtttaccttcagtgccagttaatggggcatgtgctggcaacatatctacatacgcgttgaaagcaacagcggcagtaggttcagttgcggcggcggcgatagaaggcgatcacaaaacggcatctcgtaaatccgctctactcgatagcgttaacacggcgatccgccatttgtctctaatcggcctgactgttcaaaatcgcattcaatccaatccggctttggccacaaccgtagatgttatcggtggcttgggtgccgtggctggattggcttga

SEQ ID NO: 452788 - DNA, 180 bp, Serratia marcescens
atggtcgctcaaaaacttgagcgtgatgcttaccgcaatcgcaatgttgctgagcggtattttggacgtctgaaagaatatcgccgcatagccagacgttacgacaaaacggcgaggagttatctggcgatggtgaaactgggctgtatccatatgttctacaaaaggttatgtaattaa

SEQ ID NO: 452789 - DNA, 834 bp, Serratia marcescens
atgaacgaggggtggctagattctactatgcaagctataaaccaaagaattaaaaatccattatggggatttatcattctggcttgggtatggttcaactggcctaatttagctatgctctttatgagtgatgctcctgtgaaattcagaattgattatattctttctcaagaatatttttatccacgttatgtattagcacccattttttttggaggtatattagccatagtaaccccttatgctcaatggttgctttctcacgctcataagtgggctactgataagcacagagagaatatttatcttactagagagagagagtatcaagattcaatcagactatcagggcttaaggttcaggctgatagagcaatagaaaaagaaaatgctaaaattgatgcagatatcaaagcagaagtagaacgaggcaagcgcgaagagttggttactgaggagcttgaagttgctaagaaagaaatattatctgaaatcagtacgttaaagcaattattggctgttgaaaaagaaactatctccaatgtcgaggtggaaaaaaataggttgcaggattttattgttgcatcattaaatataataaatcagttatttaaaattgatagtagtcgttcaatacaacaattgaaagccgaaattgaagggctttttactgtttcagatattgaggcgtctacaatccggaataccttaaattcagggggggaactaacgcctgagttgttagcgagatttttttcttttgttgatgagcaaaataaagttaaaaaatctgatgttgagggggatgggaatttagtaaataaggataattga

SEQ ID NO: 452790 - DNA, 579 bp, Serratia marcescens
atggacgcaggtttacaacctaacattcaaataattcctctaactgaattccacaatcacaggcgctttagtagcggtagtgccgagttccaaccattaaaaacttttctccaaaatgatgctttgtcgttccagaatggttgcatagctcaaacgtatgtagctgtagatgacaatgagcggatggataaagcatctaatgttaacattcatccttacaaggtattgggctacataaccctaacctgtagtcaggtggctttaactgattaccccctcgacgggtgtgaaagagctggacgttacgaatatttacccgcagtaaaaatagctcgtttggcaattgatgccactcaacggcgtagtggtcttggaagtaggcttttccaacatgccttgctactggcttgtgatgatattaggcctcgcatagggtgccgttttttgattactgacgctaagagaacagctattgatttctatcagaatcaaggaatggtacttcttgatacggaggaaaatcaagctgctgagcatccaatcatgtttatcgatctgtatactctgaaagatgaatag

SEQ ID NO: 452791 - DNA, 159 bp, Serratia marcescens
atggctatttcaagtagtatgttcggccgaaccgtcctgagcggtaaagatgccgagcaaatgcataagcaaatgcatgatagcaaacctaatgagaacgctaagcgctctcttgaggctgctcgcgcgatgcgtaaaaaagcgatcgttactatctaa

SEQ ID NO: 452792 - DNA, 780 bp, Serratia marcescens
atggaaatatgtaaattatgtggtaaagaagccgttctcaaaatgtctcatattattccgcgtagttactataaaagattgaaaaaagaatcgggtcaattgctattagtatcaagtaccgaggaagagcctaaactaacaaactccgatccaaaagaaagattactgtgtggtgattgcgagcagttcttaagttctaattatgaagtttatgggacggttatttttagacgatccgaaaacgtaatcaaaaatgataaccacatcgtaattaatgggtttgactacaaaagaacgtatctttttttcataagtattctgtggcgagcttctttatcaacacatcctacctttcaggcggttttattagaggagcgcttgcaggaattattgcgacaatgtattttttccaatagtttaaaaataagtatgcataccaatcttagactcgatcacttttttaggttatcggtcgttcgtatcgtagacagtacagggaatattcccgatgaagtaattaggagcataatttcaaactttagaatggaacacggtacggataagtgtagcatgatttattatttcatgctggacggttttctggtgacatatgttttatctttagggaaggatttacacgatattagggctaaaagattaaactctcaattggttagtggtagtagcgctagaatcaataaagtggaagttaacgagttaaaagaaattgctggaatgttcaatatgatcatagataaacgcaagagtagcggtgcctag

SEQ ID NO: 452793 - DNA, 1263 bp, Serratia marcescens
atggcaaaactgacagacttacaaatcagagcatggataaaatcaggtgagcattttgctggtcgctctgatgggggtgggctgtatttatgcttccctgaaaattactcagtacccttttggcgtttgcgttatcgttttgcgggcaaacagcgatcgctggtcataggaacgtacaccgagctgtcactcgctaaagcacgagcaaaagctaaagaacagtcagctcgggttgcattgggttatgacgttgcgggggaaaagcaagaacgcaaagctgaagcgctgaggaagatggaggatgaaaagcacgcgctacgtgtttcagaacttgcagctgaatactttgagcgacagatcctcaaccggtggaagcaccctgacattctgcgtcgtcgcatagacaaagacatcaacccgagtattgggcatttcagaatcgaagaagttaaagccaggcatatcgacgatatgctacaaaaaatcgtccaacgtggcgctccaacagttgccaatgacgtgcttcgctggactcgccgtatttttgattacggtatcaagcgacatatgcttgaaagcaatcctactagtgcttttgaaatctcagatgctggcggacaggagcaaagcagagaacgctggctgagccgtgacgaattgatgaagctcttccaggctatgcccatgacaaaaggcttctcacgtcaaaacgagctgacattgaaacttcttctggtgttttgctgccgtaagatggaactttgtggggctcgctgggaggagttcgatcttgatgaagcggtctggcacttacccgctgaacgagtgaagaatggtgatgcgattgatatccctatccctgcgccagcgcttgaatggttggaagaactgcatcagatgtcctgcaatagccagtgggttcttccagcaagaaagatgcagcaccgcatgatcccccacattcaggaaagcacactgcctgtagctttgagcaaggtaaagggcaatctacctgatatgcctaatttcactattcatgattttcgacgtaccgcgcgttcacatctggcagcgctgggagtcaaatcggtagtcgcagaacgctgcctgaaccacagaatcaaaggtgttgaagggatttataaccgttatgagtatttcgatgagaggaagcaagcgcttgaactttgggctgacttgcttgtttctttagaaaaaggtgaggggcataacgtgacgccactgcggaagcaaactgcgtga

SEQ ID NO: 452794 - DNA, 894 bp, Serratia marcescens
atgggaaatagatgttttcgatatattctttcagttttattgttgttgatttttaatgtttgctctgcggttgaagtggatgtgaggttttctgattggtattggttaaatggaaaggctgctatcgattataatttctcaagtctggaattttcagctaaggatcatggcatcaatgattacattagggaggattggggggtgcgttgtggtggtaggtgtactatttcggtctggagtaatcacgatggacaaaggtgcgtaataaatccggttgctcgggagatggaggttgtagtcattgatacgtggaatgggcaatggtatccctttgatgatatcaatgccagaataaaaaaagcactacccgttcatggggtaataaataaaaatttctcggagaaggggtgcaaaccaaaggtttgggtttattttaaatttgatccagtttcgctggtggttgcatcgactgataatggtttacaaccgctagatccgctaccccccgtcaacgtattttgccgggtcgatggtttaagtaacagtgagattgattttggcgttgtcaaccaggaatctaaaaccgccagcattacggcatcgttggtttgcgatggtgattacacctcacaagcgacggcgcgcttaatatttaccgatgccaatcgcagcggcggcgacaccatcgtgttgaccaatccacaaaataaacagcagctcaaagtgaaactgtccgttgatgcaccgggcgacagcaacaaacgagatgtgaccgtcaaggtcggttataagggtagcgtcgagctgtttgcctctctcgatgagtcggaactgaaaaaagaaacctcgggcgactttaccggcagtgcagtgattatttttaatgttatctaa

SEQ ID NO: 452795 - DNA, 861 bp, Serratia marcescens
atgataagatgcatggtcttcatcttttctcttacggctttctatgcttctggtgcggtaaatttaaatgagaagtgggtgaaaaaagcaaatggggcatctgtgttatctatatcaccgacagggactgttaaagataagtattctgcgcagaaaaattttaagtgctatccatctgaaggagcagggcttactacgtgcacagcttattggatgatagaagtaagcggctatcagtcaacctattgctcggctactgtggatgttaataagggaactacgcttgattttatggcatcgcagatcgacagtaagctaatgacagcatgtgaatcaagagactattggttatcaggcggtgagccagtatgtgtctggatacgaacctggggaaattatagtgatggtgttaccggtttgacaccctattttgcatcttttgggggcacctgttctagtgctcagggaggggggagcagcggctcagtagagccgccgattgaacctgttagttgtcagataaataatcaaaacattattatacagcatcccgcgttaagtcaggagaatgttgatggcaattataaagagagcaacttcagcgtctcctgcacccggaagaatagcatgaaattagccgtttccgggttggatgcatcagggcgcttggttttgagtagtgccaaaaacctatattcaaaattaaaaataaacaactcccctgcaggttcaggggtgacgataaatgatgtcgggagtgatggtaagaacgttacgatttcttccgagcttcaaaagaatggtgacatacccggtggtaactatagtgcttcggcagtattaactctggagatactttga

SEQ ID NO: 452796 - DNA, 174 bp, Serratia marcescens
atgattttattgtttttggcgttattgctgttgttgctgagtttgttttcattctatatgcactataaaacggttaataaaaagaggctcaatataaacacccagggcatgattgggagggcagcaagaaagaagcgtcggccggcaatccgtcgtcgtgtcgagagcctatag

SEQ ID NO: 452797 - DNA, 1080 bp, Serratia marcescens
atgaatagtgacaatataatggcacgtgcatcattagataatgtatcttataaaacatcatcagccaatacgattagagcaaaacagagttggaaaaaccatatcgatcacttcgaaagtgccatttttgatccgtggtataaagctataacaagaatacactcaatcatatcatcgcaaactggaaatttctttaattcaaaaggattatcccctgttttattacctgtaaccactggctctatatcaagcccaatggggttaggctcagattcgatgccagtaaaaatcaacttgggcggagttgatacatatttagcagattcaatgcagtttttacttgagtacgctctcagactaaatgataaaggtgtttattatctgatgcctacttttagaggggaagaacaggataagagacatttgaatcaattctatcatgcggaaagtgaaattatcggtggattaagtgacgtcatagaacttgccagttcatatgtcacttatctgtgtgattatttcttagagaatgaacgaaatttactatctcagttcaccgacgatatttcccacctaagaaaattatctaatcttaagggggatattccaaaggtaagttttcagaaagcagttaaattactggaaaataatccactctatgtatgtatgcatgagtctggatttaaacaaattactaatgagggagagaaaaaacttattgaactctttgatggaccggtttggctaacgcattttccgaagttatcagttccattctaccaagctgactcattggaagacggttattcactgaccgccgacctactaatggggattggtgaaactcttggtgctggagaaagaaatacatatgccgatgatgttattgagaatttaaaagcaagacaggtagggagggaagaatatgaatggtatattcgtatgcgtgaactaatgccactccgaacttctggctttggcatgggggtagaaaggtttattttatggttgattaaccatgatgatattcgtgactgtcaattactaccccgtgtgcatggagagaatattttaccttaa

SEQ ID NO: 452798 - DNA, 351 bp, Serratia marcescens
  misc_feature (319)..(328): n is a, c, g, or t
atgaaagaattaagcttagagaagatcccaaccattaagtatttcccaatgattggcatagtaaaagagactaatagaccgccgggcggaatgaatagcattagaaaaatagcacagaatgctttcttgaatagcaagaaaaacgtattggaagtgggtacggcgaccggagtaacggccattgagttagctaagttaactgagtgcaaaattacggcaattgatattgatgaaaacaatttgtcagttgcgagagatcgcgctgaaagcgaaaatgtcgccgatcttatttcatttgaaaaaagagatgccacagatnnnnnnnnnngtcttattttgatgacaaagtaa

SEQ ID NO: 452799 - DNA, 1080 bp, Serratia marcescens
atgaagctcaacaaacgcaacatagatttttgttgttcactggatattggcatgaatagcagagatcaaaagttaaaaatgcgcgttgataagctctgtgtggtaagtcaattcaatgagaataccgaaacgaagattatatatacaaaactgaaaaggatgagatacaaggagttcaaacaatatcgggttcaatatatccgtaacaaagatggtaaaccttatcgaaaagcgttattgatccgaggaaagaagaaacactcaccggtactgttgcgaatagattattccccaataaatcgtaatacaggaggaatacgtttagattttcgcccccaacatatgaagtccacaaaaatacgtcatttgctattgtggttaaatcgtcgattaggaggaatattctaccaactactggcacaggcatggattacacaaattgatgtcgctcttgacgtctacaaatgcaagttagatgattatatatggagcttggaacgttcaggaaaaacagcatactttgataaggaaaatggtttaccggggctaaggataggaagttgccgttcgcttttacacatcctttgctacggaaaagtagatgctaacagcggtagaaaactggtatttcaggaaagagccaaattcattaacattaattttgatgagtatcagcaattcttgcgtattgaggctcggtacaggccaaacactaaacccacaagcaagaagggtaacgttttgatgctggcccacctttcagatatgaggaatcctttcgagcgactccgggtctactcgaaagatttgggggatgagctattggaaagagggtttctttgtacattgccagacgctcccagcatcgctgaaatgaagcgctacatgctggcaactatgcaatgctcacgcttacctcgcaaagtcgatagactcattgcagagtacgagatagagctgttcaataaacatacagtctggacgcagtggtcacgctgcgttgcacaattaagcagcattatcagtatagcgtcggttttctgtgtacatagccgtgtacataatgaaaatcctgagtag

SEQ ID NO: 452800 - DNA, 597 bp, Serratia marcescens
atggtgcagatagtgagaaagcaaaaaatacttattattgaatcacgcagcgatctggatatttatgatgaaagatgcgagggaaatacgctaaggaaggttttggagttacaaggagtagctgcaaaatgtattgaagtagttaatgagggaatgttagtaaaagcattgaagatagcgcaaagagagcacataaaatatgtacatatcagtgctcacggctcatgtgatggttttattttaacagatgagggttttattacatggcgggattttgatcgtatagcgtggcctatattaagaggtaaatgtatttgcttttctagctgttcagtcggtaggggcgctgaacaattatttaattttcataagtctttttgtaacgcaatcgttggacccacacgagatattacttggggtgaggggcttgttgcatattcagcattttatcaccgggcacaatcgtatgagaaatcatccttccaagatgttcgggtaatgaatcatatcgttggcgcgagaacattcagacttatagaatcaccatatatatcatctacctatacaattgatggttctctaaaatatgtttattaa

SEQ ID NO: 452801 - DNA, 138 bp, Serratia marcescens
atggccttccacaacgccattactccatctgctgcttatcgcttcgtgtattgctgttgcatccgcttccataccgaccgcaacacgctgaaggtcaatgagcccactttgacttacgtcagagaaccattgatttaa

SEQ ID NO: 452802 - DNA, 189 bp, Serratia marcescens
atgctgtttgaggggctgagaaaacgctacccaaagatccctctaaaatcatctttaccattcttggggtatatcaagcagcagatacgacctatcgcaggcaaggcgaagatgccaaataacccttacgccaagccggttacccatttccaccgcctccatagcgtatgtttggaggtcgttgtgtag

SEQ ID NO: 452803 - DNA, 360 bp, Serratia marcescens
atggcactcactgaattcggtaaggccgtcagaaaagcgaggatagatactgattgcacactactcacgatgtccaaagagttaggtgttacttctgctttcctgagtggtctggagaccggcagtaaaaagatacctaagaaatgggttaaggacatacaggctttcttcaaagcccgtggacttgaactcgaggatttacaacaactggcagacgtttctaacgagtatgtctccctggatggattgtctcagaatcagcaaatgctcgttgcaggatttgcgaaatcccctctgacacctgatcagctaaagaggattgctgagctaatgaaaaacattaacaataatggggattaa

SEQ ID NO: 452804 - DNA, 513 bp, Serratia marcescens
atgcggacagttgctgtggtgccatatgagaaacagtggcctgtaatgttcaaggctgaaagttcactgatacaggcattactcggtgaggtggttaaggatgttcaccatattggcagtacgtcagtccctggtctgtcggcaaagccagtaatcgacatactgctagaagttcacaatatcaacgagctggataaatataacttagagatggtccgcgcaggatacattgcgcgtggtgagaacggaattccaggccgccgatacttcattaagggtggtgatcagcgtagccatcaagtacatgcattctcggtaggagacatacaggtcttaaggcatcttgcttttcgtgattatcttataaaaaatagcgatgttgcagaaagttacgctgaaataaagcgtgcagcagcgtttgacagtaagaacgatgttcatcgctatagtatgctcaaagcgagctttattgagcatcatctacagctagcgctgatgaatctggaaaaatag

SEQ ID NO: 452805 - DNA, 831 bp, Serratia marcescens
atgtcatctctgaattttcctgtgataaatcgctcctttgaaacaattactcacaaagaagctccgcatattgatgatttagaaaagcttagtgagcatgattacgcggtataccaagctctagcatcagaccaactagcacctgttcgaatagctattggttatgaggggtaccaaacagaatctggtcttagaaaaggttttatcaaacatgtttcagattctacaacattcagagccttcaaaataccttcattgattatcagtgataatttttccattataaaatcgaatgatttcccctattatttgtctatacctgaaggtgataaatggattatttcggcatcgagcaattgtaatccgctgatcttcgcccttgaattaatctttggtaaaatacaacaaaaatatggggttaaccttcatttggatgaagaggtatttgatgaaaatacttgtcccctactctctatcaagaaaaaagatggtaaatgggatgcatacgagattgaagccaatagctcttttctaaaaaacagagagccatatcttgcttgggaaccagtgcctatagatgaagatgaaatgctattgctaaaagagatagagtcatcgtctattattacgcaggatgatatttttcgtttgaaatccatttcagataaaactgacgagttaatttacaaactcacacatgctggatatttcatgcattcttataatggtatatcgaagggggctggtttttattttttacagttcaattcaggaaattacctcctctttccaaataaaagaaaaatgcaacagtgggtaaaaaaatcataa

SEQ ID NO: 452806 - DNA, 231 bp, Serratia marcescens
atgccatttagtacattgttgaaaactatcgttataactcatgctaaagctggggatgtcaagtttgaaatttatcaggatgagcatggcttgttttttgctgatatatggcgaaagaactccgagggcagttggttgatgggacatgatgactatagttttaagcaggctgagagcatcgaagatgccgtgaaaagttgcgaaaaatatgtccataatcttggaaaataa

SEQ ID NO: 452807 - DNA, 555 bp, Serratia marcescens
atgcttttatttcaatgcattgctggatgtatagctaccttctctgtgtacacttctgttcacctacagggtgaacagtctgaatcgcaggcacaaaaaaaccggcctgagccggtttggggagcgcttgtcgttatgatattggccattcagcggccgatagaatgccctggtgttgctgcgtgtgtttgggtcaatgccactataggcggcgcggcgattgagcgtccaatgggttcggcagatcaatcatggtctattgatcggccgggccgatcgactcactcaccgtcacacagcaccgcacttcggcaaccagtccgcttcgcactcgtcactcaatatcaggttgatctgtattcccagcttggtgcggcgtttcagcagcgtatgctcatactctttcagcgtctgcggcaccgtctagtgcaaaatggcatctggatagatcatgatttggcgtgcatctccgatgcgtggtttaggctatcgcctactcggaaatacgtttcggtgtcatcgagaagaaggcctcatcgcgtcactcgcagctag

SEQ ID NO: 452808 - DNA, 249 bp, Serratia marcescens
atgcttcgcatggataacggcccggaatttatttcgctgaccctggctgagtgggcagaaatgcacgcagtgaagctggaatttattgaaccgggtaaaccgactcagaatgcatttattgaacgttttaaccggacataccgcactgagatactcgatttctatctgttcaggacgctcaacgaagtacgagaaatcaggggcggtggcttacagaatataactgtgagcgtccacatgaatcgctga

SEQ ID NO: 452809 - DNA, 1218 bp, Serratia marcescens
atgtcaacagcaacagcgggtagtgccgggtttaaaaagttaccagtaactgttttgtcaggctttctgggggcaggtaaaaccacactgctaaaccacatcctgaacaatcgtgaaggtcgccgcgtggcagtaatcgtgaatgacatgtctgaagtcaatattgatgcagcgcttgtacgagatggcggagctgaactgtcacgtaccgatgaaaaacttgttgagatgagcaatgggtgtatttgctgtactttacgcgaagatcttttgctggaggtcaatcggctggcgaaagatggtcgctttgataacctggttatcgaatctacgggtatctccgaaccattgcctgttgctgaaactttcacttttgctgatgaagacggacaaagtctgtctgaggttgctgaactcgacacgatggttacggtagttgatggttttaacttccttaaagattatgaatcaaacgaaagtattcagtcgcgtggtgaatcactgggtgatgaagatgagcgtaccgtagttgacttgctcatcgatcagatagagttttgtgatgtgttgattctgaataaaactgacctgattgatgattcacagaaagaaaggttaatgcagattctgcaatccctgaatcctcgtgcaaaaatcattacttcagaatttggtaaggttgaactgaacaaagtacttaacacaggattatttgactttgaagcggcttcccaggcgccaggctggctgaaagaattgcgcggcgagcatactcccgagaccgaagagtatggcattcgcagctttgtttttcgtgctcgtcgcccgtttcatccgacacgtttctcacaatttattgagaacgatctgaaaggtgttgtacgttccaaaggctttttttggttagcaagtcgtccacactatgcaggctcctggtcacaggctggtggagtgtcacgccagggggtggctggtatgtggtgggcaagtgcaccaaaagaacgatggcctgaggatccggaaacccttgagttcatcatgcagaactgggttgaaggcactggcgatgcacgtcaggaaattgttttcattggtatggatatggatgaagcagtgcttcgtcagaaacttgaagccgcactgcttaccgatgaagaaatggcgctggggccattaaactgggaagagtttccagatcctctgcaaccgtggttttaa

SEQ ID NO: 452810 - DNA, 870 bp, Serratia marcescens
atggaacttttcgttaataatttaacggttattgatttttcttttattgattcagtaagaggattagtgggtgaaagtctgattgtcgatgtttgcttaaaagggcagctggatgatcaatccatgatcatggatttttctctcgttaaaaaggaaattaaaaaatatattgatggcagcattgatcatgcagttgctattccagtgggaagtaaaaatgtaatctttaaaaaaaggagttcaagaggtgaactaaccttgtttaatcatgagggtgcggtagatttttttgtgtccggccccatggaaagcttttatcttgtacagtcaaccactattgataaaacaattcttgaagaaaagttaaacaaagaaatcaggaaaattctgccgggaaatgtaactaatgtctctatctccctgcgggaagaacatctggcaggcagctattatcattatacacatggcctgaagaaacatgccggtaattgccagagaatcgcccatggacaccgttcggcaattggtatttttattgatggcaaacgcagttcttcgtgggaaatgtactgggcagatagatggcgtgactgttacctgatgtctgaagaggatattgctgatccctcccagctatcagaaaatgcaaaaaaaatatacagttcggcgctagtggcatcagcttatgccggtagtcaggggagatttgaactactggcgcgacatgagcgtgttgagatattgccacgtgataccacaattgaaatgattgcattctatatcaagcaggaaatcagttatttaaatcctgaactgaagagtattacggtacatgccttcgagggtattgagaaaggggcgcaagtttaa

SEQ ID NO: 452811 - DNA, 243 bp, Serratia marcescens
atgatccctaaaacttacaatgaatgggaaaattgtattgtcaatgattgtggcattgaattgacggactcatttattcaacaacgacttgatgtgctgaataatgaatcccaccatgaaacgaaacgcttgctgtcgctttatggcaaacctcatctggaaaaactaattcgctggttcacgactgcagcagaaaaactgaatacggagaacgaacagacgacattgaatcagatacattga

SEQ ID NO: 452812 - DNA, 1641 bp, Serratia marcescens
atgaataacgtggctttaatcggccttgagagtacaggcaaatccagcctgttcaatctcattacgaggagtgcctccagtgatgagcgtaactttcgcggctctaccgtatattgccgtgagaaacagttgccagatggcctgggtcatctgattgatacacccggtattcgctatgcgagcgatagtgtaacgacatcaatggcgctatctgccctgcagcaaagtgacattatcttgctggtgatgcgggccaaccacgcgatggccgaatggaacatcctgcaaccggtgataaaacagaaccctcatcggctggccattatactgacgtttagtgacaaaatcgccacgggtctcgatgcaataatccaggcatttcaccttaagacacaggcaccggttttagcactcaatgtccgacatgccggagaaaaggagcgactgcagttaaatgagctactgcgacaggttaagtcggtaaaatccaccccaatcaacaacagtgacatcattccgatcttaaatgtctctactgcaaaaccacagcgttcatggtttgaaattgattatctcggacctttgctcgccgttattgccttaatatggttatttgcagcacctgtatggctggcctggcacatttcagactgtacgcaaccattggcagttcaattcttcatacatccagctattcgctggctacatacagccccagcattcattcaggcattattaacaggcagctatgggattctgtctctgggaatatattcgtttatctgggcctttccggtggtgtttctcattggcctgtccgtggcagtcaccgaagatagcggaataaaggaacgaattattcatgccctccatccgttgatgcacaaaattggcctgagcggcgatgatttgatccccatattgagcgggtttggttgtaatgtagtggcggttttccagagcagaagttgttcacaatgttcccgaaaaaactgcatcagcaccatagcctttggttccgcttgtagttatcagattggcgccaccttatctattttcagtgctgcaggacagcctgaactttttgctccctacattgctttgttgttttgcacggcatgtctgcatacacgcttatggcatcatacccatataccttcgaacacactggcctctgctgatctgacctggttgcaatggccgcgctggcgtgccgttaagtggtcgctgaaaaatatggtgatgcaatttatcttacaagctatgccgatttttatcggcatctgcctggtggccagtgttctcgattattactctatcattgattcactttgtcattttctgtcgcccatagcacaactattccatctcccccaacaggttatgccagggattatcttttcattattacgaaaagacggattaatggtacttaatcaggataatggcactttaattcgctcccttaattctggtcaattaatgttgctggtgtggctggcttctactctaatggcctgcctggtcaccgtaatcactatcggcagagaaatatcctggcgattcgccaccaggctaattatcaaacagttaataagttcactggctgttgcagtccttttttcattaaccctcagttga

SEQ ID NO: 452813 - DNA, 1122 bp, Serratia marcescens
atgactgaacacaaagacgttgtaatagtgggagccggccctgcaggggtcggcatcgctgcgacactacgccatatcggtgtggaaaattttgtccttcttgaccgctacgaggtaggtgcgtctttccagcgctggccagtcgaaacccgatttatcacaccgtccttcttttcaaatccatttggccagattgaccttaacgccgtggccccagacagttcccctgccctctcatcaggaatggagcatttagacggcaaagcttacgccgggtatttgcgagaagtacttgatgctcacgctatagagacgctcacttctaaacatattgttgaagtttctctgaaccgtcagggacgttttcgtctcctgtcggctaacggcaaaagatgggaaacgcctgtattaatctgggctaccggggaatatcagtttccagatatgcatgcctttgaaggtgcagatctgtgctgccattatggctatgtcaacagctggaaagattttaaaccagaccattacattgtgattggcggctatgagagcgcggtagatgccgcgctgaatttactggaacagggtagccaggtcagattgttaacccgttcggctccgtgggcaaactaccatattcaggatcccagcgtaagcctttctccgtatacccgtcagcgtctgaagagcgcaatggataaccctcatctcgagatttatgaagatgctgatatcaccagcgtattgaagactccaaatccggatggcgtgtatcgcgttaacaccgcagatgggcgcgtctggtgcagtcatcagcgccccatcctcggtactgggtttatctgcggaggtggagcacgccagatcgcaccctttttcgactggaattctgatggtcagccactcctgaccgaagaagattgttcaactcgttttccgggtctctacctggttggtccccaggtacgtcatgaccagcgcattttctgtttcatttataagtttcgtgagaggttttcaattgttgcacaagcggtggcgcgccagctgaatattcccctggtaaaacaaatctggcaggtaccggatgatgcgtgctgcaaagatgaaagctgcggatgctga

SEQ ID NO: 452814 - DNA, 1383 bp, Serratia marcescens
ttgattaaactaacaaatacttacggtgggcaaaaagtaccattcgttccgatcaacaacaatcaggtggggatttatgtctgtggtgtcactgtatatgacctgtgtcacctgggccatgggcgtacatttgtggcctttgataccatcgtgcgctatcttcgcttttccggctacaatgtcaaatttgtacgtaatatcacggacatagatgacaaaatcatagcacgttcacaggagacaggcgaaagctggcaggcactggtcaatcgcatgacaacgaaaatgcatcgtgactttacagcgctgaatattcttccacctgatgtcgaacccagaccgacagaacacattccgcaaattattaagatgattgatcgcctgattgcccgagggcacgcctatattgcgccggatggtgatgtcatgttttccactgaaacggcaaaagattacggcaaattgtcgggacagaatttaaataatctgaaatcaggtgcacgggtttcagttaatacacaaaagacgaatccactcgattttgtgttgtggaaacaagcgaaaccgggtgaacctgcatggacgtcgccctggggagcaggtcgtcccggatggcatattgaatgttcagccatgaacagtcatcatcttggaacacattttgatattcatggcggcggttcggatctcatttttcctcaccacgaaaatgaaatagcccaatcaaccagtgcgaatgatggcccctatgtgaattactggctgcacaccggcatggtgaccgtcaaccaggaaaagatgtcgaaatcactcaacaacttcatgaccctgcgtgagatgcttgcacatcatgacggagaagtattgcggttgttctatatcagcgggcactaccggaaacccctcaacttcagtcagggtaaccttgatgcagcacgatcctcacttgcgcgcctctattcggcatgtcgtctggctaatggcaaaaaacctgcggaccatgctgtctggctaaaacattttcagcaggtaatggatgatgacttcaacacaccaaaagcactggcagttatgttcgagctggtccgaatcatcaatcaacaggtagtagataaacctgatgtagcaggtgcgctcgcgactacgctaaaagaactcggtaatatactgggacttttaacaaaagaccccactgtctatctgcaaaccaacccgctatgggagccatcacgtctggatgatattaaaaaccggattaaagagcgtgaagaagcccgtaaaaataaggaatggcaacgcgcagataacctgcgggcatggctggaagagaatggtgtggagctggaggataaagatgggaagacgctctggaaagccaaataa

SEQ ID NO: 452815 - DNA, 177 bp, Serratia marcescens
atgaggattttgtttacagtcaggacagataccatagctggcgagaacgacttcgcgttccgccataccctgttcagaaaggcgggttttgaccagttgcattgcagcttcaagcaccggatctttctcaatggggataacatgatggcatttgtcgcactcgaaacttcccattga

SEQ ID NO: 452816 - DNA, 1209 bp, Serratia marcescens
atgacaaagacaccactaacaatcttgaatggttttcttggagcaggaaaaaccaccttgctcaggaatcttcttgttcaggcgcacaaacaacaactgacagtttgtgtcgtcgtgaatgatatgagtgagctggatgttgatggcgtgctcatctccaacactgaaatcgttaatgaaagcaaaaacaactttgtcacgatttctgccgacagtatcagcagttgcagtggtatcgaaaaacttgatgccgcgttgaagaagatgctggcacagcatcacccggacctgatcttgctggagacatctggcagcagccatcccctgccgttagtgcgctatcttcgcgatcatgcacaggtgcagctcaagggatttttgtctctggttgacagtgtgatgttgaatgatgatttcgatgttggtcagacgctcattccacgtcttcaggctaatctggaaaagggtgagcggcgtattgaaaatctacttgccgagcagatcatgttttgtagccagctgctgctgaccagatctgatcgcctgccgacggaaaatgtcgtcggtatcgctcaggcaatccatcctctaaacccctatgtggcagttagcgccctgtcatggggtaatctgcgattaaacgatatcctgaccatgcctgattacgattttcatcgggtggcggcactgatcgaggagcttgctccggaagtggatgccccaaagcctcaggaggctggcgcatggacaatgacatcagaagttatttatgacgaccgcccctttcatccacagcgtctctgggatgcctgccatcacttcatgggggcgggtatttaccgcagtaaagggtttttctggctaccggggcgtgatgatcttgccctgctatggaaccaggcatcggggagcataaatctcgaatttatcagctactggaaagctggcattctcagacataccgacaaccatctgacgattcaggaacggcagatcctccaggaagaagttgagaatgcgccaggtcgttttggcgatcgccgctgcagtttaaccgtgattggtgaaaaaacccaggtcagtgcttttgttgctgcactcagggactgttttctgactggccaggaaatcgcatggtggcgcgaaggtggtacctttcctgatccctggccacagcgggtgtcccgcatctccagtcaagaatcgtag

SEQ ID NO: 452817 - DNA, 420 bp, Serratia marcescens
atgaacagaccgtcgatgtcggaacagcagggcctgctggccatgccacccgacgaatacatgaatgcgcaacagcttgatttttttaaccgcctgttgttgcacgagcgcgaaacgctgcttaatcacattgaatatctgaagactcagttaaaacaaggtgaacagcatagcgatgaagcagataaggcaatgcgtgaggaagagctacgcctgcttttccgtcagattgaccgcgaaagccggctggtacctaaatttgatgcggcgttgcagcgcatgaagagcggtgagtacggttattgtcgagaaaccggcgatcccatcggcattgcccgattactgcttcggccaactgccgaactatcaattgacgccaaggccaggcaggaaatcgttgaagcccaataccgaaaataa

SEQ ID NO: 452818 - DNA, 918 bp, Serratia marcescens
atgaccgtcacaccttcgctttgcccgcattcactggccgatattcagtcagctgccagtgaattgcaaaatattgcgctcgactgggtagggatggagcaaattgatttgcccctggaattcgaaggtcgcccggttaacgctaaagtttcagctggcatcaatctacttaatgttgagggcgcgaccaaagggatccatatgtcccggctgtatatgcagcttgataccctgacacaaagtgaagtgacgccgggggggatacgcgacgtactgcatgcctttatcgcttcgcagcaggagcattgcaatgatgcgtacctcgacattcatggtgatcttttcctgtcgagaaagtcactgaattctaatcagttcggctggaaaggttaccccatttccgttacagcgcgtgcaggccagagtgagatgttacgcttaaaagtgggcattccgtatgcttcaacctgcccaaactctgccgcactgagccgtcaggttgctcagcttgagtttcgcaaaagctttggtgatcgcatcgatcggttaccactggaggaagtggtgtcctggattggggaacatggcttgccagctacgccgcacgctcagcgcagctgggcgtggatcgatgtggagcttaatccagaaagcccaacattcccgatccgccacttaatcgacacctgcgaactggccttaggcacggcagtgcagacggtggtgaaacggagtgatgaacaggcatttgctctggcctgtgggcaaaacctgatgttttgtgaagatgctgctcgtctgctttaccgttgcctgcgacaggtggagggactgcgtgcgtttgagattcgtgttgagcatcaggaaagcctgcatgctcacaatgcagtagctaaagttagttggaaggaacagtaa

SEQ ID NO: 452819 - DNA, 561 bp, Serratia marcescens
atgttacgtaaaaatcctagtggtcatactcctcaggtatctaccaaagcgtttattgacccaaccgcggtcatttgtgggcgcgtgattattgaagattacgtctatgtcggcccctatgctgttattcgtgccgatgagctgaatgagcagggggagatggatccgattatcatcggttctcattccaacattcaggatggcgtggtaattcactctaaaagtggggccggagtgacaattggcagcggtacttccattgctcatcgggcgattgtgcatggaccctgtacggtagacgatcgggttttcatcggctttaacagtgtgttgttcaacagccacataaaaaccggttgtgtgattcgttacaacgcagtggttgatggtgttacgttgccagaaaatacctatgttccatcaaccgaacgcgtcggaccggatactgtcctggaaaaactgccgcgtgttgatccggcatcactgcaattttcagaagaagtcgccacaacaaatgtccagctggtagagggttatcagcggttacgtaacgagttctga

SEQ ID NO: 452820 - DNA, 1959 bp, Serratia marcescens
atgtctgaagccatatcatctccccaacaaaacgtcatattaactctgcccgatggttctcaacgggattttgttaaaggcaatactatccatgagatcacgaaaatcatgggccaggcagtatttgagagtgctatcgccgctgaagtgaacggtgaagcggtggatctcagtaccacacttgatgcagatgtacgtctcaatatcattactctgcatgatcaagaggcacttgagattattcggcgcagctgcgcttatctccttgggcaggcggttaaggaactatttcctgaggcacaacgcgttgaagcagtgctgacagagcacggtttttattatgactttttcagtaccgtgccattaacaaccggcgatttggcccgaattgaacagcgcatgcatcagctgattgcgcatgaggctcgcattgtcaccgaagcggtacaacatgacgaagcgctggcgtggtttgctgctcagaatgaaccgtataaggttcatggtttacagacctggcagaaaggagaacctgtaggactctggcaccaccaggactatgtggatttctttccaggaccgcatgtgccggatacgcgttttctgaagcacttcaagctactgaatgtcgcaggtgcttactggcagggcgatgtcaaaaaggaacagctgcaacgtattcatgtgacggcctgggcaacggcaaaacagttgactggttggcttgagagccgggcggtagcggagcaacgcgatcatcgtaagcttgggcgcgatttagatctgtttcatttccaggaaaatgcgcctggcgctgtattctggcatccacatggctggaccctgttccagcaattgatcagttatatgcgtcagcgacacgatgcggctggctacgtggaagtgaatacgccggatgtcatggatcgttccctgtgggagatatccgggcactgggagaattatcgtgaccacatgttcacaacgcagaccgaagatggccgcacgctggcacttaagccgatgaactgcccgggtgccgtttcactgtttaaccacggcataaaaagctatcgcgagcttccgttgagaatgtctgaatttggtaaggtgcaccgttatgaaccttccgggtcactgcatggtctgctgcgcgtacggcacttcacccaggatgatgcacatatattctgtaccccgcagcaggttgaagcggaatgtcgccagattctggtgctggtactggatatttatcgtcagttcggtttcgaagatgtctccatcaaattatctacacggcctgaaaaacgtattggcagcgatgaagactgggatcgcctggaaagcgcgcttgaatcatcactgagggcggaaaatctgacctggagtgtcaacccgggtgagggggcgttctacgggcctaaactggaatttgtcctgcatgatgcgattggtcgcgactggcaatgcggcacattgcagattgatatgaatctgccagagcgtttcgacatgcgttatatcgcggaggatggcaccgcgcagcgtccggtgatgttgcatcgtgcactatttggttctctggagcgttttaccggtatcttgctggaacattatgcaggaaaactgcccgcctggctgtcgccggtgcaggcagtggtcatgacggttactgaacagcaagcggattatgcgcgcggtattgctgctaagttacgtcgtcagggcatccgttgtgaatgtaatctgaggaatgaaaaaattggcctgaaaatacgtgaacaaacacttgcgcgcgttccttttatgctgattgtcggtggtaaagaggaggagcaacagcgggtcactattcgcgatcgcagtggtgccaatatgggcgctctgctgattgatgaagctgctgatgcactgactttgtgctgtcaggttccacctgtggaagcaaacgtcaactga

SEQ ID NO: 452821 - DNA, 711 bp, Serratia marcescens
ttgctctcatcttcgctggccgtgtcgctggcgaaaaaatatggtacgcgcttacacgtgctccatatcaccactgccgatgaactgcgtttgtttgaggccgcgcccacactcgaggcgctacaaaagaaaaccattactgcggaggcctgcatccatcatcttttcttcaatcaggatgattatgacgtgcttggccatcagctgaaaaccaatccctcggtgaaagatgtttcacatcagcaggcgttatggcaggcagtgaaggatggcgttatcgacattatcgcgaccgatcacgcccctcacctgttcgaagagaaacaacaaccctacctgacggcccctgccggggtgcctctggtgcaacatgcgttaccggcactgtttgatttatgccatcgcggcgtctttacccctgagctgatcatcagcaaaaccagccacgccgtggctgagcgcttccagatcaaggatcggggttacatccgtgagggttactgggccgatctggtattaattgacccccgaaaagcgttgcatgtcagcaatgacgaggtgctgtacaagtgcggttggtcgccgtttgcgggtaaatctttgcagggtgggctggtagtgatgacgatggtgaacggccacatcgcctggcgtgacggtcatctcattgcttcgccgccggggctaccgcttgagttttacaggcattaa

SEQ ID NO: 452822 - DNA, 1017 bp, Serratia marcescens
atggacgtgaatattgttggctcttatccggcgcgtcgtttgcgccgtagccgttcgcaggcgttcagccgtaacctgacggcggaaaatcagctgagtgtaaacgatctgatttatccgctctttatcgtggaaggtcacaaccagcgacaggaaattccttcgatgccgggtgtctggcggttgtctatcgatcagttaatcagggaggctgaggagatagtggctctgggcattcctgccgtggcgctgtttccctgtattgaaaataagctgaaaaccccgggcggtgatgaagcctgcaatgatgatggtctggtgccgctcgcgattcgggctttaaaacgtcattttcctcagttaggggtgatagcagatgttgccctcgatccctacacttctcacggtcaggatggcatcctcgatgaaacgggatatatcctcaacgatgagaccaacgagatactgactaagcaggcgatgacactgacttacgccggggccgatgttgtggcgccgagtgatatgatggatggccgggttggcaggattaggcaggcgctggaacaacataaacaagtaaatacccagatcatggcgtactcagcaaagtatgcatctggctattatggcccatttcgcgatgccattgggtcagcttcagttttacgcagtggggataaaaaagcgtaccagatgaatccggctaaccgacttgaagccctgcatgaagttgctcaggatctggcggaaggcgcagatatggtgatggtcaaacccggcatgccttatctggatgtcatccgtgaggtgaaaacgcaatttgctgtcccggttttcgcatatcaggtgtcgggtgggtatgcgatgcatatggcagcatttcagaatggctggctccaggaacggcagaccgtaatggaatcgttactctgcttcaaacgtgccggggcagatggcatcctgacttattttgcccggcgtgtcgctggctggatcaacgaaccacgcgggtga

SEQ ID NO: 452823 - DNA, 315 bp, Serratia marcescens
atgactgaacgcaatcatgaccagacgttttcatcgttgcggcgcaaactgctgttatccgggctggctttgagcctgcctgcgattgcgaaagaagagtttgcgaccctgtattttgtgccgactccacagcatgaaaagcatcacctgccagtaaaaaaacgcactgctatggacaagcgcgtgaaatgcgtaatgatcgaccctggacatggtggtgaagatccgggtgcgattggccatgagggatcagaggaaaagcatgtagtgctggaaattgcgaacaatatttgtgcgctggcacaggagtgctaa

SEQ ID NO: 452824 - DNA, 282 bp, Serratia marcescens
atgatattgctggccgttggcggtgcgttgctcctgttgtggttgggtatgacggtcttgttggtgggagggatgtgggtgttgccaccactttcctcatcaacatcgctgtcgacagcgggaatatggcgctttttgtccggtgagtttggtgtttggggaacgctgcgcgtgggaatagcggtgggggctgtggtgtggtggtgtggtggtgtgcagcggccggttatcccctgttgctgtcagtgcgtgatgggctggccctggtcgtgggtggtgtga

SEQ ID NO: 452825 - DNA, 1032 bp, Serratia marcescens
atgtttatcaaatgtttcagctttattgtttttctcatggggttgggtagtggtgtatcctttgctgcaatatcttgcccaagttgtgccaatcccactattactacgaatatcactagagatataggtagtgatgataatagtgtaggtaaggtcttaactagttctgattttgtgactggttcatatccgatagttgttaatgtgagccaggaatcatacgtcaatgagtggtttgttttttcaggtgagtcaattgccccgagcggcactcatcgaactagttgggggttttataaggttaacgactatatttcatatggtctgaggtttgttaataactgtggggtagagcattatgcgccatttaatacaaaggttttgagagaaggggattgtcatcagcaggtttataagcctgaaacgtcaggagacatctggtttccgagggtgtttcagactgcaattcgcatcgataaaaaaataatctccggaacatactctaaaaatatatttgttggtgaatatggtatctgtgcaaatgctgctggggattgccgtagtaaagatgtcgttttatcaaggttatatatttcattgaatattacggtgccccagacctgtgagttgaatgctggccaagtaattaatatagattttggtaatgtctcctctggcgcatttaaaaccgcgggagcgattgctcagggggttcagcccaagtcgcgagatattagtgtcaagtgtgacaatattgctggcaatgctcaattgaccctgcgtctgcaggcagataagaccaacggtaatattgtggtttcggatgagaataatgatgtcgggttccgtgtgaccaataatagcgggacgccattgatacccaataacttatccagtgttattccctttaccctggacagtaatgcgcgtcagaacgtcaccatacaagcttacccggtgagtgtgacgggaaataaacctacagagggacctgtaacatcgcgaggttatttgcgtgtcgacttcccttga

SEQ ID NO: 452826 - DNA, 2331 bp, Serratia marcescens
atgagcgcccacttcgtttcccagaccgtacgcaccgccaccggccactggccggtgatactcccggccctcggcatcgccttgcagccgaacagcaaaccgcagccgtgcccaacctgcggcggtaaagaccgcttccgcttcgacaatcaggaggggcgcggcacctggttctgcaatcagtgcggggccggtgacggcctcaacctggtggaaaaagccctgtcgctgtctgccagggccgccgccgaacaggtggccgccgtgatgggagaaaacaccaacgctctgccaccggccgctgagactggtcattcaacgaaagataaggccgagtctcagcgcaaggccgcgcgacaggcacaggctctggtggccgctgcccggtctctgaccggcaacgcctatctgagcgccaaaggctggccggaggcagaaaccctgaccctgcacggccagccgctgcgcgttggcggaataaccttccagcccggcgacctgctgctgccattgcacaatgccggtggcgaggtggttaacgtgcagctgattaacaccagccgggacaagcgcatgcttgcaggcgggcaggtgaaagccgcttgccacaccctaagcggcccagacaacgcggttatctggctcaccgaaggctacgccaccggcctcaccgtgcatcgcctgaccggcgaaacggtgtgcgtggcgctcagcgccaacaacctggcggcggtggcagagcagctgcgcagccattacccggatgcacggttgctgctggcggccgataatgaccgcagcggcaccgggcaggcacgcgccgccgaggcggccacactcaccggcggtatccctgtactactgccttcggaaggcgactggaacgacgtctactgccagcagggcgctgagtccacgcgtgcccagctacaggcatttagccagccgccgcagcccagcccgttcgacacgttgagcgatgccgacctcaaagccatgagcgccagcgagaaggccgaactgctggccgagcactacggcaacaccctggcggtgccgccggtgggagaggagctgtgccgctacacgcgcggcgcctggcaggtgctgccgcaccggcagctgagccgggagattgctgcgttgttccagaaggtgcgcgcaccgttctctgccgccggtatcaacagcattttggacaccctcaagctgatggtgccgcagatgggcgacccggcccgccggttgataggctttcgtaatggggtattcgataccgtcagcgggcagtttagcgcccaccggcaagcgcactggctgcgcaccgtcaacagcgtggactacacgccgccgcgtgccggggagaacctggccgaccatgcaccacacttctggcagtggctgacgcgggccgccgggggcaatcacgacaagcaggagcgtattctcgcggcactctttatggtgctggccaaccgctacgactggcagctgttcctcgaggtgaccggccccggcggcagcggcaaaagcgtgatggcggccatcgcccggctgctggccggtgccgataacaccacctccgccaccatcgataacctggagtcggcgcgcgagcgggccagtgtggtcggttactcgctgattatcttgcccgaccaggagaagtggagcggtgacggagcgggcatcaaggccatcaccggcggcgatgcggttgccatcgaccccaaataccgcgacgcctacgccgcctacatcccggcggtgatactggcggtcaacaacaacccgatgcagttcagcgaccgcagcggcggtgtctctcgcaggcgggtgatactcaccttcccggacgcaataccgctagccgagcgcgacccgcaactgctggacaaaatcacccaggagctggcagtcattgtgcgtcacctgatgcagcgcttcgccaacccgaatgaggcccgcacattgctccaggcgcagcaaagctcggacgaggcgctgaccatcaaacgccaggctgacccactggttgatttttgtggttacctgacggtgctgggcaccccggaagggatgatgatcggcaatgccaacatcaccccggccaacccgcgccgctatctgtaccacgcctacctgtcgtttatggccgcgcggggctatcagcacgtgatgaacctgacggcgttcgggctggcggtgccacagacgctgaaagagtatgagcacacgctgctgaaacgccgcaccaagctgggtatccagaccaacctgcggctgaatgatgactgtgacgtggactggttgcccaaatgcgaggcgtaa

SEQ ID NO: 452827 - DNA, 204 bp, Serratia marcescens
atgataatatgggctgaaatacaaaatatcatcctcaattttattcagccggggaagccacaacagaatgcgtatattgagcgttataaccggatagtgcgttatgactggctggggcactatctgttttattcgctgagtgagttacaggaatacgccacacaatggcaatggttctataataacgaacgaatatggcactga

SEQ ID NO: 452828 - DNA, 234 bp, Serratia marcescens
atgcatgctacctttgagtgtggaataaccagaagactacctgaattgtgccgcgagcatggcatcagcagtgccagtttttataaatggcactcaaagtttggcgggatggacgcggcactgatgagccgacggaaagagcttgaagaagagaaccgtcggctgaaaaaaatgtataccgaagagcgtctgaaggccgaaattattcaggaagcgatggcaaaaaagtggtga

SEQ ID NO: 452829 - DNA, 1635 bp, Serratia marcescens
atgtcccctttctggtgtgcccgcagtgcagccctgcactggcttttactattgacaatcatcggcctgacgttatcggtggtagccatcagcgtgttgtataacaactggagcaaagatttttatgatgcgttggccgattatttccagcacgcctctattgcggctttagcactgcgctatacgggctataccatgctgtttgtgttgactatcgtctgcggtaactggcttaaaaaatttctgatcatacgttgccgccgtgaaatgacgcagcgtttcgagcagatgtggttggcaggcggcgcccactatcggctcagtatgaccagcgagccggacaatccggaccagcgaattgccgaagacatcaacctgttgattacacagagtctggagatgttgctttcgctggtaaaaaatatcgcccgtctgttttcattcatcgccattctctggcagctgtccggcgtacacacactgcacctcagcgatggctacaccataaccatccacggatatctggtgtggaccgctctgggctatgctgcgttgagcagcgtactggctcatctgttcggccgtcatttgcatggactcaacgtggcacaacagcacgctgaagcggactaccgagccactctgttgcgcatacgggaacatggcgagcagatcgcgttttaccgcggggaagaggctgagcatgtgcgaatgcagcaacgttttctgaccatcacaaaaaactggcgccacctgatgggccaggagttcaggctggagacgtttaccactatctacttccgctttagcctgatgatcccggtatttgccgtgttgccactatacctgacgcgtctggtctcgctgggagcaatcatgcaggcccgcgccgccttcggctacgtgctggacgcctttggttggtttatcgactcctatcgccagctggcgcgatggtccgccaccgtagagcggctgtgggaattccagagcagcctgcagcatttaccgatatcgccggcaataccctgcgcaggcacagccctgaacatcttcgggctgaccgtgcgccacgccgacggtacagctttgtttttcccctttacagctacgctcttaccgggtgaatgggccgtactttcagcacccagcggtagcggcaagacgacgctactgcgcgcgttggctggtctatgccccgccgcatcgggacaatggagtcttccggcaggaggtatgctgtgcctgccgcaaaaaacctatctgccgcaggacgcgctacgtcgcgtgttgagctatccgctgacgcaaacaccggatacgccgcaactacgacatgtgttaacccaagttggcctgccatcactctgccgtcggttggatgaggtatgtgattgggggcgcgtattgtcgggcggcgagcaacaacgtctggcgttggcccgcgccctgttattgcagcctgcgttgttgtgtctggacgaggcaaccagccatctggacgacgcggctgctattgacctactcgggctgttgcaagaggcattaccagagacgatagtactggccatcagccaccaacctgcagtcttcgaactctttgagcatcattgggtgctagagccgcggcactag

SEQ ID NO: 452830 - DNA, 2496 bp, Serratia marcescens
atgtcgcttacatcattgatctcatcatccggcgcaagccgaacccccaccccgctagcggttgtcattcggtttttactctgtggtaccccgctgctgctcgcgcctggttttgcacaggcgacagttcaaccatcgcgcgtctacgctattcctgccgggcagttgaaccagcagcttagccagtttgccgctcagtcaggggtgtatctggcaggcgacgccagtctggcgaccgggagcggtacagcgttgacggggaactatggcatagaagagggatttggcattttacttgccggcagcggcctgcaggcagtacgacagtccaacggatcctatgtgttagaaaaaatctcctcggacgatgagatgctggtgttggcaagcgtcaatcagaatggcgtcacggaaggatcaggatcctacaccacgcgcagtatgaataccgccacggcactgaacctgtcgccacgcgaaacaccgcagtcggtgagcgtgatgacgcgccagcgtatgaacgaccagagcatcacctcgctggacgaagcgatgggacaaagtaccggggttaacgtcgttaatcagaatggctttcaggtaaaatacgaatcacgtgggttcgtgatggacaacatcaaggaggatggcgtcaacgcctccacccaaaacagcgtgatgaacgcttttcaggcatcaagcgaatcgcccgatatggcaatttatgatcgggtggagatcctgcgaggtgcctctggcctgacccaagggagcggcgaacctggcggcacggtgaatctggtgcgtaagaaacccacttatcaattccagggatatagcagtgtcagtgcaggcagttgggacaactaccgcggcgaaatggatatttcagggccgttaaatgatgatgctactctgcgcggccgcgtggtaggcgtatatcagaacaaacaaagctttgtggattatatccatagcgaacgcaatgtgctgtacggcgtgctggcctacgaccttacccccgataccattgtgacggcaggcatcaactggcagaagactcgctcggtacctgacatctatggtgttccgttcgccaccgacaaaagcagtctgaatctgcctcgttcaacctatctgggcgctagctggaaccgcgtcagttttgaaaaaatcaatccgttcgttgagcttgaacatatttttgccaacgactggatgttgaaaagtgccctcaactacacccactcccgctccgacggcaggtatatcagtgcatggggcaacagtacgacaggggtcgatccagccgtgggcacgggcaggctcaacaacaatctgcgctacgacaacaaaggcgaacagtggggttacaacctgagcatgagcggcccgtttgaatggctggggcgcagccacgaactggtgttcggcggtgattaccagaaagaaaatttcgacaacgagtttggcaggatcgccaacaccgctacggtcgatatctacaactggcagccagaatccgtggctgaacctgactggtcgaatctcgatctttacaacagccgctacaacgatcgttacaacgtctatcagcgcggactgttcgccacaactcgactggaactggcggatgactggaagttgatcctcggtggtcgatacagtgcttacagctatgactactactatgacaaccaccgtaatagcgcctccaacgagcatagcagcctgcacgtgcgcgataaattcgtcccctacggcggcctgctgtgggattttgccactcactatacctggtatctcagctacgcggacatctacaagccgcaaagcgagcgggacagcagcaataacattctgcccgccatcaccggtgtcaactatgaaacaggtgtgaaaggcgaattcctgaatggcgatctgaacgcctcgctggcgctgttccgcatcatccagtccaaccgtgcgctttccgagccggacagctctgtctgtgtcgatgctgacagtggttgctacagtgctgaggggaaggtgcgcagtcagggcgtcgagctggaaatagccggtaagctcaccgaaggctggcagattcaggcaggctacacgctgaccaacagcaaatacctcgaggccacggagagtcaaaaggccgctggattcagcccgcgtacgccgaagcacatgttcaagctgtacagcagctacacgttgcctggcgagttaaaccagtggactatcggcgcaggcctgacggcgcagaccgccacagcaacctacattaaccggacctacggactgtatcaggggggttacactctgctgaacgccaacgtgagctaccgctacagcgataacctgagctttaacctggtgggcaacaacctgactgacaaggtctactaccgcaatctggtcaaccgccaccttggcggcaacaacttttacggcgatccacgcaactttatgctgacggcaaaatacacgttttga

SEQ ID NO: 452831 - DNA, 732 bp, Serratia marcescens
atggggcgccggcgggccctaaaactgagcgtgctgttcgcttccagcaccttgctctcatggctaacttaccgccacacgccgctgcgtgaatcgctgcttgccgtcaccgctgactaccacagcgccacgggcgaaataaaacagctgatcctgcaggatggcacgcgtctgtggctgaacaccgccagcgctgttgatgtgcgctacgatagtcagcgccggcaaattgttctgatatcgggcgacctgttaatcgacaccgctcgcgatacgaggccattttttgtctcaagtgaacaaggccagatgcaggcattgggtacccgtttcagcgtggaacaacatgatggctctactcacctggcagtttacagcggtaccgttgaagtttctgcgcagcgtggacacgttgtacgccgggtcaatgcgggccagcagctggattttgaacgctacggcaagggggcgttatcccctaatgcacatgttgacgctgattggtcgcaaggcgtattgcaggcgaataacaccccgcttggcgaaattattaagcagctggctcgctaccgacacggctacctggcctgcgacccgaatgttgccgatctgcgggtgatgggcgcgttcccgctggcagacacggacaagtcgctggcgatgctggcacaaattttccctgtgcgcatccaccgacgtttttcctggtgggtgacggtggaaaagcgttga

SEQ ID NO: 452832 - DNA, 555 bp, Serratia marcescens
atgtccgccattgatgcctcatctccatcagaaatccatcaactgtacctgcatcatcacagctggttgcgagggatcctgcgtaaacgattaggtaacctcagcgatgccgccgacctggcccacgatgtttttatccagctgctgctaaagccccgatgttttgacagcaacgaaggtgcgagggcctatttgagcgtaatggcgcatggtatgtgtgtcgatctgtggcgacgcaaagagttagaaaaagcatggcttaacacgatgcaactccgcgccaacaccatcgtgatttccactgaacatcaagtgttgatactggaaacattgtatgaggttgacaccatgctgcgcagtctgccagaaaaagtgcgcaccacgttcattatgtcgcagattcaggggatgacttacgcgcaaatagctttggccttacaggtttccgaaagaatggtgaaaaaatacatggcaaaagcaatgcttcactgcatattgctggaagcggaactgtcagacgccacggcggatgtcccgtcggcgggctctcgttaa

SEQ ID NO: 452833 - DNA, 1776 bp, Serratia marcescens
atgagcgaatcgctgtactgccggacctgcgccaggatccttcgggcaagtaacctgccaaaaggcttagtggcaacgttgctgtcgcggataattacgcttaccggtattgtcgtgctgatcgggatgctgccctggctttcgggtcaggatcccgccatggcgctgctgagagcgcgttctgccgaacaggaagcaaccccggaagcgttagcagcggttcgccagtcgctggggctggatcagggccctgtgcatctcctgctacactggctcagcggcctcttgcagggggatgcaggtaactcctggatatcagggcacccggtgctgcctggcatgatccaggcagcccaggtgtcactgacgctgatgctgatgtccgccggggtggcactgctgctggcggcgatgatttgcctgccgacattccgacgaggcctgcaggggcgttcgtttcgttcgacgggctttttcgcgtcaatattcaccgcattacccgaatttcttctggcgtcattcttactggtcgttggggccgtctggctggagtggtttcctccttacggctggaacggcctgcactatgcggtgctgcccgcgctggcaatggggatcccggcgggtggctatctggggcggatattctcggatgctttagcggcaacctttagtgaatactggataatcacctggaccgtctccgggatatcgcgctggcacattacctgcgcggtagttaagcgaacgctttccaccgttataccgttaattggcctgattttggtgtcattgacgggcagtacagtggccgtggaaaaggtcttcgccattccgggcctcggcagggcaacgctgggtgccgtggttgcacaggatcttccggcgctgcaaacgggcgtgctcttccttctcatcattgcatttatgttcggaatgctgtgtgcggggatcagataccttattctgggccgggcattacgcacgtcctctctgccggtcaccaatgaacctgacggaaaaagcgggaaattgtcgctgatgcttccggtcgcctgtggcgttgcttttgtcgtgcttctgctttttggtctgcctcgtgatccttcctcgtcagagtttatgcgactggctcatccttccttttcgctgccctttggggccgatgccatggggcgtgatttgctggccagagtagcccacggcacggcgcatacctgcatactggcgctgatggtgtcgcttatttgtcttctcctggggctggttattggtcttttcccccgggtgtttgtgggaccggcagagatggcaaatgcgctgcctccggtgattgcgggcttactggtggtttccatcagtggccccggcagttcaggtgcggccattgcgattgcagcagtaggctgggcgcctcttgccacacataccgctgcgctggcgacagaagttcgcgccagatcttatatcaacatgcttcctgttctgggtgttggctggctgcgtcagaatctgttttacattttcccggcgctaattggccctctctttcgtcatgcaatgctgcgcttaccggggattgccctggctttagcttcactgggttttctcgggctgggcgcatccccgccggagccggaatggggaagagtacttgcggaaggaatgccttatctggagcgggcctattgggtcgtactagctcctgcagtcgcccttgccgttttgtcggtgatgggcgtgagtttggccggtctgagaggtcaaaaaaattaa

SEQ ID NO: 452834 - DNA, 1527 bp, Serratia marcescens
atgaatatgggtaaacctttatggcctgtttatggtctcctgtcagccaccttattactgactggctgctttaatgaaccgcaggacgaatcggtcagcgccagcgagggcagaattaaagtggcgcaccttcttccaccgcgttccggcctgacgccgctcagtgatgatgcctttaaattatcccgctggagcacggctgaaaccctggtcgtactcaacagcgccagtgacgcacagccagcgctggcaaccagttggaagcaaatcaatgacacaacctggcgttttgagctgcgcccgaacgtcaagtttcatgacaacaccgatctgaccgcgcagtcggtcgttaacacgctgagcgtagccgctagtgccaaaccaaaaccccgtattctggatggcgtaacgctcacagccaaagcagacggcgaaaatgctgttctgatcgcgactgaaaaacgcgatcctcttctgcctcagcggctttccagccctcagttggccattttgtcgctgaatgcttacaaagaaaatggcgtggtgaatccggttaatgcggggaccgggccattcattctgcgcagcgtgaatggcaccagcagtgctgcgctcgatcgctttgatggctactggggcgagaaggcgaaagccagcggtattgacgcaagttttgttccggacggggccgcgcgcgcagccgcattacgcactggcacggcggatatcatcgaagcaattcctgtgtctcaggccccgcttctggatcaatcactggttcatgaagtgccgatgccgcgaacgaatacgctttatctcaacacggcgcagggcgtgatgaaagatcccgcgatgcgagccgcagtccgtgacgtgattaaccgtcagcagattgttgataatgtctatgagaaacgtgccgacgtcgcgcaggggcttctgggcccggccttgccatgggccgcccccctgcgcaaaccggtgacgaaccccgttgcggcggggaaaccagacggagccacaatcaccctcgcaacgttcagcgatcgtgcggaattgcctgaagtcgcggtttatcttgcgcagcagctcactgccgccgggtttaccgtaaaacaagtggtccgcgagtattcgcagattgaagctgatgcgctggccggaaagtttgatgcctttattttgtcgcgtgcaaccgtactggattccggcgatccggttgcctacatgtacagtgatttcgcctgcgaagggtcgttcaatatctcccagctgtgccgctcggaaattgatgcagcactgaaaacagccagtgaaacgccagcgggtgaggcacgacgtcaggccattatggacgctgagaacatgatccttgccagcgatgctgcgataccaatgttgcatgaacgcgtcattcagggagaaagtgcggcactgaaaaatgcgctccgtgaccctcgcgagcgcacgctcatcgacagccagacccagttagtcgctggcgaaaagacgactgctgcgcagtaa

SEQ ID NO: 452835 - DNA, 1245 bp, Serratia marcescens
atgactgaattgatttcagggaagaaagcaaacacctcctcctcattgctgctggtcagccagtttatttttaataccggtttttatgcagtagtgccttttctcgctatttttttgcgcgatgacatgctgttatccggtgccgtgattggcctggtgctcggtctcagaaccttctcgcagcagggcatgtttctggtgggaggggctctgactgacaggttcggcgggcgtgccatcattctgtgcggttgcgtggtccgaatcagcggctacctgctgctcgcaaccagcgcctcgttatggggcgtcattctgggagcctgcctgacagggattggcggtgcgctcttctcgcctgcaatcgagtcgctgatggcgcaggcgggcacgcaaagtgaaagaaaaggcaagcgcagccgttcagaatggttcgcgttgttctctgtttgtggcgaactgggttcagtcatcggtcctttgctgggggcattgctgacaggatacagcttccagagcgtggcccttggcggggcaggcgtcttcctgtttgcgctgattatgctctatttcatgctgccgacaggcaccagccatcatggccagcttaaaatttccccctggtggacggcattccaccaacgccgctttgttgcctttatcgtcgcttacagcgcgtatttattcagctataaccagctctatctggcgttacccgttgagctgcgccgctcggggggaagtgaagcggatctcggcccactgtttatgctggcctccgtcatgatcattttcctgcaattgcctctggcacggtttgcccgaaaacgcggcgcatcacagattttgcctgtgggctttttactgctggcactgtcattttttagcgtcgcgctgttcgccagtaccacaccaccagacacgctttggcggctgattcccgcggtttcactggtcacgctgctgacgctgggccagatgcttattgtgcctgtcggcatggacatgatccctgtttttgcccgggataaaaatctgggcgcgcactacggagcactctcctccatgggcggcgtcaccgttctggctggcaattttgccctcggcgggctgctggatcgagcactcatcccttcttcgcaggcttttgtgccatggctacttatgggctgcattccgttatgcagcgcagtggccatgctgtttattttacgatcgtttaaaacgacctctggaaatcaataa

SEQ ID NO: 452836 - DNA, 834 bp, Serratia marcescens
atgagtattcccctgcagatggcatccgactccttcattcaggtcgacaggatttcctgctaccggagtcaacccggactcatctggcggaagcccctgccagtgaatgccattcttaaagatttttcgctcacgctgcgtcagcatgagcgtgtaggcctgctgggatgttcgggctgcggaaaatcgacgttactgaaagctatcctggccctcgatccggtggatggcggtgaggtgtattgtgatggaaaggtcgtaaggccgggctctgcccgcgcattgcgctggtatcgccgtagggttcagtaccttcctcaggagcccgccagtacgttgccgccgtcaatgcatgtcagagagattctcaacgagccgctaagacatttaggctgcaaccgtgatgcgtcacctaatcttgccgctgcgcttgaacaggtcgaactcagcgcaaaagttctcgaccagcgtgcatgctcgctttcaggggggcaggctcagcgcgttgcgctggcaagagcgctgattatacagcccgattttctgctggccgatgagccggtcagcgggctggatcttcccctgcgtgagcaaatcaaatcgctgcttttgcgtataacagaagaaaaccgcatggggcttctgatcgtctctcatgacatttctatgctggcagggttgtgcgacagaacgctggtcatggaggccggaaaaatcatagaagatcgccctacgcttgaaatgctgcattttcctcatcatccttatacgcgtcagcttctggacgcggtaccggcgcttgtcactcatgccccgtcgccggcaggtggctga

SEQ ID NO: 452837 - DNA, 846 bp, Serratia marcescens
atgttatcacataaccaaaatggcatatgcagtgacatgaacaagaatcttacttatccaatacctgtgcttgatgttaaaagcgtcgtcatttctacgggccataccgccctggtcagcgatgtcagttttcgggtccagcaaggcgagcgggtctgtattatcggctcatcggggtcaggtaagtctctgacggcaaaagccattataggtacattgtctgccgggctgtcattacaaggaagcattcgtataaacagtgtggatgtcgttggccttcatcccacccggcgccctcagcatgcgctggcatccgccatctttcaggactcgtccaccgcgctgaacccgctgatgccggtggagcgacagcttgctctggcgttgaaaacaggtgataaagcgatgctggcctctttgctggatgcgcttcagctcagcgataaccctcaattgctctcccgctacccggctgagctttccggtggacagcgtcagcgggtctgcatcgcgctggcgttgctggggaataatcgcctgctgattgccgatgaaccgacgacggcactggatgtgattagccagcagcaggttctgcagatattaggtcaggattccacgctgagcgctccgccagcgttgctcttcatcacgcatgatattgccgttgctacacagctttgccagcgaggaatcgtgatggaaaaaggcaggattgtggagtcaggcacaatggcccagctcctgaacgcgccggagcatccttacactcgcaaactggtacaggccgcgcgagccgctgaacagacgttgttaacacacacccgtgaggcgctcgccggatga

SEQ ID NO: 452838 - DNA, 813 bp, Serratia marcescens
atgataggaaaaagcagtgttgagccagtggttttatatgaaacaagagggcatgtcgcttacatcacgctcaaccgccctgaagttctaaacgcgatgaatcttgaaatgcaccaacagttgcggcaagtatgggatgattttaaccataacgatgacatatggcttgctgtgctgtcaggggctggcggcaagtccttctctgttggccaagaccttaaagaattgaaggcacgttatgactctggcgagccattttctagtttgggtagcaaagggcgagcgggatggccgcgattgactgagcggatagacatttataaacctataattgccatggtagatggttatgcttttggcgggggatttgaactggcacttgcatgtgatttaattgttgctagtgaagaatcgatttttgcattgcctgaagctaaactcggtttaatccagggggccggagggatttttcgccttaccagacaaatgccttataagttagctatggagatgcttctcaccggaagaaaaattaatgctctacaagcagctgacttcggtattgtcaatcgcgttacttgcaaggaaaaattacctgaagtcgtcaataatttagttgacgatatattgcgttgttcacctgcttctacacgagcaatcaaaaacattgcctgtgacagcgcagataaaaacatacaagatgcttttcttgcgcagtaccctgcagaaaaattgcgattagagagcaaggacctcgttgaaggtgtgaacgctttcttggaaaaaagggagccggtatggtcaggacgatga

SEQ ID NO: 452839 - DNA, 1242 bp, Serratia marcescens
atgaatgaattacccaatgcgttacagccccgtgtggtggcgttaagaaatagactacagagcgttagcaatgcggaccttagagacgatgtaattattgcccaatgtgcgggtaacggagaagtctcgcattttttcgaacaacacactcttgagctgtaccaattttggacagaaaagtattgccgtcctatacgggtcgaggcgctctatcaattgaccgcagcattactggtgggaacgataacgacaggaacgccggaacaggttgctgtggattactgtttttcacttttcttatcgcaggtgttacaagacagtcaggcgggcatgcatttattaaataccatgttgcaaccaaaagcctcttctttccccctggtcgatgattttaatcagacgggttatctccggttgactgcattggagatacgaaagaaaggtgaagctgcgattgtgagtttcatcgatggcgatacactgcatgcagaagacggtgactttgtccgcgatctggaaacggcggcggacatcgtgtacctctccaaacaaattaaaactggcgtgctacgtggagggattgtcaatcatcctaaatatgctggtcgtagagttttttgctctggcatcaatttgaaaaaacttcatgcttctggcatttcttatccggattttttgattggaagggaaatgggctgtattaataaattggttcatggggtggcctattcacctaatgagtcaaataccagaattactaagccctggattgcggtcgtggacacctttgctatcggcggcggtatgcaaatggtgctggcctgcgattatgtgattggtgagcaaggatgttatgtctcactgccagcggctaaagagggcattatccctggcgtatctaaccttcggcttactaccgccacaagtgaacgtttcgccaaacaggtgatcttgcatggacgtaaagttatggccgacgatgctgatgctggattcatttttgatcgagtggttgcttctgaggagcttgatcaggagctggaagaagcaatcgcactgatggctgctccggcggtaccggcgaataaacgcatgctggtattagctaaagaaccgctgaaggcatttcgcacctatatgcaggcattctgtagagaacaggtcgttagaatgtatgccttagatgtgaaagaaaaaaccggaaaattttcccataagacaccaagagccataattagttaa

SEQ ID NO: 452840 - DNA, 642 bp, Serratia marcescens
atggaaaatttaactgttaatatttctgggtcttcggctatttccagcgttctcattgaagaagtcaaccagctatgcgctcaggttgagagcagctctaccattaacatggtgttattcaactttgaagccgattcgatgagcgaacttagttctggggtggaaaatgtggatgtattacacaaatgggaaaaagtgttacgccgcgttgaaaatctgaatgccctaattatcgccatctgtaacggccagtgtgggctcgcggcgctatcccttattgctatcgccgatcttcgtttagggacaccaaccagtactttcgctttgaacgggaaagacatcaccttgcccggtatgcttatccaccggctaactaaccaaatgacggctaattgggtacgttcactacttgtgctagggaacacgtttggtgccgatgaggccttggcatgtggactcctggaccgaacgagtacacagccgaaagcgcttgccgaagatttagtcgttggcatgaatccgcatgcttttaatgacatacgggtacgccgcaaactgatgctggaagccagccatacctcacatgaagacactattgggctgtctctttcggccagcgatcgtacattgcgccaaggataa

SEQ ID NO: 452841 - DNA, 222 bp, Serratia marcescens
atgaacgagggtggaaagtctgcgatctccgctggcgacgaggtggtcagcgtctctgaggtcaaagcgctggagaaaaaagtcaaacagcttgaacaaatgctgggccgcaaaacgatggaagccgaaatccttcgggatgcgcttgagatagcccaggcaaaaaagttgatatcgcgcatgccattgctgccaccggacgataccccctcatccgaatag

SEQ ID NO: 452842 - DNA, 372 bp, Serratia marcescens
atggtgcaggatctgctgacagagagtgtggaaaagcgctttggcaatacgctttacctgccacatgccgttgagtggctgaccgataatggcagttgctacatagcggactcaacaagaacgttcgccgcctcactcgggttcatcgtgtgtacgacgccagtgcgcagtccggagagcaatgggatggctgaatcgttcgttaaaacgttcaagcgtgactacgtgcatgtgaatgatctgccggatgcgatgacagtgatgggaaaactgacggaatggatggaagactataataactggcatccccataaagggctgaaaatgcagtcaccaagggaatacagaagttcgctgctagctataaattaa

SEQ ID NO: 452843 - DNA, 1185 bp, Serratia marcescens
atggagttgggagaggaaaaagaagctgttaatcagtacgttaggttttcattcatgtcagtggctttggttttaggcatggctggtgcattacaaatgcctgtagtgagccttttccttactcgcgaaacgggtgcaactccatttatggtagggttattttatacaattaacgctctggctggagtaggaatcagtcaaattcttgcccgtaagtcagacactggtggaaaccgccgtcgtttgatcctgatttgttgctctgtcgccgttgtgaatgcattgctttttgcatttaaccgggagtatttcattctggtttctctaggcgtgatgatgtcagcattggccacaacggctatgccacaactgttcgcactagcacgtcagtattccgaaggagcggactttgacgtcatcaagttcacaacgagaatgcgtgctcagatttcaatctcctgggttgtcgctcctcctctggccttttttatcatcaatcattccggctttactagtttatatctattagtcgcatctctgttttcactaggaattgtcattgttttcttatcattgcccatagataaaactcaacatgcggtacattcgaaagataattccttacccgtaccggtcactgcccgatcaaatgaagcatggctattgtttactgccttagccatgttgtgggccggagatacaatgtatctaattgacatgcctatttatattagcgaaatacccggaatgggcagcggatttgccggatggctattgggaggtgccgcaggactggaaattttaatcatgctgttctgctccccagtgatcaaacgatttggaaaacgatcgatgatgatattagctgcaatttgcgctgcactattttatttaggaatggcagttgccgactcacggatagtactaatagcaatccagctattgaatgctatatttattggtgttgttggtgcgctaggtatgctttatctacaagaattaatgcccaacagtcccgggacagccagtactctatatacgaatagtattgcaactggtgccatttttgcaggcttattacaagggttgattagtcagcactggggacatcaagaagtttactatgcggcgctaatattgtcgtgcttttcattgttattactattgagagttaaagaagcttag

SEQ ID NO: 452844 - DNA, 246 bp, Serratia marcescens
atgatgcagttaaccttgggtcgccaacatttcacccttgatgagcgcgacgcgctgtttgtggcggaagctatcctgttgcagcgtaaagagcctggcgtcgtcttgccggaacaccgcagcgaaaaatacggcgttattcgtctggcgagtcgccaggccgagccgcgcctgttccgtgccgggccggtgccgctgacctgcgcggctgccgatacccgcaacgacccactgaccgactgttga

SEQ ID NO: 452845 - DNA, 192 bp, Serratia marcescens
atggcgacgaccctcaccccaactcacccgacattctgctttttgtttgcggccgtacgccgttctgcgctgaccgcttcaccgcgtatcgtgcgcaccgtggcggattctgagcacaacgctcgccgcctgctggcccgtgattatgtgttgtcctttgccggtcgtctgccggttaaggcggcagcatga

SEQ ID NO: 452846 - DNA, 426 bp, Serratia marcescens
atggataaattcagcgaactgaaagcggctggcaggtgcgaaattggcgaaggcggttggatggattgcgataaagacaggtatgactattgtcagagacgtcctgaaatggacacgcgcactgtctcatccccgccggcagagctggaagcgaaggatgaacgcatcaaatggctggaatccatctccactgattacatcggtaaattccagaaggtgcaggacgcgctgaaatacgcggcaatcatgagcgatgaggacaagaagaaaatcgccgagctggaagcaaagctggctacgccggtgcggttgcctgacatccgcagcgacgattaccacgagaccggatggttccaacacatgaaatattaccgtgatgttgagcgttctattctcgccgctggattcgctgttggggatgagtag

SEQ ID NO: 452847 - DNA, 567 bp, Serratia marcescens
gtgagaaaggtattattaatattgggattgtctgtagttttatctggttgtaccgtaaaccttccatttaataacagattatcctactcatcagtaaaggaaatgtcttcagttcaaagtgggaatgaaagggtaaatttgaacatcatatggaatcctgctgattttactacacgggtggatataaaaggagctgatggttttgtcggcggaggatcaagaactcgaatccctacaggtgtcgcgctttctgcaagaattgaagaagctatatcgacgtttgccaatatctccgcaagtggaagtccattgaaaataactgtgattgaggcagtgtcagggtttgaatattctgcaggtatctttaacgcaaccccggggattgatgttgggactgtattcttgaaggcgaatttcgatttcaatggtaatgcgtggacaagagaattcaggtccgaaaagaaagaccctaccatcggtggaacaagccaaacggctattcttgagtcggcatgggatgatgtcgcggtgcaggtggctaaagacgtagcaaccagaattaaataa

SEQ ID NO: 452848 - DNA, 285 bp, Serratia marcescens
atgagtgataaagtcttaccggttgaatacttcctcgaggtttatgaaatagccgccagattcaatacgaccgacgtggggtttagcgttcaaacatcaacaccactgagcaatttgaatgttggtgataaatatcatcatcaaggaagtggggagtggttagatcctccaatgcagggagagtgtttctatatcaaagacatcaggcattttatttgggaaattgaaggcagccatgtaggccacaaatcaatggtttacattcaaaaaggtttagatgtttaa

SEQ ID NO: 452849 - DNA, 414 bp, Serratia marcescens
gtgagtcatacccgcgtagccgaactgctcgaagcgcgcctgggtgaatgggccgatgctaaaggcgtgcccgtagtgtgggacaacatcgcggaaaacccgccggatacgctctatcttcaggcctacgcgatgcctgcgacgacgacgacgatcgacctggctgaaaagctgcaggtgctgccgggcgtttggcagatcaacgtcgtggcgagggccggcgacggcgtgagtggcgcccgcacgctggccaataaggtggccgctctgtttcctgttggcttggtgctcgaagatggcgcgctaacttgctatatcagcacgccaccgactgtttatcgtggaatttcatcaaacacgaactactcgatccccgttagcatgatgtatcgagcgcaaattgtaacggggtga

SEQ ID NO: 452850 - DNA, 300 bp, Serratia marcescens
atggctggattaacgaaagaacagcgtgcgctgcgcatcgcagaaaaacttgctgctgagcaggcgaataaaaacaatcctgagcagcaggagcagcaggagcagcaggagcagcaggagcagcaggagcagcaggagcagcaggagcagcaggagcagcaggagcagcaggagcagcaggttgagttggtggctatggttactgattacccagctttccccggcgcaccaacggttgctgacgtacatcccgctgaggtggaaaactggaaatcatccggttggactgtccgggggtga

SEQ ID NO: 452851 - DNA, 387 bp, Serratia marcescens
atgagcggctggctctcaaaactggccggcgggggaatgctgctcctgctggtggcgtcaattttactcggcggttacagctcgctgttgtcgcaccagttggcgcgggcacatcagcaggctgcagaacagcagaaggcgttggcacaacaggccgggctgatagccacgctgcagacgcaagatgcgcagaatcgcgcgctgatggcggcccagcaacaacgcgagcagcagctgcgccagcagggcgtaaactatcagaggaaatatcgtgaagcaatccagaatgacgagtgtagccggcgcgctgctcctcccgctgttcttggcctcctgcgcggaacggacaccaccgccgccggcgccgctcgtgctgtttccccctga

SEQ ID NO: 452852 - DNA, 201 bp, Serratia marcescens
atgactatagccaaagcgccggggtacgccatgcctccgcttaacttttcacctcgactggtgcggggcgtcaatttgacgacagaacaggacatgtggcaatgcaaaaagcattatcgctttcgttcggggaaatactacggccgggtccgatatgcggaggtgacgaactcgatgaacagggaacgatcacgcaggtag

SEQ ID NO: 452853 - DNA, 570 bp, Serratia marcescens
atgatgctagccaatgaacagaagctatatcccaacataaagcgaatagtttggagtgattgggctgaagggaaggttcggcagcagcgctggcacccgatgcgagtggcaatgctgtttcgcctcggccctgtcatgccaacgccctccatcgcaaaaatgttcggagtttccccgcgggtcgttaggagtaaggctgaaagccttgggatcaggctgtaccgatgctttcggaactacgccgattgggaaataaagttcatgaaagacaatcggcaaaagctaacgcagaaagagatcgcaaggcatttaggtcggacggaggccagcgtatccacggcaatgctcaggcgcggtattaacccaggaaagccacgtggagagcatcatcagttcgcgaaacacagcgatgatgacgttgagttgtgccgggcgttggccgacgaaggtctgttcgtttcagaaatcgcgagaaagatggaggttgaccacagtaccgtctggcgctgggtcaatttcgagagtcggaacaacatagaacttgaaggctatgggagagcgagagcatga

SEQ ID NO: 452854 - DNA, 543 bp, Serratia marcescens
atgacatctgcacattccaacacgtctgcttacgatcacctgcgcgccctgttcagccggttgtcgcgtttcggccacctgtccgccatcgccggttgggacatgcaaaccatgatgccaccgggcggcagcaaggcgcgctccgaagcgctggccgagctgagcgtgctgcagcaccagattttaacggcacaaagcaccggcgcgctgttggatcgcgcgcagcaagagacgctggacgaactcgaccgcgccaacctgcgcgagatgcgccgccaatatgaagacgccgtgctgctgccggcgtcgctggtcgaggccagtcgctcgcgggtgcgcgctgcgaacacgcctggcgcgcccagcgcccggccaacgattgggacggcttcgccgacaacctgcgcgaggtggtcaagctcagccgggaagaggcgcagatccgcgcgcaggcggccggcacaagccgttacgatgctctgctcaacctgtatgagccgggcatgcgcagcagcgatctcgaccgcatcttcggcgatctga

SEQ ID NO: 452855 - DNA, 1863 bp, Serratia marcescens
gtgagtttccctctagaattgacagcgcaaattgctggtcacaatgaaaatttcaatcgcaaggtcaccttaaacagaggtcttacagttctactcggcccaaatggctctggaaaaacacatcttttgagggggctcaagcaaagtcttagtcagcatacgaatggaaagtatgtgcgctttctctctgctggacgaatggggatgttggagcagtatagatcagactttgacgggcatcgtggaggctcaccacagtacgactacgcaacttatggtagcaagagtgatactgttcgcagacatcagatggaaactattaatggcgatttccaaacgcttgctgaacgggctgatattttaattaaaattcaggagagacttcggaagttattcaagcgcgacattcttattgaatgggatggtggatcactaaaaatattattttcgcgattggacatagaagcaaaatcatactcgtcaggcagagaggcatccggattgatgcatctggttgggattttatctgcactttatgatgatgatgtaggggcgcttcttctagatgaaccagaggtttccttgcatcctcagttacaggcatttcttcttcatgaaatcctcagtgtctcgggccacccgtctgagggaggtaataaaaagattgttatcatcgctactcattcaacagaaatgctccaaattcagaaaccggaagatttactatctcttgtcttctgttatgacctgattagtgagccagtgcaaattccagctgacgctggcgagctcaggaacaaaaaagtacaaaacttaattgctcgtctcggacaagagcataagttatcattgttttccaaacggcctttattagttgaaggcccctctgatgtaatgatttgcagtgcgcttgcaaacaaacttgatatacatcttgaagctgccggatcacagttattacctgtgattggtaaaggacagatgccaaccgtggcaaaattattgcgtttactcggcaaaagcccagttgcgttggcggacgctgatggaatcgctgatggtcttgatcttgtcaattcataccttaatgataatcccaccgcagaaacgcgagccagtgagttagggtatcgatcctcgcaacaaatggttagtgctatattcacagatttttgcaaattggtagattgccggtggaatgaaatttctgcaatcgccgaattgcacccgtattgggtgaacaagaaaaccgaggaagtggcacaagcaaagcgccgctctgctttctgtacacttttcattattgatgataatgaattggaaaatttagctaaggacaatgagtggagtagtataaagatccgtttaaaagtgctacttgacctgctggaacagtgtggcctatttattttacgcaaaggttcagtagagtcttactatcaaaattcagatccatttacttcaattggaaagccaagtgcggctgttggtgaaattgaccatatcaatcagttatcgcttgacgatgttaacaccgcatattcagatttgatccgctgcgtccagcatgcctcgagcactgaagtaatatgtgaagctgatgcactgagagatcttttgctttcaattgttgcaccagctcatgccagattaaagagtggtgaatcatcaacaaacttcaatatcttggctcgttcaattttgggtgagcgttctaaaatatttggtttggctatagaaggtgaaaaacttgttatctcaatcgagagtaacattcttaatgttagaggtttccccgtatctattggaaaagatgatgatgtactaaaatgtatcaatgcagcccttgcctctaatctttaa

SEQ ID NO: 452856 - DNA, 225 bp, Serratia marcescens
atgaataagccaacattcaaacaacgggtcagccagctggatctgcggctgcgccaccgggttccgatggtgcaccagaccgagtcgtcggaatgtgggctggcctgtttggcgatgatctgcggttattacggcaaaaacatcgacctgatcgcgctgcgccggcagttcaatctgtcaacccgcggtgcaacgctggttgggctgatcggtatcgccgaatag

SEQ ID NO: 452857 - DNA, 1173 bp, Serratia marcescens
atgatttccttaggggaacttgttgatattaaaggtggtggtacccctgataaaaataattctgaatattggaatggtgatattccatgggcttcagtcaaggatttcaaaaaaaatattcttgactctacgcttgattcaatcacccttttaggggtgagaaattcggcaactagcgttattccagcaggaaatataatagttcctacacgcatggcattgggtaaggttgcaattaatactattgatttagcaataaatcaagatttgaaagccttgtttattaaagacaacgacattgttgatagagactatctttttcgatggttggaatctcaaagtagtttaatagagagtgaagggaaaggagcaacagttaaaggaattacacttccttttcttaagggcttaaatgtaccaattccccctattaatgaacaaaaacgtattgcagctattcttgataaagccgaaggtatacgtcaaaaacgcgagcaagccatgaaactggctaacgatttttggcgtactacgtttttgaatatgtttggcgatcctgttgaaaatccaaaaaatctaaaaaaagctcccattactgaattggcagaggtcattaccggatttgcattcaaaagtaatgagtacattagtgatgcaccagaatcagtacggctttgcagaggggcaaatacacttacggggtatttagattgggctgatacaaaattctggccaaaaaataaactagaaaaactagataattatttaattaaggcgagtgatattatccttgctatggaccgtccgtggatatcaagcgggttaaaagtatgcatattccctgaaaatcagcgagaaacgtacttagttcagcgtgtagctaggttacgacctcgttgcgaatcttacacaaactatatttacagttgtattaaatcgccagctttcgaaaagcattgctacccgacagaaacaacggtgccacatatatctcctgttgaacttaaaaattttgaaattctaattccgcccgacgaacttatggttaattttcattcgattgtatcaataatcaataatagcttaaataaaatggcgtcaggcgatattgatagcgacgccctcttctctaaattaagtcagcaggctttttcaggacatcttaagaggtaa

SEQ ID NO: 452858 - DNA, 3282 bp, Serratia marcescens
atggacttatttgacctgttaacaattaaatttaccttgcccgcgaaagctgcccctgtaagaaaagtgggggggaattatgttcataaattactttgccgatcaacaacagtatcggctcaagtcagaaatgcacgtttccaaggatattttgaacttgtgacgggtctaaagccccctctagactatatctatctgaaagatccaaattccagggggaaatgcgcagatggtgtagcttcccttaaagctaaggaaccatttacattcgaaaaatggcgagaagatactgagttaagctgggagcaatttccagagcaggtatttagcacttcacctgaggatattaatgaacaatggtatcatcaatttcagtttagagaggatgatccagagcaccgttctccaggtctcagaaaaccccaactgggtgcacttcatgcaattgcaggctatttcgctactgatttgcaggtagaacctgctaccgtcgtactgcccactggaacgggaaaaacggaaacaatgctggctaccatgatataccagcgatgcgagcgaattttgctcatagtcccgtctgactctctccgaacacaaatatccaaaaaattcattgagttgggatatttgccagagctaacagtcgttccgccaaacattacactccctaatgtcgctattattaagaagggaattcaggtagcggaagaagctaagcaattagcttgtgaatcaaacgtcttggttgctacgaccagcgttttgtctgcctgctccgaagcagcattaaatgcactttgcgagtcgtgtagccatctttttgttgatgaggcccatcatatctcagcctcatcatggcagacaattcgcgaacgattcacagacaaacgtgtagtgcagtttacagctactccctttaggaatgataaaaagtcccttggtggaaaaattatctataactatacaatgggggaagcccaacgagcaggctattttacaaatgtaaatttgctgcctgtagaggagtattactctgaccttatggatcatgcaatcgcggatacagctgtaggtcaactgcgtatagacttaaataatgaccttgatcatttgctcatggctcgtactagcagtaagcagcgagcagaagaaatacttactatttatcagaaaattgcaccgaactttaatccaatcgttgttcattctgattatcctaaaacggaaataaaaaaacgtcttaataaattattatcaagacaatcaagaatcgttatttgcgtagacatgttgggagaaggctatgatctacccaacctgaaaattgccgctttgcatgatcatcataagtctcttgcagtaactttgcagttcattggccgatttactcgtgtcaataaagcacagaaaattggtcaagccagtgtagtcatgaatgttgcggaccctaatgttgaaggtgaattacagcatctatattcaacagatgccgattgggataacgtattaaggcgactctctgaaggacgaattgctagagagattaggttgcaagaggtcgtggatgccttaaaaaggaaaggtgatttacacgatcagatttctctctggaatattgagccaagttgttctgtcatgttatttaaaacgtactgtgacaattgggagcctgaaagatacaaggagaaactgcccagattcgatgaatcctggcatgcaatagctgaagatgagaatttgcttgttgtgctagctgtccaggcaacttcagtccggtggggaaactacaaagatcttaaagataccaattataaaattctaattgctcattgggatcaagacagatccgccttgtttgtattctcaaatgactataaagtatttcgagttgagaatctagtcagtactatttgtgatgataaatttgaagttgtcagtggtgaaaaagtctttaatgtatttaatggtattgaatatcctttggcaagaaatttaggcgcatctcaaattggggcaatcagctttactcaatattttggcccaaatgtcactgaggggctatcactaattgaagcatctcaatcaagcttaagcaatattgctgcattaggttatgaatcaggaaaccgtgtaatctggggatgctcgcaacgcagaggtaaagtctggtcaccacaaaaaggtggcagcattgctgattggtgcaactgggttaagaaagcctgggacaagatctttagttctgaaccggatccaaacaatcttacgcgtaactttttgcgtcctgtcccattacttgaaccctataatgaatatccaatatcagctcaatggggtgagtatttgcttactgcgtttgaagataaagttatttttcattttgatactatatcttctcatttatatttagtagaggttaggactgctggaaagtttgaagatggtaatgtgcggctcattttttctacagatgaaacgtcatctgaatataaattatgtctcacgggaagtgctacagcaaaaggttattcctatcaattgatatctggccctgaagtttttatacagcgtggtgaatctgaaccggtatcactatcagagtatatggaaattgatccagtaatgattcattactccgatggctcattttcatacaacgctcatatagtccatgtaagtcaaaatattggcctttatgacaaagacgaaattgtagcatttgattggaagggaactgatgttcgagtggaatcaatgggctatactcgtaatccattatccatccaatggcgttggtacagtgaaattaaagataattacgatgtcattattaatgatgatggtaaaggtgagtcagcagatttagtggggttgagaatagttgatgactgtattgttctctctttaatccattgcaagtattcaggctcagaagaagctggagcaagacttaaagatctttacgaagtatgtgggcaggcacagagatgcattcgttggaaacacctgaatctttcctatttataccatcacattaagcgtcgcgaggaacagtggcgatcgcgtggtcattctcgctttctgaaaggcactataaaagaccttgctgctatgaaagagcgctccagaatcacacctcttaaattccaagttgttattgttcaaccaggacttagagtaagcaaaattaatgaagaaggccttaagctacttggcagtacggccttatttatcaagaaaacaacgatggcagatttagttgttattggttctaaatag

SEQ ID NO: 452859 - DNA, 1323 bp, Serratia marcescens
atgatcctattcttttatccctacataatgctttgctacagcgctggatacgctttattgcaaacactggatgggatgggagtgattagtaccaactttgtagaaatgaacgcacagggtgctcttttgagcagttactggtctcccaataaagttgctgtagtcttaggaggatgttttcttgagctatttattttattattaccctttgttttcttgagctcatggatacttgccagaaaaaagggactcatcatttgttttgttcttcttataacccctggcctattatcgctttgtcaccttcttcctgctatccagtggttgccattgacctatgaaataggaggtacaggtgcaacgggtaacgcagctggactcgcaagtcttagcctcatagggctattgtgtggttggattttggcagtaattattagtgatatttttgctacaggagagaaattcagacagtggacagatattttcctcatcttaacagcagttggcaacggtattttctgggtatcagacagagaggtagctgtcggtaaaacagcatatgaggaaacaattacggatattaatgatgcagccaaataccttcttgttcagctgaaagactacagccgcatgtgtgacaataacgggctttctgaaatgtcatcttgtcagtgggcatcgtacattcaagaaacgctagagaatattgccagtacaaaatcatctattattgaatatgtaatacctgaaaatcttgacaccttctataaaattcctgagtactatagcaatcaagtatctccggataaaatcagacaggaatttcaagacttcaataaaaaattatgcccaaataaatctctttccaaaacaataacacaattgccatcaccttctcgatggtgccagaccccacccccagcttactgcaatgccattcaagagggaaaatataaaacaggtatgtcagatcgtttcgctgtcgccaatgagtgtgtaactacatcattattaagataccgccaagttttattaaaagaacaagctcgtttatccttaagtaaaaatgccccccattatagatggatgtggtttattgccatgtctttctttattggtgggaaaattgccaatgtaatgacaaaaataggaaatgtagagaatcgtctcataactgaaaaacatagagttaaatttatccttttaaaaacacttggctttattgtgcgtacattaataagatgtgccatcttatgtcggaaagtgtttttttcaacgttcaattatatcaaaagattgaaggaaataaagcatgatacttaa

SEQ ID NO: 452860 - DNA, 705 bp, Serratia marcescens
atgggttttactgatgaatttttttttgcactctcaaattggcagaatggatggagggaagatcagaataaacgtgacttactagctaaggatttattggatacaacccagtgtttggataaaaaattcaaaagtgtcacctcaccttgctatagaaagcgttttcttcaccaaggtgaacttatagaaatcgttttggtagaccaaaaacatgaaggagtagtgagttggactttagataaaaaatatgctgagatattcaaaggtctttttaaagtagatgctgtttctgcggcgatttttgagcacacacctacagaaagtgaagttgtcgtaaatctatgtgaattatggaataactctgactttattgaagcagccacacattttcagaagagatatcctgaggatgcaaaacctctttttcatttcaaagatagtcaaagtgaagtgatacttacatcaccactgaaaggctcggaaatcatcgctcttaccggagtatctagtccgtttgatgctttatgtgatcaagctggaatcccggatgattcatccagaaataacttgttttcagaattagttgaaagcggaaactatccgggagaattaagatacacaagtaaagaaagtgcacaacgaattatagccaatgtaattctaaaagtggaaaatagaattaaagaatttaagcagaacagttaa

SEQ ID NO: 452861 - DNA, 741 bp, Serratia marcescens
atgaaaacgcataactcactatttttagcgtggcagtcacccgaaactcgggattggcatgttgtaggccagttaaatgagagagaagatgattatgtgtttaaatatacaaaaggtgctatgaaagttaaaaacttcattccctttagtggcatggatgacattagatctacatactcctcaaaagagttatttcctttatttaaaaatcgtgtgctatcagcgagaagaccagaataccctcagtttatgaagtggcttggtcttgataaaaacgagttttctgcaatggaaatgttagcccgatctggtggggctagagctactgataatcttcaggtattcaaacgaatcgaaattcaggacgatggaactttcgattactactttttcgctcatgggatttcgtatcttccagattcggcaaaagagagaattagtaacctgaaaaatggtgaaaagctatatctttgccccgatccacaaaatgaatatgatgaatgtgcggtaatgattcgtactggtggaccagtagagattattggttactgccctcgttatattgctaaagttattggaatttttctcgcctcatctggttctaatctaaatttgaaagtagagtcaatgcaggcaaatgcacctgttaattataggcttatgtgtaagctcgaggctcaggttgataagaaggcagttgaaaaatatcttgagcaagaagagttccaattgattgattaa

SEQ ID NO: 452862 - DNA, 918 bp, Serratia marcescens
atgtttgaaatcaatcagatcacttctgatgtccaggatttggagcagttaggtacgaaagaaaaattttggtactcaacaagcacagggaagatgctgttcaaattttcgagagcgggcacgggggagcattggtcagaaaagtgtgcagagcagttgtgttttaagctcggtatcccatgtgctacttacgagctggcaaaatttgaagggcggccaggtgtaatcactcctaaccttgtgactgatggttttaacatggtaatggggaacgaagtcctgcatcagtttgaatcaggtagttaccccaaaccagaaggtgtagatgagaaaagggttaaagtgcgtgagcatacagttagccgtgttttaggctgcttagatgcggggcatatcaaagtcatgccttcttccttgggacttgaggaattgagcccaggggatgtgttttgtggctatcttatgcttgatgcactgatcagcaatcaggatcgtcaccatgaaaattgggccattttagttaatggtgatacaggtgaacgtttcctttgcccaagttatgaccatgcggcgagtcttggaagagaacttacgacagaaagacgaatcattgggttaacatccaaagataaaaatcaaagagttgagtgcttcgttagtaaagctaggtctttgctctaccgtctaaagaacgataagaagccattgcttactgttgaagctttctactgtgctggtgaaaaaaagcctaaagctaaagctttttggcttgaaagattaagagggctatcagatgaagactttcatagcatcgtgagtaaaatccctgatgagtatatggataagcatgcaaaggcttttgtcctagagatgttgaaggaaaataagagaaggttgttaaactatgaaaacgcataa

SEQ ID NO: 452863 - DNA, 165 bp, Serratia marcescens
atgacgaatcatcattacgtcagtggaaacaaaaaggaatgccacacggcaaagatattcctgatacagaaacacgaaattggattattgaaaatgtcattaagccattacgtgaaaatacaagtactaaagaacaaattgaaaaagaacgtctgcgaaaattaa

SEQ ID NO: 452864 - DNA, 624 bp, Serratia marcescens
atgaatagagagcaatttcaaaaagttatagtgagaaggtatggcgagatcgatgccaaactgtatttaagtaaatttatacatcactggttcaccttacctaaagaaccagtttctctaactaataaagctgctgtagggaagtactgcgaacatctatctaatactagatttggtaataatggttcatttcaagttgcatgccatatgctttcgcatcttttatctagaaatgaagctagtctaagagatgcagaaagagcatttggcttcatgagcttaatttcggcctctcaggcggagaggaaatccgaaacggagcaagtcgctattgcaatagtcacttatattattagccatcatccggggttagttcagcgtataaagaatagaaatatatcaccagacgagctaatgagttctcttggtctaagttatccatctaattttgaagaagataaccatatcatgattattatcaatactgaactattaacagacgatgactatagaaaaatgatttcggatggtactcccctggtccttcactcatttgggcgaagacccttttggttacgtaatgtgctatcccatgtagataatatgttcatcgataataattaa

SEQ ID NO: 452865 - DNA, 582 bp, Serratia marcescens
atgcgactaaccactcgtgaattagattatagccacggttttacacatgaaaatgatatatttaacaggcaacgttttgctacacagttagaaaatatcattattaactcacaagatgaaagtttagtatttgcaattgatgatggctggggtagcggaaaaactacgtttctccgtttatgggaaagtagccttaacaaaaaagaaccaagtactttaaaagcaatttattttgatgctttcgagaatgattatcaacaagatgcattcttagctattgcgtcaaaaatatatagcctaatcgaaaaaaaagagcctgaactacaaaaacgctttattgatggagcaaaggccgttggaaaaagccttctaggaatatcagctaaagtaggcataagtattgccacggcaggcctagtaaatggtacagccattgagagtgcaggggatagtatttcagatggattatctgaccctatagataaattcattgaggacaagataaaaaatgctgaaaaagacgaactaaccctagcccactttaaggaaacattacaaaaagtagccgaaaataaaaagtag

SEQ ID NO: 452866 - DNA, 285 bp, Serratia marcescens
atgatgaccgtggtgtttatgctgttcgaagtgcagctgctgccttacaagctgcagcaggcgctggataagccgaacgaggggctcgccgcgatgcggcgggcgctggacggcgtgacgcgctatctggtgatcaaaaccatcatcagcctggccaccggggtgatcgtctggatcttcctggcggcggtcggcgtgcgttttgcctttatctggggctgctggcgtttctgctcaactatattcccaatatcggctcggtgttggccgccattccgccgctga

SEQ ID NO: 452867 - DNA, 243 bp, Serratia marcescens
atgcagcgcagcttaactgcctatattcaggagcggatggacggtgcgccgtggaactacaccgagtttgaagagcgggttaagcatctttccgaggtacatatcaccagcgtagctgagaatgccgcactgaaccgcaaaggtgcaacctatataaacctaggcatcgagttggtgaactggacgagctcacttttacacagcgcacattgctgcataagcacgttttggctggacacgtaa

SEQ ID NO: 452868 - DNA, 666 bp, Serratia marcescens
atgaatttatcattgttttcaaaggaattatttcagtgtttttctccttatcagatattggcgcaaagtctactaccgttggctcttgaatcggatgacggttcacatgatgttgctcatctgaatcgagtctggaaaaattgctgtaaaataaacaagtttgaggggggagacctacgaattctttgcgcatcggtgttattgcatgacatcgttgcggtagaaaaaaattcgccggagcgacatttggcttcgcggatggcagcagagaaggctagactaactctcagccgcctagaatggaaagctgcagacattgaggctgtggcccatgccattgaggcccacagtttttctgctggtattaacccgcaaactttggaagctaggataatgcaagatgctgatcgccttgattctctcggattgattggtgttgctcgttgtttctatattggtggccgtatgcatagttcattgtatgacgttaccgatccgttggctttgtatcgcgagcatgatgacaaatgttttaccctcgatcacttcgcaaccaagctatttaagcttgaagatatcttccaaactaaaacggggctacaactagctcaacaacgtactgaaaacatgcgtcaatttttctcaggattattgaaggaattatag

SEQ ID NO: 452869 - DNA, 594 bp, Serratia marcescens
atggcaaattacattatcagcgatgacatttattttgcattaggttgcgaagcgatatttaattctcatggagaaaaactaaaaataatttcatcatctcatcatgcagccatgaatttatttaaaataaaaaacgatgatataattctcatatcaattgaatctcaccctattagaaaaaaaatattcagattcatccacaatcttaatttgaaaataatattctttatagatgctccgaaatgccctccctcttatgcttgctggaaaagaggcttcatctcaaaaaaaattgcagtcgaacttctttttcctacatttattttatttaaaaactctaatgaaaaaaataactttttaacaaaaagagagagggaggttataaatgcattcctgaacggaatgtctgccacaaaaatatccacctcaatgagtctatcaacaagaacagtatatgcacatcgtaaaaatgcattgacaaaactaggacttcggaaaatacgaaccatatttaacattgagttttatagatttatatttcaaatatctccaagtgagagctataattccttcaataatcctgagaaaaattga

SEQ ID NO: 452870 - DNA, 651 bp, Serratia marcescens
atgaaatcaatagagaattacttggaaaataatttcattattgaacgagacttcgttgaaataagtgatatttcaatcttggatttaattgtatggcaagaacataaaattttccctcgcccatcatacacatcagagactgagttttgcgttaattcattttttggcccccacaagatcacaaaccaacgcagttggtattgcaaaggactattagaatggatccctcaaataagaagttgcaattatgactcaattgaaatcaagaatagttttttgaacagatatatggacgagatagtagaattaggcaatcttggattacaagcgagtatctttcagaacagcatgacatcgaggaaacatttagatgatgtttggaatgattttttaaaaggatattatggcgtatgcactaaaacatcatcaccagaacaaattgccgcaaaaaacctaaccacaacaattattgacaatatcacaaaaaagcaatctaaatgttcaatctcaagggatgatgaattaattttgatgctggccgttaacatattagacgagtgtagttcaaatttttcgcctcatgagagagcaatcagctcgagaagcagatgcattgacctcgtacgctcaaagtattttcaaaaaaattaa

SEQ ID NO: 452871 - DNA, 291 bp, Serratia marcescens
atggtacatctattgcaatttctacttgaaagaagaaatgaagacgccatcactatagatgaaatattgtactacgtatgggataaaaaccacttgcaatcatccactcaaagactttggcaagttatgcgttctctgaaggcaaagctggaatctgcgggagttgaagacaactttatccttagaaaagacaagcattcatatcaagtaattgatgattttatagatccactttatttttataacttcaacaaaaaaggaggtgcttatgatgagataaaaaacccatga

SEQ ID NO: 452872 - DNA, 606 bp, Serratia marcescens
atggcttggtatgatattacaggtacaatagcagattggacgatggccggtgcagctgtttatgcggcggtaaatgctaaacaatggttttcacaacgttcacatactaaaggtttcgataaagcagagaatatattatcagctattgataatcattatcgcgaaagaaaccgatatcttagcgaaattcattcagcacttgagtatctaaatgctcttgattccaatcttatttttgctgatcaagaaatgcaagatagacatgagaaactatccaaacaacattcaggtaacattttattagttgatggactgagtgatgaacttgtattaattgaacgctggtctattactgttttgaaccctgaaaagataaatgcagtcattaagtcactcagaaatttaaatgcttctgctgccaatgcttataattattctcgttcatgcatatacaatcttatttgcgtgagtagacaggattttgagtttacgttaacacaatttaaatcacaatatgaagattttttgaaagatttagctacacttgatgattgctatgaaaattttaaaaagcagaaatttactaactttttcagagttagttaa

SEQ ID NO: 452873 - DNA, 1380 bp, Serratia marcescens
atgctaaaatatatatctgccgattgtggcagtgggaaaactcatgcactaatttcaatcgcaaaaaggtcaaatgatagatttattatcgtgcaaagtactttacagttgatcgaacaaactacaaaagaactaggtgctattgctacggcgattacgtcatcgaatcatagtaatgttatcaatgcaacgattgaatttttaatgaagcctactcaccgagtactagtactttctgagaaagcatttcttggaattagcgacctatctctattaagggactggaagatatttcttgatgatgtagtaaacttccatgcttataacgtcatcaacactgagaaaaagtacgaagttgagaatgaactttttcgtgactttgaagaagtatcagagcagtacttgacagctaaaccagtacttgaatttagcgatgatctactaaagcaaatgtctagctcattcgactttgttggaacttatgatcatttcgtaatgaatagtagtttcttcaacaaaattggtaaagctggtaatattgatgtgtattcaaatgattgcaaacaactaactaccttagcttgggtgaacatctccaagtacaaggatctagatgttactttcatggctaatctgttcgaagaaactctaatctacaaaggcaacaaagaactattcgagaaagttgatttagatggcttacgtgagcgtgtgaagacagtacgggaacgtgtgaaggtttactacttctcagagaatcaacgcctcacaaagtcgttcagggactctcatggcgataagttacaagcagtgtatgactatataaatgctaatgtaaaacagccttactactacactactaataacagtactggcaaagtgctaaatggtgtttatatcaagcctgtaagccgtggtatgaatagttttcaagattacagtacttgcgtatggcttgcatcaatgaagccgtcaccagtcgaagcaaagcagttagaattgatgtttaagatcactggtgaagagattacatatgctcgtgagttagaaaatctctatcagttctgtaatcgtagtagtctaagaaagtatgacagtactgaacaagtagtagtctacgtgttcgacaaggaacaggcacgctttctaagtgacgatatcgagtacatcgatgttggtattgatgaagtacagaagtttgtaccgctagatcttggaagtactaaaacgaaacgcctttatcgtactttgaaaaagaatctttcagaagattcttttctaacgtggttgcgtagtgatactaacaaagatttatcagatcgtgaacgtgagcatttcagaactcagtactacaagcgaatgtctaaatcaccaacatag

SEQ ID NO: 452874 - DNA, 621 bp, Serratia marcescens
atgggaaaacataaagaactagtagccgggattggcacgaatgacctgaaagatattaaaaaacaagaaaagatgggcttaacacctgaaattagagagaaatgctaccaagcgtggaagagtcgcctagaagcagaaacagtcgagaaaagagctactgtcagtactgaatggctcacgtacagtaaattcgctagctggtggcttgatactcgcatagaaggctggtgcatcgataaagattggctagtcgccggtaataaggaatatcatcctgataaatgcgtttggataccgaacaagattaacagcctgatgaatgacggtggtaagaataacggattaccgaagggtgtcagtatacaacaacagaaatataaagacgtcgtttataagggctatcaagcacggtacatggttggtggtgttcgtaaatctaaatacttcaaaaatcctcatgatgcccatcgccaatggcagctatggaaaattcaggaaatcgataatgtgatcaacgagttcagtactgatacccgacttgatcaacgagttatcacgcgtcttattgaagtcagaaacgatatcaaatgcgattacaataacaattttgaaacacaataa

SEQ ID NO: 452875 - DNA, 216 bp, Serratia marcescens
atggaaaaacagcccggcgggctgtggcctcttcccgtttttctgcatcccccttactccttcatctttccctttttattcccaccgctcgccgcagtgttggctagcgaagtctgccaacgcgaggaagcggaagtgcatctgaagctgatttttcgcacggtcatcgcggggcttttgttgacgatgcaagataggcaacgtgttcccgtttga

SEQ ID NO: 452876 - DNA, 960 bp, Serratia marcescens
atgttacataacgagccaagtaacatagctagctgcattactgatacatcagctgttcgactttcttcttatcgaatattcttccgtgttgatgatgaatccgcatttgccatatacaaatggaatgaagaagtttcatctcgcctaatgaagcttgtcggtgttatcgagataacacttagaaaccgtatacattcagcaatgagtcaagctgtgcagaaatcggccaccggctcacctctgaataacgattggttcaaccatttatcgctggggtctggttctaaagccaaattagataaggtcctgttgttaaagaacaatcgtcctaaaaacccgcagccatccccaaattttgtcgtatccaaaatgacgtatggtttttggccaaacatattaaaagtcgacaaaaaaaaagacagaagcaggcttgagtgggaggtgtatttccctctaattttccctggcctttcgccagaaccagttggattttggaagaaattaaagcaacgtgaatccgtcatagccagatgcttcaccgtcggtgaactcaggaataggatcgctcactttgagccagtatggaagtttggtaacgaaattgaggaaatcattccgaaacataactctatcccaaaggtcgtaaaaccggctcctcaaaataaacatgagactgtagctaggttaaagatggagttttccaagacaatgcagttgctaagttggctatcaccacacgcttatcaggactatctaaaatcggaaagtaaaagatctctcgattggttgataacagaaagcgctattgacgcgtttattaaacacaaagagatagagaggatatcttttaataaatcattaaaagcaaggcaaatcaaaaggttatctttgaaaataaaaggatgttcactgatcacagtgaagaaagaaccaatcggcatgatcttcctatacccttaa

SEQ ID NO: 452877 - DNA, 831 bp, Serratia marcescens
atgtccggttttatttccagcataatttttcatgactatgtatgggaacggtatggtgtaaaaataacaattattgatcaagataaggccacagcatattttgttatctacgcattgcttataacttcacttttattcaccaggccattaaaaaacaaagtgatttacatatcgaccctgcttattggcatttttatgttttacaatatgtacaaatttgttttctccttggcatttctctatattatttatgaattcttcatcaacgcaattcgaggtcgaatagcggtggtgaaaatgtcgctactaacagtaggcctagttgcagtaatgtctacagtattgatgctttcaaatagtaaggcaatgaatacgcgttcaacacaatttggtgactactgggagtatacaggtagtaaatttcctgctattgcattgggaattggctttggtgggcaatactattcgccatcagatactgatgatcagggggagataaagcaaatcgacgttgagaatggaactgctaactaccgtaaaagcatacaaactccgttcttgaatcaaatcaaaaatgcgggcttgataggtttcttcataactattttctttgctatctttgctgtcatatatatggctaagattaatatctccttacctgttaatattctttataacgctatatgctttaatataatgtggtttatgtgtagtggcagcattatgcttcaaccgacaccaatagcaatagttactgtctccaagttattattgttgttctacttgttgcgagaaagagaaaaaaacaataatgccacagttaaagtttag

SEQ ID NO: 452878 - DNA, 129 bp, Serratia marcescens
atgagcgatagatgtttctggattgaaattgtcgtcggtgcctgcagcctgttctgggcgggagtcattgtagcagcactgatttttaaggggcatgaccatgagcaagatcgtcccaaacagcggtaa

SEQ ID NO: 452879 - DNA, 207 bp, Serratia marcescens
atggttttttcctttcattccctaatcttaaaccaaaagtttatttccatgcacactcattatgttgacattcaaataaacaatatgtttaattcggtgtgtcaaacctatggagatacctatgagtgctttagaaaaagccatttgtgcagcaggcagcgctaccaaattggcgagtcaacttgggatttcgtccatgacgattag

SEQ ID NO: 452880 - DNA, 852 bp, Serratia marcescens
atgaagctgcgtatttcatctctcggccccgtcgccctgctcgcctcctcgatgatgctggccttcggcgctcaggcggcctccgccgaccagggcatcgtcatttacaacgcccagcatgaaaacctggtgaaatcctgggtcgatgggtttaccaaagacaccggcatcaaggtcacgctgcgcaacggcggcgacagcgagctgggcaatcagttggtgcaggaaggcagcgcttcgcctgccgacgtgttcctgacggaaaactccccggcgatggtgttggtggatctggccaagccggaatggaaaggccgctgggccgcctcgccgtcgggcgccgatttccaggcgatcgtcagcgcgctgctggcgctgaaaggtgaaaaagcaacgctggagtggctgaaagcgatgaaaaccaacttcaccgcctataagggcaacagcacggtgatgaaagcggtcaatgccggccaggtcgacagcggcgtgatctatcactactacccgttcgtggacggcgcaaaaaccggcgaaaacagcaataacatcaagctgtattacttcaaacatcaggatccgggcgcgttcgtcagcatctccggcggcggcgtgctggcttccagcaagcatcagcagcaggcgcaggcgttcatcaagtggatcaccggcaaacagggccaggagatcctgcgcaccaacaacgctttcgaatacgccgtcggcgtcggcgcggcctccaacccgaaactggtgccgctgaaagatctggacgcgccgaaagtagacgccgcgcagctgaacggtaaaaaagtggtcgaactgatgaccgaggcgggcctgctgtaa

SEQ ID NO: 452881 - DNA, 135 bp, Serratia marcescens
atgatggtggagttcatcttgttccccagcgcctcggtcatcatgatcggcatcaggttggccgggatatacagcatgatggaggtcaccagcagcgccagcgtccattgcaagctgtggcggcggcgcacgtag

SEQ ID NO: 452882 - DNA, 837 bp, Serratia marcescens; identical to SEQ ID NO: 34951

SEQ ID NO: 452883 - DNA, 255 bp, Serratia marcescens
atgagccagtggattaccgtttgtcccgtcgccgacattctgcccggcaccggcgtgtgcgccctgatcggcgatcggcaggtggcggtgttccgcccctatgccgacgagcaggtgttcgccatcagcaatatcgacccgttcgcccaggccagcgtgctgtcgcgctgttatgggtcattaagaatgataaagggaaataagggaattggcggaaattttcgggaacaggcgggaatggctaacccacgctag

SEQ ID NO: 452884 - DNA, 1584 bp, Serratia marcescens
atgttgaataaactgacaggagccattcgcaaactgatccacccggccagcggtgagacggtgaaagtgagccaggatgagttgcagaccgaacagagccgagcgaaggccgtgggcgtgcgtcggccacatcctggcatcagtatcgccagcagcctgacgccgcaacgactcgcaagcatcctgcaacgcgccgctgagggtgacgcccgggactactttatcctggctgaagagatggaggagcgcgatctccactattccagcgtactacgtacccgcaaattgaaggtggccggtatcacaccgacggttgaggcggccagcgatgaagcccacgatatcgaactggccgatgtagtgcgcgcactgatggagcggccgcaaatacccgagctgctgttcgatctgttggatgggttgggtaaagggctggcggtaattgagattttgtgggacaccaagactgtaccttggacaccacgcgattattcatgggtggatcctcgctttctcaaaccggataaggagacgctgcgcgaagtacgggtgctcacagaggctgagccatacctgggcgagccattgacaccgtacaaatacatcacccatcagcctcgcctgaagtccggtttgccgctgcgtaatggcttggccaggctggtggccgtcatgtacatgctcaagtcatacaccgtccgtgactggtgggcatttggggaaaaatttggtttaccgatcactgtgggcaaatacggcaacaacgccagtgcagaggacattcagacgctggttaatgccatcgccacgttggcttcagatgccgggtgtgccatcccgcaatctatgcagattgagatgcaggagaccgccagccgccagggcggcggtgtgctattcgaaagcatggcgaaatggtgtgatgctcagacgagtaaagctgttttgggccagaccatgaccactgacgatggcagcagccagagccaggccaacgtccataacgacgtgcgtatggatatcgcgcgctgggatgcgcgccagctcagtgacacgcttaacgagttcctggtacgcccctttatcttgctgaactacggcgagcaagagaactatccgcgcgtatgcttacctatcaacgaaccggaggatttgaaatccttggtcgatgcgctagtgccgttgctcgatcggggtatgaaggtgcagatgtcggaaatgcgcgacaagttcgggttatcagagccggaagacggtgcggaaatcttccagcctgcaggcatgtccatggccggttatgccgccttacctcccgcgctaaaccgcgagcaattggcccttaaccgccagtcgtcgccggatgagattgaccgcctgaccgacgagggggtaagcgactggcagcgcgtcggcaccgactttaccaacccggttttagcactcgccagcgaggcagaaagctatgaagaattcatggcgcgcctgccggagttgcaagccaatctcggtgctagtgaattcgtcgagcagttggcccaactctgtttccaggctcgggcaatgggagacgtaaacgatggctga

SEQ ID NO: 452885 - DNA, 957 bp, Serratia marcescens
atgtctgttgaattactggcgctctgtttcgaactgccggacaccattgacaacaagctacctgactggttgccgatgttgccgatcggttcgttcagcggccgcgatggccgttcctggatcaccaacgaaccggaagcggtgattgcagcatcgctgcaatacaacaagctgccgttcgatatggaacacgccactgagctgaaaggcccgcaaggcgaccccgcacccgcttacggctggatcaccgacctgaaaattgacggtgaccagatttgggcgcgcgttgagtggacgcccgagggtgctgcgctcattcaggggaaaaaatacctctactacagccctgcattccacttcaccgccgatggcctggtcacgaaattgtccagtgtcggcctgaccaacaaacccaatttatttgtacctgcccttaactcggagaacaccgacatgaaactgcctgaacagattgcggcagcattgggcctgggcgcagatgccaccattgaatccggtgtcactgcaatccagggcctgaagaccgctgaacaggtcgcattgaaccgtgcgcaaaatccagacctgacgtcctgggttccaaaggaaacccaccagttagcgctgaaccgtgctgaaacagcggagacggcgctgaaggccatcaatgaaaaaggcgctgaagccatggtggatgccgcgattgccgccggtaaggtagccccggccaaccgcactatgtacctggctatctgccgcaccgaagaaggtcgcgcgcagtttgctgagtttgataaatcagcaccggcgatcgtctccaccgatccgctcaagaaaaaagagctggatgggaaagacaagcaggaactcactgaaactgagctggcgatgtgccgcagcatgggcctctccaaagaagagttcatctccgctaaaaccaaacaggagcaaccgtaa

SEQ ID NO: 452886 - DNA, 1539 bp, Serratia marcescens
ttgccacagaaatcgcttgaaggcgcccagctcgcctggatgacggtcgcgctcgccatggcgaccttcatgcaggtgctggactccaccatcgccaacgtggcgatccccaccattgccggtaacctcgggtcttccaactcgcagggcacctgggtgatcacctcgttcggcgtggcgaacgccatctcgatcccgatcaccggctggctggcgaagcgcatcggcgaagtgcggctgttcctctggtccaccgcgctgttcgtcctcgcctcctggctgtgcggcatctccaacagcctcggcatgctgatcttcttccgcgtgatccagggcgtggtggccgggccgctgatcccgctgtcgcagagcctgttgctgaacaactacccgcccgccaagcgggcgatggccctggcgctctggtcgatgaccgttatcgtcgcgccgatcttcgggccgatcctcggcggttacatcagcgacaactaccattggggctggatcttcttcatcaacatcccgatcggcgccttcgtgatcgtggcggcgatggcgacgctgaaggggcgagaaaccaaaaccgagatcaaaccgatcgacaccgtcggcctggtgctgctgatcgtcggcatcggttcactgcaggtgatgctcgatcagggcaaggagctggactggttcaactcgaccgagatcatcacgctcaccgtcgtggcggtagtagcgctgctgttcctggtggtgtgggagctgacggacgaccatccggtggtggatctgtcgctgttcaagtcgcgcaacttcaccatcggctgcctgtgcatcagcctggcctacatgctgtacttcggtgccatcgtgctgttgccgcagctgctgcaagaggtgtacggctataccgccacctgggctgggctggcgtcggcgccggtcgggctgatcccggtgctgctgtcgccgatcatcggcaagttcggcaaccggctcgacatgcgcaagctggtgactttcagcttcatcatgtatgccgtgtgcttctactggcgcgcctatacgtttgaaccgggcatggacttcggcgcgtccgcctggccgcagttcgttcagggcttcgccatcgcctgcttcttcatgccgttgaccaccatcacgctgtccggcctgccgccggaacgcatggcggcggcgtcgagcctgtcgaacttcacgcgaacgctggcgggttcgatcggcacctcgatcaccaccaccctgtggacgcagcgcgaatcgcagcaccattcgcagctgacggagttcgtcaacccgtacagcccgcagtcgcaggagatgtaccggcagctggagcagctcggcatgagcaagcagcaggcgtcggcctacatcgccaacgagatcaccgcgcaaggcctgatcatctccgccaacgagatcttctggctgtcggccggggtattcctggtgctgctggcgctggtgtgggtggcgaaaccaccgttcagctccggcggcggtgggggcggcggcgctcactaa

SEQ ID NO: 452887 - DNA, 756 bp, Serratia marcescens; identical to SEQ ID NO: 432628

SEQ ID NO: 452888 - DNA, 624 bp, Serratia marcescens
atgatgaaagcagaactgaacagcgaacttatcgctacagtggcaggtaatattaccgtctataactacgacggcgagacacgagaatatcttgattcaacagttgaatatctggctgtgggggttggcattccggctaattcctgcattgatgctccaggtaacagtaaagatggctttactgtttgtcgaacagaagattttacctcctgggagtatgttaccgaccatcgtggtgaaacagtatataacactgaaaccggtgaagcagtaatcatctctttgcctggaagttacccagagaataccactacacaggcacctgccacgccatacgatacatgggaaggtaatagctgggtgacggatattgcaaaacaacacatagcagacgtagcgatagcagaacagaggaaaacaacattactggctgaggcgacaacgattatcgccccactagtggatgctcaggcagggggctatatcgatgatgccgaagtgccacgcctggccgaatggcagcgataccgctacaaactgactaaagtcgataccagcaccgcaccggatatcagttggcccccgcacccgggagaggaggccattcaggtttctctggattaa

SEQ ID NO: 452889 - DNA, 783 bp, Serratia marcescens
atgcaactgacctttctcggcaccggcggcgcgcagcaggtgccggtgttcggctgcgactgcccgatctgccaacgggcgcggcgcgagccggcatttcggcggcgagcgtgcagcgccatgcttaactatcagggggaaacgaccttattggatgcgggattgccggctttggagcggcgattttcggcggggcaaattcaacgttttttactgacacattaccacatggatcacgttcaggggttatttcctttgcgttgggggtgcggaaattccattccggtgtatggcccgccggatgaacagggctgcgacgacctgttcaaacaccccggcattctggagtttcagccgccgctggcgcccttcgccaccgtcgaactgggcggcatgcgcatcaccccgctgccgctgcaacactccaaactgacccacggttatctgatccaggcggcgggcgctgcgctggcctacctgaccgacaccgtcggcctgccgccggccaccgccgactatctgcagaacgtggcgctggatctgctggtgctcgattgcagcctgccgccgcagccgcaggcgccgagcaaccacaacgacctgacccgcgcgcaggagacgcagcggttgctgcagcccaaacgcacgctgctgacgcacatcagccatcatctcgatctgtggctgctggacaacgaactgcccgccgggctggagctggcgttcgaccacctcagcgtcagcctcggtagcagtgcagccgatccgactccagcaccctga

SEQ ID NO: 452890 - DNA, 561 bp, Serratia marcescens
atgggtgaatggttctcaactaatgcaacagcaattataaccttagtttcagcactattatcagcaatcgtggcaggcggattcgctttgcttggatctcgattaaataatcaagccgcaaaggaacagagagaagaacattggcaagttgaaaaatggagagcaaatagagagctgtatttacgtaaaggtgaagaggttagcgacctacttgataggtggcatgagaatactcatcaggttatgttgcttcaaatgttcagggccttaggtactaagactcagcaacaggtggatgaagagtggaaggaattcataaataaggaaattcagccaagaataaacgcattactatcgatttactattctgacgcggtgaatgattttgaactagccacgaattacgtaggtaaaatccatcttagctatggcctcttcttggctggtgatgtagatgtaagccccctttgtattgaaatcagtcaagccatggataacattcaaaaaaaaacgaaagaaataagagtaaaacttgcaacgctaactaaagcaaatttataa

SEQ ID NO: 452891 - DNA, 216 bp, Serratia marcescens
atgctgacgcacatatgtgagctgatctgttgcggtgacagaatacggctgaacaactatcggatcgccaatcgggttaccctcgtcatcaacattgttggctttggtattgatgcggctgccaacctggtcaatcacgataatcgggccggttgtggcgccagtgatgccgttgaagtccgtgaggcagtcattaaaatacgggccaagcaatga

SEQ ID NO: 452892 - DNA, 246 bp, Serratia marcescens
atgaatcactgtgcgaatgccattccatgccggggcggttacgacgccttcttcctgcatgcgttcgataagccacgctgcgcggttgaagccgatgcgaaaatgtcgctgaagctgtgcaacccatacgcaggcatgctggcgaacaaattcaacagcctcactgtagaggtgatcatctatttcggatgctttcatttggcctcccgcagctcggtggcgaatgcttgcagctcgttaatctga

SEQ ID NO: 452893 - DNA, 345 bp, Serratia marcescens
gtgtccgagcaatttcagcaggctgaaaaacaagacggatttgaagcctccattgaagaaaagcagctgtacagcataaagaaagctgttattggtcttattgaattcgttactactagcttggatcagctagggattgacaagcttcatgagcttgttgacccatcacttgatgagcttcatggcatcatcatgcaacttgacgctgaagcaaaagttcatggtgatctgaacctcaaccaagctttgttgtttgcacagatcttgatcaacgacatcaagcaaaagaacccagaaatgtgcgcccacagttccaggatgctgaaaagcgcacaaattctttaa

SEQ ID NO: 452894 - DNA, 123 bp, Serratia marcescens
atgtccaaacaagacagcattaagagaatgttatctctagcgcatcgtctggatgccatcgttgcagaaatgaatgctcgcaaagagctcatgatgcaagacatgtatgcgaaagctgcatga

SEQ ID NO: 452895 - DNA, 1095 bp, Serratia marcescens
gtgacgacgatcgcgctaacaattcgaaccggaaaccgtttggccgctcagtcagaccgccgcgttaatcttgttgcaaccaggctctatgacgggcatgcgtcgagaagcatcagcggtgcgttctaccacgtattgaaagaccttggctatgctgatagccagatagatttcgccactatcaatgcactggaggataattactggacgccacgaggagaaacctttgactggtcagccggcagtgataacacttccggtttggaagtgctgcaacggatcgccaatgcaggcatgggttactttttactgagcgatgggctggcgtctgccggcagggagggggtaaaaaactggtccggcgtaatcagcccacaggaacaaaccgaggaactccagacagctttcaaggcgctgtcgcaagatgactatgatggtgtcgatgttacctacattaacgccactacatgggctgaggaaacggttcaatgccgtttcagcgacaacccaacgcctcagaaagtggaggactacacccttgatggagtgaaggatccagatagggcttaccgtataggcatgcgcaggctgatgaaatatcgatatcagcggctaacgcatacaaccagcacagaaatggatgctctttgctataactacggcgatcgcatcgttcttacagatgatattcctggaagcaaaacgattagttgcctggtggtagatgaacagcatgatgctaacacggtgaggatccacgttagtgaacccctggattggtcatttgaaaacccgaggtgcttaatcaggtttcaagatggttcggcatcacccttgctggttccaacacgcattgatgactacacgctatcactgagcaacacgggagatgttcgcattgatgaatggataatgaatgattcatcagttgagccaccaaggattgtattctgctcttcttcgagggttgggtacgattcaataatggactcaatagagcctggctcggatggtacgtgtaaaattaatgctctgcagtatagcccattgatttatcaatacgacgacgctttgtacccaggcgccgttcagtaa

SEQ ID NO: 452896 - DNA, 1419 bp, Serratia marcescens
  misc_feature (1393)..(1402): n is a, c, g, or t
atgtttctgtgcgttggcgttggcacgcatgcaataaatcagacgacgataaagatcggcaatacgccggttagcagttttggtgatgatgttagttatacgatttatccgccgggagctagcgtcgcttctgatcaccgcacagaaaattggtttgcttcaactgaagttggtggtacgacatcaggcaccgctggacttgatcttgcttcaacaggtcctgattcggtcagcatcacagcagatgccataaccatatctggtaacaacgttacagtaattggcgccgtggatgatgccggtgatgctgtgattcctgattcttgggttgtgggaacagatcttactatccaggtgccagataccttcacggtagctatcgaggctggtcgtaacgttatctatggtgattttgctgaactcaaaccatcagtaggccttcccgtgtccatgacatggaatggaactcgtattgacctgttcatttcagcttatgatccaggctccccagcagtgccaggcgtaggtggtaacgcggcaagcatcaccgcatccgcatcaccaacaacatacgacttcagcgctaatccgctttcatttacattgacatgggctggtgtgaactatgtcatttctttgacagctaactacgtaactatgtcaggtctcacagatgagatagatgatcaattatctggttcagggctggaagttgtagggatagatacgaaggtagtgatcagggaaaaggaaagcccatttagtggaaatagtattggtttcagcgtacttccttcagttttgtttggtagcgatcctgttattgttgccggtacggcatcaacaggcggaacccccgctgttatggagcacattgctttgtcatggggaagcgtgactggtgatccattcattggacttccaaacggatcccaacgtatagcctttggcctacgaggatatcgctatcgtataactgacattgatgggcaaaccatcagcgttgagagactaattgaaagttcagatggctcaacaacggtagatccctcttggcctgggtttaccgggcgcacgttgttggattttactgtcactggattgagtgattcctatgactggatggggcctttcctttgctgtccagaaaatgaaacaacgactcaaatagagctaaatttcgtctatcctcagggattgtgcgatgtgggaagtaaagacggagccattcactggcatgacgtagcgatgacagttcaatatcgtttgtcaggttctgatgaatggaccagtgtacaaataaagcatgggaacaacacggttaatgaggttggttacaccgaggctatcacgtttcccgctcccggaaattatgaagtacggattaagcgannnnnnnnnncagttaccccaatgtga

SEQ ID NO: 452897 - DNA, 915 bp, Serratia marcescens; identical to SEQ ID NO: 27201

SEQ ID NO: 452898 - DNA, 693 bp, Serratia marcescens
atggaaaagcgtttggctgcattagaagatattcaagcaccagagcatttgcgttctattcgttttcgtcaaagttcagccctagaactgcacaataagttcccgattacggcagatggtctgagcttaaaatttggtagccgtactatctttgatgacgctaactttataataccgcttggcgctaaagtcgctataactggatcgaatggaacagggaaaacgtccttgttaaaaatgatatcagaacgtgctgatggattaaccatatctccaaaagctgaaattggctactttacacaaacaggatataaatttaacacgcataaatctgtgctctcctttatgcaggaagagtgcgagtacacagttgcggaaattcgtgcagtattggcttcaatggggatcggagcgaatgatattcaaaaaaacttatccgacttatcgggaggtgaaatcatcaaactgcttttatccaaaatgcttttaggaaaatataatattttgcttatggatgaaccaggaaactatcttgacctaaaaagtattgccgcattagaaacaatgatgaagtcctatgcaggaactattatcttcgtatctcatgacaagcaattggtcgataatattgctgacattatctacgagatcaaagaccacaaaatcatcaagacttttgagagagattgttaa

SEQ ID NO: 452899 - DNA, 840 bp, Serratia marcescens; identical to SEQ ID NO: 349077

SEQ ID NO: 452900 - DNA, 543 bp, Serratia marcescens
atgtgtggcacgaaatactggctcaactggctatacaatgatggttccctttctcacttgaaccaatatggcaaagtgttgcagggcgaagctattgaaaaagtagtttattggcatctttttgaccctgctaaaaagggaacatggaagggaacacgggtgcagagtatcgctgtcaacggcaacgtgattgacgttaagtattacgtgccgttcccgcccctggtcatcgacaccgatttccttggcgactgcgctgggaaagggtactccctggaagctgggagcgcgtcggtagtgtcggtagcagttgtcggcggtgatactgtccgtctaacactcgaccaggcgccagcggtcacagaccacttgctaatcgggttcacaaacaccaccccggcaaataacggaaatatttacccgcttgtttgcgtgcacgattcatcgccgtgggtatctcgttacgtaacaaaaaacagtaatccggctccgctctataattgggcaaccctcgatcgcattccattaactggggagttttaa

SEQ ID NO: 452901 - DNA, 336 bp, Serratia marcescens
atggtgccgtcgctgaaaatgctggcgatcggctggctgtgctgggatgccaacggcaggaagaagccgcgtgccgacagcgaacgcatgcacctgatttatgaagtggtcgaattcgttggccgctggtcaatgatcgacgtgtttgtgatcgccgtattgtcggcgctggtgcgaatggggcagttgatgagcatttaccccgcgacgggcgccgtgctgttcgcgctggtggtgatcctcaccatgttcgccgccatgacatttgatccccggctgacctgggatcgcgcaagtgaaacaatcaacaaggagccgcaaggtgacggaaaataa

SEQ ID NO: 452902 - DNA, 201 bp, Serratia marcescens
atgctgcctgacgcctatcatatcttcatgcaactcagcccgttgacttacgtgattgagcaggcaagagattgcatgatgctgggtaaaaatatcgcctggggcagttggggcgtttataccctcacctctttcgtcatcatgctgctaggttatggttggtttatgttcacgcgtaaagggtttgccgatgtcatctga

SEQ ID NO: 452903 - DNA, 1152 bp, Serratia marcescens
atgtatgcaatttgtagagtagggaaaattaaatcacaatctcagctttcacaagctcaaagccataatttaagacagcgtgaaacattcaacgctgatccattaaaaacaagtaataatgaaattttatatggttctccgttcgttcgtgatgatgtaaataaaagactcgaagagtctggagtaaaaataagaaaagactctgttttatgtgccgagatgattttaactgcatctcctgaattctttaatacagataatagttttaaagattggaaaaatgaaaatttaaattttctaaaaaataaatatggtgaaaatttaattaatgtaattattcacaatgatgaaaaaacaccacaccttcatgcaataattactcctattatttcagataaaaataataatagattatcaatgaaagaattcttaggcggtaaaaagttattaagcgaactccaaacagattatgcaaaatctatggaaaaattcggtttaagtaggggtatggaaaaatcagttgctaaacatcaagacattaaaactttttattcttcaattgaagaagcaaaagaaataggacaagaaacaaaagaagaattcaagaaagatttcaaagtagcaattagtatcaaaaccccaacacctacaggtaaaatttttaaaactataagccctgaagatgccaaaaaaagtacaattgaaaatcttcaagaatataagaaaaaagtaaatgaaaaaattcatccaatgcatgatggtatagtaaacttatcaattgaaaacaataggttacaaagagaaaactcgcagttacgtgaagtggctgcaagactaaatagagataatgaaatatcaagaaaacgagatcaaaaatttgatcacatgagaaaactttgtcctgatgaatataatcaattacaaaaatcatataaaaataggctcaatgaaattgagcagaagaagaaacaagacgaagagttaaaattaaaacaaaaattagatttggagcagaaaagaaaagagaaattagcaaaaagacctaaaggcgaaagtagtcttgatctggatgaacaacgtaaaaataaaatgaagccagaacctgagccacagcaacaaatagaatattcaagaccaagacccagattttaa

SEQ ID NO: 452904 - DNA, 888 bp, Serratia marcescens
gtgtggcaaaacgtttaccaagtgcctttgtatgaattcgtcaactttaccaaacaatgcaaattgaatggtaaaacggcgctattcatcattactctgccagcacaggtatttataccagctatctacgatttcagagcgcaaggctgtcacattgcttacgatatcatggatgagtgggagtgcttcaatcaagtgggccaagcaccttggtatctgcgagaagcggaagaaactatcatattacaaagtgattatgtatgtggcgttgctccatcactgcgcgataaattctcctcgctccgaagtgatattgaggttattggcaacggttactcagagaacgtattgggcgatacacgaaatatcgcgcagagcacctcaaataaagtgggttacttcggccaccttacggactcctggtttgactgggatatcatttttaaactagccgaacataaccctcagtatcattttgaaattattggttatggcgagcccgaatgggttgtcgaaaaagtgaagcattttaccaacatcatgctagttggtaaagtgatgccgaaagatctccatcaatatgttaaagaatggtcgatcgggttaatccccttcaaaagtggtgagcttgcccaagcggtagatcctattaaaatatatgagtacctttattttggtttgccaacgttggtaacaggtatcgaacatattaaacgctatccgatgacttatttttccgacggaagtgatatccttgagttgtttaataaaacattaaattgcgagcgaaactcatccgaacttgaaacaacctgggcagccaggttcaaaaaaatggagtcagacattttgactcaaaatggaatcggagaactttatgcttcgtaa

SEQ ID NO: 452905 - DNA, 189 bp, Serratia marcescens
atgctcaggagtctcgtgggctcggagatgtgtataagagacagccgtaaaccgcgccccgcctgggtttactcggcattcattgttattatccatcgcaacaatcagaaaaagcgcattttcattcccaactcgatgatgcagtgtgttccccctatgatgaaaaaggttctcatttccctacgttga

SEQ ID NO: 452906 - DNA, 654 bp, Serratia marcescens; identical to SEQ ID NO: 251025

SEQ ID NO: 452907 - DNA, 282 bp, Serratia marcescens; identical to SEQ ID NO: 251067

SEQ ID NO: 452908 - DNA, 1605 bp, Serratia marcescens
ttgaaattgctaccaaaattattcttaccaaatcaagatgggtcaggttccaaagttgaaattgaacataacgggtctgctgtaattgtaggagctaatggttcaggcaagagtcggctaggtgcttggatagagcgaaacattgaagaaaatgtggtggtgcatcgtatatctgctcaacgtgcattagacatccctgaatatgcaaccgttaagtctttagaacaatctttgaatgatcttctttggggtaatgaagactcaaaatatgcaaaccaacattacaaatggagctataaatggaacaataggcccgaaacatttatgcaacaggactatggaaaagttctgtctacgttgttcgcaactagcgcggaaagagatcgaaaacatgctgcagagactagaaagcgccaggtatatatccctgtcgaagactctccgatagatgtacttataaaattgtgggatgagattcttccgcatagacaggtagtactagaagatggaaaggtcaaagtaattgataaagctcatgaaacggaataccacggaaaagaaatgagcgacggtgagcgtgtagctctttatctaatggggcaatgtttggttgctcctaaaggttcaatactcatagtcgatgagcctgagatccatttacacacatcgataatgcaatcactttggaataagcttgaagaagctaagccagactgtctttttgtatacattacccatgacttaaattttgcttcaaccagggttagctccacaaacatttgggttaaagaatacgatggaaaaactacttggcaatgggattttgtccctgatgttgaagggtttccagaaagcttattacttgaactgatggggaatagacgaactatcgttttcgtcgaaggagagaaaggcggaaaggatcattctatatatcagtcagtctttagaagctacaacatagttcctcgcagcggctgccaaaaggttatagattccgtaaaagcaatgaaactaaaccagtcatttcatcatgtgaatgtgtttggaatcattgatcgtgattaccgaacagagcaggaaattagtgggcttaaagatattggagtttacacgattgatgttgcagaaattgaaaatattttgctcaacgagtctactttaagattagtggcagaaaatcaacacctagacgcggatgttgtagttaataaatcgctggaaattgcaaaaaatatgctctctaaagatgtagaacggcaagcttcattgcgtacctgtagggcattagaaaatagactcagcagaatagataataaatcagttgggcttgatgctatcaaaataactgtaacggaaacgctggcagaaatagacgtcgatgtgttatttgcagaaagtttgggtctatataacaatctaactaagtccaatgatctcgatgagattttaaaatattttaacaacaaaggtctcctgtcaaatatctgttcaacttttgaactcggcaaaaatggctatgagaaattggtgttgcgtatgcttaattcggagaagagagaccaaatactcaatggtcttaaaaaatatgtgccagagatttaa

SEQ ID NO: 452909 - DNA, 858 bp, Serratia marcescens
atgtcattgatttttaaatatagaaagctatatgactctgaaactatggagttggataaatacacgctagatatattgatgaatgatagaatatttttttcaaaggtaaacaattttaatgatccgtatgactttttacccacagtaaatttagatcctgagaaaatcgaacgttattgcaatgaagtattaccgcttgaagttggagagcgctttaagaaggctatagtttcaacttctgagcaagaagttgaaaaactggttgttgaaaagcttagagataatttagcagtattctgtgctacgagagatcataaaaattttttaatgtggtctcattacggtgataatcataaaggaatatgtattgcaataaaaacatataaaaatatcgaaaataatgacgtattgcatgtggaaacagaccagtttaaaaaaatcagaaataggagtgatgagacatactttccattgtttccggtacggtatagtaatgtgcgaccaccacaattcgattttgtagaaaatgttattgataaaaaagtgcctaatttcacattgaccaagtcaaaagtttgggagtatgaggatgaagttcgtgcagttatgttgatctctaatacagatacccagttggtaaaattaaagaaaaaccaaattgctgaagtatttatcggtagtcaagtaccgcaagaaataaaagataagttaattcaaaagcttgaaggtaaaggtatcattattaacgaaatgaggttatctcaaactacttatgatttaacaacgatcgagataataacaaaattagattgtgaaggcattctgaaactagttgagtatggtatcgaagacacctaa

SEQ ID NO: 452910 - DNA, 3306 bp, Serratia marcescens
atggagctgactgcccccgttacaacaactgctaaggcttggctgagtgagcttttgtttaatcgtgcaatgttcaaagggcctaatgggaagccactctacagttaccaggttactgaatcagagtatcaatcgcttattaagttgttaaaaagctgcttcaagagaggcttgcctccaaactgttcggagtacctagccgcctgtttttgtctttttgtcagtgagcagtacaggcgtgattacaactgcatttggtcatgggccgggccagagtcgctacttggaacatcattgactgcgcaacaacatgccagcctgacgcatagtggattagcgtattggaagaggccggttcgagttcgtgaaagtggtcgggattggcttggttcgctgtttactgagggagggctgccttggccgctggtgcaaagtgagtcacatggttttggacgagctgtgcgtcgaggtattaagaacttctaccgtactgagagtaatcgaagaaccaccgctgaccttatggctgactttgaggaagaacttccgtcagcatttcgcaatttggagacgcgtaggctattggcaggtatcgtcgatcaacttatgtatctggtggagcagttccctcttaaggatcaggaggatccagccaactacctcgatatgcatgcatctggctggcgggatgcatttccggttccgcttgataaaagcaatgcacgcaccctgctcaatgattggctacgtgatgcggaccagaaacgtcaggaacgcaaagaggcactagagaagacgcgggcgttcacctgcgagcattttttacagggcacgctgcctcaatggtcaatacacagtgagatgcagctccccaacgaagagaccttcccaatagctcagtccatgctgagcagtactcgtttagagattgcttactacgaaggtgatcgactattggctcggggggctaccgtttatggacacctcacagataatggcatcaaagtgcgttttccctgcacgcaagttacggtggaacgctgcaagctcgacgagccgctgagccttcgcttattggatagtggacgtacggtacactgcttgttcttcgatggcagtgctcttgagcacctggatacgccacttgtcttcgagctccgatctgaacaatggaaactggttgcaatgtccagctgctgggtggcctctgcactggctcggcttcgtattcctcagggttttttcatcacatctgctggcgtcgctccagagactttggcgctagatacggaaaatggccattggctggaagctgtttctgacctttctttttccaatggcattgattgttaccagatcgagctgaatcaggcgcgcagtgatgactgcaaacccatgctctcaggtacttttgctctcaatgaaagctctccctcgatcacgtatctgggctggccaagccttgagttgcccgaaggctatgcttactcaaggaatgaactgcttgagttcgtcaacggcgaacggttggagcggcagcgtaataatcactctggtttggtcagctataccctacgtcatcaagcgggcaagacgttactgcagcgccgattcggggttctgcccaaggagttcagtttgtctctgatgcccgcacagggacaaacccccgctcgtctcttactcaaggatacatgccagcttgatctacatgtcatcagcgatgctttggtcgtagaaaagtccgaacatgctctgttaatccgccaccaaggcgatcatcccccttcctcatttatgctggaggtcagcaagggcatgccgccaattcggctgcatcttccttacccctatcagggagctcgccttttggacccaaatggtcatccgtcacgcatccatgagctgaaccaggacgaactgatcggttaccgaatcgtgctaacctccggatatccacagggacagatcttctacatggggatggagctgatctgtaatacgtatccacacccgaaatgcactttcagcatcccggttggtgcgacgcccgtcatgcttagcctattcagttatctgagcgatatgcagaacatgctcggtgcagttgatgagcaggatgcctatatcaggctgtctgtagaaaccgaacaaccgttgcttaaactcgatatcagacgttatggcgggcagatccagtgggaggggaagcatgccttctgtatccgcaactcctctaacgcagtaattctcgatggtgctcaggctgaggtgatgcttctgtccgatcccaaacgcatgccgttggtactagctgagaaaaccagcgaaacagttgggacgggtagcttcgagatatcagagaaaatgcaatctaacggcccatggcttatctatccgggtgcacaatcaagtgtgcgttttcgtccgggactatttattaacccggccaatagcctcggctcagagtttgaggcgaactcactacatcgtgcagccgagcttttccaccccctctactatccggatgtcattgagcagcagattgcagcaatggcaaccgactttaaccacagtggctggcagtatcttgctgacctgaagcagaattaccggcaccttccgttgtcgtcgttcgaaacctggaaggctctatcgcgcaatcaagcagcgttgagcttcgcagtattccggttggagatgaatgaatcgttttgcgtacgcatacacgacgagcttgccgttatctgggaggggattccgcttccactatgggtgcaagcctatcgactattcctcgatagcatgcatctgaccggtctacctgaagctttgatcaacaatctcatcttgaatcgagccagcgtgctgcgttgtgttgtttccggattcgaccatctggatgactatctgagtacaggtaatcgctgttcattgaagaaactacctgttggacagattttaccagtctggtatcaagggctacgtcacttgcatgaatccaatcggagctggccaactttgctcggtagtgagctttcacgctggatcgagcaacagcagatcccacttcaactaaagaatctttcactagtgtcgtttactgatgctgtggcctatctgccgatctttatggccttcgtaaccgcaggtagagcccaaatcaccgacctgcccgtgactcctacctatctgaagttcgctattcgcttggtttccgattttgaccgtcagggctggtttataccggtccacgccctgatggtgtcctatctgctggcctcaaatttagatgatgaggcataa

SEQ ID NO: 452911 - DNA, 6300 bp, Serratia marcescens
atgcggtttttcaggagcctaattgagcaaagtcttgagcgtacccgtgaggcaacgctaggggtcttgggtatcaatcactcaggcttgcgtcgtcacctaagtacaagcatggtgaacatattaggggaggagggctgcttccttgctccgcctgtatttgaacatacttttggttggcacgaagccgagctgcacttaggagacctgcaatccgagggactactgtcctcaagtttgcttgattcgcttgccaatgccccagcctatcaattccccaaaacggcacgtccctatgttcatcagttgcatgcttggcgcactctgctaaatgaggtgccacgatctgcagtcatcaccaccggcaccggttcgggcaaaaccgagtgcttcatggtaccaattctagaggatctggttcgcgagcatgaacataccaaagcggcgttagttggcgttcgggctctgttcctatatccactcaatgccctgatcaactcccagcaggagagactcgacgcttggactcgcaactacggcagcaacattcgtttctgtctgtacaacggcaagactgtagaacgagtaaatgacgttcgcaaggaacagctgctgagacccaatcagattctgtcgcgggagttgctgcgcaaggaaccagcaccgatccttatgaccaatgccaccatgctggagtacatgttggtgcgtcaggtcgacaacgatatcttggaaatttccaaaaagcagaaatcgttacgttggattgttctcgatgaagcacacacctatgtgggatctcaggccgccgaactctcattgttgctgcgtcgggtggttcaggccttcggtggtcagcccgagcaaattcgtttcatagccacttcggcaacaatcgctggtgctgatgcgaaggatcggctgaaacgctatttgtctgatttggccggtatcccacttgaccatgtcgaagttatcggaggctcacgagtttggcccgatcttggcgtagagtcgctaaaccacaatcttaccctgcaagctattcgtgctattgacccagaagcagaagtatcccctgcacgatataaagctttgtgcggcagtatcatcgccaggagcttgcgccactcggtggtcagttctgacaagcccttagacctgcatgacctgattggttcagtcacagagcagttgcaggggcgcagcccccttgaacagcagcaggagatgctcgattggctcgacaccatgactggcacgtatccgaatgaaggccagccaccgttcctcaagctacgcatccacttgttccagcgcatgctgcatggcctctgggcctgcgtcgatccgcagtgcagcgctaaatccagccacctgcaggactggcctttcggcaatgtatatgtgacccaacgggcgcgctgcgagtgcaacgcgccagtgtacgaaatgggtttctgtgatgactgtaagacgccgcacctattggcagaagatcgaaatggcgagctgcaccagcccagtccttacgccggtgatgagttcgcacttaatcacgaaaatggtaacgaggatccaccagccgatttcgtgacggcaaatgccaccagcacacgccctataatcgccggattgccagcgatgaataccgccagcacacgcctgatcattgccagattgccggtggcacatgagccctatttcacgttcactctcgatctggaaagccagaaactgggagctgtgagtgctactcgcaacatcgagattgtgcttaccgaggaaaaggatggctgctgtagccactgcggcaactcatcatttggcaccaatgacttcctgagaaaagcctatctcggtgctccattctacatcgccaatgccgtgccgaccgtcctagagttttgccctgatcctgacaaggctgactgtgaaggccgctctcccgaagaactgccagggagagggcgcaagctgattacctttaccgacagccgccagggtactgcgcgcatggcggtgcggatgcaacaggaagctgagcgctcgcggctacgcgggctagtattcgaaacactaaggaatgcgcaggccaaggctgatgcagctcccaaggacacccccagcggcaatccggcagagcttctggcccaggcagaaaacctggaaaaaataggtatggctggcatggcggcagaactgcgcaagcaagctgaagttttgcagaacggggctgagccagccaatcaggctgagagcattccttggccacagatggccgaaaccatcgcggaagctagggatatcgagaagttcatcttacgctacaaccgctatgccaatccggctctgttcgatggcagtgagggaggactgactatggcgcgcctgctgctggcgcgtgagttctccaggcgccccaagaaccagaacagcacggaaacgttgggactgattaaggtcggctaccaaggactagagaaggtgacgacgactccacctttgtggggcgatgcccgcgctattcccgctctgggcgctgcaaatgatcccagaagcgctctgacgttggacgactggcgtgacttcctcaaggttgcactcgacttctacgtccgggagaacactttcatcccgatggaaaacaagatgcgccgctggatggggagccgcttcagccctaaagcgttatactcgcccaagagcgatgtgcaggaaagtagcaccatcaggaggtggccgcagatcaagccaggcacgccccaccgtctggtcaagctacttgagctggcaaccgggctgaatcgcgccatgaatgcggatgccgagaagatcaatggttggcttgaagcggcttgggtggcattggtcaatgcggggattatggagtcttccgatactggccaccgtttacgcctggaaaccctcaccttctcgctacctgcagagggttggctctgccccttgacccggcgcatattcgataccaccttccgtgctctgactccctatttgccccacaaactgctgagccaggactaccgctgccagaaagtccagcttcccgccctgagcagcctgatgttggatggctcgccggttcccaagcaggtgcagatccgtcagcttgtcgcgagagatcctgtcattgccaagctgcgccaggagagcctgtggacggatatcagtgaccgtgcggtcgagggggggttctactaccgaactgcagaacattcggcacagcagtcggcaaaacggctggatgactatgttgaagagttcaagtgcggcgatatcaacgtgctgaattgctctaccaccatggaaatgggggtggatatcggcggcatctcagccgtggtcatgaacaatcttccgccacatccggccaactatctgcagcgcgccggtcgagcggggcgacgcagcgaggctcgggccatcgcctatacgttgtgtaaggccgatccgcataaccagcgtgccttcgccaatcccaaatggccgttcgtgactgcaattccggcaccaagcattactctcagttctaaacggatcgtgcagcggcacgtcaactcgctgttactggctttattccttcgcatgcacagcagcaatgatggcgatcgtaccaagctgaccctgcagtggttcttcacctcggacgattcgccttgtcagcacttcatggcttggatcatggcctgtgcagatgaatatcaaagtgccgtgaagcagttggtgaagggtacctgtctgcaaggccgatcgttaagttcaatcaccaacgaaagcaggcttgcattccacgatctacaggctcgctggctgggcgaataccgcaatatcaaccaaaaactgcatactgccagtgatgggccatataagaaggctttggaattggaaaagacccgccatgaaaacgagtatttgctccgctcgcttgcgtcttcagcaattctgcctggctatggttttccgaccgatgtggtaaacctcaaaacctataacgttgaggacttcgtgtatgagaagcacaaaagtagcatcagtcgtgaagatagcatctttgacaacaaggaaatgccatcgcgtagcttggatatagctattcgtgaatatgcgccgggagctcaagtcgtcattgatgggcgagtctatcgttctgccggtgtcagcttacagtggcacgcaaatggtcaggtaaatgaggctcagaaatttgacattgcgtggttctgccctgagtgtggaaatacaggggtgaccgcaaatgcctatgcaaataacgagggactgcgctgctcgcattgtactacttccattcccattaacgaacgccgcattgtacttcgccctggtggctttttgactgatttttacgagcccactaccaacgatgtaacgtcacaaaaattcatccgtgtcgagcggccacgcatccagcttattggcgaaaacattgcactaccagaccaacgttgcggttttgtgcgttttggccatgagggcagtgtgttccatcattcttcaggcgagcacgaagcgggttatgccgtttgtatggcttgtggccgggcagaatcaatgcttgcaatagatcaaatccccaaagagttgcaacctgacaagagccaccgcccagtcggtgggctagcgggtagccgcaaggatcgcgattgttccggtgaaaccgttaaggccaatttgcatctgggctatcagatccgcactgatgtgctagaaatattcctcagaaacccgcttacaggagaatggttgcccgatacgcccgaggggcgtttgattgctaccacgctaggcgtggcaatgcgggacgagatcgccgaccagctcggtatcgcgagcagcgagatgggttttagctatcgtctggatcgtgatcgtgacacacggaaaggacgctctgtcatccagttgtttgatgaagtcagtggaggggctggctttgtacttgctggtttgcaggatatctcgcagctattgactaaagcgctggatcgtctgcactgtaaggccaactgtgagaatgtctgctcccattgcctggccagccaggacagccgtgtcgaacgcgaggagttggaccgaaaactggcactaaggtggctgaatgagtctcgattggttgagcacctcgacctgccggctacgttttctgctctgcaaggagctcgttattgctccgttgggcctctgcgcgagctgagctccgccattaacactttggatcgccgtgacctgactgcatcgattatgctctgcctgcacggcgatactgtagattgggacctcgaccatcctcgcttccgtgagcgagtgttgacctgggccattactgagggactaaaagtccgccttggcatctcagtctcgagccagctgagatcagagcaaaaggaaacattgagactgcttgctagcctgggagttgacctaatcgagttgcaacatgaaacaacacgtgctcctcacgtaattgctcaattggtttctcaagctggggttaggagcctgtacagcagcataaacactgttggagttccaggctctgattggctgcaaggcgactctgatgtggtctgggctacgagcaaactgatgccagctctcgttggtaataccatcgactacagcgaatggaaccaacattcacaaggggctcgcattgtcgaagtcacgactcagcttgatggcactgttaaagcactcaaaaagcgccttctcatgcttattaataagcaaatgcccgagctggcagccttgatctccaatgataagcccgtaggcatcgattattctgatcgttacctgaagtcaccctggtcgctaatgttgctcagtggatttttggcacttttccgaagtgagcaattgcaatcgctaacagtgcaaaccttggctcccagtggtagccaaccaagctatttgttcaaccatgactggatgcgcgtggatgatcagcaggccattctcgaactctggctcaagcgtcagttcgatattcaacctagcatcaacgtcatgaaccgaccacgcgatctattgcattgtcgtgtcatcactgtgagctgggcatcaggtaaaacgagcaagatattgttagatcagggtatggggtattggcgtgtccgtgtgccaagcagggatcaaatgaacttcgatttcagtgccccgcatcataaccaggatatgcaaatgattgaaaaatatacatatgtagagatgcagcagagtggcgactggcctacttacatcagttgcatcatagattga

SEQ ID NO: 452912 - DNA, 549 bp, Serratia marcescens
atgagccgtgaatctcgttattattatgaacccgccgccggcttgcgcaatctggcgccctacagctttttcaactgcttcaactatcgcccgcccatcatcggtttcgccagcaccggctggaaagacagcgtggcgaatatcgtggaaaccggcgagttcgtttggaatctggcgacgcgcccgctggcggaagcgatgaacaacagcgccatcaacctgccgcgcggcgaggatgaattcgccttcgccggcgtcacgccgctgcccgggcgcagggtcaaagccgagcgcgtggccgaaagcccggtgaacttcgaatgccgcctgacccagtgcattcagctgcaaaccgccgccggtgaacaggtggaaacctggctggtattgggcgaggtggtggcggtgcacctcgatccggcgctgctggacgaacacggcgtctaccagaccgccgccgccgaacctatcctgcgtgccggcggcccgaccgcctactatggcatttccgaacagcaccgtttcgatctggcacgcccaacgcgctga

SEQ ID NO: 452913 - DNA, 1179 bp, Serratia marcescens
atgggagaagtttgcttaattcctgaaggaatagattgttgcctcggccaacgtcaggtgttattaagggccaataatgaaattgatccttattatttattttgggccttgcagtctccttatgtgcaacatcaaatttcctggaatgagggaacaggtacgacagtaagtaatgtgcgaattcctgtactcaaggatttgaaaatccctcgcctggggggacatgagtcttggattgcaaaaaccatgacttctctggcattgaaatctcagataaatgaaaaaatcaatcaaaccctcgaacaaatggcgcaagctcttttcaaaagctggtttgtcgattttgaaccggtaaaagccaaaatggcagtgctggaagcgggcggttcgcaggaagaggcgacgcttgctgccatgacggcgatttccgggaaaggtgctgattcgctggcggtttttgagcgtgagcatcctgagcaatatgccgagttaaaagccacggcagaactgtttccgtctgctatgcaagagagtgagttaggggagattcctgagggttggtacgttagtgatttatcagaagtagcctcattgaatgcagattcatggtcgaagaaaaatgctcctgaatctgtcagttacgttgatttggcaaataccaaatggggggttattaactctatagaaacgtatcaattttcagatgcaccaagtagagcaagaagaatattaaagccgcacgatacaatcgttggcacagtccggccgggaaatgggtcctattcctacataaataaaacaggattaaccggaagcactgggtttgctgtactaactcctaaggctcgggtttttagtgagtatatttatctctgtgtcacctcaaatgaaagtattgagcgtttggctcatttagccgatggtggtgcttaccctgcagtgaatgcagatgttgtactttcaacacaatgtgtattacctgttgaacgagatacacgagaggctgtacttaaggtctttagttcaagaactgacatgtttttctcatacagagctaatggcttgagtcaaaatgaaatactctcgaacatacgcgacacccttctccctaaactcctctccggcgaaatcaccctgccggaagccgagcgggcggtaagcgaggcggaaaatgtataa

SEQ ID NO: 452914 - DNA, 774 bp, Serratia marcescens
ttgctttgtggctattttgagggattcttaagggagatgtgtaaagagtttgtcgatattatcaatgattctggtgtgtcggcaaagcttttacctttatcaatgctatcagaccattctgaaagttgtttgattaagctaaataatagaagtgagaccaagttttcgcaatttgtaaatagtttggtttctgaccttccactatcgatgaatagtaaaaaattatcatcaacaaatgcaaatcccactgttgatactatcgaaaaaatatttgaagtgtttgggattgaggctgtgcttgatatcataaccattgaagattaccactttgatggtatgtataacaatgagtcccaattaacacatgctatacgtagaaccattagtgccgctgcaaacggtgatttggctaaagaaatggccattatctctgagttagaaagaaaatggaccccgaaactgaaaaggcgccggattggatatattcaagttatcgatgatcttttaaagaaaagaaaccgaattgctcatggtgaaggattagaaattattacgcctgatgagttagaagaaacccaggaagctgtccttcgattatgccttaagctaaattccaagcttgaagataaactagtgaacttaatcccaagttatacaatgcacactgcagagcaggcagagcaggcagagcaggcagagcaggcagagcaggcagagcaggcagagcaggcagagcaggcagagcaggcagagcaggcagagcagggatcctga

SEQ ID NO: 452915 - DNA, 1164 bp, Serratia marcescens
atgacacaggaacagcagatccaaggtaatcttgagtttgatgataatgtaacggtagatgataatgagttagggagcacgccgtatgagcatatcagagaaaggaaggttgttattcagccatatgattatgcggtaagaacacttatggacatgatcattgatggtgatttagtactagatcctaattatcagagaaaatatcagtgggatgatgttaaagcctctaaatttatagagtcaattatcttgaatattcctgtgcctgttgtttatttggctgaggaaaaaaatggtacatttagtgtgattgatggccagcatagattgacatcgttatttagattcattaaagcaaatgagctaagagcggtctttgacgatactgctattgaacctctcactatctcagggcttaagattatgccagagctcaatgggcagtcgcatgctgagcttgaccgttcttataagtctataattgccaagcgtccgattagatgtattgtggtgctcaatgagtcagatgaggctctaaaatttgaagtttttgaaagattaaataccgggagcgcttctctaaccgaccaagaggtcagaaactgtgtttatcgtggtaattataatgagttgataaaacacctctcggactatgctccattcaaagagttactttctctaccagagcatgctgatcgtgcaatgaaaggaactgagttggttctgagattccttgcatatcgggaacttactgctacgaccgactactctgataattactctgagtatcttaatttacatatggaagataatagagatatatcatcaggtcgcattgagaatattagtaaaactttctatgaaactgtggatttaatctacagtaccttggggccggggatagccttcagaaaacctaaggatagagttcatccagaacaatcaggctttgcacataatgtgattaatggtgcgatttatgagtctcagatggtctcattctctcgcgtgatagatagtggagaaaaaatagaaaatattaggaataaatcgctgggagtgttctccattgatgagtattggagcagcttattccaaggaacatcgcaaaagaacaaggcacttaggaggagtacgattttgacacaagctcttttggggtga

SEQ ID NO: 452916 - DNA, 1482 bp, Serratia marcescens
atgaacttactcagagaacaaaaaaccataaactctgcattatgggcggccgctgatgacacccagctaagattagccgtatcaagagctattcgggataatggcgaatttgatattgagtcattcgcaaaaattgagcttcctgtatggttatcatatgcacttggagctgggcgagcgacaaaatgggcagccagcaatctaatgcgaaaagatactacttggttttcaaatttttataaaactaatggaaccgaatatattaatgctggcggtaatggtacagccatgagaatacaacctcatgtttggagctgtaaagatttatctcaaagaagttacattgcttcagttatcaaagattcccttgtaacgcatggtaatttattagctgtttgtggagcgatcctgcatgctgacactctacaatttgcattattaaatgaacggccagcggatatttctgacctacaaaatataattgaagacttttcatcaatccctgagagaataaatagtatctatgaattgaagaatttctggctgccgaattgggaaagtattagccaaaaaaaattatctgatgaaattgaaagtattaggattgaaacaaaagattatctgtctaaagtaattaatgctaccaataaaattaacgatccttcagaaaagtataaggttgcaatagatgttttggattgcaacaaagaatcaagaaggggtactgcaactaacacagctatcgcaagtgccgttttatgtcatctcttcagagagtcatcgccatatgatgcaatggtaacttgtgttaatgaattaggcactgatacagattctattgcaagtatggctggagcaattattggttgctataatgaaatacccaaatgggatattcaggatagtgaatatatcataaatgaatcaattcgccttaataatatttctaaaggcgtgcctgttaataattttagctaccccaaaattaataaatggcttgctccccaaactcagagtgatagtttggtaaaaagtgattctggtaactattatgtattaggacttgggtatgctaatcctttaaaaaatgaaagctggcaaacaaaaacacaccgttggcagtggctaaaactaagttttggtcaaacgattttaataaaatgcaagattggcgacttggaaactattaagataccagagcttcgcaacagtgaaccaatgcctaaaaatgaaaatatcactgctaccaagttagctaaaccaattgaacgtgaagtacaaggtagcttcgattatgaaattaaaaaaagcaatgagttagatctcgatgaagttacaactctactaattagagaaggcttcgatgaaaaaagaatagggcactttctcatagagcttgctgataaaaaaggtcttgaggcatgtattgcttatgcagcaattatcggcaaggccttcatcaccaggaagaaaaaacagtaa

SEQ ID NO: 452917 - DNA, 240 bp, Serratia marcescens
gtgggcagccattggggacacggctccggcgatatcgcgctggcgttttccacccggttgctgggggccacgctgccggacgaaaggctggagccgctgtttgcggcggcggcggacgccaccgaatacgcggtgctggatgcgttgctgagcgccgaaggcgtcagcggcttccagcagcatgcgcgcgcagcgctgggcccgctgctcgaccggctggcggcgggcggcacagcctga

SEQ ID NO: 452918 - DNA, 576 bp, Serratia marcescens
gtggtcaccaccttcccggcggatgtggtgcaggatctgcaagactttatcctgtggcagccggatgcgacggagattggtgtagaggccatctatgtgatggtgagcaagccctatggtgaaaccaacgccaggggcaaatatggggggcgtgaatacaacaccaataaagctgaaggccccatccagaatctggattggaaaggggccagcatcgaccgtgccggcgtggataaggtgaagctgcatactgggcgttttgagcagactccggaaaaccaagtgatgattgaccgtttggataaaactttgaaaggggagctacaacctactgacactgataggcgattttatactcatgaaatcagagagttggaaaggtacaggaatcttggcataaaagatggtgaggttccgcacagtgttcaagaacagaaggccgtatggaataatacacatactgctacgcttgaagactatagaataaatgaaaaagaacaggcactttacacagatggggccctacaagccgcatatgaacaggcgctgaaagatgctatgggagggaagaaataa

SEQ ID NO: 452919 - DNA, 774 bp, Serratia marcescens
atgaacgcaaccagtggaaacaaagatggaattagatttatcacggctaattatgcgttacgtgatatcttatttgagtttaatagacaactagagcatttttactcaactacacatatgagtcatcgtccgcgggcttatcgagcaataataaattttatcccattagttatttatctctgcacgaatgttgaatgcattggctacgtaccccccactattttattcaatgattcggttaaacgtgttaaattcataacagaatgccaaatcgactttatactcacgcacgaaattgcccatcacatactcgaacatccgcaaaaatcagtcataattagtgatattgagtcaaagaagaaaaagaagattggattcgaagtcgaagcggatgcacttgcaaactatcttttggctgtgaataacattgaaggcgtggaatcagttttatatgatgaagactcgtatgttaattataatgagatggttgaaagtgttgaggtattgtttgaacatatgcatttctgtgagcaaatgtcagatataattcgagatgactttggctcttatgtcagaattgcaacattgaaggatggcgttcacccgccagcaatggagcggttaaaaatattcttgtctcctataaataaaagcacatggaagcaaagtgaactatccatttatgcgcgagatttttatgcagagatcatatcttactacaaaggaatgagcatctctgataaaacggaaatgttaaaagtgttttttagttga

SEQ ID NO: 452920 - DNA, 645 bp, Serratia marcescens
atgaaaaaattattagcaaaaattatacctttggcaatcctctcttatgcttcacacgtttatgcacaagacacacagaacccgacggcttcagaatgcagatcactaaaagataacatccagcgcttgcaatgctatgacttgatgtctaaaaacgatgcatccaaagaaaaagaacccgaaggcctacagtcaggacttccggatggagatgttgggggatggaagattgagaagatgcagtcccaaatcgatgattcgtggaatgtttttgtaagtcttgcatcaaccaatacgatcagaacgccgtatggcgaatatttaaacccgtctctttatgctgtttgtagagaagctaaaacagagcttttcgtaagttggggagtattcttaggcacagaccaagcaaggatgattcagcggattgatgcggataaggccactcaaaaaatgtatacaatttcgacagataataaatctgtattttaccgcggaaatgcaattcccacgattaagaagctaatgaatagcaagaaactctatctccaaattgtaccgtatagtgaaaatgccattgatgccactttcgatctttctggcttgtcagaggctataaaacccctcagacatgcgtgcaaatggtga

SEQ ID NO: 452921 - DNA, 198 bp, Serratia marcescens
atgaaagaccgcagtcacgatgaggcgatggccgagcacttccgcgccgatcctgcctatgcagcggagctgcttgccgaagtgcgccgcaatggtgatccagccgagctggccatgttgttgcggctgatggccacggcctcggcagatgacgctaggtcggatgacgccgatacagggcgcactctacctcgctga

SEQ ID NO: 452922 - DNA, 1755 bp, Serratia marcescens
atgataaaaagaatagataaaatcgccataacgaatgttaaggggatcgaaagctctgtttttgatgttcagcttattccaaacaaaccgacactcgttgtagctcctaacggtttcggaaaaagctctattgctgctgcttttggttgcctgcgttcgaaaaagatggatttggataaggacgaatgccacaagggtgatgaaggtcgccatccatctcttaaaattagttataccatgcagggcggagacaagattgaaaaagaagcgaatcatacaaaaaatgaactagcagcgacatttggcgttcatgtaattaatagccagttagtttcgaaagcaaagaaactcaaaattgcgggcgctaacattgtcacttcagcaattgaagtcactccgatcgtactgatcaaaaatattcctccgaaagaaaaatttagctactccttcgcagcagtaaaagtgggcttcggaaaaaacggaaaggtattgccaaacatttcaaatcttcttgccgataatcggataatggctaaaatttggaatcaggtcgattttaccaagcaggatcaggccggtgttaagaaggcaataaaagctctacaagatgagatcaacgccgggacaggaaatacggataaaatccttgccgatgttaaggatgaaacaacacaagcggtgttagccattgactttgttagcggcactttggcagccttggcggaatccggattaaacgatttctcgcaaatcgaggctatcctcgtagccttgcagattggtgatattcacgccaacgataaggccgcctttaaaaaagcagcggagcgcgctaactatgcgttcgaaaaagcagcctatattgaggatttttctgcgcttaaaggcacttggcgtaatattcagccaaaggaaacagcggatggacttgtgattgcctttccgaaggcaaatcagatttccaacggagagcgagatatcatttgctttgtagctcagttgaaaaaagccaagctccaactcaagaaaaaaaaggccattattttagtcattgatgagatatttgactatctggatgacgccaatctggttgcctgccagtattatctgacgcaaatgattgcggaacttaaatctgaaggtcgccaaatttttccattgattatgactcacttaaatcctgggttcttcaggaattttacttttagcgatcaaaaagtttgttatctaaacaaaattgcggtctcgaacaaagcggtcgaaaacataatctctaagcgagatgaccctgccatatcggatgcaatttctaagcacttcctgcacttccactctgaagacgtagacctatctaacgagtttcaggcccttggactccctgctgatttggccaaggcgtctcagttttcagtacattgtgccagccaaatgcagcgatatgttgaaggtaagggctttgatccccttgcagtttgcagtggcgtacgccgaaaggtagagcaattgacatttgattcgttagcggaagagtcccgagaagagtttctgtcggtacacaaaaccgtcaacaaattacaattcgcagaggctgcgggaactacagttcctgaagtctattatttgttggcggtgatttataatgatgcgatgcatatcaggcccaatcaagataatttctccggattgggaacaaaactggctaacctgaccatcaagcacatgatttccacactaattcagcctgatgccctttaa

SEQ ID NO: 452923 - DNA, 129 bp, Serratia marcescens; identical to SEQ ID NO: 252209

SEQ ID NO: 452924 - DNA, 663 bp, Serratia marcescens
  misc_feature (557)..(566): n is a, c, g, or t
atgatgcctgtggtgctgttggcaattctcaaagcgggctacacctatattcccttatcagattttttgcctaacgagagagtattaaaaattctcgatgacgctgcagcctttttgttgctgaccacggtttccatcatgcgtaaaacggggataggaaaaaatttcccttctacgctggcgttagaggatatcgcctatgcagatatgccggctacgataagcctgcccgtggtacagaaaacggatatcgcttatgtgctgtatacctcaggctctaccgggttaccaaaaggggttgtcattgagcacgggaatttgagttattacctggattggttcaaccaagcactttggcctgaaactcaggcagtattaccgctgacttcaaccttgagttttgctgctgcggttacgcaactttatgcccctttgctgcgtggcgatacgttgcatattttacctgccaatattttgcatgagcctgaaaaattgctgacttggtacgaacaacatccttcaggagcgctttattgtgtgccgacggtatgggatgnnnnnnnnnntgggatgcgttgctgcgctacgatcgtcaagcaggcggcgcgtcgcgtttaccaacaaccgtatttctttccggtgagccggttccctttgatctaa

SEQ ID NO: 452925 - DNA, 270 bp, Serratia marcescens; identical to SEQ ID NO: 437881

SEQ ID NO: 452926 - DNA, 228 bp, Serratia marcescens
atgaagacgctgtcgcgccactcggagctggcaaaggcgttcacgtatgtcctgaaccagtggccggcactgacgtactatgcagacgatggctgggctgaagccgataacaacatcgctgaaaatgctctgcggatggtcagcctgggtcgaaaaaacttcctgttcttcggttctgaccacagtggtgagcggggagcactgctgtatagcctgatcggcacgtga

SEQ ID NO: 452927 - DNA, 657 bp, Serratia marcescens
atgagagcagtcatttttcaagggcaatatggtatttttgaaaaggaggggttggatctatcaatgcccgcagtacaaacttgtttaggcctctatgctgagtcgaaaagatatgtggtttgtgcacatttcgatacatcactcaatctgcagggaaatttgctagctataaaaaaatccctcgaggataaaggcctggaaatgagtgacatgacttggcatgtttttggtggtgatggagtgttgagttatttacgatgtggcaaaccgagtagctttattggaaaaatgattgttgaatttataaagagtcaaggtggagatgctatttattcaaatgaacactatagtggacttatagaaaagaccttcaactttaattatataaatgggagtgggagcgaaataaccgaaggtcaacatatggatgatttcaaaggctatcatcctgaggcgtatagtatttctcgtaataggataaggatacgacccgaggagtatacagagaaacattctgtcatgatggacgtaagtcgattttatccatccactcgttctatagttagagatgaggataaaatggatgaggatagttggcaaacaagtagtgttgtaaaaaaaagaaacacatcggtaaaacagtctataatacgttaa

SEQ ID NO: 452928 - DNA, 897 bp, Serratia marcescens
atgcaggcgttgaatcgcaaaaaaaaacttaacatggaaaaaaacaaacctaatattaaagatgataattacgagggttttttgcataaatcttggaaattgtacgataagatatttaacgagttatatgacaaccacgcggatcaattcgctgacgtgtcatttaaattgattgaacaatatggtagcttgagtgaaattcatggcgttattgatagacttacagatgtgatagataaattgaaggtacaaagaagacggtgcaatgagcttcctaagcttgccgctaagaacgactgtcgaattatagataaaagtattgctgaaacaactaagcgactaagtgaagcaaaagcaatacgaaatgaaatagagtatcatcatcaaatgggtaccatagaatttgctaaaagtttaggaacggaattgccgggaaaagtcagggggtatattgcagaatatgaagcgaatctccgtgagtactttaccccaccaaacatgattaaaacgagagagcaagggattgaaagattgcaggagtacagagagacatttataacggcaatagaaaactgtgagcatattctccttatgacagaggtgcgtgatacaatgaagtttactaatgaagtattaaaaaatgaaagtaaaaaacacgatgagcaacttaatgaaatcaatcgtggcatgcaaaatattaaaataaaacaggatgcggtaaatgttcttttgatcaatgacaatggcgagaataaagatgttaacatcgaggaggaagatattattttcccatcagtaccgcaacatgcactagagccaagcagcagtgttgctttagaagaaacacctcgccataagtctaagttgaggaggaaaacagctgctttagataattga

SEQ ID NO: 452929 - DNA, 918 bp, Serratia marcescens
atgaacgtagaccaagacgatattgacgaaatttataataacctgatcagcatatatacgggcggtgaggcggcgattgtttctttgtttcggtcgaagtcccccacgctgagggaaaacatgactcaggcaatgacggagtatgacgatgagttcacgcctgaagagcaaggcttcatttttcgcgccctggagcagcgtattattgctgcatcgcaaaacattcctctgacgctggataacgaacagaagaaacaggtgcaacgcttttactccaccaattcaggcgctagctttatcaatacccatgcgagaaatgctcgcctggatcaaaagcaagccatttccctcaagcatactaatatacgtagtgcgttaaacgcggcggcaagtgaacccgtatcggctggtcgggtggctttttcaaatgctaaccggcaaaccatcgaacatgcgtttatgttgagtgatgtagaaaaggtcatgcaggccgcgttgagcggggaagaaccgtattatcgtgcctcccagtatcgtgggacgcgcgtgcccaagacgcggctcgatgcctttaaggtgggtgatattatggtgaatacattctttacttccttttctccagacattctggaatatactaaaacaggagaaagaaaggtccatgacggactgaagcaggctatgaagtttactgggggggcttataaaagccatgagggggtaccggttatctatgagatacctgagcgttcagggtataaaacaataaggatagacacactatacgaacatgaaacggtgatcccgccaggtgaaaaattagagattgacgaaattgtggataaaggaacatatacacacatacgcttgaaaaaagtagaagctaaaaaatcaaaaatgcgatacatgtattattag

SEQ ID NO: 452930 - DNA, 1725 bp, Serratia marcescens
gtgaacgaaaaaacacacattgatatcaaccgtttgaaggagtcctttaaggagggggcaaccccaaatgaacaggattatggcaacctcatcgacttggcttcggtggggagcaaggccctgggggctgcggctacggatgccacgactcctgttcccgggagtggactggaagcgccgggtggcaagctcgccgtcaaggcgggcagaggggttctcgctgacggtaacggagtggcggtaaaggtcgatgataagacgctttccgtgacaaaggacaatgcgttggcactcaagttgaaaccggagggggggttagaggccgctgacgcgataggtttgcacatcaaggctggcatcggcctgaaagccgatgcgaaagggttatcagttatcctggactccaagggggggctcaaaacagacaacaacatgctcgcggtggctgtggacggcgcgacgtcgggtctgacgtttgatattaagggagcactaaaggtccatctggcggcatcaggggagaattacctcaccacagacgccaaagggctggccattaccaaaaccggcattgaaaaaatcaaggccatgctggaagcggagtcgacggcggcgctccaaaaggctgttgagcatactgaccatggcgagcatccagacacagcgtcggggggggcggtcgaaaccgccatcgccggcgcattaaataccgcttacacaaaggggtatgaaaaaaaacacacgcaaaaccagctcaccgtaaaggctgttgagcatcatgtgctggacgtgggggcgaccaatgcgaccgtgcccctccggtcacacctcacggccgacagcacgctggccagcccgcatttttatttcatgccggtgcaaggggatgagacccactggcgtcagtttgtcggcccgcagggggtgtctgccagtggggacctgcacctgtctgccgcgacagtgggtcaaggcaaggtcaaggtactggcgctggcgctggcgaatgccgcctcggggccggggttaaatatcgccgcggcggaagtcacggtcgaggtcaccgtgcggccggtggtcaaaggcgtcagtatttcaccgggcggctaccggtcagtgtatgagcccctgacgctcgcctgcagcaccgtcccgacagcgggcgttgtatgcacttatcgatgggaaactcgaaaaaccggctctgaggacgcatggcagtcagtcgcaggtgcgaccgcgcagacgtggacgccaggagcggcttatatcggccacgaggttcggggatttgtggtgccggcgatggagcacattaccggtatcgaggttcacagccgcaaccctgtcactctctatgatagaccgctcgacatcgaccatattgacgtgaatggctatacgtttaagcatgatgaagggttccccactacggccttcaaggcggcaaggtttaccttggtcctgccggcaggcatgcaggcatctgactatagctggacaaccgatgcggacaatgccattaaggtgactggagagacggaggggggcgtggtgacctttgtcagcaagcctgcccgagcgcaggtgaccatcagcggtaggcgtattggtcatgcgcctgtcgagtaccgtttcaccctgaagcactggtttaccaatattggcaatcaagccatgacctggtccgaggccaacgaggcctgtaaacactgcgattcataa

SEQ ID NO: 452931 - DNA, 1149 bp, Serratia marcescens
atggccgacagtaaaaaagtcaatttagacgagttgaaaaaacaatttgggcccctgcaggtgccgagcgaaacccacttttcccagttgatcgacgtggcggccctgtcgtttcaggccggacccggcctggccggcggcgtgcccgctgtgggtgaggaggggctggatgtcggcggggtgaccccgctgtacgtcaaagccctggggggcatgcaggcgaccgcggacggggttgcgctgcatgttgccgcgaccggcgggctggcattggacagcgataaccgtctgaccgccccggtggccccgaaaggcgggctgcacaatgacggcggtttagctgtcaaggcaatgccccccctgacggtgggtcgcgaggtctcggtggccattgatccccatcaggggatggcctgttctgcggcgggattggccttgcaggtcgatgccacgacgctggagacggacgccgacgggctgcgggtgaaatgccaactggccggggggatgacgataaaggatacgggtgagctcgcgctcgatctcgacatcattttggggcgtgcctgcatccgcgtgcatcatgggcgtgcattcatttgcttgcccaaatcgcaggttacggccatcgacaagaccatgattttcattaatagcatatataccggtgagataaggaaaggcggtgagagatactacgtgaaggaagcctggtacgtggcggtgacggactattgggtcgtggagacctccgagtgggtgaaggcgggggacgttattcaggtccgagggcctgaagaacagtatattcacctcgaacatactgtcacggccagggaaagcgccccggttaaccgcttgccgcagataacggacctgaagataacggtccaggggggcggggcggcccgtgttggaagcaccctagaggcggcttacacctttgatgcccatggcgcggcaagtagtgaggttttattctcatgggagtggtatgacccttcaaggatggtatgggtacgcgtcagcagtaataagacgtttctcgttcctcccggttatcagagatggtcaatgcgtgtgctattgactccggccaataattgcggaccgagttcctccagcgcgccgataactatagcagaatga

SEQ ID NO: 452932 - DNA, 1827 bp, Serratia marcescens
atgacaaaaatcatcatggggcggttacggttacggttgcacacggaggagcggctggcggagcggttgcaaaaccgctgcagcatctggtttcgggcgcacctggagcgtgcgttggcggacgtgttcatggattacgccaatacggggaaggcgccgcgggtgatagaccggttgaccgtcaacgtgggcgacattccactgtcccgctttgaggcggagatgcttgagcgcgttctcacgcagttgaaagagcagttgaccctgcggtcgctgacgcgcctggtgcctggtcggcaggcaccggagcgcgccacctcggcagagccggggcaggccgccgaaccggcctcggtggcctcaacggcccctgcctccgagacagaggcggtatcggcgtcaccaccggcacgcctgtttgcgcatctgctgcgttatctggataccggcgtggcggttgacggccatctctggcgttcgcgacaggcacgagatgcctggttgcaccaggcgcttgacgcggcgttgcctgctgcgggccccggaggcggcccgcggcctctcccgccgcgtatcgcactggctttgagggtgctgcagccccgggcccgacagcggctcgtgacaacctggtcggggcaggcgataagcgcactggcctcctggttgaccccctcgctccggttgccgtctctggccccgtccgaggcgccaggaatggtgccgctggcggccctgctcgcgctgcaacgccaccctgtttccgtcccggatctggcggccatcatggaccgtgtttccctgagccacccccttcccgccgtgctgcgtgacggcgttcccgcaccaggcgtagcgaaggaagatagtgatggcgaaccatcggtgaacgattggaaaaggagcgggactttcccggttaaatctgtcgtcgaacagtggttcggtgctctacagcagacggcattgccggcatcgttgcgcggccccttgcatgcctggttgtccgagccaaacttggtgcgggagatggtggcgatcttggcagacgtgtcggtgtctgtgcatcggcaactccgtgcggcgctcggtttgtcattgcccgcgcaacacaagacgggggcgcctgtcacgccgggggctaatgaccagcaccgtccggttaccgatggcgaggggggcgatgcacaggatcaccggtcaccggcagccgggatgcctgagcgaccccgttctgttgccgaagccggaactcccgatcggccccgggcggtgaccgacgctggggaggccattgttcggggcgcgcggtcattcgccgacgaggacgatgttccccgtttcctgacaaatgcgggactggtgttgctctggcctttgttgccacggctgttcagtactttcggctggctggaggaagggctgtttatcgatgaacaggcccgcgggcacgcgataggctgcctggactggctggcctggggcgatccggatctggcggaatggcgtacgccctgtacagcattactgtgtgggctggacatggatacgccgcatgaagcctgtctgccgtccctctcacgccaggccgagcttgatgcttggctgggcggggcactggcaacggtgcccctgctggcgcgctgcagtgtgagcgatttgcgcacttttttcctgcaacgcacgggcacatatgataacgcttcccggcggctggtgattgagccggaagcccccgatgtgttgttacatcaattgccgtggccgctgacccccgtggtgctgccgtggttgccagctcctctttgtgtggattggacctcatga

SEQ ID NO: 452933 - DNA, 3621 bp, Serratia marcescens
atgaccgatgaaacaaaaaaggcagcaggggcgacgacaagcagaatggcagccttcgtgctggatgatcgttcgattgggacgcagctggatgccttccggcagtacagtcagcgtttgccgtacgcagagtgtaaggtagccggctggccagaatccaccaattgggcgcaggtggtgctggggtttgaggcgggtgcatgggcggcggcgtccacgggcagtgctgtctggcatgaggctgccgcgcttgcctgggcatttgagcgcgaccgattggtcaaattgtacgagacgccggaacaagccgacgggcagttgccgccggagcgtgcgtttctgctgagcctgctgggcatgctggaaacaccgcgggccttgttgaaccagcttccggcacagcaccgttcgctgtactaccggcagatgctggcactggaggcgcaggcgccccaggcagatggggtcacggtgcactttacgctggttgacggtgtgcgtgagcaggtgttgccggcagggttgttgctggacgccgggcaggatggggcgggcaatgccttgcggtatgcgttgacgcaaccgctaacggccaatgccgcccgcgtgacagatcttcgctgggtggtcaatgacccctatatgccgggtggccgacgggcgcgcattgtgctggatgaggcggcgggacaaacctggccggtgacgggggtacggatgtttggtcgcgcgccggtcaataccggcgagccgccccgggccgatgccgatcgtgttgtcgacagtgggcggattatcgagtcaccggtgctggacgtggccggcggggaacgcacctggacagtgacactggcgagtgccctgagcggcggcctgacagccgccgtgagcatgggggaagcctgggtcacgctgacttgcacgcagaacatcaagccaaacacgacgtggacgataacgctgcctgcgaacggcggcgcgccgtctgcggtgtctaccctggacggcctgacgtcaaccgcccctttgctgcggttgaccagcccggtgggcgcgccggtgccgcccatccaaaaacttgaggtcaaggtcacgggggccgttggggtgcactgtgcccgcgatgacgggacgtcgctgtcagaaggcggattgccctttggcgacacggcggaggccggcgaggggttcagtctgatgtcgccggaatggtggcgactggggaaaaaactgaggtcggtgaccgtcactccggtttgggtcggattgccgccgaagccgttttctgcgtggtatggacctgacgagcatcaaaaggccaaggactggttgtgggtggataaggatctcaatatcaccacagatacaaatcacggaaaaccactcaacaaactcacagagttttccgcagatacccgggcgcaccgtgtcagcaacgcgggcgagattgccgcacttattcccatggacctgggttacccgggcgccccgaaaaccaatgcggatttcaaggtggccgcctcactgatgcagcaagggcgaccgctaacggcgttgggcgcattgccgttgtttgccaatgataacgcgcagatggtgaagccgttggcactgacgctgcctgtcaacgcactagggctgatggcgaccccgacggccccggtgccggatattgaagagccggcacggtggccgtggtacctccgattaaccttgacacggtcgttcctgcagcacgaatacgaggcgcatgaacgtgccgcgccgcagaccctgatgttgttgagcgaggaagagagcatccactacgtcccggtgatggagacggtaacggcggctgacggcaaaccttatcgcgtgcataaaatggtggaaaccgcccagggtacgggcaaaaaaacgcccatgccggccatggaggagaaaaaggtcaagattgtcacgccggtgccgctcacggtgccgaaggcacgatggaatccgccatatgtcccgcaatggtcgggggtgcaggtcgcctatgaggcggccgatgaccaggttacgcagcggatcatcacgccgtttgggcatgtcttgccggtagaaccagacacccaagccgtggcgaaagtgacgcagacacaaccggccccccaagccgtggcagaggtgtatgtgggggttgacggcatcacggcgggccagctgctgtcgctgcactggcaagtgaaaagtccggcccgtctgccattggaatgggattacctcaccgcgggcgagggctgggcgcggctgacggtgaacgatggcaccgacgggtggcacacgagcggcatatggtcggttgactggccggaggacgcgagtcgaacgtcgaccagcctgccgacaggacgcctgtggctgcgaggtcgggtaacggcctggcctgaacatgacaaggcgtctggtgcattaccgacgaccccctggctggcggggatggtgacaaatgccgccctggcccggctggtgtcgccgcaccaggtgcaggcgtcccattttgagacgggcttgccggccgggcgtatcgtgcaggcgctgtcagcgccggacacgctgcagtcggtcactcagccgtggccgtcgcaaggcggtcgggcggccgagacgcaggctgcgtttgagtctcgtgtggcacgtcgtttacgccatcgtgagcggggtttgaataacgtcgacctgatgatgttgttgcaggagcagcatgaaggcattcgtgagctggctgtcttgcccgccgccccggataccgagacgcgggcacggtgccagaccctagtggtgttgccgggaccgacgctgagcgacagtgacgatgcgtgtcggccggcattgagccgccaacacctgacggcgatggcggagggattgaaggcgatcacttcgccctggctgtcgctgacgtgcgtcaatcctgagtatgtgacggtcagcatcagttgggatgttgagtatgtcactggcgtgagccacgtgatgggatatgtgcgggtgaaggcagcgctggacgcggcattgatggcatggtctcggccatccgatgaccgtggccagcccgtccttggccgcgctgtcacgcaccgtgcggttcgggatgtgctgaaccggttgcccgaggtggcgacaattaaggacgtgtatctcaatggcctgccgtcgagtgagcccacgctgacgccgggacaggtggcggtggtgacgtgcattccgcgggaatataccggcctgaccctcacctggctgggcggttcgcgtgatattgaattgaccgcaggacaacacgcgacggtgcagatagtcctgccgacggctgcagcagggcatgatgcctcgcctgaagcggtgtatctggtgaacctggagacaggacggcgtttgccgacgatagtgacggcaaacgacctgtggagtgagtacgcccccaataagctgactttcacggtgaatacgccggccggtctgtgcgggatcttccacctcggggttgtcgttgtgtacccgcggggcatcaccctgcaatcggcgtccatcggggagagtcttaccctgtatctgcgtcagcaatccgcctcattgggcaatccgacccacgcgtaa

SEQ ID NO: 452934 - DNA, 225 bp, Serratia marcescens
gtgcttctgtggcaaccatcaccgttcattgtccccgttgtcagtcagctctggtttaccgtcatggacagaaccctaaaggtcgtgaccggtttcgatgccgtgagtgccatcgagtatttctgctcacttatacttatgaagccagaaaacctggtgttaaagagcacattgccgaaatggctttcaacggcgctggcgttcgggataccgcaagagtgctga

SEQ ID NO: 452935 - DNA, 4284 bp, Serratia marcescens
atgtcattcacgccagcgatagcggcgcgaaccaatacccccacattccttcgtgcggatccgtcaacgcaagctttggcgacgcgcccttatgtgctgggaccgcacgaaacgacaggctctgtggccaagcgttacaacatgacgcctgacgccctgcgtaagctcaaccagttccgcacctttgcccgcggatgggagagcctccgcactggcgatgagttggatgtgcccgtggcgccgttgccgcctgtactctgggaggataagggtaatcgtaaggacaagaaagagggggcgcacgatgggggagcccataaaatcgcaggactcgcgtcccaggcaggtggccttttggtgagtcgcgaccgcagcgaagcggcggcctcgatggcgcgagggatggcgaccggcgccgtgggcggggaggtgcaacagtggctgagccagttcggcaccgcgcgcgtgcagctggatgcggataaaaaattatcgcttaagaattcctcacttgacctgttggttcccctgcacgagcaaaaagaccgcctggtatttgcccagggcagtgttcatcggacggatgagcgtacccaagctaatctgggaatggggtaccgctggttcacgccaacgtggatactcggtgctaataccttcctcgatcacgacctgtcacggtcgcatacccgcatgggggtaggcgtggagtattggcgcgacttcctgaagctgggcgctaacagctatcaccgcctaagcggttggaaagactcgccggatgtgacggactatgaagaacgtcctgccaacggctgggatgtccgggcacaagcctggttgccgatgttgccgcagttggggggcaagctgacttacgagcagtattatggcaatgaggtgggactgtttggtaaagaggctcggcagcgtaacccgcatgcgatcaccgcgggggtcaactacacgccggtgcctttgctgacgttcaacgcggagcaccgtcaggggcagtccggcaagaacgacgcccgagtggggcttgagatgcgttatcagttgggtgtgccgtggcgtcagcaggttgacccgtcttctgtggccgcgatgcgcagcctgatgggcagccggcatgacctggtcgaccgcaataataacatcgtgctggagtaccgtaagaaagaggttatcaggctgcatacggcggaggcggtgacgggctttgcgggcgagcgcaaatcgctgggtgtctcggtcaacagcaaatacggtctggagcgcattgactggtcggcaccggccctgttggcagccggtgggaaaatcgtccatgacgctacgcaggggtacggcgtggtgctgccgccttacaaaccggccgccggcagcgttaacagctacagggtaagtggcgtcgcgattgaccggaagggaaatgcgtcgaaccagagtgagacgcaggtaacggtactggcgcccgtggttagcgataccttgagcactttcctgcctgccagcagcgcgttgcttgctgatggtaaaggtacgcaggagttgaccctgacgctgaaggatgggcaggggcaggtcgtcgatgtggccgagtcagacattgttgtgggggcaggagagaagacgcgtcttcccgcaggggcaagcatttccgcgccgaagaagagcgcgccaggcatctataaggtgatagtaacggcaggaacacgcggcgagatagtgacgctgacgccggtggtcaatggcgtaacactgtcagcggcgcgggtgaacatcaatgatatgacgccggcggccgagcagtcgagcttctcagcctcgccaacaacgttgccggcagacaatcaggccagcacgacgctgacgctgacgttgaaaaatgcggcaggcaatgcgctgagtgggttgccccccaggttgtcgctcgcactgaaggcgggtgaggatgcatcacgcgcggcggaggcggtcacgctgagcgccctgaaggaaagtggtcagggaggggtgtataccgcaacgctcaagggcacggcagcggggcaatacactgttattccagtctacaacgggagtgcgcttggtaacttgagtgcgtcggtcacgctaatggcgggtgcagcagtacgcgccacttcgaccattcatgttgacaaggcgagttatgcctctggtgatgatattaaggtgacggtaatcctgaaagactcgaggggcaacccggtagttggccaggcggcggtgttgtcttctgcagtgaccgcagagcatgcgacgttgcggggggagtggagcggaaatgcaacgggcgagtatacggcaacctataccgcaaaagaggtgggtgttgacctgaaggcaggcttgttgctgaatggctggcagtctgcgcagacggccccttacgccattacggcgggggcggtgacgtcggccacgctgacggtggacaaggccagctacgtggcgggcagtcctatcagactgacggcgacgctgaaggatgcgcagggtaacgcggtaccggcgcaggccggtgcgctgaaggaggcggtcacggcggccaacgccgcgctgagcgggaattggaccgagaccgacaccaccggcacctacagcgccacctataccgcgaacacggccggcaccggcctgaaggcggcgctgaagctgggtggcgtgagtgcccagtctgcggcctacgccattacggcgggggcggtgacgtcggccacgctgacggtggacaaggccagctacgtggcgggcagtcctatcagactgacggcgacgctgaaggatgcgcagggtaacgcggtaccggcgcaggccggtgcgctgaaggaggcggtcacggcggccaacgccgcgctgagcgggaattggaccgagaccgacaccaccggcacctacagcgccacctataccgcgaacacggccggcaccggcctgaaggcggcgctgaagctgggtggcgtgagtgcccagtctgcggcctacgccattacggcgggggcggcagtgactaccaaatcaaccattgtggtgaagggtgacagctttgtgtctggcagtgacatgactgtggttgtgacattgaaagatgcgcagggtaatctggtgtcagggcatgaggagttgttggataatggagtggcggtgcctaacgccacactgaaaactaatactcactggactgagtcgagcactgaggtgggtgtctacaatgccacctacgtagccgtcactgccagtatcaaccagacggctacattgcgacttgggagcagcagcgtaccttccggaacctatgctattacggcaggggcaccggcacaggaagcttcggctatttctgtagatggtgcgcgttacctatccggtggcgtgcttgccgtgatggtgacactgaaggatgcggcgggcaactcaatttccggtgaagagggcaagctggcgacagtagtaaaagttccgaataccgagccaaaagaagcctgggtcgataaaggtgacggtgtgtatggtgccacctatactgctactgtggttggtgacaatctgaaggcgaccctggcactgaatggctggagtggcccaagggagtcgggcgcctaccgtattgttctcgacggtattgcgggtgttcaggtgaatggttatcggtttggtgcagacgccggattcccgaccacgggctttgccggggcgaaatttacgtttgaacttaaagagggtaaggcagccgactatacctggtcgtcaagtgcgccgtgggtatcggtgaatgataacggagaggtgagctttaccggccagggtaatggccagcgcgtgaccctcacgggcaccgcaaagagcgggggcggtgccattacgtacagcttccaactgaaacgctggtttaccaataacggtgaccaggccatgacgtggagtaaggcaaacatgacttgtagattaccgaaagcgtcggaggtgactaacgccaggacgctggaaattgttgccggctggaagccagtacttactgacccaacgcgtgccgttggcagtctctggggggagtggggtggagaggcggtagtcggactttatcctggcgatcggcataacagcatctcacgctgggtgggagatgcaaccatagcggggttgacggggagggcttacggggaggggcctttcactgtggatccgtacttcgggagtatagcgcccaccaataataatcctgaaaaaggagcccccatgtgtgttgaggatttttaa

SEQ ID NO: 452936 - DNA, 330 bp, Serratia marcescens
atgtacattccgcgccccgcaaagctgctattccagcacaatgacggctggagccactatctcgacaaacacggcgacatcctcagcgactggaccgaaatcgccgttgagcgcaagctcgcctgcggcacctatgccatgggcgtgcgccgttactgctgcacctcaccggactgcacccatgcccacttcttctgccagagctgcaagtccaaagcttgcagcagctgtgatcacaaggccaccgagcagtggattgccgaacagcagcacatcctgcctgactgcgactggcaacacatcacgttcaccctgccacatctgctgtaa

SEQ ID NO: 452937 - DNA, 624 bp, Serratia marcescens
atgctctgttgggcacgccaacagggtatcgaagtgggaaccttctgcgcactccatacctacggccggcagctcaatcagcatctgcatatctacgtctccgttacccgcggcggtctcgacataacacacagcacctggcgcagcgtcaagtacctgggccgctatctgaagcgcgcgccggtggcggcctcacagctgcgccactaccgcggcggtgccgtggtccaacagtactacgatcaccgcacgcagcgacacaaacgccagaagatcagccaggaggagatgctccagcgttacatcagccatattctggcacggtattttaatatggtgcgatactacggttttctggccaacagcaagcggggctcgctgctgcctaaggtttacgacgcgctggagatgacggtgcgggaaaaaccgaagcgcccccagttcgcggtactgatgaagggcttcctcggtaccgacccttaccagtgcatcctgtgcaaaggtcggttatgttttgtcggtgccgtagcggctgaacacgctacaaaaatgctatctgacagactgcagcggatggagaaaaacgatgacttccaggccccggcactggataagtgcgcctga

SEQ ID NO: 452938 - DNA, 654 bp, Serratia marcescens
atgaaactccagctagagaaactaggcaataatgtagtcacttgtgataatggggctgatgcgttgattttattagacaaggagtatttcgatctcattttaactgattgccaaatgcctcatatgaatggctatcaatttgcaaggctccaaagacaaagagagagagaaaagcatagtcggtatattccaattataggctgtactgccaatgcatttaatgatgaattgcatcgttgcttggcgtctggtatggactcagtattaataaaaccactaatgcagaaagatattagaaatctaataatacaacaacaaggtgttcgactggatatgaatgagattaatatcatgacaactagaaaccctgaagcaaagttagctataattgaggagttgcagaagagcagcgagatggtgcgtcgagaattaacatcaaaaaattccatagataattattatttagagatcatacatcgacaaaagggttgttttgcattggcaggatttcaaagtggagtggctatttgtcacaggctagaacagatacatggcattaaagaaaatggttgcaatgagttgcttctactaaactcaatgctattaaggtttatttccttattagaaaatgaaaaggagctttgtgtaatttga

SEQ ID NO: 452939 - DNA, 222 bp, Serratia marcescens
atgcgatttttatttcttgtgacaacactggctatactaaatggttgtggaattagtgaagaattggatgcaatcaatctagaaaaccacaaaaagatctgcaatggttatggatatactcagggaacagacgcatatgctacctgccttatgaaattagatgagcaagaagatgcagatgaacaaagaatgctggacagagagtccagaaagaaaaaatga

SEQ ID NO: 452940 - DNA, 1029 bp, Serratia marcescens
atgctaacattggagttaagagtggagattgctgttcttcttcggcaaggcatgtccatccgcgccattgcccgtcatttacgttgctctcgccagactgttcggcggtatatcaggatgggagatgctgcctcatcatcccgttattccaaccgagctccacgtcccggtaagctcgacccgttcaaggcttacattcttgagcgggttcaggctgctcgcccccattggatccccgccagcgtgctgttgcaggagatccgagagcgaggttactcgggcggttacagtatgctgacggcattcttattgccgctcaagcagcaacccgctgagcccgtggtgcggttcgagacgccaccgggtgaacagatgcaggtcgatttcaccattatccgccaggggcgacatccgctactggcttttgtcgccacgctgggttggagccgggcaacctacgttcgtttctatgcccgccaggatacctccgcgtggtgtgatggcatcgaacatgcgctggctttcttcggcggcacaccacgacatctgctgtttgataacgccaaggccattattctggaacgggatgtctacggtgacgggcgccatcgctggaacccactattgctggcactcgcggagcagtacggcttttcacccaaggtctgccgcccttaccgcgccaagaccaagggcaaggttgaacgctttaaccgttatctcaaggagagtttcgtcgtgccgttggcaacgaccttcaagcaatcaggtttgatgctggatgttgactcagctaacgcccgcgtggggccatggctggtacgaaccgccaacgccaggaagcacggcaccacgggtattcctccagaccaccggctgcagaaggagctggccgctttgttacctttgcctgtgttcagggcgtcaacaatacctcgattggcggagccacaacgccgagccgtgcctgtggagagtattcagcatccactgtcggtgtatcagtctctgctggaggcccgtttatga

SEQ ID NO: 452941 - DNA, 705 bp, Serratia marcescens
atgtcatgtttacttgttcaagctcgtaacatcttaaaagtcttgctgatgtcatcggttatccttcccccggcagctgcagaaattcagccctctgtttctgctgttctgatcccgatcggaaaagaggaggcgaccatagacattaaaaacagcgggcctgaaagtgttttactttacagcaaaatcattcagctgccagatgataagctggcgggcggaactatttttaccgagccacagactgtacttatggggccgggtgagagccagagtgtaagggtgatatatcagaccaatactcccgacagacaggagcatattgcccgcattatcttttcagggctgccgtcaggcaacgatgccagtgaaggaaaaatcaagatccttgtagggcaggatttgccggttgtggtaaacgtgcgaaaagatatggaacagaaagatatctgggaacgtattcgctatcgcataaaggatcaaagcctttgtatgatgaatcctacagccaaagtatttcgcttttcacctacattggtcactgatgaaggcaggattgaaattacctttaaaaagccgtatatcctgccgggtgaggaactgtgtgcgattcccgcccgcagcatctcagagggaatgcatgtcaatctgacaagcgtcagcgattataattacagaataaaaactaacaaggtcacactctga

SEQ ID NO: 452942 - DNA, 2367 bp, Serratia marcescens
atgataaaaatccaatgtataggtttgattttagttaaccttttttattttcctgtttcatccgcagaaacgttaaattttgaccggaagctactggaggccaacggcatttcggctgcgcagctggagaatgctctgaacagacacgtcattccacaggggtattctgagacagacgtctacgtcaacggaaaatatataacaaccggctatgtatattggcggaacggcgctctttattatgagaaagaaataaaagagaaatcaggcatcaccaatgatgtctggcacagaaccgatatcaagcacaatcaccgacagttttaccgccttgataaggtattcagcatagcctcctatgaccgttcagccagaacgctgaagctgcgtggtcctgctcagtaccttaacgtcctggacggcacaaaccgtatcagtggaggcagcggcgccttcgtcaattacagtgcttatggttaccacttcagcgccgcgggacaacctgtcagcagcctgagtgctgattacgaagcaggtataaacgtagcgaataccgttatccgggcccacgggacctacagtgaattccacagcagacagactgccacgagatacagtaccgtgcgtgacgggtacgccgaacgtgatattggcggcttcagggtcagggtcggccggaccgtcgtcagcgatggcggattcggtacgggctacatcgatggtgcattagtctcttcagcaacaggcaaccaccaggccttcgtgaattttgattacgatgcgaatgagattcttacggttgagtttctacagaataacctgctcctctggaaagaaaccgtgcagaaaggtcatgcgagcctgagaaatataccggttgccgatttaacaaatgatgtcagcgtcttaatccgccgtaacgggcaggtaatcgaatcaaggctgatttcacgcgctcagatcagcaccagtcaggacggtcttccgggatattatgcattctcggggtttaccgtcggcggtaagcgcatgcaggtagcggggggggggtacagcaaacgaatcagcgatcagttgcaaccctcagttgctgcggtcaccacggcccgctaccgcgcaatctcgctcagtaatacccttgaaagaggccagttgcgttcaaatcagacattcatcttttcccacaatgaagcacgcgaagctggttcaagcgtcagtctggacgccgccatcaataattacagcctcactcacacgcgtaacagtcggcaattcagttatctagggcaaggaacaacaaggtcaggtaacggcctgcgaaacagtacaggtctgatgtacagcagcaggctcagcgaacgcgtgagcggaaacctcgcattcaaccattataacttttatggcgctgccggttttgattctgtttcagcagggctcagcctctcgcttcctcatgcctctgtgggactgaacctggcctacatgtcgctggcacagggacattctgaaaaggataaactcagcatgaatctggcccttaacattccgttacgctggggttcagaacgtattacgtggcgcagccagtactctcattttgcggacacatcccgcttcatcaattcactaagcgccggtatcagcgataattatacactcaccgcaagccatacacgtaagacaggcgcacagcaaaacgacacgttttcacttgataattctgtgaccaccccttacacctcggcgagtctttcactttcgcagactaaacaaaacagtcagtcataccttacatccgctgcgtacgtttcgggctccatcgctgcgagccagcacgggattatcttttctccgtctcccatcagtgacacctgggcgattgtggataccggtgtcagccagtatctgaaagtttcttcattacagggaggcggcgtcaccaatcatgacggaaaagtcatcatcagcccggtcagagccaacacgggcgactttatacgcgtggatcctgaaggattacctaagggagtaattatctcgaacaacatcagggtattttctgccgaccgtggtgccgtgccttacttctatttcagcgcctaccggaaccggctgttgctactgaaatggaccaataaaccttcgtgggttcaccagaatgatattttttacgatcgggacggaaaaatgctcgcccggttcattgacagggacgtacttctgattagcgaggaggatttacagaaaatagaacaaacaggtatgacgtccccggcggacatcaatgttaagtgcagactgtcgcccggcactctgaagaaaaaggaaaagatcaaaaatgtcatgtttacttgttcaagctcgtaa

SEQ ID NO: 452943 - DNA, 687 bp, Serratia marcescens
atgttcactaaaaagattatcgttctgacatcggttacgggcattatcctgacgggaagcagtgcttattctgccaccaacattaatgttcacggcattattgctccgaatgcctgtattgcaaccatcgtcggtggcgacaaccttgactggggcattacacaacatgccagtttaaatcagaagtcattcaacaacttcccggccaaaaaagtcacccttcagtttaattgcccctcaccccagagtgtggcgttttgggcgaccgatcccaatgatgccagcgttatggtggggcagaataccgacgggagaaccaaccatgcagatgtgaaccgcgcattcggactcggtttcgatcctgtaactgggaacaaactcggtaatttcaccctgaaccctgtttccacgacagtggatggcgtcaccaatacaaccactttcggttatacggccagtggggcacataatggaaccgcattcgttagcgtaaacaccaaagactgggcctataacaagagagaggattacacgccatgggatcaagccacaaacaaaccggcatcaggacaatccatctcatgggtttttgatgtcgagcctcagctcaaccacggggaaatgatcaccaatgcgcaacaggttgactggcagggaactgcgcaggtcaacgtccgttatttctga

SEQ ID NO: 452944 - DNA, 831 bp, Serratia marcescens
ttgagcagaaaaatcataataaacagaactgtgatatttgaaccggataaaaagaccatctcgggtaaaaaaaatacggtccggctcagtgcttcggcaacgttatgtatggagttgctcatcgataaagcaggtgaacttgtcactcaccagcaattatacgatttcgcatggcgacgttttggcatggagcctacagccacctcactttaccagaacatttcaaacctgcggagggcacttatctgtacaggtataagggatgaaaccattcgtaccatgccccggcgtggttttatactctcaccacggaccgaggtcgtccgtgaaagcccgcgctctgcggtaatcagtgcggatgtgcaaactcccctgaacacagggatgcccagagaagaaagccaccctgacactgaacattcagaagaaaattcagttgggggagaaaagaaaagctgtaataaaggctaccggatattaagcagacctttacttttctgctccaccgccatagcagtcacggttatcacagaaattttcctgttatacgggccacctgcaggcagggttcagacttacttcactcccgtcatgagcgatttttccggctgtcatgttttcactaatcctgacaatggcctcagcgaaatgcatttagataaaaatatcatggatttaatatcagactgcgataatcaggcttatctgtatatcacaacctacaaaaactccgagcgtacatctgtcatttcctgccagaatgcattagggacaccgcatcgcgcaaactgtcattcttattatttcacagagcacattaaaagtgattaa

SEQ ID NO: 452945 - DNA, 1503 bp, Serratia marcescens
atgaaggataaacacccggatcagttacgtcgtttattagttaaaacaccgttgctggccccgctattagccacattaccggcgacagcaaaagagacactattctcttcccttactggaaataaaacgacaggttctcccccgcctcaaggccagtcgctgctgctgaaaaatgcagagatggtcgtgaccatggataaagacaggcgcgaaattaaaaaaggctgtgtctttcttaaaggcaatacgattgttgccgtgggttccgaaagcgaagtgccacaaaaggcagacagagtcattgacctgaaaggccatatcgttattcctggtctgattaacactcaccaccatatgtatcagagcctaacccgcgtagtaccggcggcccaggacggagaactctttacctggctgagcgcactgtatcctatctgggaaaaactaaccccggaaatgatgaaagtcgcgaccaaaactgcgatggcagagctaatgctgtcaggctgtacgacttctagcgatcaccagtacgtgtacccgaacggcataaaactcgatcacagtatcgaagcggcacaggaaatggggatgcgtttccatgcctgtcgtggcagcatgagcgtcggcaaaaagcagggggggctgccaccggactctatcgttgaagatgaaaagttcatcctcaaagatactcagcgcgtgattgagcagttccacgacgctgaacgtggttcgatgatccgcattgtggttgcgccttgttcgccgttctcggttagcgaaggactgatgcgcgattcagcgaaacttgcccgggcgcacggtgtttccctgcatacacacctggcggaaaacaccagcgatatcgaatacagcaaaaagacgttcaacaaaacacctgcgcagtatgtggaagatctggagtgggtcggtcaggacgtatggcatgcgcattgtgtgaagcttgatgattacggaatgaagctgtttgcccgcaccggtaccggtgttgcgcactgcccttgctccaacatgcgtctggggtcaggtatcgctccagtgcgtcatatgctggatgcaggcatgcacgtgggcctgggtgtggacggttcagcgtctaacgatagctccgatatgattggcgaagtgcgtcaggctctgctgctgcaacgtgttggttttgggccggaagccctgaccgcacgcgaagcgcttgaaatcgccacccttggcggagcgaaaaacctcaatcgcgaagacattggagcgctggcgccgggaatgatggcagatattgcggtatttaacctagaagccattggccttgctggcgcacagcacgatccagtttccgcactggttttctgcaatcctggtaaggttgcttataacatcatcaatggtcgtgtggtggtggataacggtaaggtaacgaccgttgatgtaccgttgatcattgagaaacacaatcggctggcgcatcaactggtggaaggttaa

SEQ ID NO: 452946 - DNA, 309 bp, Serratia marcescens
ttggcacaacagctcagtctgcccatcgctgcgctgacgggcgagaatatcgcattaatttctcagcccgtccctcacgatatccccagacagtcatttccgacggcggctgaagacagctatgtcagcatcattgcggccaaactggcgattgccggagaactggccacaccgctggcaaagctgcaactggcggacaggcagtttatcgaccagttactgggggaaacgctcatacgtcggatagtgctggaccgcgtacgggagtattttcgtaaacaaaaaaaggaaggcgatcatgcgagttga

SEQ ID NO: 452947 - DNA, 1290 bp, Serratia marcescens
atgccaccgggatggcgtaagagcattcctgcagaagcattattacagttgcgccagcgactggagcgtttgtcgcctaaaaacccggagcgggcattacaggttgcggcgatgtcacaactatatggcgtgtcagccacctcggtatatcgggcgcttaatgacctgctgaagccccataccattcaccggatggatcatggccaaccacgaatactcccccgtcaggagatggagcggtactgtgagctggtcgctgcgctcaagtttcgcactaccaacaaaaagggccgtcacctctcgacccgccgggctattgagttgctggaagactatggtgttgacaccgaacaagggcatatccaggcacctaaaggggttttaacccgcagtactgttaatcgctatctctccggctggcatctggatcaaccccggttacatcgcccaccaccggccgtacgcttccaggccgaatacagcaatgattgctggcagtttgatatgtcgccgtccgatctgaagcacattgatgtaccagaatggatcgacccagaaaagggcgaccccaccctgatgctgttcagcgttgttgatgaccgcagtggcgtcgcctaccaggagtaccactgtgtctatggtgaggatgccgggtcagctctgcgttttctctatgccgcaatggcacctaaacctgatcccgggttcccgctacagggaaggcctaaaatgctttacctcgacaacggcccggtggccaaaagccggattttccaggacgtcatgctggcgctgggtgtggactggttgacccatctgcccgcagggaaagatggtgaacgggtgaccgctcgctcgaaaggtaaggtggagcgcccttttcgaaccgtcaaagaagcacacgaaacgttgtaccattttcacaaaccggaaaccgaacagcaggccaatgagtggctgttgcgctatctgcttcactacaatgaccagccacaccgttcacagccgcattcacgtctggaagactggctgacccgcctccctccggaggggatacgtgaaatgtgcagctgggaacatttctgccgctttgcccgggagcctgagcgccgcaaggtgggcattgatgcccgaataacggtggagggaacggcttatgaagtcgatcctgatctggcgggtgagagcgtactgttgttgtgggggggggggttgataacgaactgcatattgaatttgaaggcgaacgaactggcccatattacccgatatctggcccgatccccctga

SEQ ID NO: 452948 - DNA, 576 bp, Serratia marcescens
atgcttatcggatacgcgcgggtctccactgacgatcaacacctcgatctgcagcgtgatgcgctgacgcaggtcggatgcgagcgtatttatgaagacacggtgagtggagcacaggctgaacgtgaagagttggctaggctaattaatgcactgcgccccggtgatactgtgatcgtctggcggctggatcgtctgggacgttcattgaaaaatttattgcaactggttgagcggctggacgggttgtgtgtcgggctacgcagtctgcaggagagcattgataccacctccagcggtggtcgtctggtcttccatctctttggggcgctggccgagtttgaacgcaacctggtgcgtgaacgtacacaggcgggattatcagcggctcgccggcgtggtcgtcagggagggagacccgcgctgctcagtccgacaaaaaaagcgctggcgctgaagttacatcaggaactcaatcataccattgaggaaatctgcaacatgatggggatctccaaatcaacgttatataactatctgagcaaggccggtaaagatgccaccgggatggcgtaa

SEQ ID NO: 452949 - DNA, 153 bp, Serratia marcescens
atgaataccgaagcgaagctctaccttcttaaattagttttgggacttctgacctggggttttttgatgtggtatttgctcgatctcggtgattttttcagggatttaatgccgaaaaaaaaccataaaaaaagcgggaggaaaggcaaatga

SEQ ID NO: 452950 - DNA, 219 bp, Serratia marcescens
atgaataacaacgacaaacccactatccggcatttcgatgactttccctttactggcagcgatttcgctcgagtggggaacatcatcgtctgtggccaaagcggcgcggggaaaacgggaccgctgcagtccatcgtaagtgaatacagtctagatgctgtacggcagggcatttctattgcaccgacaccgccttctgaagatgaggccaaatcatga

SEQ ID NO: 452951 - DNA, 273 bp, Serratia marcescens
gtgctggcgtacttcggcttcccgaaggcgcaccgtgtaaaaatccactcgaccaatacgctggagcgcctgaataaagaggtgaagcggcgtgtcgacgtggtgggtatcttccccaacgaagagagcatcatgcggctaccgggagcggtcctgacggagcagtatgaagaatggctgctgcagaaccgctacctgccgccgtatagcatggcggagatagaccagactgctgaagacgacgtaatcgacgcgttgccagtcagcgcataa

SEQ ID NO: 452952 - DNA, 477 bp, Serratia marcescens
gtgtgttaccgctatccatttgccatgatccacgtattgtgcgtgctctggctctttggagggctgcgtcgcgatgaagtacggcggatgcgccccgagtgtaaacggtggcacggtgatgagcaacaggatggctcacgggtctgcctgctggacgtgtcggtcaacaaaaccagtacggcgttcactaagctggttgactgggaaaaagagcgccacaggcagccagctcaggttgatgtgaaaaccggcgaactcgtcagctacctttttatgcacagaggtcaccggatccacggcagctatatcaataaatcgctgatcccgatactctgccgtaaagccggcgttccgaacgaggatgttagggggacaatcaccagccatagggccagagccaccattgccagccagttgtttaatgcaaaagagccgctaggattattcgaattacagcgctggcttggccatgcttag

SEQ ID NO: 452953 - DNA, 294 bp, Serratia marcescens
atgggtgacaggtttatagccaccgagggcgtgaaaatcgtcaaagacaatcccggcctgtggccgcagatcatcacggcggtttcgtccgtcggcgcggcacttttcggcgtgtacttgacccactactttgctcgccggcgtgaggaaagagcggtggcggttaagctggccagtgagcagctttttatcgccacggagctggtctttttgctggagcagtttgccgaggggggcccaggtagccacggaccagagcgagcccgattattcccctgcggtaaatccgcctga

SEQ ID NO: 452954 - DNA, 813 bp, Serratia marcescens
atgcgctacatcctggcactgatattcctttatccgttcttcgcgtccgggtatcaagtcgctgtccgagacctggttctcaccgctgcaccgtcctcgggctacattggatggaccgggacctacctcattaccggcggtccagaacctgtgcaagacagtccagttaattgtggtggtgctcgcgtgtgcttcatcacgttcgctgcatacctcactgatggttccgacccgacgcgtgatatagatcgtgcatccgcaactacgccccaacccaccgtcctggcaggggtctcctggaatcaggctatttcgaccttcatacgactgcatggtcgtagcggagctttggtccgtccccctgttagcatatctctttcagactacgacccgagacatctctgtttcatcctcatggccggcaaaggggattggggtgactctggtcggcaaagggtaccgggtgtagcatgctcatacgccgcgccgcctgaagtgtcatgtgagtcgaatttcccacggatgcttaatcttggcgtcgtgccggtcgggtccaccgctgtacacgggcagtcgcaaggtctcgtcacatgctccgggcccacggtcatacgcgctcgcctgatgaatcgacccacaatcgatagacgagccgtcgatgtcactgtgaatgggcgactcctcggcaacaccgactcccgcattggggaggggcgtaccgtacccataatcgtctctgctcagatccctcagccccttatgaatgcgggaacctacaccaccgacgccgtgatcgccctcacatacgaatga

SEQ ID NO: 452955 - DNA, 1596 bp, Serratia marcescens
atgtttcgtcagggtgagttcgtcttcctgatccaacgctcagatgatggaacgtggtgtcagcctggtggcaagcttgaaccgggggaactggctattgatgctgcgcgccgcgaagtgctggaggaggtggggtatcagtatgatggcccgctgaatccgcacagcgtctacggtgattacctgacgtttcgcgctgagatgtcggagaagttcgaagcgaagcttaacgacgagtcgctggccgccggctggttccatattgacgatctgcctaagccgcttcatcagccttttgctgagatgctggcgcagcaggcgctcaatgaaaccgaagtggccgcactcatcgctgatgggacattaagcagcccgcaatactttatcaacatgtggatgttcgccatccgggtgaccggaacgggggttacctggcgctctgcagatcaacagatgaccttccgtaacccggatgactatctcacccctgaatttctccagagagttgccgggttacctctaatttggctgcacccggagaaaaatacgctcgatagtgatgagttcgcaaaacgagttatcggcaccctgacgaatagctgggtcgccgataatggcgaagtgtgggcgattgcgcgcgtatacgatgccgaggctgccgaaattatggcgaccaggcaattaagcacctccccaaccgtaaagtttgttgaggtacctaaatcaatcattgtcgacggccagtctctgctggtggagccatcccccgagctgctcgatcacgttgcaatttgtgaacagggggtatgggacaagctccttgcccctactggtgttaaatctgattccattccaaatgaggctgaaaagatggacgaggaaaaaatcgtagcgcttatcaacaaagcgatcgatgcccgcatggcaaaagctgattctgaggcgaaagaggccaaggaaaaagcggatgccgaagaggcggcgaagaaagaaaaggctgacgctgaagcgaaagaagctgatgaggcgaaggccaaagctgacgcggaagagaaagccgcgaaggaaaaggccgatgctgaggctaaagaaaaggctgatgccgaagcagcagaagaaaaggcagcaaaagaaaaagctgactctgaactacgtcagcagattgccgaccttaaaacacgcattccaaccgagttgagcgatgaagaacgcaacgaggttgctgacgcgcaggtgaaggctgacagcgtgttctcctgctttggcaaacgcgctccggccccgctgtctggcgaaaagccgctggcataccgtcgccgtctgatgatccagttgcaagaacactcgccggactttaagaccgtcgacctgtcatcaatcgctgattctgcgctgcttggatttgctgaaaagcagatttatgccgatgcccagaaatcggcaagcttgtctgtcggtgctggcatgctgcgtgaaattaaacgcgctgatgcgaccggccgtcaaatcagcacattcgaaggcgatcctgccgctacctgggctccgttccagtcaggtaaacgccaggtcaccagtttcaacaaccaggcttaa

SEQ ID NO: 452956 - DNA, 1284 bp, Serratia marcescens
  misc_feature (1115)..(1124): n is a, c, g, or t
atgaaggatagaaagagatcgatggtctatggcatagtttattggggggtattcacacttacttacttcttattagctacaatttgccttcaaacaagagatccatggagtttatcgagcacggtctggctaccatcaggactattgctaggagtattatgtgctcttcctcctgcgcgttggccattatgggtcattacagcaagtgctttacacttttctgttagtctaatacatgatagacctgcagatattgctctaacatttgccattattgatccggtcataatttgcccactggccttcgtctggaacaacttacataactatgcaagaaatttgtcacatcgagctcaaacttggctattactcacgggagtaaatttaggtagtatcctggggggggtgttcagtgatattcttttgaaaaaattagggtatcctacctcggttacacatttccttacttgggggatatctaatgctaccggctgtttagctataaccccattatttattgtaaatcaactaaacaaaggtcgtacgcaatggctatcatatctacagatgttcgcagccataatgattatcccaatatgcattacaccattttttttacagtcacatctattttgcaatgaactggtaaacaatactctattatacctattgctcatcttgtctcttctgctcgctgcatggttgccattgttcccattatgtctatatttcgtcttcctgactatgcttgctagtttggcaactttctataattatggcccttttcctgccatgttaaacggcacgcaaacgatactcgcatcccaaatttacttactggtgctcatatcgcttgggttattagtctctacaagagagcagcatcatcgttctaaatatcaacgactcctgcgccaaaagcgcttgctaagcacgttccttcagaatagagatcccgtttcgttctatttaacgagagaaactggggaaatagattggctatcacatgaaacagtgtatggagtacccccttcacaattaggtaatttcgatctgttactagcacatattcatcccgaagaacgatataaattgctaggatggataaaggatgnnnnnnnnnnggatgatgatggggaaagtagtgaacattgctgcgacattcgtatgcttctgtcagatggcgactatcataacttaactatttgtttttctttatatccatcccaggatttattgggtatgctagtaaaaaaaaaccactgtaataattcctgtttctga

SEQ ID NO: 452957 - DNA, 648 bp, Serratia marcescens
atgcgtaaagtaaatcaagcgaaaggcactatatcaatatcttttattgggggggactacttttttaatgagggcgttcgacaaactattaaactatacttcaacagcaaaaacgtcaaggttgtttgttacaagagagataactaccgactagctgatattgttttccattcagtgaggtgggaatgggaaaaatgtttttgcttaattcgccctttaaacttagaacaaatccactttgctgtagtaatgccagggtgtaaaataaacccaagaaaatcaggctgtttttatgagtctggattgatataccataatatatccgctaaccaattgattgaacaaataaaatacgcatgggagaatagagggaagaacctctcatctcattattgttcctggtgttctaaacattctctttcaccaagagaaaaatatgtaatgtcatgtatgcaattggagatgaaacaatctaatatagctaaaaacctaggggtcagtccaaagacgataagtacttacaaaatgtctgtaatgcgaaaattgggatttaaattaaacgtggaactctatgattggttgcgcgataaaagggttcgcaatatcctgacctgctccccgttgattaatacatcgcgatgttggtaa

SEQ ID NO: 452958 - DNA, 390 bp, Serratia marcescens
atgaaaattaattccgcattgttaatgcctttgcttttcataatgcgttctgcctatgccactcaggaatgcacgtccttgacgagagagattaataacgaaaatatgaaccaatacaaggcgctggtacaaaaatcactgtctcagaaagtctctctggacaaaatcgacatcacacagattttaagtgaacacgaatgggtagcactctcggtgtcgactgagattgctgagcctggtgttatgttttttaaaaataattcttttgttgacgtctggggcggcgatgtctatccgcaggataaagccaaggtattaacgtgggccaagggtattcacgccccggagaaattggcgcactgtttttattcgtcggttgttatcaagtag

SEQ ID NO: 452959 - DNA, 1731 bp, Serratia marcescens
gtgaataaggtaattgctggtagtgatgtatccatagggtatcaactcttactggagactctctctaaatggggggttacccgctatgttggcgttactggcggaggggttgttcattttttaaaatatatcaatcctcttgtaaatttctgctccgaagagtcaggttttctctctattgctgaatacagtgccggatttattccattaggatattatctgagtagcggtagaatggcggccgcagtcgcaacgacgggagccgctagtaaattactcagttgtggtctaagcgatgcgaaactgcatgatattccagctatatacatagtccccctcaccggagaggaaatccagggacactccccattgcaagatacttccgcgtctggcagtaatattgtcgcacaattacgcagcgagttgcctgaatctgtctttgtgcttgactcgccagaaaccctcgccgaaaaattatcatctgcccatgttcagttggaaagggcaaaaccggttgtgcttgttttgcagcataacgcgctcaacagtcctatatatcatgccgaaacgacaactgcctcggtaaaactccccgtgcaaagatctgcattcatcgatttttgtgacgaatttcgacacgacattgatgggcgacgtctgatcctactggtgggagaggaaatgactcgctatccagacgcggcaaccctgacgactcaattttgtcaaatgctacgctgcgcagctatctggagcatcaatggagccaatgctgtgcagcgagataatccttatggttttggctatatttcattcgggggcaatgatgaagccttgtcgctctatcaatcaattgggaaagatgatgtgttgctagtgctgggtgcttgccctgatgaatacactgtcaatctacacaaattttccgccgctaagacgtttttcctcactaacattcctggatgttatggtcaaaaagagaatagtttcgtacatatgagtttgggagaatatcggcagatctccggcccactagataaattgttgtgtaaccttctggctgcggcacaacaacagccgttcggcaatattcactctcccctcgctcctgataatcttaatcagcgccaatatccgcctcctcgccctggttatgttgacatggctgagctttatcaacgacttgatcgttggtggccggctggttctattgggtttgacgatgtttgcctgtcttacaaagacagacaatatgttactcaacgtccaaataacaatattcacttttattcactctaccgaggttcagcaatggggggcgcattcggtgccgctgttggagcgaaattatccttgctaacacgtccagtatttctctttactggtgatggatgcttccgactattttccggttcattgggagaagcgagtgaattggggctggttatttttctcgtcaataacgccagtttttcgatcgttggtcagggtttgcccatcatcttacctgagatagaagaaaaaaattatcacgcccacctcaaaccggttgattattgcgcaatagcacgagcttgcggctgggatgccgatcggcttgcacctgatttgagcaatctgagttttttgctggataaagcaacgggtaatgcaatgaaatctttgctcattgatatcccagtcgatgcgttacaagtactgggttataatcctcgcgtgaaaaatctttaa

SEQ ID NO: 452960 - DNA, 582 bp, Serratia marcescens
gtgccggtcaacaccctggccgaacagctgaccccggaaatgatgaaagttgctaccaaaaccgcaatggcagagctgatgctgtcaggctgtacgacttctagcgatcaccagtacgtttacccgaatggcatcaagctcgatcacagcatcgaggcggcgcaggaaatggggatgcgtttccatgcttgtcgcggcagcatgagcgtaggcaaaaaacagggtggtctgccaccggactctatcgttgaagatgaaaagttcatcctcaaagatacccagcgcgtgattgagcagttccacgatgctgaacgcggtgcgaaaaacctcaatcgcgatgacattggtgcgctggcaccgggtatgatggcggatattgcagtgtttaaactggaaggcgttggccttgctggcgcccagcacgatccggtttccgcactggtgttctgtaacccaggtaaggttgcttacaacatcatcaatggtcgcgtggtggtggataacggtaaggtgactaccgtagatgtaccggtgatcattgagaaacacaatcgcttagctcaacaactgttggaaggctaa

SEQ ID NO: 452961 - DNA, 1008 bp, Serratia marcescens
atggcgttatattttgttttccatgatgaagcgctaattatcctctccgtcgatcaagacatattacaactctcagggaaatatttatacatagttagtttaagctatccgttaatggccttatctttggttatgagtgtttggttacgcatttacaatcaagcgcagaaggttttattaatattctcagttggactggttattaatataataattagtttgggattaatacttttgcttggacttgatatagcaggtgccgcatggggtacagtggctggcgtttttgttgagttttctttattatctctatgtgtattatcaaaaagagagaaagttatttccattaagggaataaccctgtctagattaaaatctatagtgctccactctgtttcttcaggggtcggtggccttatctggatgctgggatatttttttttctatgtgttagtaggcaagacggacaacaatgttttatatattcttgccattttaacacctatagagagccttcttttgtcctttgccttaggtgtaacaacggcgtcgggcatcgagttaggaaagaggatccctgcttaccaaaaatcccacataaattactttgtatatcaaaccttaaagctaactctatatgtgactttgctcttagtgatgatcgcgctacctatattatggttaacatatgacttgtacttcattacaatcaagcaattccctcatttcattttaatgctggttttggtagtcatattaaaaagcctttcgatccttttgattaacggagttcttcggtctggtggtgatattcgattttgtttgcttttagatggtggtgttcaatggggagtaatgttaccgtgtgcatatataatggtttcattaaaataccctggggagtatgtttactctataatccttttagaggaaagcatgaaaattataatatgtttctggcgtttaaaaagtgatcgttggaggcgtaatttagtagcgggatattag

SEQ ID NO: 452962 - DNA, 534 bp, Serratia marcescens
atgctaatcccctacaaaaattgtttggagaaatgcattgatatgaaatttaacgacttgaaggaaaaacacctccagctgaagcgaactcagtggcaattgcgggaaaaattgcaaaataatgcgtgtgatctttcccgggagtatgccgaatccctctcactcccttccgcaacctggaaagatgcacaagggaatgaatatccatatgtagaaattggtgtatggaaaaatcctggagagtttgaacccacgccatttccacgtttgccaatggatgaaaattacatattgaattttgtgattgccacaacattggatgactcccccgtgacgggagggtatcgacatggggtcagcgttgcactttattatgatcgcaccgttctttgtgcctccgttggtagtggcgatgatattgctctcttcactgtgtcgccaaattcaggtggttactttgaagtatgcgcggcaattaaagcgttgattaacacatctatcgttagggcgactccgcaggccgttatcctatga

SEQ ID NO: 452963 - DNA, 408 bp, Serratia marcescens
atgaaagctgtgaatattaagtgttggaaaattgaactatttggcgagccgaaacagctagcctctgttattaacggggtaacgccatatgcagaaaacaggccattttttacaggatatgcgaaagattcggtaaatctggaagagcttcgggatgagctgtttattactattcattgcgatctcgatagcctggaaacccgcacttttcgtatcagcaggattcacgaggttaaatgctcaccaattcatgaggttgataactctttcgacgaagcggcaaagccattgattaaatggttggcggaaaatgtaaacccgcatcacaccgccatagtcaccagcaatagagcggagctgctgatgggggagtcggtagtcaacactgacgaatatctgaaagattag

SEQ ID NO: 452964 - DNA, 1227 bp, Serratia marcescens
atgactacacgctatttttcttcgctgattgaacaatcgttatctcgttcgacggaagctacgctgagcattatgggcgtaaccaacccgcatcttcgcgagcaccttgcgcagcagatggcggctgaatgtggaaaggaagggacatttctggcttctcccgtatttgaacaaacatttggctggaaagagtcaaatttcacgatgagggatcttgccacaaagcaaacgttactgagcaaggaggttgttgattctctcgataacaaagaaaacggacgttatcgttttggctcaacctggaaaccgttcacacatcagttagccagctggcaagcattacttgatacagagtgtttcatggttccggtacttgaggatctttatcgtgaactacgggacaacgagaaaaaaccgctaataggcgttagagcccttttcctttatcccctgaatgccctgattaattcacagcgtgaacgtttagatgcctggacccgaggttttggaaccgggattcggtactgtctgtataacggtaatactgaagagctgcatgcctcagtaaaaagtgagcaggcaaaccggccaaacgaagtgctttcgcgtgagaaaatgcgtgaggaacctgcgcctgttctggtcacaaacggtaccatgctggaatacatgatggtgcgtcaggttgatgcacctatcattcagaaatcaaaagcggaaaaatcattacgctggatagttctggacgaagcccatacctacgtaggttcccaggccgctgaactggctttacagctccgtcgtgtcatgactgcatttggcgttacacctgatgatgttcgctttgttgcaacatctgcgactattgccggaagtgatgcagaaaagcagctgaaaaaattcttatctgagttgtccggtgtgccacaggaacgtattgatgttctgggaggtagccgtgtcattcctgatctggcgccgtgccagcatctttctctatccctggatgagcttgagcatatccctgattctgatggagcgggtattagccttgagcgttacaccgcgctgacccattctccgcaagcgcgtcatctccgtgagatgcttgtgagtcaacccaaaccgatgaagcttgatacgctgacccggcgtttgaatgagctaacaaaacatcagtacactcagcaagatagtaagcgtacagcgagagccgtctggttataa

SEQ ID NO: 452965 - DNA, 468 bp, Serratia marcescens
atgacggcgttcaaagagcgcaccgtgaagcacagccagcggcctgagccggtggccggcatcggcaagaccgaacgctatgccgaacgcttcttcgatccgagcgtgcagctctcttctgacctgaaagacgacaaggggcgagtctttgcccgcaagggcgacgttatcaacccgctggccaccgtgccgttcgcgcagacgctgtatttcatcgacggcgacgatccgcagcaggttgcctggatgaaggcacagcagccagagaccctgatggtgaaggtcattctggtcaacggcgacgttcccaagacctctgctgcgctggacagccgtatctacttcgatcagggcggggcgctgtcgcgccggttcgggctgacgacggtgccggcacgcatcacggcggcgccgagcggcttgcgcctgcgtatcgaatccattcctgccgccggtagcgcgaactga

SEQ ID NO: 452966 - DNA, 1311 bp, Serratia marcescens
atggcaaagaaacttttcaaaaagaatcgttctaccaaattaagtggcactggcagcgtacgcataaccaatttgttgaacgccatccttcctcctgggccaaaggttgataacagcggcctcacgctggaaattaagcgtcaccttgccgttggtaaagatgagaaatatatcctcctgaatgtccctaaatccgttgcatatgatcgctatttaaaagcgcaagctgccatcgaaaactatcaagaattaacacgggaaagattggagaaagcaaaggctgaacgacagcaggatgaggttcaccgacatgaagatgagcgactggaacaggaacgccgtctccaggctgttgagcgctataaagatgaagctctgcgccttgccaatggcggggtgattgaaaagggtgctccgtattcaaaacagctcgctggactggtgaatgaccttctgaatcgtggtcttccagtacaggaaatcatcacaactgttctctactcatccatttttgaaaaatactgcttccagcgtgatgctgtcgggaaaaccaaaaagaaaaaaaaagccgctgttaaggcggaggacttccagcgtatggaggatcaatatagagagtcacgccttcgccgtgaagaggaggagcggctggccaataaaaagcgcatcaatgatgaagcctgccgtgaagatatttacgaagaattacgccagattgtaccggcccaccgattgcgcgaattccgcttacagttgcgcggcaccactgaaaatgtgctagaaagcgcccgtgattttatggttgcaggtgagcaaaaacaggcacaatcagcgccacgcggtgaggctatcgaaccggtagcagcgcaattaagtgttaaatcagtagttcccgttacagagtttcctgtgaaacctaagcgcgaaggcaagaaagcggagatcaccactcgccctaatcagattgaattcaccgagacagtacgcctgaactgttttaaccgctgcgtgatttctggtgttcgtatacgccaacgtacggaagcgactcatcttgtggagcactgtaaagacggtatcgaccattacacaaacgggctgcttatgcgcgttgacctgcaccgcctgtttgatgctggcctgcttgcgattaatccggagacgttaacagttcactttgacgcgggcgtattggcggacgatcacgacctgatgcaatttgaaggcaagtgcattgctggtacccagcgcccgattaatccggcttacctactgacccgctgggcggaattcaatctgaatgcaacgtga

SEQ ID NO: 452967 - DNA, 1767 bp, Serratia marcescens
atggataatataacacaatttagagaatacattgattattataagaaacttacagctcccggatacgcagttctcgttactggggaatggggttcaggtaagacatatcaaataaaaaaagctttgaatgacgatgaaatgtactatgtcagtctttttgacattacatcaatagatgatatttacgcttcagtattctacaaaatgtctcctgcgaaagcagttgcaaaaaaagcggctgaagatttaagtgatgccagcattggcacaggtgcatttacattcggcttaggaggtattgtcagtggccttgtcaatgcagtaataaaggaggatgtaaagaacgatcgagtgattgtatttgacgatattgaacgatgctcagtcaacattaatcaaatacttggagccattaacaaatatgtagaacatcatggatgtaaagtcgttgcaatagcccatgacaaaaaaataatggattcatttgaaaaatctaaagaaaaagtaataggacaaaccttaagagtcgaacctgatattagcgaggtatttaatttcttcacagatggcaaaatcatccctgataaaataaaagaagcaactttaaatgctttcatcgcatctgaatgtcgctctatgaggattttaaaacactctattaatgattgcgttagactattagaatgtctagaaagtaaacatatagaaagtgatgttgccatgcatgaaattttcactttctttatggtattatccatagaatatagatatgggaatttaaaagaaagcgacatagagcttagattagaaaagtcaataaaataccatgttaataaaagcaaagaaaatgaagaaccacctgcaatcgaaaaaatcagtgagtcctatagaaaaaaagggttaacaattgatttaacagcaagtatgttgagtgatagtacattaataaattgtttaacaaaagggtattacgaaaaaaataaaataatttccgagatagagtccagcaaatatttctctcaagaaaacatggattcctggctaattttaatgaactttgacggactacagcaacaagatgtaaaattggcaatacaagatatagatgaaaaattagaaaaccatttaatagttgatatcggtgtaatacttcacatatttaatttaaaactattaatgtcattaataaacgctcataatttgacttatagagaggtttacactcagctcaataattatctaggggaattattaaaaaaagatctaataccctttccgaatcctaatagtaggttttcaatgtttagagactcctcccatggttacggttattggatacgagatgaatatcgaaatatctctaatgatatgtttgatcttattgaatactatcaaaaaattgcaataagaagaaaatacccagattatataaaagaaatcattgatacaatgagtaacgatcctgataaatttaaaagattgatatcatctggctaccacgggttaggacagtacagttatattgatgtcatgagatatatcaaagctcaccaatttgttgaaatatggttagatgcacctgttagcaactggcaaaaaattagagaaggcttgcaggagcgatacagcactggggctttgcacaatcagctatctgaagaaaaattatggatcaagagagttaactatatccttcgaacacatgctgaaaaaaagactgggtttgaccgtctccgaatcgagagactaacctgtaaaatcgactag

SEQ ID NO: 452968 - DNA, 510 bp, Serratia marcescens
atgagcactgagaagctgagcgaactgagcaagccagtgatgtattcactgcgatttcggaatatgcataccggcgagactgataaaaaaatcaacgccaacaccactttctctacgctggagaaagccaggtcgtatggccttggcactaggtatgtaacgcaagacgacggcaagatagttaacgttcgcgatccgtcacaagaccctatcgttgagccgctttactcgcaagagtacgtctccgccctaaagcagcgcatcgccgagctggagcaggtgccgacaattaagcacatgcgtagcgttgaagagtccctgatccgcgccacggacatggtttcagagctggaaaagcggctggctacgccggtgcggttgccggaagcacatagcacgctattccggcagcatatccgcagtgattaccaatccctgcaggcgttcaaggcggatgaggtaatcgcagcattgcgcgccgctggcttcaccgtagagggggatgagtag

SEQ ID NO: 452969 - DNA, 690 bp, Serratia marcescens
atggctactcaatccccagctttagcacctgaaattatcgtcagtcacggccaggccgtcacaaccacccgatccgtttctgatttctttggcaagcgccacgccgacgttatccgccgggtcgagactatcgactgctcaccagaattcactgaacgcaattttgcgttgagtgattaccaagaccctaccggtcgcaccttacccatgtaccagatcacaaagaacggcttcgtcttccttgtgatgggcttcaccggcaagaaggcggcacagttcaaggaagcgtatatcgcggagttcgaccggatggagagcgagttagccagccagcgctatggccacaacacgcttggtgatctgaccggtaccgctaacctgtctgccctggtcgacaagctacaacagatcattcatgaaggtgagttcatccccgctggcaagcgtccgaactacagcctgccagcgaaccggaagcacgaagcgacaatcatccgcgacttcctgagcaaggatgacagcagcaccctgctcactctgcttgaatggctgcgcgccgatgggttcgatgtgtcggcggcggatcgggagctggacattatccggggctacgtcggcggcatgcgccgcgcgctgggtgacatccagacccacgcccgctacattgatcatcagattgggaagatgtaa

SEQ ID NO: 452970 - DNA, 258 bp, Serratia marcescens
atgccggagcaggcgcccagcaatgaaggcttgccgcgcagcatccactcggcgaaggtccaggagagaatggcgcccgcagtggcaaccacggtattgaggaatgccaaggccgcaatgccgttggccgcactggcggaaccggcattgaagccgaaccagccgatatacaggatggacgccccggtaaacaccatcggcaggttgtgcggtttgaaggcctctttaccgaagccggcgcgtttgccaatcaggtag

SEQ ID NO: 452971 - DNA, 1488 bp, Serratia marcescens
atgaagaaatccaaaccgtctaagtgcccttctagtgagcttgttgccaaagagtgtgttgactttatcatgcagtatccaaaggataagggtacgaatgatgttaaagcggcagtactcccatcgctttggtttgataaggggataaaacttaaaacggtcaaagctgcaatggcacctttccccgagttagatacggtgtcaatgcgtaaagccgccatgacggcagttagcacttcagattgtttagatcacaagacgcttagcaaagcagctcaaattgcagtaccgcccttttttggcttgggctcagagacaatacgtaaggccgctatggcagcggttagcacttcagcttgtttcgatcatagaacgcttagcaaagcagctaaagtcgcagtaccaccctttttgggtttaggttcagagaccattcgcaaaaccgctatggcagccgttagctcttctgcctggtttcatcatgagacgctcggtagagcaagcaaactggccattgattctttcactgcgttggatatgaacgcaatacgcaaagctgccgtggcagcggtaactgcatccgctcggatggacaaaaatatgctacttgcagcagcgagggctgtccctaatcctttccccatgctggatatgggagcaatacgcaaggctgccgtggcagcggtaactgcatcctcactgatggacaaaagcatgctactcgcagcgacgagggctgtccctgatcctttccccgcgctggatatgggagcaatacgtaaggctgctatggcggcagtaactgcgtctgctcggatagataaagaaatgttcctcaaagcagccagcgttgtaatgaatccaacggcccagagaagcatagatttagcctccttttctgccgaggaactatttaatgggatactaaagtggggatttgaacacggctacattcctggcgtttctgaagtatccgcagactcatctgtggtacagcagaacgaggtgataataagtgaggtggatacatcttcagattacggggaaaacgttaaagccaggttgttagaaacgttctcaaccctacccccgatagcacaaatgatagttttctggattgtcattcaagtcttcggtggcgctgtaactgactatgcgaaggaaaaggtgttgggccatattcataaaattgagctttacactttgtcgttaacgggctcaaaacccattgggcgtaatgatatcttgaaagaacgtaatgatattacgtgggagcagcttaatcagttcagagttattactggggagaatgtcaggttgcggaatgccccatcaatgcagggtgatataatcgagactctcaataagaatgctgttgtggcagtgttggataggcatggtcgccaatggttgtatgtacaagcgatattgggaggagagaaaattgaggggtgggtaaatagatgttatacaaaaccaattcgctga

SEQ ID NO: 452972 - DNA, 741 bp, Serratia marcescens
gtggggtttgtcgttgacgctgaaaatcgactagttacggtcgatcattcgcataatcgcttttgtatcactacaccagaaggcaaccccgcagagataatgctgggaacgctaaaagtaacctccatcttttcccgaacgaagggaaagcgcgacaggaacgatcctggtgacaatagtccgatgctttacgtgataaaggggctgcatgacctgagaacaaaacctcatgacattgcgatgttgtgcgccagctttaggaagatcctccctgcttacttagagagcggcttccggtgggactgggtcgtacctctgccgtcgagcagttctgtctgctgtcggtttgctgagaaggttttgaaacgctcgcagcaaggtgcttgttatcctgatgcgcttgttaagatcacggccgggcaggtgctggaaaacgtaagccatcttcggctcgcctcaagggacagaagccgtcttcgaaccgaagtgaaacgcttcataagcgcacatggcgaggacgcatcttttcaaattaaatcggtgaatgttggacttcggaatcatatcaacccaatgatgtgggggcatgtaccaccgggaacacatccaccgaaagcgattctattggttgatgatatggtcacttcaggggcttctttagtgaatgcggaggcaatactcaagcgccgttacccccatgtccaaatcgaggcgctaacgctgtttggctcgtccaggtga

SEQ ID NO: 452973 - DNA, 1242 bp, Serratia marcescens
atggtaaatcgattaattaataatatgttcgcagaattgcgggaagaagaaattcagtcatcccgcggttatatatgtgctgaatgcaatcgcagtgcctactacttttgtaaaaaaaacagtcagctgaattccgggaagcaatgcctgatgtgttcagcaatccggcctgatggcattctggtagaagatttcgagttcaccctgtacaaccatctccgttaccactatacccttgaggacagtcgctcgacagacaccattccgctgaaggacgtcctgaaacgatttacttacgataatgaggacttcctgacgccactcgccgcattactctgtaagccagacgataccttcttccaggaggacgggtggtacaaaaatatcgtcgatgaggcttttatagccacgtgtacaaacgacgcaatccgggaatgggaaactatggcctatgaactgaaacacgtccggcgttttagccattcagaagcatcaaattactatgcttccctcattggttcatgtgtccgcatagttgagaaagataatgaaaaattcaacacagcattgacgatcctaccaaaaggggaggcattgtaccggggacgtatcgccaaggatgatgaagaaaaagaggctttcctttcagacccggtcaagaaactgtccgcaccgcctaatcatctggccaccaacaaccgtatgagccccccaggcatagcctttttgtataccgcgagcgacgcagaaaccgctatcgcagaacttcatccgtttatcaatgacaccgttgccatagggcaattcgtcacaacccgggatctacatttttttgattttacgcttctggaaaatgttgcttacgctgatgcccatattctcgacaccccgagtaaggataaaacgttcaagaacagatacctgatgaggacgcttcatcgcctgatcgccagacccctgcgcgcgaatgacaccagttatattgagacgcaggtgtttgctgaaatcattcgtggctacccgggtgaaagatatgatggcattatttttagttcaacacagcgacctggcggacgtaactatgtcatcttcggagagagtacagccactgacggcccgactgggaaaaggaatgagtatcctgttgagtttaaccatgagcaaggggtgacgctgtaccaaataacagaaatgcgcgctcagacattagtagtgccgcatagggaccctgtgaattcataa

SEQ ID NO: 452974 - DNA, 585 bp, Serratia marcescens
atggataacaaagtaaagaagcccaaaactgcagcatcacccaccctgacggtgcgtcatattcccgctgatgtcgatgcggccatcacggcacaggcgaaagccgccggcaaatcaaagagtgattttgtgcaggcgtttctgacggcaacgtttggcaatctgattggaaatttctcacgcagcagcgagctggtcgccctgatggaccgggagctgtcgtccgtcaccggcctgccactgacggaaagctggtatgatgcaggccacacgctggcggataaccgggaatactgtcgcctgctgcggatcggcagtgaaggcgatttgcagcgtatcatgatggcggccgtaccctggttgacgttgcgtgcgcagcagctggctaccggcattccgctcctgccgcaggggatctcgctgacctgcgccctgtttatcgaggccaccggtcatgaactgccggcgctgaacgtgttccgccgtcatctgttctggtatatggacgaggcgcagttccgggccgatgtagatgccatccggcaagcgcgtttgctgcccccgctgacgtggccggagtactga

SEQ ID NO: 452975 - DNA, 1956 bp, Serratia marcescens
atgattgctggtgttttcatcagaaactttaaaagctacgaaaataataatttcatccctttcctaacatcaagtagcgatagaatgacaattttcgctggtgataatggagcggggaagtctgcaattcttgaaagcatgaattgtttgatgaacaacttagatagtaaagagtgggcagtaactattggtcagaaaaaagatagggttagtatattcccggtttttttgatcaagagagatgaatgggatccagatgggagtaatataccgcagctatcaagaatatcttattatttttgggagtatgatttttctgattcatctaataatgacacaacgaaaaaattcttagcatataggagtcaacttaaaacctggtataatccagaagagtactacttaatatcaataggaaaggattatgatggaaatatattattaacaacaacgtttcataataaaatagctaattctacaaaaaaagatggcgtttccaaggataaaataaacactatttttaaaaagataatcgaaagatataaatatatttatttaccagtggagaataaaataagtgatgctttatctctgcaagctaatgaattgcaagggatgatggataaaagtgttgcagatgaaataagaactttgttatccaaaaaagatcagattcatattcagcaaggaagtaagaaagtaagtgttattgatctaataaataataagctagatagctacatagaagagttaaacaagaaaatacctaatggatataaattcgagtatcgaggggctatcaaaagacaaataaaaccatctgatatactggatgcaatctttgctaagtatttctctttacggccattgtcaaaaaactctaagcatataaggaatttgagctctggtgaacaaaggatagcgctgatagatatagcaacaactttactttcaacgtcagaaaaaactaataaagaagttattctggcaattgacgagcctgaggtttcattggagtccgcacatagatttgagcaattttcaacgttgattgatctatctgaaaatttcaaaaggcaaatattcttgacaactcattggtatggtttgattttacgtccaatgaaagcagggttacattacattgtcaaagatgatgattcgacaaagatacaagcatttcccttgattaatattcaggagagcagacgttcgtttcctaattcaatagaaattagaagctacttcgacctgatggcatcgatgcttacactgctaaaaaaaagagagtataactggattttttgtgaagggagtgaggactacttatatttaaatgcatatttgaagaatagtatacctaatttatttatattgccatttaatggttgtggtaatatcaagaagattttcgatttcttgcatgtgccattttctgacaagcaagagaataaggagataaaaggaaaggttttgtgtttgattgataatgatactaaaaacattattcgttatgaagggtataatgcatctttgtacaagaataaattgggttttttccgtttgctaatagataatgattcctccgacataatcacagtcgcgaatacaaatgcgataaatacagagatggaggatttactagagccaagtttattttatcaatccatagtgaaaattgcagatgaagatagtgatttagcagactacctttccaattatgagttggatgaaagtaaaaaattcacaaatctaagtgccagtttgtcatttttacgtccaaaaaatgtaaaaggctacgaaagttgtcatgcgttttaccaatatttaacgactaattctatgaaaagtaaaatatcagagaattacaccaaagatatatctaaaatccatattagggatgaagatgtttggttgaaaaaaatagttaatttttttgtaacgaaagaggcttag

SEQ ID NO: 452976 - DNA, 630 bp, Serratia marcescens
atggacattgcattcgagggcgacctacatgaacgcctgattgaaattataaacttggaacagacgggaaaaattcaggtcagaaaagatcttgctattggctcgacctatttcaagttgcagcccgaatactacaatggaaacggcattttttttaacccagaaagtgaaaaccgtttctcgctgtccgacaagtcaaaatggccgatgtatttggccgactcgcctcatacggcactcagtgaatctcaccaaggtgaaagcttcattgatcgttcggactttgaaactaactgcatggccgaaatttcgacggtaaagagcttgagggtttttgatgcaacccgactggctccccatctgaggctcaccgtcggtgacctcatgggaccaaaagctgtatacagttttacccaagagttggcaaaagagctgtcaaaatatgcagacggtttagagtatttgtcccggcacacggggaaaacgtgtgtagtgctttggtctgatgtggttgacgggggtgggatcctgtcgacggtatcagtaacacctttgaaccagtatgaatatcagggcaaaagtgccaagcagattctgaaggccgagtgcaatatccaggttgtagggtaa

SEQ ID NO: 452977 - DNA, 345 bp, Serratia marcescens
atgacggcagccactgcggcttatcagcacggcgaggcctggcttgacgatttgcagcgctatctggctgagaaccggcgctggtttgagcaggcgttaagctatgccgcgccctggtgcaaaatgacccgggcggaaggcacttaccttgcctggctggattgtcgcgccctggggttggatgacgatgccttacaacaggcattgatccacacatcgaagatcgcgccctcgatgggccgcagctttggctcccaggggaagggatttatccgcatcaatctgggctgccctcgtcagtacctggaagacgcaatcagagggttggccaaacttaccccttaa

SEQ ID NO: 452978 - DNA, 405 bp, Serratia marcescens
atgacaagccctgatacccctcgtgccaactactccatggagttcaagttggccatggtcgagaagtccctccaaccgggcgtcagtgtcgcactgctggcgcgtaacaacggtattaacgatatcctgctgttcaaatggcgccgtcgctatcgtcaccttatcgagaaacctgcggagcagcatgctgacgcacccgttgtcatcgagaacaaggttgttcctgtggtggtcgaacgcccgcctgcgttgctgccagcggcttctccggcgccagcaacaccgccaaagcctgagcaggtctgtgaaatatccattgggcgggcacgtctgacgctgtccggtaacctcacgcccggcatgctggcgacgctggttcgcgaactgaagcgaggtcgccggtga

SEQ ID NO: 452979 - DNA, 348 bp, Serratia marcescens
gtgatatcattccctgcgggctcacgcatctggctggtcgccggcatcaccgacatgcgcaacggcttcaacggcctggcgtcgcgcgtccagagcgtactcaacgacgacccgttcagcggccacctgtttatcttccgcggacgccgcggcgacatgataaagctgctttgggctgacgaggatggtctgtgtctgttcgtcaaacgcctcgagcgtggacgcttcgtctggcccgccgtcagcgacggcaaaatccacctcacgccggcacagctggccatgttgctcgaaggcctcaactggaaacatccgcaacgcgcacatccgtctggtctgcgcgtataa

SEQ ID NO: 452980 - DNA, 441 bp, Serratia marcescens
atgaacaccaacaacgtcaacgtcaaaaccgccgctgcagaatctgccgagatatgtgaaaaggcaggaatgtgcgaaccagaggccccagagccgtgggaaaagcccggcgtgcaatatcccgccgccgttcgagcgttggaaatggagttttgttatttagacgacctgaatgacctgtatgcgcaaagcagcacgtcacccgacgagctggagcaggcgctctatgtgattttcggccggatgactgagcttgtccaaagctgcggcgctgattataagcagccggacaaaccgcgagttgcctacgaaatgatccaatactgggtcagggggcaacgggttgcacagcgtgacttcggggagatcggtcagcgcgcctgggagcatgcacgttacagactggcgcaagagatggcggtggagtattcgtacaactga

SEQ ID NO: 452981 - DNA, 474 bp, Serratia marcescens
atgaagacgatcagagcggagattttcgagcagctccctggcaagttacccgcggcgaaatacctgcagcccggcaaatgtgctttccatgccacaacaggctctcgccggcttttcattggggagacaactcgtcaatactggacgcgcgaaaagtatgaaagcccagaggtcgggaacacggaagcctatgttaactacacattcgctcaggcatccggggatcttgctccggaggaaagagaggttcccatttgcctgaagggcgaagaaggggatgagcatacggcggtgctttgctatatgacgttgccggtgaaaaatgagggggttaccacagaagaattcctggctgaagttgaagataagctgacgctcacgctggcggtacagtatgtctatgattgtctggaagcggagcgcagagagcgtgcctccggacggtctggagagattttcatcaatgacttctga

SEQ ID NO: 452982 - DNA, 294 bp, Serratia marcescens
atgaacacacagaacgtcaacgtcaaaaccgccgctcaggagccctcggaaagatgtggggagaggctgaacgctatctgtcagatcgatatgccaattttattgaaggaatgcctgtatgtcctgaatgaaataacgaatcgcagactgccgcgaggtagccgttatcccgatacatatgcactggcctcggccattgaggccgttttacgggcggttgaacaagaacaatcagccgcaattcaacgtgagcaaaaggaggttttcaaccaaaaaacgcaaatccgtaaatga

SEQ ID NO: 452983 - DNA, 261 bp, Serratia marcescens
atgactattgaagtttcaatcattacatcaactgactcttatgtaaagcagttggtggcaaatgacgaagcgccaaaaaagcaaacccgcatactgcgggacagcctcgaggctacggcagttaaacctgaactgcgtgcattggggcggcatattgcaaaatgtcagcgtaaacgccagccggtacgcattccggctatgcgcggtagtgagctggggcaggtattacgcacgttagaactgaaacgggcctacgcctga

SEQ ID NO: 452984 - DNA, 882 bp, Serratia marcescens
atgacattttcaaccgtagaacagacccgtgataacgcgggcgtgatcgcagatattaccgttaatccttcccaggggggggaagttattccctctgtatcaattgaccgcattattgcgcagcgaaatggcggcattgctcaattcatggagggaatggcattgatccatacggctgctaaacagctttcagaggcggccaacaaagaatatttgtatggttacagcgacgtggtcaaacaggcgttggattggcgaggcaaaccagaaaaatacggtgatgcggttgccaagctgattgatcggaaagtttgggatcggctgctgagtgataccggtatgtacacgctgatgagcagtaaacagcgggatgagtgggatcgccagctgaacagcaaggattgcccagaggtcacgcttgatacggtgctggcgacgttcaaacaacttaatgccgataagactgttacctttgagaaaggagtaatagacgtatttcgtagcttgtcatgggactacaaaaccaacagcccatgccgccttgggaaaaagatcatcgtagaacgctttctcagcacatggcggcacaggcaatcaagtttcacgtgggaagggcaacaactgctcgatgatctggcgcgtccattttatttgcttgatgggaaggcggtgccggacttcaggtcaggggacggtcaaaaatacgctgatttctttggcactggcaacaaaatcagcgaattgtgtgatcttgaatattttaccgtcaagggctttgccaaagggactgggcatatcgtttttaaacgccccgatctggtaaataaaattaacgatatcgtggcgcgccagttcccagggatgttgccaccgcgcttgtaa

SEQ ID NO: 452985 - DNA, 855 bp, Serratia marcescens
atgaaaatcgaaaataaatctcttaaagttgggcagaatgtttacaccaatctttacgggtatggccgtggcgtaattttcggggttcatggtgagcctctaccagaaaatgttataaattttccaggaaatgaaatggttcatggagaaagaattgatcttgatgttgtatttcattgcggaaaaattcttaggaatgtgtctgaaagcgttttaaggggggttcagtggaagatctgtgatgatgtgtgtacgccgtcagaactagatggaattctatctgccgctttacaggaagagcgtaggaatgagaaagccaaaaaagatatgaaagaagcctttgaagaagaggtcaggagattaaaatctgctcctgagttcactaaccttaaaaaggtagaaagtaataacatcagcgttgcggcagtagtttcttcaaacattcggttattgcttaagaaatatttttcagatgttaagtttaccgtaaagaagacaagctataattcagtatcagtacgttggactgatggcccaacttgtgacaaagttgaggagataacagggaggtttaagagcggatattttaacagcatggaggatgtctacgagtataacgaaagtccattcaatgttgtctatggtggtataaatttcatttctatagacagagtttacagtgatgaactcatcgataaagcgatatcgatgtgcagagaaatttatggtgataaggttcctgaatgggctgatgtagattcctataaaaatggaaagttgttcacggtaaatgttaactcattgttcaataataacttgcaaagtgaaatcagactcaagctaaaatcgttttag

SEQ ID NO: 452986 - DNA, 1077 bp, Serratia marcescens
atggaaaaagataaactggccagtgttcaagcgctgagagggcttgctgctcttgctgtaatgctatttcactttcgttggaatattaatctttcctatcctaatttaggggataaattgtttgggtggggggctattggtgttgatgttttcttcttgattagtgggtttgttatcacgctttcagctaagaagttaactccaggactgtcggctgcgggggtgtttctgaaacaccgcgtaagaagaatatttccagcttattttattatcctgctaatttccttccttttgtctggggctatgagtacctttcattacccagaaaaagtaagtaacttgataagtgcaatcaccttctccccaattgatccgaatcatgctccattctatatagatgatagtggtttctatggagttcggtggacactgaattacgagatgttattctacgtggccatggcattttgtctgctatcaagatatcgatggttccttttgtttggtgggttttcgttaagtctggttgttttccctatgttggcagggcattctccgaccttggatgtgagtggttatcaattcaactctgcttacatgaacttaatcaccaacccaataatatggatgtttttggtaggggtagcctttgggcttatctatccttatacaaaaactttaaataatcatgttagagttattttcttattcgtggcgatgtccatcgcagtttactgcgttctgtatacatcattgttaaatcatggcataacgatgtctggatggtatctttccattttgtttattgctgtggttctgaatgataagctgataactaaattcatgccgaggttcttcgttactttgggagagatatccttctctctatatctcattcatactttaatgaacggagggataggcaaacgttttgaagatataggtgtggctgatggcataccacgatttttgttgtcatgtgttttttctatcgtattggcatacttgtcatatgtttttattgaaaggccagtaagtcgacgaaaacaaaaatcagcaagccataaaatggcataa

SEQ ID NO: 452987 - DNA, 378 bp, Serratia marcescens
atgaaaaagaaaataagtctggcgatagttatatttattctgggatggtcggctgcagtgggatatctgagctggcgatatgagtttaatttttccccgtggcaaggaaaagacgccgatgtgataaaactgacgagttcagtttttgtaatgcagtgcatcagcgaaaacaacaagttgataaatgaagtggaacgtggtgaaaaaccactttcagcttttaatgtggtttatttttcatgcatttctgaccgggcggaatcactcagaagtaaattatcgctcacggtgaatgaatataactatttaggctgtatagaaaaggctgaaagtgaaatctggtccggagagaaatgcaacaaagtgataaatgagtga

SEQ ID NO: 452988 - DNA, 642 bp, Serratia marcescens
atgacgcagaggatgaaaacagcgaaagaagggtggttcttcttggttaagcttgcttatggtttattagcactaccatttctactatttgtagctgttatctatacattcatgtcatttgactctgggttaggctctcaacaaggtaatgccattatcttcacgtccattgtttgggcggcggtgattattcctgttggagtgtttttcttctcggttattaataagcgtcgccttttaaaaatcatcactaacgacattaagcatcccgactactttatgccggagcaaggctatgagatgtaccatgaaggtgatggtaagtacctgggcattgatatcaaatgtggcaccatcctttacgtgcaccgcattcgcaaaggtgaagtcgacgttgttgggctggatatgaaagactggaccaatcgggaagtggaaggaaagatgttccgtctttacaccaaactcccggaattgccccgtattgaaatttccacgccgtgggcccaacgctggtttgatacgctgggttctatggagttcaagcaatatcagccggcgatgccgttctctgagtatgttgatattcaccgtgagcagctggagcgtgaaaaccatatcgcgatcccccgcctggcctga

SEQ ID NO: 452989 - DNA, 537 bp, Serratia marcescens
atgtcgcatcgggtgatggccatccttggccagctgacgccgcgactggaagtgtattcaatcgatgaggctttctgcgatctgactggtatcccggccgcgcagctggagtctctcggtcggcggctgcgtgaagaggtgcagcgccgcacccacctgacggtcggcgtcggtattgcgccgaccaagacgctggccaaactggccaactacgccgccaagacctggcacaagaccggcggtgtggtcgacctgagtgcgccggcgcgccgacagttctcggtggtgatcgagcgcacggtgcgcgagctgaacggcatcgcctgtctgggcctggaggaatttgcggcgccgaaggagcaaatcgtttgctcccgctcgttcggcgacaaacccaccgagctggacagcgtcagtcaggcggtctgcgcgcatgccgagcgcgcggcacaaaagctgcgcggcgaacggcagttctgccggcacatctcggtgttcgtggccaccagtccgttcgccgccggcgagacctattag

SEQ ID NO: 452990 - DNA, 1437 bp, Serratia marcescens
atgtctgagaatttatctacggccaatgaaaatttgaatgcctttattcatgataatgataggggtaatgggaagtatgttggtggcgtggtatccaaagatattgatgatgcaatgacatctttactatatagagcacaagataaagccgttgtggcaaacggattatctagttgggcaaccattaaaaacacacagagaggagatatcacggaaattacttataagtttatagatggtgatggtaaaaatatcatttcattcaatgatgtagcacgagaaacattccgacagtcagcaaagcagtgggcggaagtggcaaatgttaaatatattgaaatcactgggaataagaaggctgatattgatgtctatgtgaataagggaatgagcgcggctggaggtggatcattcccgggttctggggagaatagtcaggactttgttcgcgttaattttcagccaacagacagtaattactcccatcaactggttactcatgagcttggtcactcgcttggtttatcacactcgttcactctcggcaactacgttgaaaacaccaataattatagtgttatgtcttatagcactgcccctgatcttgctcaaggagactattcagcctggccaatagggccacaaatagatgatatcgcggcagttcaaaaattatacggcgcaaataccacgactcgtagtgacgacactgtgtatggttttaactccaatacaggagaacgtgaattatctttctcaaatgaagtcaaggagttaaagttgccattcagtatctgggacacgggtggtaatgatacgcttgacttctcaggtttttctcaaaatcaacgcatcgatttgaacgaaggaaaaatgtcagatgttggcgggcataaagccaatgttggtatagccatagggactattattgaaaatgccataggtggcaatggtaatgatatcattattgggaatgcgtcggataataaaattgatggagggaacggtgacgatattatttacggtggtgtagggtctgattttttaactggtggtcaagggagtgacacgttcgtttaccgtgcgtcatccgattcgatattgagtgggttagggaaagatgcaaattcaggtggtattaaagatctgtctgaagtcatttcaataaatgatttgtcaggccgttatgataccatatttgattttaactctggtgaggataaaattgatttgagttacctatctaaaaatggtcagtttgacttcagtcttgttgaacattttagtggaaaggccggtgaaatagaattgcaatatttctcagaatccaatacaaccttattggctgcaaacattaacaacacgcaaactgtcggtgcggactttgcaataaagataattggtcatgtagattatgttaacgatattttagtgtga

SEQ ID NO: 452991 - DNA, 285 bp, Serratia marcescens
atgccgactgaaaaccgctccccggtgatttggcaaccctttaagcgggcagtctaccgcctcgacgatacgttgtcagaagaagaccgccgggctatcagcaccgctcacgggcgcacgctgtatcagcagcgcctgcctgtcccgccgttattgcagccgctggtcgatattgcccggcgcagcggagcgagcgggcggatagtccgggtgaccatccaggctatcctggccgaaatggcccgcctgaataccccctgtcaccactggacggcagaatgctag

SEQ ID NO: 452992 - DNA, 159 bp, Serratia marcescens
atgtttgccctggttgacgtcaacagcttctacgcctcctgcgaaaccgtctttcgccccgacctgcgcggccgtcctgtggtggtgctgtccaataatgacggctgtgtcgtcgcgcgcagccgcgaggcgaaagcctgcggcatcaagatggggtag

SEQ ID NO: 452993 - DNA, 582 bp, Serratia marcescens
atggggctgctggcccgcatgatgagccaggcgatgcgcaagctgaagggcagcatcaacaccacccgcacggtggtgatcttcatcaaccagctacgcatgaagatcggcgtgatgttcggcaaccccgaaaccaccgccggcggcaacgctctcaagttctacgcctcggttcgcctcgacgtgcgcggcgccggcaacgtcaaggaaggggagaccatcatcgggcgggataccaaggtgaaggtggtcaagaacaaggtctcgccgccgttccgccaggcgcagttccgactgctgttcggcgccggtattttccgcgagggcgaagtgctggatctggccgtcgacgccaaatatatcctcaagaccggcgcctggtacgagtatcagggggagaaaatcggccaggggcgcgagaaggccgccggctggctgcgcgaccgtcccgacgtggtggccacattgaccgcgcagctgcgcacgcactacctgcaggcggcgctgccggccgcggcttcagccgacgcgtacacgcccccggatgacgatgcctggcagagcgtaccggaggccgtgtga

SEQ ID NO: 452994 - DNA, 1986 bp, Serratia marcescens
atggcaaggaggcagattctttctctatcggaaagagaatcattactggcattaccgggcgatgagttagcgcttatacgaatggcatatttgagtgagcatgatctggcgcttatcagtgctcaccgtaaacccgccagccgttttggttttgccgtccttctttgctacctgaaaaatgtcggctttgccccggataagaaaatcccaccctctgatgcgctgcttaagcatatcgccagcaggctaaagcttaccggggatctctggtctgcttacctttccggcagggatacgacccggcgtgaacatttaaccgaactgtaccgctatcttagcgtaaaggcgttcaccggcaaaatacagcaggacggtattacacacctgctgccgatggcgacgcgcaccgataaaggtattctcctggccgaagaactgctggtctggctccggaagaacaacgtgataatccccgcgattgatgtcgtggagcgtacctgtgcggaggccatggctggcggcgataaaatcgtatttcagaccctgaatgccccgttaactccggctcacagggatgccctggatcgtttacttgagtcatcagacaatcagccttccaggctgacatggcttctgcaaccgccgggcaaaatcaatggtaagaacgtgctgcaacaccttgatcggctcagcagcattgaatcgctggcattacctgaaggtatagatcgtaccattcaccagaaccggttgctgaaactggcgcgggaaggccgaaagatgagtagccgggatttgacccgattttcagcagccctccgtcatgcgatcctggtctgcgtgctggaagaagccagggccacgctgacagacgaagtgattgagctgcatgagcgaatgctgaacagcctgttcagcaaagccaaaagaacacaggctgagcgccttcagcagaccggaaaactgatccagtccaaactgaggcagtacatcgatgtcggtcaggcgctgtctgatgcccgcgattccgatggcgatccatggctcgcaatagaaaacatactccggtggcccgaatttgtcgccagtctggaggaaacacgccatctcgccagaaaaaataattttgacccgctgcatattattactgagaaatacagcacattaaggaaatatgccccgcgcatgttgtctgctttacagttagtcgccaccccggcagcacaacctctggatgatgcgctggttgtgatcaaggatatgtaccggaagcagtcacgtaaagttccggcgacagcaccgcttgagtttgtccctgaaagctggcgcaaggtggtgattacacctgcgggtattgaccgacagtattatgaattttgtgcgctcagcgagcttaagggagcgctgcgctccggggacatctgggttaaaggctcacgccgctacaaaaattttgatgattacctcattcccgaaaaagactttgacaacctcacaccggcgctgcccctgcccgtatctgctgattatcatgagtacattaccagccgcatgactctgcttcagtccagacttgaagaggttaatgctatggcagcccttagtgaactgcccgatgtggaaatatccgacaggggcgtaaaagtctctccactggataactgcgttccggtgcaggtttcacccctggcagatctgatttacagcatgctaccgcgacctaaaatcacggagattctcgacgaggtaaacagctggacgacgtttacccgtcatttttcgcatataaaaaatgacatcacccgtccctatacccgcctgctcctcaccaccattcttgcggatggcatcaatcttggtctgaccaaaatggcagaagcctgcccaggtagcaccaaatcatcactcgaagatattcaggcatggtacatccgcgacgaaacctattcagccgctcttgctgagctggtaaatgcacaggggtaa

SEQ ID NO: 452995 - DNA, 726 bp, Serratia marcescens
atgatgcatctgctgggatttgcgttctgtccgcgaatcagggatctccacgacaagaagctgtttatcaaagggaaagcggaccagtacccggcgcttcagtcactgatatcaacgaccagtctgaatctgaaagatattgaacttcactggcgtgaagtgctgcgtctggcaacctcgataaagcagggaaccgtgacggcatccctgatgctgaaaaaactggccagctatcccaaacaaaatggcctggcaaaggcgctgagagaaattggccgcattgagcggacgctgtttatgctcgactggttccgcgatccggtacttcgtcggcgggtccaggcgggactgaataaaggagaagcccgtaacgtgctggcgcgcgcggtattcctgcaccgtctgggtgaaatcagggatcgtaaaccggaaaatcagagccaccgcgccagtggactgacgctgctgacagcggctatctcgctgtggaataccgtctatatggaaagagcggtcgatgccctgaagcgtaaaggggtgaagatcaacgagcaactgctgtcacatttgtcgccgttaggctgggagcatatcaatctgacaggagattatatctggaaaagcaaccgaataccggcttcaggtaagtttcgtcggctgagacccgctaaagtcgaaaggtcaaaaaaagccttaacgtacaataattttcgatattcaaactga

SEQ ID NO: 452996 - DNA, 537 bp, Serratia marcescens
atgacatcaggcgtttttgatagagaaccgtcgcggcgggacgatgctaattccgtttcagaatcacaaaaagagtttattgatttagcgtttagattatcattaattgatatcattactaatgaaaataattctcctgctatgattgtaatggagacaccagaggctagcttagatagcttatttatgcataatgcaggtagactctttcgtgagttttcatatgcccaaggtcaacgaaatgtattcctcgccagtaccaatctaaataaaagcgaaatgataccaacgctgttaggttctataaatccaccaaaaatctttgataaaactgatatagacttgatactagatagggttggtgttgaagaggatgaggtagaagttggagtaattccacctaatcagcgtgctaatcacataataaacctgttggagttatctgcaccaaatctttcgttgaaaactcacagagatgagtattttgatatgtataataaagctgtatatcctgaaggaggcaaaataaatgaataa

SEQ ID NO: 452997 - DNA, 1005 bp, Serratia marcescens
atggccggagttttccgcaccgatgcgccagcccaactcctgcaacttctccagcacgtaacggtcgcccactttggcgcgagcgaacggaatgcccagctgtttcagcgccagttccagccccatattgctcatcagggtgccgaccgcgccaccgcgcagctgaccctgacgcaggccttcgcgggcgatgatgtacaggatctgatcgccgtccaccttgttgcccaggtgatccaccatcatcacgcggtcgccgtcgccgtcgaacgccaggccaacgtgcgctttttcctgcagcacgcgctcctgcagctgacgcacatcggtagcgccgcatttctcgttgatgttcatgccgtccggctcaacgccgatggcgatcaccgtggcgcccagctcgcgcagcacgctcggcgcgatgtggtaagtcgcgccgttggcgcagtcgaccacgattttcagccctttcagactcagctcgctcgggaaggtgcctttgcagaattcgatatagcgacctgcggcgtcgatgatgcggctggctttacccaactccgcggactccacgcaggtcagcggtttttccatttcggcctcgatcgcttcttcgacattgtccggcagcttggcgccgtcgatcgagaaaaacttgatgccgttgtcatagaacgggttatgcgaagcggaaatgacaatgcccgcttcagcccggaaggtacgcgtcaaataagccaccgccggcgtgggcatcggcccggtgaaggacgcggacaatccggcggccgccaggccggcttccagcgcggactccagcatatagccggagatgcgcgtatcctttccgatgatgatcttgcgggaaccgtgacgcgccagcaccttaccggccgcccagcccagcttcagcacgaagtccggcgtgatggggctgtccccgaccttgccacggatgccgtcggtgccaaaatatttgcgctcgctcatgtttctactgtcccttag

SEQ ID NO: 452998 - DNA, 336 bp, Serratia marcescens
atgtacgaagctcttctggtaattttcctgctgatttcaatcgggctggttgctctgattatgttgcagcaaggtaaaggcgctgatatgggagcctctttcggagcaggtgcatcaggcacgttgttcggttcgagtggttccggtaactttatgacccgcatgactgctgtattggcgacgctgttcttcgtcatcagcctgattttgggcaacctcagcagcaaccaaagcaagaaaggcagcgagtgggaaaatctgggtcagccggtgaaaactgagcagacaaccgcgccggcagcacctgccaagccgagcagcgatatcccgcagtaa

SEQ ID NO: 452999 - DNA, 912 bp, Serratia marcescens
ttgaccgatgtcagcgatccgcagttagtctttgagctgttcgaaaaacttcgcaccagcggcattttcctgtggaacgaagtggagcaattctgcgaagcgttcttcaccaagaacaaatccaatgctgcgataagcaatatctgcaagccggcggttgagcgctggaagcaccgctatacctcagcgattgatgcctatgtgttggctaaagagatgtttgaacgcaccaagaagaccggcgatgtggtgctgataactaatgcagaaaacagctttaagacgtgcaaacaggaaaaagacaagctggatatcttcaaaaaagatctcggtagctttgttcgtttttatgagtttatgtcgcagatcgtagattacgatgacaagggccttgagaagctgagcctatttgctcggcatcttcgcccgttgctgcatgaacaacgtattgaagacgatgagattgatttaagtaatgtggatatgagccattaccgcttatcgaagcttcatgaacaacatctgaagctgcaggaagatgcggaagaataccaaatcacaccgggtaacgatatgggtacagcgaagccaaaggacaagaaagaagagtttctgtccaatattctggcgcgcctgaatgatctgtttgttacggataatcttagtgataaagacatgatcaactacgcctttaccgtgcgtgacaaactgtcggaaaaccaggcggtgatgacgcagattgctaacaatacgcgtgaacaggcgatgctgggtgatttcccgaaagcgatcgatgatgcagtgatggacagcaacgaagcccagcatgagatgatggtgcagtatctgtccaaccctgaacttgccaggggattcgcccgcgtggtgtttgatatgctcaaaggtgcttaa

SEQ ID NO: 453000 - DNA, 2067 bp, Serratia marcescens
atggatatcgttgccgatattgaagcaggtaagctgactctcgatgaagtgatcggttctctggccgaatataaagactattcgcattcagagtgggatcgtcgttaccgtgaattcacggcgtcacttcagcaaacgccgacattttctgagcccgaaacggatgatctggttaaacggctttggtacgagcgtgataacgggattgccagtattcggcagggtgttccatcgttggctgaattccaacaaagcctgccgttgttcagagagctgaccgagcgcattcgtcgccagcctgatgaacaaacttaccaatatgtagaagccgctttgcagcaagctaaggagagcgggctgctaaagcgcatgtattggagcttgcggaatcgtgtctttgcggcgtttacgccggcaacctgcaccagcacggtggacgagaatgcatttaccaaagcggcgacgtttctgaatgatcgattttccctggcgctcgcgcttaccggaaattggctgcaaaaaaaccatgaactgaagaatgcgattaacgcacggttaccagatgcggacccttactatgtcaacatggcaatctggcatctttacgaattgctgcgtgagcgcgatggcgagcagaagcaacaggaagtggctaaccatcctgccgtagaaagccataaagtcgtgagcccgcagataccgcagcactcacctgttaacgctatctactttggtccaccgggcaccgggaagactttcgtcttgcagcaaaagatgaaggagtacaccacccaagcggcctccgctgactatgatgcttggttagattctcgtctcgaaacgctgaactggatgcaggtgactgcgttagttttgttagatcttaatagaaaagccaaagttcgtttgctgattgagcatccttggttccagcgtaaagctctactgaatggccgcagcagtaatctatcgcaaactgcgtgggcaacgctgcaatcctttaccgtgccagagtctactacggttgaatataaaggccgccgtgagcccgcgattttcaataaaacggcagagagtgagtggttcctggttaagccgcagctagaacaagtggaagaccttatctcgctttatgatgagttaaaacgaggcccacaaaccgcagaggctattcagcgatttgccgcagtcaccttccaccaatcctatggttacgaagagtttattgaagggatgcgagcccgtgcagatgacaatgggaatatttcttaccccatagagccgggtattttcatgcggttatgccagcgggccaaggccgatccggcgcatcgctatgccatttttattgatgagatcaatcgtggcaatatctccaaaattttcggcgagctgatttctcttatagaaatcgacaagcgggctgggatgagcaatgcaatgagtttgcagctgtcttatagcggccaagtattcagcgttcctagcaacgtagacattattggtgcaatgaacaccgcagaccgttcgttagcgctgatggataccgcattgcgccgtcggttcgactttattgagatgatgccggatctttcattgctcagcggggcgaaagtaaaggggattgagcttgagcctttgttagagaatattaatagtcgaatcgaggcgctctacgatcgtgagcataccttagggcatgctttctttatgccagttaaaaaagcctgtgatgcgaaggatgaagacttggcatttaaacagctgaaggcagccttccagaagaagatcattcccttattgcaggagtacttctttgatgattggaataaaatccgtttggtgttggcagataatcagaaacaaaacgacagcctccaattcgtgatggagcaaagcgacgatctggagatactttttggtaccgatcatggtttacggcgtcacgatcagcaatcaaccgcctacgaactcagagcgtttgagcacgaagtctgggatttgccacaggcttaccgtgcgatctatcaatctgaagaagctacccaggctgtacaaaatgggtaa

SEQ ID NO: 453001 - DNA, 1398 bp, Serratia marcescens; identical to SEQ ID NO: 438416

SEQ ID NO: 453002 - DNA, 231 bp, Serratia marcescens
atgcacaatcccagccccgccatcaagatcaccgagcggcagcccaatttgccggtcaggaaaccggtcagcggcatcgccagcatggagccggcgccgatacagagcagcaacaggccgagcgagccgtcgtcgatgccgatgcgcgctttggcgaaggggaccaacggcgcccaggcggccatgccgagaccggcgacgaaaaaggccagacgggtggcgatctgttga

SEQ ID NO: 453003 - DNA, 816 bp, Serratia marcescens
atggtgtacttgttcttctcaccttctcctgaatttatctcagccgtcatgacgctcagattaggggctatggtcgccttgattgacgattctcttgatcaagctgaacagaaagtgcttgagaatgccatcaacaacaatcctggcttcaccgatgatgaaaaacgctctctacatgcgtatttaacgtggcaacttcataccccagccaatatgacaggaatgaaaagcaggattgagttgatgggggccgcggaaaaagctgctgtgggtaaggttatcattagtgttgcctgttcggatgggacgatagcgcctgccgaaatcaaacagcttgagaagatttattcaagtttggggctggatccctcatctgtctcgagcaatatccatcagcattccgcaactgaacatgatctcgtctcgtctgtaccaactgatcagacagcagcagggttcacactggatgctaatgtacttgcccgccacgaatctgccacggatgatgttcgtaaattgctgaacacaattttcaccgaagaagaaccggaagagccagaaagcgctccagcctcatcaacggaggcgggggggcttgactccgcacatagccagctttatcgcagtttgctggagaaagaacagtggtcccgaaaagaggcgacagaattgtgcggaaatttgaatttgatgctcggcggtgcgcttgaggtgatcaatgactggtcctatgcggtggttgatgctccagtactggacgatgccgatgatgatatctgggttgacctggaaattgccaaagaattagagggatag

SEQ ID NO: 453004 - DNA, 258 bp, Serratia marcescens
atgagcacgaacaagctgcggctcggcccgctgcccaagagcgaaaccgtcaagctgacctttgcgtgtccggccagcctgaaagccgacctcgaccgctacgccgtgctgcacgcgcagacctacggcgaaacggtcgatgcgctgacgctgatcccgcacatgctggaggcgttcatggcgggggaccggggattcaggaaagggacgacggcgaaagcaccgccagcgccccggcgggatgcgccgcccgcgtag

SEQ ID NO: 453005 - DNA, 1293 bp, Serratia marcescens
atggaccaggacaatgcctccgaccttgccgcgccgcaggcgggcaaggtagcgcccgaggcggtgacgctgcgcgcgcagccgcgcccggtcacgcgcctgaaccggcgcatgctggcggtgctggtcggcggcgtggccaccgccgtgctgggcgccacgatctggtcgctgcaagcgccccagcgccgtggcgcgggcgagccgaccgagttgtacaacgtcgatcgcgtgtcgcactccgaagggctggcgcagttgcccgccgactattcccaactgccgcccgcgctgccgccggacgtgccgatgctgggcgagccgctacccggcgacctgggcgcgccgatcctgcgggccgagcagcgcgcgcagggctacaagcaacccggccacgacccggccgaggccgagcgcctggcgcggctcaaggaggccgaggaagcggcggcttcgtccgtgttcttccgcgcgggcggccagcgcgccacgatggcggcgcccacccagaccgcagcgcctgtgttcgccgcgaacgcggccttcgacccgctggcggctgggccggcctcgacggccgcgcagccggcagacccctccgccgtgcagaaccggcaggagcagaaggaggcgtttctgtcacaagccggttccacgcaaacccgtaattccggcaatctgcaattgcccgcgtcgccgtatcaggtgatggccggtacggtgatcgcggcggcgctggtgacaggcatcaagtccgacctgccgggcgacgtgatcgccacggtgacggagccggtctacgacacggccaccggcaaccatctgctgatcccgcagggctcgcgcatcctgggccgctacaacagccaggtgagctacgggcagacccgcgtgcaggtggtgtggaaccgggtgatcctgcccgacacttcatcgttccagctcgataacctggtcggcaccgacccggccggctacgcgggtctggaggatggcgtcgattggcattgggatcgcatcttcgccggcgcggtgctgaccacactgctgggcatcggcgccgagctggccgcgcccgagaatcgccaggacggcaaccgcgtcatcatcgccggccgcgacagcgtgcaggacaccgtgaaccagatcggccaggaagtaacccgccgcaacctgaacatccagcccacgctgaccgaacgccccggcctgccggtgcgcgtcatcgtcaaccgcgacctggtactgcggccgtaccagccgctgttcttcaacaggggatcatcacgatga

SEQ ID NO: 453006 - DNA, 987 bp, Serratia marcescens
atgaaaccgtctttccgcttttacgctgttgcactggtcgccgtggcgctggcgggctgcgccacgccgcgcaagccaccgaccatctcgctcgatgaacccgtgcaggcgcagccgctgccggagccgcccatgccggtggaagtggtcgcggtgccggagcccttgccgctgccggggcagttgatgccgttgccgtcgccggacgagacgccgccagcgcccgagccggcggatgagcgcctgcgcgtgtcccgcgccaacgcggaggcgcgcgtcgcccccagccgcgagggctacgtcaacgcgattcaggtctggcccttcaccgacggcgcgctgtaccaggtctatgcgagtccgggccgggtgacggtgatcgcgttgcagcccggcgaggagctggtgacggtcgccgccggcgataccgtgcgctggatcgtcggcgacacctccagcggcggcggtgacgagctgcgcgtcaatgtgctggtgaaaccgatccgctccggcctgaaaaccaatctggtcatcaccaccagccggcgtacctacctgatcgaactgacctcgaccgagaaagcctggatggcctcggtgtcctgggactatcccagggacaggatgctgtccttgcagcgccaggcccaggcggccagcgccgccgcgccggtcgatgcgggcctgtcgctggagaacatccgttttcgctacgcgatcagcggcagcaatgcgccgtggaagccgctgcgcgccttcgatgacggcgaaaaagtctatatccagttcccagcgggcatcgcccagggcgagctgccgccgctgttcgtgatcggcgcgcagggcgatggccaactggtgaattaccgtttccgtccgccgtactacatcgtggaccggctgttcggcgcggccgaactgcgcctgggtggagacaggggcgacgtggtgcgcatcgagcggaccgacggcacacggaggaactga

SEQ ID NO: 453007 - DNA, 705 bp, Serratia marcescens
atgcgattcaaacgaccgcaggtgcgctatgccgagtcgccgcagcctgccacgccgtaccagagcgccgaacaggtgtgggacgagcgcatcggctcggcccgtgtgcaggcgaagaactggcgcctgatggccttcggctgccttgttcttgcgctgctgatggccggcggcctggtgtggcgctcggcgcagtccatcgtcacgccctacgtggtggaggtggaccacggcgggcaggtgcgtgccgtcggcgaggcggccacgccgtaccggcccaacgatgcacagatcgcgcaccacctggcgcgcttcgtcacgctggtgcgctcgctgtccatcgaccccatcgtggtccggcagaactggctggacgcctatgactacaccaccgaccgcggcgcggcggtgctcaacgactacgcccgcgccaacgatcccttcgcgcgcatcggccgcgagacggtgacggtgcagatcaacagcgtggtgcgcgccagcgatgcgtcgttccagatgcgctggaccgaacgccgctacgtcaacggcgcggcggcgggcaccgagcgctggacggcggtggtgtccatcgtgctgcaaacaccgcgcaccgaagaacgcttgcgccgcaatccattgggcatctacgtcaacggcctgtcgtggagccgcgaactcgactcaaccgaaggaggcaggccatga

SEQ ID NO: 453008 - DNA, 1386 bp, Serratia marcescens
atgaacgacgtatcggtgatcgaccgcttcctcgatgtgttttccacctacatcgactcgggtttcgggctgctgggcggcgagattgcgtttctcaccgccaccttgatcgtgatcgacatgaccatcgccgggctctactgggcgatgagccacgccaccggccaaggcgatgacgtgatcgccaagctgctgcgcaaggtgctctacgtcggcgccttcgcctacatcatcggcaacttcaactggctggcgggcatcgtgttccgctccttcgccgggctggggctgatggcctcgggctcgacgctttcggaagcggagttcctgcaacccggccggctggccagcgtgggcatcgacgccgccgcgccgatcatggagcagatcggcgacatgacgggctttcccggcgtgttcgtgaacctcgatgccatcgcggtgctgtttctcgcctggctggtggtgatcctgaccttcttcgtgctggcggtgcagcttttcatcacgctgatcgagttcaagctgacgacgctggccggcttcgtgctggtgccgttcgcgctgtggaacaagaccgcgttcctggccgagaaggtgctgggcaacgtggtgtcgtcgggcatcaaggtgttggtgctggcggtgatcgtcggcatcggcacgggcttgttcgccgagttccagaccgtgcccgatgagccgtccatcgaccatgcgctggtggtgatgctggcctcgctggcgatgctggcgctggggatcttcggcccgggcatcgccaccggcctggtgtccggctcgccgcagcttggcgcgggtgcgatggccggtgccgcgctcggtgtggccggcacggcggtcgccgccggtgcggtggccaccggcgtgggtggtgccgtggtggccggtgcgcgcatggcacccggcgccgcccgcatggccgtgggcggtgcgcgttcgatggcttcgaccgccagcagcgcgaagtcggccttcgatgccggttccgctgccgctggcggcagcctcaagggcgccgctgcgggcctcggcaacgtcgcccgcacgggcgcgcagtcggctggccagaagatcgccgccggtgcccgctcgctgaaggagcgggccgccgcagccgtccagccccaggccgccgcatccccggccggcgcggctggtgcgggcggcggcgctgccgcctcgactgcccagggcggtgcggacgccgcgcccgcgagcaccgatcaacccgcctgggccaagcgcctgcaacgccgccagcagctcacgcaagccaccaccaccgtcgcgcacacgctgcgcggtggcgacggcggcggctcgggttccggccccagcctgcgcgacccctcgaactcataa

SEQ ID NO: 453009 - DNA, 318 bp, Serratia marcescens
atgaagcccgccctcgtgttgctgaccctgctcgcgctgaccgcctgcggcccggcgccatcgaccgatggcatcgaggcgctggcggtcgatccggtgcggctcaaggccgtgcgccagcaatgccaggcggatcgcgcacaggtaggggaagccgcctgccaggccgccgccgaagcgttccgccggcgcttcctggcgggcgcggccgggccggacgagtacaccgcgccggccgagctgtcgcccgttccgccgagcttcgatgaacctgtcgtcgatgaaccggacgcaccgcccgccgaggtgtcgccatga

SEQ ID NO: 453010 - DNA, 738 bp, Serratia marcescens
atgaaaacccgtatgcgttccatctcgctcgccatcgcgctggcgggctcgctgctggccgtgcagccggcgatggccttcaccgtcatcgacccgaccaacctgatccagaacacgctgaccgcgatccgtacgctggagcagatcaacaaccaggtgcgccaactccagaacgaggcgcagatgctcatcaaccaggcgcgcaacctggcgggcctcgacttcaacgtggtcaaccggctgcgctcgacgctggcgaccaccgaacggctgatcgccgaggcgcagggcctggcctacgacgtggcgaacatggacagggagttcgcccggctgtacccgcacgagtacgccgccagcgtcagcggcgaccgcatggcgcaggatgcgcgcgagcgctggcggcacacgctcgacggcctgcacaccgccatgcgcgtgcaggcgcaggtgtcgcagaacctcagcgaagacgaaggcgtgctggccgatctggtgggccagagccagtcggccaccggcgcgctgcaagccatgcaggccaccaatcaactgctggccttgcaggccaagcaggcgatccaggcccagcagctccagatcacccaggaccgcgccgcgtcgctggagctggcgcggcaggcggcggccaccgagcgcgcccgcgaggtgcggcggcgctttctcggcgagggcacgccgtacacgccgcagaccgtgcgcttctacggcaactga

SEQ ID NO: 453011 - DNA, 2451 bp, Serratia marcescens
atgttgaacctcgccgaataccgccagcgccccgcattgcttgccgactggctgccctgggccggattggtcgcgcccggcgtggtgctcaataaagacggttcgttccagcgcacggcgcgctttcgcgggccggacctggacagcgcgacccagggcgagctgatcgccacgtcggcgcggctgaacaacgcgctgcgccgcctggggtcgggctgggccttgttcgtggagggtgagcgcctggcagcggccgactacccgcactcggattttcccgagccgctgtcgtggctggtggacgaggaacgccgcgccaccttcgaggaggaccagagccacttcgagagcggctatcacgtcacactggtgtacctgccgccggaggaatcccacgcgcgggccgccaagctgctctacgagaacacgccgcagcgcggcgtggactggcgcgagcgtctggccgccttcgtcgcggagacggatcgcttcttcgacttgctcgacggcgtgatgccggaaatcgcctggctcgacgacggcgagacgctgacctatctgcacgcgacggtctcgacgcggcgctaccgcgtggccgttcccgagcagccgttccacctcgatgcgctgctggccgactgcccgctgatcggcggcctggcgcccatgctgggcgaccagcacctgcgcgtggtgtcggtgcgcggctttccgacctcgacctggccggggctgctcgatgacctcaaccgcctgggcttcgcctaccgctggagcacgcgctttctgtgcatggacaaggccgaggcggaaaaggagctgggccgcctgcgccgccagtggttcgccaagcgcaagaacgtggtcgcgctgctgcgcgaaaccatcttccagcaggaaagcccgctggtggataccgacgccagcaacaaggcggccgatgccgacgccgccttgcaggaactgggcagcgaccaggtggcgttcggctacgtcaccgcgacggtcacggtgctggatgcggatgccgccgtggccgacgagaagctgcgcctgatcgagcgcgtcatccagggccgtggcttcgtcaccatcccggaaacgctcaacgcggtcgatgcctggctgtcctcgattccgggcaatgcctacgccaatgtgcgccagcccatcgtctccacgctgaacctggcgcacctgatgccggtgtcggcggtgtgggccgggccgcagaagaacgcgcacctcgacgggccgccactgatcgtcacgcgcaccgatggcgccacgccgttccggctggtgacgcacatcggcgacgtgggccacacgctggtgtgcggccccaccggcatgggcaagtcggtgctgctcgccacgctggcgatgcagttccgccgttatcacggctcgcgcatcttcacttttgacatgggccgttccatgcgggcgacggtgctgggcctgggcggcgagcactacgacctgggcacggatggcgacatcgcgttccagccgctggcgcgcatcgaccaggagggctaccgcgcctgggccgccgaatggctggaaggccggatgctgcaagaaggcgcgaccatcggcccggacgagcgggccgccatctggtcggcactggaaagcctcgcgggtgcgccggtggagcagcgcacgctgaccggcttctcggtgctgttgcagaacaacgcgctgcgccaggcactcgcgccctatgtgctcggcggcgctcacggcaagctgctggacgccgattacgaccggctgggcaccgccgacgtgcagtgcttcgagatggaggagctgatggccagccgcgcggcagtgctggccgtgctgcgctacctgttcgcgcgcttcgaggagcgtttcgacggcgcgcccacgctgctgatcctcgacgaagcctggctgttcctcgacgacccggtgtttgccgcgcgcatccgccagtggttgaagacgctgcgcaagaagaacgtcagcgtcattttctccacgcagtcgctggccgacatcaaggactccagcatcgcgccggccatcgtggagagctgcgcgagccgcattttcctcgccaatccgcaggccaccgagccgcaaatccgcacgatctacgaaggcttcggcttgaacagccggcagatcgagatcgtcgccaccgcgcagccgaagcgcgattactactaccaatcgcggctgggcaaccgcgtgttcgacctcgacctggggccggtcacgctggctttcgccggcgcttcgacgccgcaggaccagcgcgacatcgacacggtgctggcctcggccccgccttccgacttcgcagccgcctggctgcgccatcgcggcctggactgggcggccgacctgctgccgtccgcgcctgccgcttcccgtgtcttgtccacccacccacaggagaacctgccatga

SEQ ID NO: 453012 - DNA, 273 bp, Serratia marcescens
atgagcgcgcccgatgagttcgctaccggcttcgaggtgccactgcatcgctcgctgaccgagccgattctgctgggcggcgcgccgcgcaccgtggcgattgccaacggcacgctggccgccgccgtgggcctgggcttgcaactgtggattccgggcctggtgctgtggctggtcggccattcgctggcggtgtggggtgcgcggctggacccgcagttcatgcaggtgttcgcgcgccacatcaagcacaagccgctgctggacgtgtga

SEQ ID NO: 453013 - DNA, 378 bp, Serratia marcescens
atgacgcctgcccatgctttgcgactttccgtaaatccgtttttccgtcttgcccgcctgcgccgcctcgccgagccggcgcagcagggcctgttgctggcggtcgtgttcctgctgatggcgggcacggcgcacgcggcgggttccagcatgccctgggaagggccgctgcaagccatcctcgaatccatccaggggccggtggcccgcatcgtggcggtcatcatcattattgccacgggcctggcgctcgctttcggcgacaccagcggcggcttccgcaagctgatccagatcgtgttcggcctgtccatcgcgttcgctgcgtcctcattcttcctgtcgttcttcagcttctccggcggggccgtggtatga

SEQ ID NO: 453014 - DNA, 1020 bp, Serratia marcescens
atgagcgcgaccccgaacgcaccgcaatcctctgccgccacctcgctggaccggcgcatccgcatgctgcgcacggcgatggggccgctgatcgccgccgcgctggaagacccggacgtggtggaagtgatgctgaacccggacggcgcgctgtggatcgaccggctttcgtcgggccgcgccgccaccggcgagtcgctgtccgccgccgatggcgaacgcatcatccgcctggtcgcggcccatgtgggcacggaggtgcatcgcggccggccgctgctgaccgccgagctgccggaaaccggcgagcgcttcgagggcatcttgccgccggcggcgccgggcccggccttcgccctgcgcaagcgcgccgtgggcgtgatcggcctggccgactacgtgagcgacggcatcctgactgcggagcaggccgagtttctgcgccgcgcggtgcgcgagcgccagaacatcctgatcgccggcggcaccagtaccggcaagaccacgctggccaacgcgctgctggccgagatcgcggccaccaacgaccgcgtgctggtgctggaagacacggtggaattgcagtgcgcggcgcgcgaccacgtaccgctgcgcacccgcgccggcgtggtgtcgatgaccgagctggtgcgcgccaccatgcgcctgcgccccgaccgcgtgatcgtcggcgaggtgcgcggtggcgaggcgttggacctcatcaaagtgtggggcaccggccaccctggcggcatcgccacgctgcacgccagctccgcgcacggcgcgctgctgcgcctggagcaactgattctcgaagtcgccctgaccccgccgcgcgcgctgatcgccgaggcggtgaacgtgatcgttttcatcgccgggcgcggccgtgcccggcatgtccagaccgtcgcccgcgtcacgggcttcgacggcaacggctaccagctcgatgacgcgctggcgctgccacttccttccctgtccccgaccaaccctggagaactgccatga

SEQ ID NO: 453015 - DNA, 489 bp, Serratia marcescens
atgagccatctgcattcccgccatcgcctgaacctgttcatcgagcgcgaccatgccaagcgcctggacgagctggccgccaagaaaggtgtgtccaaatccagcatcgtcgcggccgccttggcgtcctggctgtcgccggacgcggccgaccagcgcgaagcggcgatggccaagcgcctggaccggctgtcgcgccagttcgagaagctggagcgcgaccagaacatcctgatcgagacgctggcgctgtacgtgcgctatttcctcacggtcagcacgccggtgccggaagcgcatcaggacgccgcgaaggcgcagggcaaggcgcgtttcgagcagttcatcgaacaactcggccgccacctgctgcgcgggagcagcctggtgcgtgaagtggtcgaggagatccagcccgacccgcagcggctggacgaggcggcggcactggacgaagcgcaggagcgtgcgcgggaggcggccttatga

SEQ ID NO: 453016 - DNA, 2007 bp, Serratia marcescens
atgcaggcaacgggcgtgctgtttggtcaggtgctgacggtgttcggcatcgtgatcgccggagtgtggttcgccacacaatggacggccgccgccctgggctatcagctacgcctgggctcgccctggttcgatttcttcggcacgccgatctacttcccctggaagttgttcgagtggtggttcttcttcgacgcctacgcgcccgacatcttcgccaagggcggcgccatcgccggcgccagcggcatggtcgcggtggtggtggccatcgccatgtcggtgtggcgctcgcgccaggcgcgccgcgtcaccacctacggttcggcgcgctgggccgatagcgcggaaatcatcaaggccgggctgatgggcctggcaggcgtgttcctcggcctgttcgcgggccgctacctgcgccacgcggggccggagcatgtgctggccttcgcgcccacgcgctccggcaagggcgtcggtctggtggtgcccaccttgctgtcgtgtccgacctcggtggtgatccacgacatcaagggcgagaactggaatctcaccgccggctggcgctcgcgcttctcgcactgcctgctgttcaacccgaccgacccgaagtcggccgcctacaacccgctgctggaagtgcggcgcggcacccatgaagtgcgcgacgtgcagaacatcgccgacatcctggtggacccggaaggcgcgctggagcgccgcaaccattgggagaagacttcgcacgcgctgctggtcggcgcgatcctgcatgtgctctacgccggcgaggacaagacgctgcgcggcgtggccaacttcctgtccgatccggcgtgcccgttcgaggtgacgttgcaccggatgatgaccacgcatcatctgggcgaggcgccgcatcccgtcgtggcgtccgccgcgcgcgaagtgctcaacaagagcgacaacgagcgctcgggcgtgctgtccacggccatgagcttcctcggcctgtaccgtgatcccacggtggccgaagtcacctcccgctgcgactggcgcatcgccgacctgatttcggcgaagcatccggtgtcgctgtacctggtggtgccgccttcggacatttcgcgcaccaagccgctggtgcggctgatcctcaaccagatcggccggcgcctgaccgaatcgctcgacggcagcgacggcattccgcgccgtcacgagctgctgctgatgctcgacgagttccccgcactgggccggctcgatttctttgaatccgcgttggccttcatggcgggctacggcctgcgcgccttcctgatcgcgcagtcgctcaaccagatcgacaaagcctacggccagaaccattcgattctggacaactgccatgtgcgcgtgaccttcgccaccaacgacgagcgcaccgccaagcgcatttcggaaaccttgggcaccgccaccgagctgcgcgcgcagcgcaactacgcaggccaccggctggcgccctggctcgggcacctgatggtgtcgcgccaggaaacggcgcgcccgctgctcacccctggcgaggtgatgcagcttccgccggacgaggcggtggtgatggtgtctggccatccgccgatcagggcgaagaagctgcgctactacgccgacgccaactttcagcgccgcatcctgccgccgcccgtgctcgcgccgggccgctatgccgatgcgcctgccgcgcggccggacgactggagcgccttggcggttcccgccatgcccgccgcaccgggcgtagacgtgggcctcgccggcggtatggacgaagccggcgaaggcggcccgcgccgccagcccgagctggccgaaaccgtcacctacagccccgaacccgaacacgcggccagcgacctggcgctgctcgatgacgaagacgacctgccgtttccccacccgtcccagctcgacccgcgcctgacgcgcgcggcgcggctggccgccctcgaccctgacgacggaatccaactatga

SEQ ID NO: 453017 - DNA, 249 bp, Serratia marcescens
atgagaacactcactgcactgttgctcacagtgatgatggtcgcttgcagcgaatcgccaccgacggaaacggtcgagtcgctggccgccaatcccgagcgactgaaagaactgcgcgaacagtgccgggccaaccgcgccaaggtcggcgaggatctgtgcaacaaggtgggcgaagccacacgcaagcgcttcatgggcgacggcaaggtgccttacacgccaccggccgagccgccgaagttctga

SEQ ID NO: 453018 - DNA, 945 bp, Serratia marcescens
atggaactacgccatcttcgatatttcattgtggtagccgaggaactgcatttcggacgggcggcccagcgcctgcatatcgagcagtcgccgctgtcacgcgccatcaaggagttggaggagcacttgggtgttcgtctattcgaccggacgacccgcagcacgcgattgacccgcgcgggccaggtattcctggagcatgcccgtcgtgttttcgctgtgctggagcaggcacgcaacagcgtagaggctgtcgctgccggctacctggatcaactgcgcgttgccttgtccgacggtatcacgccgccacgcctgagcgccttgctggctcagtgtcgccaggacgatcccgatatcgaggtgcgcctgttcgaggtgccgctgtcacagcaaatcaggggattgcacgacgacctctacgatgtgggtttcgctcaatcggccgaggtcggggatggcattgtggccgagccggcatggagtgatccgctggtggttgtcctgccggcgcggcaccccctgctggttcacaaacgcattccgttggacgaggtgctgcgctatccgctggtgatgtgcgatccgcagtcctgcgaaggctatgggcagcagatcgctcgcatcctgcgtcgcgcggacgtggacccgctcatcgccgaacaggtgacttcgctggaactgatgctgacgctggtggcggcagggtatgcactggcgttggtcggatcgtcgcaggtcattgcttgccgcaacgccgacgtgatcggcaggcccctggcgggacgctccccgatgctgaccacctacctgctgcggcgcgatgccgagccatccgaaaccttgagccgcttcattgatcgagtcagcccgatcagcgctgaggtaccgccggcgaaggcgtcctcgaacacatccgacaccacgaaggagatcaactcatga

SEQ ID NO: 453019 - DNA, 1956 bp, Serratia marcescens
atgagccggcgcagcggcgacgatgccgaccgcttccgcatccgccccggcgcgcccaaagaccgcacgcagcccttcgtcaatcgcgtgctcaagcaggccagcaaggccggcgccaaggtcggcaaggcgggcaagcgtcccggtgcccggctggggcgcgggcacgtcgccgcgcgcttcgccgggcagtcgctggaggccaatgcgcggcgcgtcaccatcaagacgcggctggtgaatctcgccaaggccgggccgcgttccaccatcacccacctgcgctacattgagcgcgaaggcgtggatcgccagggcgggcggggccgcgcctatggcccgatgaccgacgacgccgacctggccgctttcgaggaacgcgggcgcgaagaccgccaccagttccgcttcatcgtctcgcccgaggatgccgaacagctcgacgacctgcgcacctacacccgccacctgatgaaccgcatggaggccgacctgggcacgcaactggactgggtggcggtcgatcactggaacaccgacaacccgcacacccacatcgtgctgcgcggcaaggacgacaccgggaaagacctcatcatcgcccgcgactacatcgccgaaggcatgcgccaccgtgccagcgagctggccaccgaatggctcggcccacgcaccgagctggagatccagcagagcatggcccgcgaagtcgatcaggaacgctggacggggctggatcgcaccctgcaacgcgaagcggtgaacggccgcatcaccatcgaccggctaaacgtgctgccccgtctgcgaagccagcgcctgctgctgatcggccgcctgcaacacttgcagcgcatggggctggtgcgcgaaaaggagcccggcgtctgggccattcaccccaacgtcgaagacaccctgcgggcgatgggcgagcgcggcgacatcatccgtaccatgcagcgggcaatgggcggcgcgcagcgcgagctggcggtgttcgagccgggcgagcgcgcccacccgatcatcggccgcgtcgctaccaagggcctggccgacgagctgtacgacaagggctacctgatcgtcgatggtatcgacggcaaggcgcactacgtcgcgctgccgccccgcacggaactggagcagtacccggccggcgcggtggtggaggtcaagggctcggccggcgtgcgcgcggcggacaagaccatcgccgcgttggccaccgatggcctgtaccgcaccgaccagcacttggcccacgccaaggcgcaggccacgcccggccgtgaccctgccgaggtagtggcggcccacgtccgccggctggaggccctgcgccgcgccggcatcgtcgagcgcctggccgaaggcgtctggcaggtgccggccgacctgcccgagcagggccgccagtacgacacgcagcgcgccggcggcgtggcgctggagctgaaatcgcacctgtccatcgagcggcaggcccgcgtgatcggcgccacctggctggaccagcagttgatcggcggcggcacgggcctgggcgagctgggctttggcggcgaggtcaggaacgcgctccagcagcgcgccgacttcctcgaagaacagggcctggccgagcggcgcggccagcgcgtgatcctcgcacgcaacctgctggcgaccctgcgcgggcaggaagtggcagcggcggcgcagaccatcgccaccggcaccggcctggagcaccgcccagtgggtgacggccagcgcgtcagcggcgtctaccgccgcagcctgatgctggccagcgggcgttacgccatgctcgacgacggcaaggggttcagcctggtgccttggaagccggtgattgagcagcgattgggacagcagcttgccgcgacagtacggggtggtggagtttcttgggagattggtcggcagcgtagtccttctgttggctga

SEQ ID NO: 453020 - DNA, 564 bp, Serratia marcescens; identical to SEQ ID NO: 352440

SEQ ID NO: 453021 - DNA, 546 bp, Serratia marcescens; identical to SEQ ID NO: 352439

SEQ ID NO: 453022 - DNA, 252 bp, Serratia marcescens
atgagcaaggagcgcggtaaacgcatcgccatcggcgcgcgtccgccggcgaatccgcaggccgaagcctggattcgccaaggcgacagcgccgacatccagaaaggcgacctctacaccgcacgcctgaccctcgacgtgacgcccgccatgcgcgcccgcatcaaggtctcggccttcacccagggcgtgaccgtggccgagctgttgcgcgcgctgctggagcgcgagttcccggagcacacgccatga

SEQ ID NO: 453023 - DNA, 831 bp, Serratia marcescens
gtgttcagcctggagcagaagcagcgcgaacagctcgacctgttccgcgcactgccgggcgacatggcgccgcgcgacgcacaagacctgatggcctatccgttcttctcgctggcgaaatcgcggcgtaccgcgccgatcgacttccgctccggcggcgtcaccgtgcgcgtggaaggcacgcaggagcacggcatcgccaccatctgggatgccgacatcctcatctgggccgccagccagatcgtcgaagcgcgcgacgcgggcattcgcccgtcgcgctggatgcacgccaccccttacgagatcctgcgcttcatcggccgcggtacgtcgctgcgcgactaccagcgtctcaaggccgcactggatcgcctgcaatccaccaccgtggccacgtccatccgcgagaccaccgggcggcgcctgcaccgcttctcgtggatcaacgagtggaaggagcgcgcggacgccaacggcgtgccgctcggcctcgaactcatcctgccggactggttctatgccggcgtgctggacgaagccctagtgctcaccatcgacccggcgtacttcaagctcaccggcggcatcgagcgctggctgtaccggctcgtgcgcaagcacggcggcaagcaggaatgcggctggcagttcgacttcccctacctgtaccgcaagtccggcagcctggcgcagccgcgcgacttcgcccgcgacctgcgcctgctggctgcgcgccagtcgctgcccggctacctgctgtccgtcgaacgctggcccggagcgccggagattctggccttccgccccgtgccgtccacggcacgttga

SEQ ID NO: 453024 - DNA, 786 bp, Serratia marcescens
atggcagagcccgccaccgatcactggcaccccggtgccgcctacctctacgtcctgcacctggacggcccggcgctggcctgggaatacctgcgccgccacccggactaccgacgcgactggctgcaccgtcgccgccatcccgaggcggcccagcgctggggcctgcgcctgctggaagaccccgccctggatgcgcgcgacgcgcacccggcctggttccccgaccatgacagcgtagtgcagctccaccccgacgacgacccgccgcccgacgccctggccttcgacttctggcgcattcccggccacaagcaactgctccacgacggccggcggctggtgctgctcacccgctggccgggccgccacgcgcgcctggtgtttgcgcccggcctggcgcacggcatggcctacacctacgccgtgcgcgcctccgcgcagccgtacccgcgcttccgtgcactgaccgaggaactggacaagctggccggcgccgcgccggtggcggcccggccacgccccgcagccaccgcgctgctggagctgcacaccctgcaagcgctcgacggcaccctggcgggcgcgtccctgcggcgggtggccgacgtgctgttcggcgccgacaccttcaagcaggactggcacgcagacggcgcgctgcgcgcccgcgtgcgtcgcctggtgcggcgcgggcaacggctgatgcgcggcggctaccgccgcctggcacagcttcccgcgcttgcacagggacgttctgccgtgcgtgcaaaacgtccctga

SEQ ID NO: 453025 - DNA, 348 bp, Serratia marcescens; identical to SEQ ID NO: 352437

SEQ ID NO: 453026 - DNA, 297 bp, Serratia marcescens; identical to SEQ ID NO: 352436

SEQ ID NO: 453027 - DNA, 975 bp, Serratia marcescens; identical to SEQ ID NO: 352435

SEQ ID NO: 453028 - DNA, 315 bp, Serratia marcescens
atggctaccatcggcaccttcaccgcagagaaagacggctacaccggccagctccgcaccctgaccctgaacgtcaaggccaagctgattcccaacgacaagggcgacaccgagaacgcccccgacttccgcgtgcaggcggcgggccacgacattggcgcggcgtggaagaaaaccagcgaggccgggcggccctacctgtcggtgagcctggacgatccttcgttcccggcgacggtctacgcccgcctgatcgaaggcgaggacggcacgcacgacctgatctggtcgcgcagcaagcccaaggcggcctga

SEQ ID NO: 453029 - DNA, 519 bp, Serratia marcescens
atgaccctccagctccgacacgaaaccccggacgacattgccgccatcgaagccgtcacggttgcggctttcgccgatgcaccgcacaccagccacaccgagcaattcatcgtgcgtgccttgcgcgcagccaatgaactgacgctttccatcgtggccgaggaacaggggcagatcgtcggccacgttgcgctgtcccccgtcacgatcaccgatggccaccaccagcaggccgagggctggtatgtactggggccgatctccgtcctgccgcaaaggcaggggcaaggcatcggttcacgcttgatggaacaggcactgtccgaactgcgggccatgcgggccgcaggttgcgtgctgttgggagatcccgcgtactacgggcgctttggctttcaggcccatgcgggcctgcaactgccgggcgtgccgcccgactacttcatggcgctggccctgcatgggccagtgccggaaggcatcgcacgctatagcgatgccttcaacgccgccgcctga

SEQ ID NO: 453030 - DNA, 2052 bp, Serratia marcescens
atgaacgcgattacccaaaccgaaacccgcgccatccacaccgccgccgcgctggaagtggccgacccgaccaagaacctgctttttgtcccgctgtcgcagttgctgccgcgacagtccaagcgcaacgtgcgcaagaccccgcgcatgtccattcccgaactcgccgcgagcattgcgcgcgtgggcctgctgcaaaacctgatcgtcatcctgtcctccgatggcgagcattacgaagtggtggccggaggccgcaggctggccgcgttgaagctgctggcgaagaaaaagcgcatcgccaaggattgggacgtgccttgcctgctggtggccgatgcgtccgcccgcaccgtgagcctgaccgagaacgtgcagcgcgaagccatgcaccccgccgaccagttcgaggcattcgccgcactggtcgccgaaggccgccccatcgaggacattgccgccgatttcagcgtcaccccgctggtggtgcagcgccgcttgaagctggcgaacgtctcgccgcgcctgatgaccgactaccgtgccggagccgtcaccctggaacagttgatggcccttgccatcaccgacgaccacgccgcgcaggaagccgcgttctacagcgcgccgcagtggcagcgcagcccgtccgcattgcgcgagcacctgaccgagcgcgagattgacgcacagcacccgctggcccgcttcgtcgggatggacacctacaccgacgcaggcggcggcacccgccgcgacctgttcgccgaggacgacagcggcatctatctgaacgatgcggcgctgctggaacggctggtgcgcgagaagctggcaacgctggccgaggacgtgcgcgccgagggctgggcatgggtggaaaccgtgccgcacctgagccatgccgaccggcaggcgttccagaatgctccgcgccagcagcgcgaaccgaacgcccgcgaagcccggcgcatcgcctcgctgcaagaccgcctcgacaagaccgatgccgcgctggaagacgcctacgaggccaaggacgaagacaaggccgaagccctgcaccagcagcgcgaacggctggcgcaggaactgcacaccttgcaggccggtttgcagcactacgccccggacgtgcgcgccgtggccggtgccatcgtcaccatcgaccgcgagggcgaggccgcgattcatcgcgggctgctgcgcgaggccgaggccaaggcgctgcgcacgttggaaaagctgcgccaaggcttcaccggcaccgaaggcgcggacgacgacgcaggcgaagacgccgagccgcccaaggccgccaacctgtccgaccggctggcgcagcgcctgagcgcgcaccgcaccgccgcgctgcaaatcgaagtggcccggcatccacaggtggcgctggccgcgctggtgcatggcatggtgcagaccgtcttgcaggaaggccactacggccacgacctgccgctgggcgtgagcctgaaagtacaagaccggctggaaggcatggccccggactggccggaatcgtccgccgccgtcgccctgcgcgaactgcaacaggcatggggcgagcggctgccgcaggacagcgccgaactgttcgccgcgctgctggcgatggagcaaggcgaactggtgcggctgctggctgtgtgcgtggccgccagcgtggacgtggtgacgccccgcgccacgccgcaccagcccggcgcggaactggcacaggccgtgggcctcgacatgcgggcatggtggcaaccgaccgccgaaggctacttcaaccacgtttccaaggccgtgattctcgacgccgtgcagcagttcgcgccgtcgcacgtcacccggctggccaagctcaagaagaccgacattgccagcgaggccgagcggctggccgatggcaccggctggatgcccgccgtgttcaaggccgaggacgaggcggcgcaggcgagtacgccggaagaagcgcaggacgccgccccgcaggaagccgaggacgacgccgaagcggaggcagcggaaacgctggcggcatga

SEQ ID NO: 453031 - DNA, 396 bp, Serratia marcescens
atgaacgacaaatcgcatgtttcgctggaacgccgtgtctgcctggtctgcggcacccacttcgataccggcagcctcctgctcgacaagcgcctgcgccagagcctggagcgctacacgacgacgggctggggcctgtgcgccgaacaccagaaactgttcgacgagggtttcgtcgcgctggtcgaatgcgaccctgagcgcagcggcaagccgtcgggcgctgatcgactgaagcccgaacaggcgtatcgcacgggccacctggcgcacctgaagcgccatgtgttcaccgagatattcaacgtccagatcgcggccgatcaggtttgcgtcttcgtcgaacccggcatcatcgagcgcatccagacgatggtggtaccggcgacgagctga

SEQ ID NO: 453032 - DNA, 507 bp, Serratia marcescens
atgtcgcaactttccctcacttccgatgcctcgctgctggtgcgtgacgaccaggggcgctacctgccggcgactgccgaccagattcttgaagccgcacgcctggtcatcgaccagaagaacccgcgcggggcgttgttcacatcgccggcgctggtcagggactacctgtgcaccaagctggccggcttcgagcacgaagtcttcgccgcgctgttcctcgacacacagcatcggctgatcgaatacgtcgaactgttccggggcaccatcgacggtgcatcggtgtatccgcgcgaagtggtcaaggaagcgctgcgggtcaatgcggcggcggtgatcttctcgcacaaccatccgagcgggaatcccgagccgagccaggccgacaaggtgctgaccctgcggctcaaggaggcgctggcattggtggacgtgcgcacactggatcacatcattgtcggcggcgagaccacagcgtccttcgccgaacggggcctgctgtga

SEQ ID NO: 453033 - DNA, 1629 bp, Serratia marcescens
atgagcagcaccgcagcggtcgcagacgtgatcgaggccttcaagcagcgaggcttcgagtttgttggcaagacggatgacggctggttcaggctgcacgggcagttaaccccaccccaagcggacaagggctgtccatgcgaagttcagctcgaccctacgttcttcgacttgcctcgcatccgactgctggaaattcctcctgagctacccgcagcggttcctcatcttggtgcaagtggtggactttgctatatcgccaagggcacggtcgttctggacatctacgatcctgtcggacagtcgctggcatgcttgcagcgcgctgccgtcgtgctcgggcagatctggaagggggagatgattgaagatcttacggaagagttcttcgcctattgggatggatggctttgctttgtggacatgcagggcgaagacttggggcgacagaactgcatagtcgcgcaggccaatgggaattctttgtggttcatcaccgacaacgaagatcgaacaacaaagaagctgacttcgcttggctaccaagtcaccgatcaaacagtgctgacctaccgggtcaagaccagtgctcaacctcgcccgctgacgagccattggcctcccgaaacagttggggatatcttggcgtggcaaagtacccttgaccctcgttgccggcgcaagattcacgagcgcatcaaggaaggagaaaagaaaaaggccaacggcgttctgatcgttatcgaatctccgttgatgacgtatggctttgcggttctctatgatcgccaacgccaagtccaaaagggcaagttcgcagatcgcagggattcgagctatgggttacaggcgatgcccgtctcggtgatcagaatcgatgaccgataccttgcccagcggaacatacctaagtcaaagacgcttgcaggtaagaacctggccgttgttggatgcggcacgatcggcggatatctgtcggatatgctggtcaaggctggggcggggacatgcggcggaaagctcacgttggtggatttcgactaccttcttccgcaaaatatcggacgtcatcgcctgggatttccggacttgctgtcgaacaaggccgaggccatggcgaaagaactcaagcgtttggcaccaggggccgagattcgtgcgctccctgtggatgtcaggcaggcccaactgggagagttggacttgctcatagacgccaccggggaagaatcccttgggcattggttgtgcagccactatcccccagcgcccatgctttcagtctggatcgaggggccaggaacggctgtccgtgcgctcctgagggcgaacccacctggtgcgtgctaccgatgtctttggcatagcaacaggagaggtgagcttcgttccaccgttgattctcttcctaccattttggcggggcatggatgcgagggcttgtacgtgccattccccgcttcggtgtcggtgcatgctgccagtctgggagcagagatggcccttgactgggttaacgacgtctattcacctgctctgcgaactcgactgatcgaccacacccatcagcttgccacgcccgattgcgatccgctgcgggaccgggaatgtcctgtatgcagttcatga

SEQ ID NO: 453034 - DNA, 393 bp, Serratia marcescens
atgccgcaaacaggcctgggcgtcgctatcaagacgctacgcgaacgcagaaccctttcactgcgtgaaatcggtcagctctcttcggtggatcatgcctatgtccaccgcttggaatcaggtgagaagacgaatccgtcgccggatctggtcgagaagctgttgagggttctcaagccaggagagagggatgcagcactcgttatgtggcttgttgaccatgcggaggccgacccccgtcttgttgagttcgtgttacaagacccctccatcagcatcgacatcttttcggctgcggcgggagtgaggcatcgtggaaatacgagacctgaccctgcaacattgatcgctcggatacagcgggcattcgaggacgaggacgaggacgattga

SEQ ID NO: 453035 - DNA, 870 bp, Serratia marcescens
atggatgaggtggatgtcaggcagagagcgcgagcctttattgcgaaggtcgatacgtcggacatccgaacagacctgacgccctatgtagttgcggccaacgccaaggtcaagaaggaagagcttggtgaaggagagtccggctacacaatcactaagccgaatgggaagcacgtcattacagtgaactcgctggaaacggaagagcgccagcgcttcaccatctgccatgaggtagctcatatcgtgctcgatctggagtcgagtcacgaagaagtgccgtcttggtcttatgccaagcggcacccgaacgagatcgcctgtgacacgttcgccgccgagctgctgatgccatatcagcaatggctgtcactcgtacccaaggaagagccatcgctggagctgatccaacacatggctgacttgtttggtacttcattccctgctgcggcatcgcggttcgcttgccttagcgacatgccgtgcgccttcgtcacaatggagcgtggcgcagtacgttacgcagcacgctccaccagcttgcgacagactggagcttggatatctcccaaatccatcatcccagtcggctctgtggctcaccgcctccgatcttcgggcaacagtgctaccgacacgggtgaggtttcacaggacatctggttcgacaactgggagcagggactcgacctctgggagctttctaggcactacgcacgtactgacaccaccacctcgctgttgtggttcgacagcgacgatttgcctgaagttgaagtgaaccgcttcggtgcgcgcgtcgaggacgatggcggcttggctgagcttacggggcaactgccgtggccaggacgcagcagacgccgttag

SEQ ID NO: 453036 - DNA, 921 bp, Serratia marcescens
atgccaagaacactccagtatcggcccaccctgatcgacgagcttatcagcaacgagcggatcaacagctaccagaacgtcttccagccggcctccgacatcgagctgatgggcgtctacctctggaacgcccacgtcagtggtgccatctaccccatcatcgacgcggctgagatcaccctacgcaacgcgatcgaccgtgcgctgcacggccacctgggcaacttctggtggtctggccacaaactgcgttaccgctccttcgtgcgcggtacgccgccaccccatccggtgcaggccgcgcgcgacaacttcgccaaggccacccgcaagttcattgccgaacagcgcagccgctatggcgtgaccgggcacatcgcaccgacccaccacggcgtcatggcgaaaaccgagttctcgacctggggcttcatgctcgaccacgagttcatgggcaacggactgatctggcccagccggctcggcaccgtcttcgccggcacctggccgagcacgcaggcttcgaccatgctgacgcatgtgcaggatctggtcacgaccgtgcgcgacttccgcaatcgcttgttccatcacgagccggcctggaagcggttcggtgtgcatagcgaggccgatgcgctccagcacttgcaggaaaagattggcaagatcgaaagcctggttgcgctcatccacccggagaaccttcggctactggagaggaacggcttgctccgggcggcgcgcagagcttgcacgtcgcatgagattcgtcgcttccagcatcttgcgcagacccacaagatcaactcgatgagcaagctacaggggttggtggatcgctgcggcacggacgacaccatcctgatggcgaagctctatctcggacggcagcgcactttcctggtcagtccagtttga

SEQ ID NO: 453037 - DNA, 261 bp, Serratia marcescens; identical to SEQ ID NO: 352434

SEQ ID NO: 453038 - DNA, 336 bp, Serratia marcescens
atgaagatcgacactgaaatccgccatgtgaccaagccgggggcgaatctgttcctggagctggggttcccaccggaggaagccaaacggctgcacctggcgtcgcagcagcagatcaatgacactaagcagctcaaggagcagctcatggccgagctggcggcgtggatcgagcagcatcacttgaagcaggccgaagcggcggaaatcctgatggtgtcccgcccgcgcgtatcggatgtggtgaacaggaagacgaccaagttcaccattgatacgctggtcgagatgttgagccgcattggcaagcctgtccgcttggcggttggccagtag

SEQ ID NO: 453039 - DNA, 339 bp, Serratia marcescens
atggagaaagagattcgctgggtcgggtcggcctacgacgacctcttggcctttcccgtcgaaccccgccggcaggcagggttcctgttgggcaaggtccaggcaggactggagccggaggactggaagcccttcgatgaagtgggggccggcacccgtgaaatccgcatccgggaagctaacggtgcgttccgggtgatgtatgtggccaagttcgaggaagccgtgtacgtcctgcactgcttccagaagaagacgcaggcgaccagccagcaggacaagcgcatcgccgaggcgcgctatcgggccatcgtcaacgcgaggaaaagcaagccatga

SEQ ID NO: 453040 - DNA, 1200 bp, Serratia marcescens
atggccaagatcaaactcaccaagtccgcagtcgatgcggcacaaccccaggcgcagcccatcgagttgcgcgacacgcttgttcccggcttcctgtgcaagatcacgccggccggtcgcaaggtcttcatgctccagtaccgcacgaatgccggcgagcgccgcaagcctgcgctgggccagtacggcgaactgactgtcgagcaggcccgctcgctggcgcaggagtggctggcccaggtgcgccggggcggcgatccggcagcggacaaggccgaggcgcgcacggcaccgacggtcaaggagctgtgcgcgaagttcatggaggactactccaaacagcgcaacaagcccagcacgcagaaaggctaccagagcgtcatcgaccgcaacatcatcccaatgatcggccggctgaaagtccgtgatgtgaagcgcccggacatcgccgggatgatgaagaagatggcccacaagcctgccgacgcgaaccgcacgttcggcgttatgcgccggatgttcaacctggccgaagtgtggggctaccgttccgacggcacgaacccatgccgccatgtcccgatgtatcccaacggcaaagccacccacctcatcagcgacgaggacatgggcaagctgttccgccagctcgaccggatcgaggccgaggggctggagaactatgtcatcccgctggcgatccgcctgcaattcgagttcgccggccgccgttccgaaatcgtgggcctgcaatgggattgggtcgatctggagaaccggcgggtggtctggcccgacagcaagaccggcggcatgtcgaagcccttgagcgaggaagcccaccggctgctctcgacggcgccacgacaggaaggctgcccccacgtcctgccgtcgccgagccatccagggcagcacctgaccacgggcgagtattacaacggctggagccgtgccctcaaggcagcgggtgcgacgcatgtagggacgcacggcatccgccaccgctcggccaccgacattgccaactccggtatcccggtcaaggtcggcatggcgctgaccgcgcacaagaccgtggcgatgttcatgcgttacgtccacactgaggatgacccggtgcgccaggcggcggaactggtggcgaaccggcgcaagacgattacgggtgcgcgccgcgccgcggaagcggtggcatga

SEQ ID NO: 453041 - DNA, 3483 bp, Serratia marcescens
atgacagagcaaagcggtggtggaattctttatcaagttgagatggatgttgcaggattgctggttggccagcggcaagtaaatgcccggcttgacgaaatggaagggcgcttcaactctacagggaaagcagtaggatccacagaaaaggcgttctcgtctttatcgcgcgttgctgtaagcttgtccgccgctctctctgtacagcaagtggcgcaatacgccaatgcctgggtagatgtgaacaacaagctggtaaacgccgtaagaccaaccgaacagttggcagatgtaacgcagcgagtttttgatatctctcaagagacacgttccgggctggaagcaactgcaacgctttatggccgactcgagcgcgcaacgcgcagcgcgggaaccagtaccgaagacctcgcaaaacttacaacgacaattaacaaggggctggtggtttctggtgcaacggcagaggaagccagctcaaccatgatccagctttctcaagcgctcgcctccggcgttctgcgcggtgaagagttcaactcaatttcagagaacggatcgcgcttagccgtggcactggctgactcactaggcgtaacggttggtcaactccgcgccatggcggcagaaggaaagctgactaccgatgttgttgtgaaaggattactcagccaaggtgatgtgattgccaaagagttcgggaatacgatccaaaccatggggcaggccttacagattgccggaaacaatatcactaaatttgttggagagtcttctactgtaagaagcggaatagcggcattcaacgatgccgtcgtatcgatgagtgagaatctagacacggtcagcactgctgtaacggctgcggccctagtatttggtgggcgatatgcgggttctcttgcattggctgtaagtagtcagttggagcaggtaagatcgaccatccaggccgttgccgcgactcgtagtcgagccaaagaagagatggccgcagcatcggtaactcagcgaaaagctatagcagatagggaggcggcgctatccgccttaaatgtagccacagcggaatataacgtagcgagaggttcggcagctgaagccattgcattggataatgttattcggttgagggcgatatatgtgcagactggtgctgccgctgcgttagccaataacgcattatctgcatcacaggctagggtagcagctacaggccttacgatggcaaatgcgatgtctgttatcaaaacggtaacatcccccttgggtgggcctatcggcattttggcaatggtggctgctgggtggtatttatatgcgcaaaatcaggctgaagctcgaaaggaaagcatcgctttcgcaaacacgctaccagatgtaatcgccaagctgaaagagatgaatcttgcacaggctcaaggggtcagggctgacaccattgaatctataaagaatcaaaagcaggatatttctgaacttgaggataaaatcagtagcctaaccgctgagtacaataaatataatgatttggctaagcaattcggcgtaacaaatgatgagaacaatggttatgtgatcaaggccgcagaggctgcaaatgagctcgcgaaggctaatcgcgatctggatagcaagacaaggactctggctgaatcccaggacgcattaagtaagataaacatccaagttaaccaaggcatccttgatcagatgaaggcagccagggataacgcaatagcattagctgaagccgagaagaacacgacaattctttccggtgcgcaaagtttccttgctgagaagttgggcatttctacgacagcaatgcagaaatttaatgctgaaagcttgaaaataaactggggaggcagtgaaggcgaaaagctgattaaacaggctgagcgtcgccttgccttgagtaagctggaagggaaggccaaagcggagcaacaggcagcatatgatgccgaggatgcaggtgttacagatcctggtgcaataaacgccctcaaggccgtatatgctcaaacggaggcaaacacccaagctaagaaggattcgaaaaaggccaacagcgagcaaaccgccgctgagaaaaaagctgctgctcaagctgaaagcgctgcccagaaagttgctaacctcaaacaacagtctgagttggctgcaggctctactcaagagttaacccgcgaacaagccatactgcaggcgcaactttctcttggtaaaggagcgacgaaagaacagattaagcttgcggggcaatatcgagccgaaatctgggatactgcagcggcactgaaagctcagaacgctgttccagaactgaaggaaaacgcaaactacgcctctcagaaggctcaactgcaaatgttgaaagaggcgaaggatgctcagggtaaccttcttatcagtcaaaagcagttcagccaactttccgagcagcttgaacgtgaacaccaggtaaaccttgccaaaatccgagcgcaacaggctacgtccaatccgatagctgatgcgcgcggacaggttgaccctattcagcagctggctaatgagaatagtcagaaactggctttgatgaaggaatatcaggctcaggaactggcgattatcaaacaatcttatgatgccaataagatcacttacgagcagttcattgctgcaaagcgtgccacggatgatcagtacctggctttgcgcacagcccaggagaagcaataccaagagcagcagacggcggcgcaatggcagctattgagccagcagagccttggttacaacatgctgacgagcgctgttgatgcattctctggtaatgcctcaaacgctataactgggctgcttaccggcaccatgtcggcacaagaggcgatgcgttcgcttggcaacaccattctgaacagtgtgataaacagcatcgttcaggttggtgtggaggcgttgaaaaactacattctcggccagacgcttggcgccgcctccgtggcgtcatctgtgggtatggctgcaacaacggcttcagcctgggcgccggcggccgcaatggcatcactggcaactcttggcgctaacgctgctccagcggctgctgggataacctcaaccgtgggattggctggtgggctggctttggctggagcgcgttataacggcggccctgtgagcgctggcgcgatgtaccaggtaggtgagcgaggcaagccagagatttaccaggcgagcactggtaagcagtacatgatccctggtgacaacggcaaggtgatcagcaacaaggacatgcaaggcggtggtggtatcaacgtgaatgtcagtatcaacaacaccaacggttcatatgtagatcaccaggtaagcagtgatggcaatggcggtgtctcgatggagatatttatcgctgacatggacaacggcggccctatgagccaagccataggtcgaaatcatcaagcccctcgcagagcaacccaataa

SEQ ID NO: 453042 - DNA, 1029 bp, Serratia marcescens
atgtcaaaagagatcaagaataaaaaaatcatctataaagatgtatctatccctgggtccgccaagacattgcagcaaatgttacaggatttactcactaagcataccaaggcggatatgcgaaaggagatggtcaaccccaacgaagaaaacctcttcaggttaataaacaaaaatgagacatttcaaggggttttgttctgccaattggttgcctttgagcctggtcattcacagagatatatccagttaaagaatgatgcagaatcttatgaaattcggtctgtgacctcagaagaactgtctaaaatgagtgttactgaggctgaaagtctgcaaacagaacaagagaaaataatcagggaatttattgattctattctatattttggtgtctttggtaatagtatagttgttatgcagtcgcgatccttaacaactcgtgagctggaaattcatctgaagtggctgctgggaacattgactaacaacatacctccagagtgtttacttaaagttaccgataaaccaaaggaggagatcattgaggaggttcttaaacgtcctgtgaagtctgtatctataggtgctccagtggcagcaatcaatgatatgagccaaggaagcgctaacccaagctgggtacctacaggaacagcatccgatatgctgaaaatcatgctcgctgagaagtgggaaagcttcattaaatctagtaagctggaagattgcctggatgatgctaatttagaagtcaccttaaaaatcacatataaacgcaagacttctgatagtggcgaacgtatgctgcgtaacttggttgatgcaaccaggcactatccggacgaagatgttacagtggaaatggttggcggcactaagttaacagggaaagacattaggctatggaatacagtcaagttgactatgcataacagcctgatagatgaacatgaactttatagccaaatgcacgaatggctgatgacgctcgtgaatgcgggacaaatagagcataaagatgactaa

SEQ ID NO: 453043 - DNA, 537 bp, Serratia marcescens
atgactaatattacaggacaaaaatcaacagtctttctacctagcgcagcgatgcacttggtagttatcgtgttgttgttttttgtagcctggaaaattgctgataaatatattgttttatcatcaataccttggggcgtactaactatactgttagcgcccattgcttatagcatagccttgtttcataagctttcagaaaccaggaaaaatgttgccgaagacataagtaaaggcgaagctagaagacttgcactccttgttgacaggaaaagaaactcatcaataacactgctaacaattcaaatcacaataatattgtttatagcgatacttagcctttcaaatggaaatgaagtaatacaaaatcacattaaaccattgaccaacctagcaatttcgttaatggtttgttctttttattcaatacttccttcagttcttgggatcaaagaagtcaatgattttgaagcaaaaatcaaacagcgaaaagctcagaataaacgagttaaagccactctcgaaaagttaaaatag

SEQ ID NO: 453044 - DNA, 495 bp, Serratia marcescens
atggttcagagatataaccctgattacgtcatgcatgcggcgcgctttgcgccgtttgcacgcgaagctgagcatggtgagttcgttaaattctccgattatgaagccttggtatcagaactcgccagcagccggcagatcaacgcccaaacgctgcaggtaaagctgggtatggctgacaccatcaaagaactgactgatcgagttaatgcgctggttgtggataacaaggcccaggccgacgcgctttctttgatttcatgttgctacaaacattctccgcacattcaaagcatgtgtgttgttgaaaccccagccactgacgcagcacttgcagctatcgaagctcggggagtggagaagtttgctgatgcctgggacgcggaaaccgcacgaataatgaagggtgcctttatctacccacaaatagagcggcgtgaatcgctttctaaagctgttcgtcagtacctcgccgagctgcgggaggccaaatga

SEQ ID NO: 453045 - DNA, 456 bp, Serratia marcescens
atgaaaactatcgaaatgattaaaaacctggcacagcgtaacagtgtcgtcgccagcgctgatgtgctggcggtgtttgcagagctggaagcgaaagaccaagcgcatcggatgcatgctgcgaggctgattagtgagcgtggggttttgcgtgaacgagtcacggagttggaagccatcgccaccgattacgccgataaattccagaaagcgcaggatgcagccaagcacctgatcatcatgaacgataaggacaaaaaacgcattaccgaactggatagaagcgagacgcaactgattgatgaacgtgatagtgcccacgcggctctggatgacatgtacgaggccataacagggaagcggcctgagtggagcaattggtttggattcgccgatgcgatagaggaagtggcgctgatcgccgctggcttcaccgtagagggggatgagcagtga

SEQ ID NO: 453046 - DNA, 783 bp, Serratia marcescens
atgacactaacgactgagacgatcaaacagtggcgaagcgatgccgagaatatcgcgcgccggagctgcgagtacgagacagaatattccgcagccgaggctatattggcgctaacggccgaactcctggctaaccgggaggcgcagccggtggcatacatcgcagattgcggaacgattttcagcgaaagcgatccgttctttgatgattacaagaatccgcaaccgctatatacggcccctcctgcgccatcatacccggaaaggttgccgtgccctgtgcatctgctaccggggttaaagtttggcaaaggggttccaacgcgcagcatgcttgatgctcttgttcgtcgggcagagtatgaggccgagcttggcgctatgacgccagagcaaaagactgaaaatgatgagcgattggaaaagttgaaagcgttaattcccccgccagcgccagcagtgaactcagcgccagattttgaggcgtggtttgttgaaaaatataagcagccatcgcgcctgatgaagaatggagatggcgcctacaagttctctggcgttcagatggctttttctgcatggagcgatggccgcgccgcaatgctggctcaacctgtaagtcagcgttacacgttgccggatagcgttcttgtacttcttaatcacatcgaggatgtgcttgacgatgaaaactggaaccggatcagcgttaaaaagtggaacgccgtaacaatgctggcagcagcgccggagggtgggaatgatcacgataccggacgataa

SEQ ID NO: 453047 - DNA, 213 bp, Serratia marcescens
atggctataacgttcacgccactgtcccgttggcagcataaaccaatcaccttgggcctcttctaccagaactttataataaccggtaaaacgggcttcaagaacagtatattcaccctgttgcctgagtttatcgcatgcgaactggcgcatggtttccagcaggcggaaacgggtctctggtacctgagtactgacctgaatcagggataa

SEQ ID NO: 453048 - DNA, 264 bp, Serratia marcescens
atgttgaccgtttccccccccgccccatccaccccgtcgccggtgcttcctggcggttacaccccacgcgagcgctttatccgcctgccggaagtgctctacaccaccggcctgtcccgctccaccgtgtacgagatgatgagccgccggcagttcccggctcaggtctccctcggcggtaaaaacgtcgcctggctggcctccgaggtcgagcaatggatggatgagcgtatcgccaaccgtcaccaggaggccgccgcatga

SEQ ID NO: 453049 - DNA, 237 bp, Serratia marcescens
atggcctacgatccgcaacaacagcgacctgaagaacagactatgaatggcaaccgcgagatgttgaaaatccgtcagccaggtgagactggcagtactgatttcaactgggagcaggtgcgtaaagcgcgggaggccgtcggccgaaaatcagttatcgtaagcagggaaggattggagatgcccagaaactgcaggatgagaacagagaaaaattgtcgcagcgcaaatcactga

SEQ ID NO: 453050 - DNA, 756 bp, Serratia marcescens
atgcgttcaaaaatcattgggcggttaggtgaaagcacactttcactctggtgcagcgaaaaaaatataaccgccactttcccatctgaagatcgtcatggatgggatctcttacttgagttcccaaaagaaatacataatatctcctctggagatcaacaccctcccgcaattgaatgtaaaattcaagtaaagtccacagataaactaacaagaacatggccaattaaactttctaatttagaaatgatggtcaagtctccactaccatcatttatattgttccttcattttggaaaatcaaactccgttaaaaatgcgtatctagttcatatagacaaagatatttcatcaaaaactctagaaagactgagaaaactgagtgttttagaaagaaaacatgactttcacaaccatacaatgacaatatcttatggtaacaaacatgaactagacacattagatggttcgggtttaaagaaaaaaatagaatcttacatcataaattacagtaattatgcttcaaaaaaggaaaagcaaaacaatgaagcaggctacaattcaaccaatagccatggtttcactctagaattaacggagaaagaacacaaagaagaattaataaatttattcttaggagagaccaaagaggctaaaaacttcaaaatgtctatatttaacaatagatttggaattaaggaggttacggaaaacttgcaccgtaatattcccaccaccttttattggtgtgaatag

SEQ ID NO: 453051 - DNA, 696 bp, Serratia marcescens
gtgcccggcgcacctggcatatgtgatttatacctccggctcgaccggcaaacccaaaggggtgatggtggagcaccggcaggtcgcgcggttgttcagcgcgacgaacgcctggttcaacttcagcgccgccgacaggtggtgcctgttccactcattcgccttcgacttctcggtctgggagatctggggcgcctggctgtatggcggccagctgttcatcgtaccgcaggcgatcgcccgctcggcgccggatttttatcatttcgtctgccgcagcggcatcacggtattgaaccagacgccgagcgccttcaaagcctttatccaggctcaggcgcacagcgaagcgcgccagcagctacgcgagatcgtgttcggtggcgaaatgctgaagccttgcgatcttgcgccgtggtttgctcgtccagagaaccggcagacacggttgatcaacatgtacggtatcaccgagaccacggtgcatgtgacttatcggccgctgtcggcgcaggatacggcgatcaccaccagtccgatcggcagccgcatcccggatttgcgcttgtatctgctgggcgccgacggcgaaccggtgccgatgggggcgatcggcgaactgtacgtcggcggcgaaggggtggcgcggggttacctgaaccggcccgaattgacggcggaacgttttctcgatga

SEQ ID NO: 453052 - DNA, 1035 bp, Serratia marcescens
  misc_feature (966)..(975): n is a, c, g, or t
atgagcaaaatccctttgtatcttggtcaatttgatcgcagaaattatcagtcttatctcaaagttatcgtgcaggaaacgcctgttggttggcgcacgatcgaaaaccctaagaaattgttccctcgtacgggagaagttgagtttaacgagactgacgctttgcaacttcgtaaggacgaatgggctgcttttcatgttggacccggcatacgcaacagagctcaggcgaaacatgcccgccgtatttatccttattatgatttatcttccggccagtcgttattggaagtgcgtcgccaattgagtttcaatggcataacgacagatggcgaaccaggattatgggctatccgttttgggccggatggtctgattctggcgaatatggctgagtcgaaatcaggatatttgattctgtccaaaagccagaacgtttatgaatatgatttccatgaaggtagtgtgatttccgtatccggcatatctgaaagtggaaagtcgttttatatgcccgatgtcgatgcatcacctgctcggatccatgactggacgccggataagcagtacatcgaaaacgttattcaacacctttcctgcgctggtttgacagccgaaatcgcttcatggctccgagtgcacacaaatgagcaaaatggaaaattaacttccggcgtcgatgctctgctggctgccgctcaaacgctccgggcaggagagttggctaagaaactggaggaagaagattcgctggctcgtcagtttaccgaatcagtgttgaaggaccagcagattgcctaccttctcgagcatcagatacaaaacattgcggaagaagagcgagtcgcgttgcgcgccgaacagcataaggcgcttgataaagagttttcagctgaacgactgcgacgccgtgaagctattgaaacggaaatggccgttttgaagaagacaaggaaaagcgagatnnnnnnnnnncgagatcgaagaagagatcgtacaattacggcagctcgaagaagaaaaattgcagattga

SEQ ID NO: 453053 - DNA, 807 bp, Serratia marcescens
  misc_feature (488)..(497): n is a, c, g, or t
atggcttactcagcgattcctgaagtacgcctcccggcgcaagcgagagccgtatcctgcgaagaattcggtcagaccgtcagagagaacaagttgctgacgcccgagggaaagatactcatgacgcaatttctggtgttgatgttggccggcgagtgcccgttgttatatggcccggaaacacaagacttccttgctattgccgaatcgctgatttcttcaggccgctccatccgactggttgctgatccgacgatgatttcctgcgaggatctttgggttcgcgcggggaatcatctggcgacaccgctttaccaggggttattactgagtggagcctcccgtccgcgaacgattctcgctgtcattgagtgtgtcgaatgttccggtgtgcgtttctggttaccggcgctgaaagatcaattacacagcggcgatttaccccgacgctttctgatttgcggcaccattgaaaatgaagattgcgnnnnnnnnnngaaaataaagggaaaacatcttcgcttgcggatggaaaacgtcatcattcgggatgcgattgcgctttctcctttacatctttctttagaaaatcatagtgagctggatcccggtccggcatcagaagattcgctaacagacaaactcgctatcgcggatgaaatgtcggccgggcgtctggatctggtaaataccctacgggcgatgaaaactgcgcatgaattcgcgccgcttgatgataaaaacaaaaccatatatcagaagtacttaatcgatttatacgccgatttacagaataacgtgatgtaa

SEQ ID NO: 453054 - DNA, 546 bp, Serratia marcescens
atgatagagccaaatttattggtcgttttatcatctttcagcaatggagtaccggtaaaagcaacgaatgcggctttcggcaacgcctgcgtcatgcggatatggttttcaccaccctggctacggtggccttcatcaatcaacacgataatatctgaactggtattgatgcattcaggctgcctgatggcggtattaaacttctggatcaacgagaagataatacgctcagtgcccttaccgatctgctctgccaaacgcttgccggatgtcgcgatcgccgctgacttgtctctcttcccggagagctctccactggagataaaggtgcggctaagctggttttccaaatcgacgcggtcggtaaccaccacaatgcggcattgctttaagctttcatgcaagattagcgctttgctcagaaataccatcgtcaacgatttacccgaaccggtggtatgccaaataacgccaccttcacggctaccatcaggtcttttgatattgatacgctcaatcaagcgtttgatgccaaacacttgctga

SEQ ID NO: 453055 - DNA, 690 bp, Serratia marcescens
atgaagacattgttgaaaaatacaggtttgatttttaatcttaccaagcgggatgttgaaagtcgctatcgtgggactagtcttggtatcgtatggtcactgctaaaccctgtgattatgctttctatctatagctttatttttggctttgtttttaaagccaagtgggggctgacaacgacagaaaattacactttgattatgtttgccggtctgctgacacatggttttattgccgaatgccttggcaaggcgacaacaatatatgtatataatgtcagctatgttaaaaaagttttatttcctcttgaatccttgtgctgggtgtctgtttttggcgcattattccaattctttatgggatgcattgtatatagcatttcattatttttgtcatcgctaggtgtttatattcgtgatatggggcaggttgtttcagttatcattgccttaatgttatttatgtcgcctatattttatcctattactgctgttccagaacaatatcgtatgctgatttatattaatccgttaacgtttattgtcgaagctttacgtgatgtcgtcctgtacggaaaattattcagtcttgaaggctatgcactctattggggtatcagtattgtgctgtacgtattagctataacttggttcaaaaaggtaaagagaggctttgctgatgtcctctaa

SEQ ID NO: 453056 - DNA, 2454 bp, Serratia marcescens
atgcagcgccaggccgcgctgctggccgagcggctgacggcggccggcattcagccgggggatatcgtcgcggttgcgttgccgcgctccgtgcgcctcagcctggcgctgacggcgattgtgcagaccggcgccgcctggctgccgctggacaccggctacccggacgagcggctggcctacatggtggaggacgccaagccgcggctgattatcaccgagagcgcgttggatgcccgctttgccgcgctggcgccgacgctgctgttcgatgcgctggacgacagcgggcgcgaaccgcctgctcgcctgccggcggggaacggcgattatcccgcctacgtactgtatacctccggctctaccgggcggccgaaaggcgtggtggtgaaccaccgggcgatcgtcaaccgcctgttctggatgcagcacgagtatgcgctcgatgcgcaggacgtggtattgcagaaaaccccgtgcagcttcgacgtttccgtctgggaattcttctggccgctgatggtcggcgcgcgcctggtgatggcgccgccggaggcgcaccgcgatccgcaggcgctgacgacgttgatcgacgactatggcgtgaccacgctgcatttcgttccgtccatgttggctatctgggtggaggcgctgaacgagcgggcgccacagcgcgccgccgccagcctgaaacgcgtgttctgcagcggtgaggcgctgtcgtgtgaactggcttcccgctatcaggcgttggttaccgcgccgctgcacaacctgtatggcccgacggaggcggcggtcgatgtcacctaccaaccggcgtccggcgcggcattggcggcggtgagcggcgccggcgtgccgatcggcaaaccggtctggaacacccagttgagcattctcgacgcgatgctgcggccggtgcccgtcggctgcgccggcgatctttacctgcgcggcattcagctggccgatggctatctgcatcggccggggctgacggcgcagcggtttgtcgccgatcccgccggcaacggcgcgcgcatgtatcgcaccggcgatatcgcccgctggctggaagacggcagcgtcgagtatttggggcgcagcgacgatcagctgaagatccgcggccagcgtatcgagctgggggaaatcgagcaggcgctgctggcgcagccgggggtagcgcaagcggcggtgcacgccatcgaactgggcgagggcgcgacggggcttggcggcgccgatatgcgccaactggtcgcctggctgatcgcccaaccgggcgtgacgctggataccggcgtgctgcatcaggcgctggagcagcgtttgccggcgcacatgatgccggtcagctatgtcatgaccgacagcttcccgctcagcgccagcggcaagctggatcgcaaggcgttgccgcggccgcagctgagccaccaaagtggccgcatgccgcagagcgacagcgaacgcctgctggcggcgctgttcggggaactgttggggcgcgagacggtgtatgccgacgacgacttcttcgcgctgggcggccattcgctgctggcgatgcgtctggcggcggagctgcgtcgccgcgtgcctcggccattgagcgtcgggcagatcatgttcgcccgcagcctggagaagatggcgcacctgctcgatgacgcgcaggcggccaactcggccgagagccgcggcgtcggcgaatgcctgcagctgcgggccggccaaggcccggcgctgttctgcctgcatccggcttccggtttcgcctggcagtactcggggctgagccgttatctgccggggagctaccccatcatcgggctgcagtcgccaagaccgaacggcgccatcgccacctgcgaggatatcgagcagatggtcgatcgtcatctcgccaatctgcgccgcctgcagccgcaggggccttactacctgctgggctattcgctcggcggcacgctggcgcactcgatggccgcgcgcctgcagcagcagggcgaagaggtggcgttcctcggcatgctggatacctatccgccggaaggccaggattggaccggccccagcgaggaggacgcgcagaaagaggtggcgcaggagcaggccgagtttatggcggaagatcatggcgatccggcgctgatggcggagaaggcggcaatgttcgatagcatcgtcgccaactaccgcgacgcggtgcgcattctgtcccaggcgcgcagccggcgtttccacggcacggcgacgctgtttgtggccgaccagacgctgccgccggagatggatatcgacgccgtgtgggcgccgtatctggatgggctgatctgccatcaccagcgctgcgaacacgcggacattctgtcgccggcttcgctggagacgctcgggccgttgttgcattcgttgctgacgcggcaatacgggttggtataa

SEQ ID NO: 453057 - DNA, 390 bp, Serratia marcescens
atgaacgagatatcaattcgttgtggcgtgaccgaacagggcgaggtgccgctggcctatgaggactggggcgatgaggcgcacccgccgctgctgctcatcatggggatcggcgcacagcttttgctgtggcctgacgacttctgccgcgccctggtggccaagggatttcgggtgatccgctatgacaaccgagacgtcggcctttccggcaaaacgcaggcacaacgtacgcagccgttgtggctgctgatgttgcgcgcccagctcggttggcaaacgccggtgccttataccctggcggacatggcggcggacgcggcgcatctgctcgatcatttacgcattccgcaggctcacgtactgggcgcttcgatgggggggggatga

SEQ ID NO: 453058 - DNA, 348 bp, Serratia marcescens
ttgaaccaggcgctgaccggccggatctggttctcctggcagatgtttcaggcggtggggctacccaatccgctgttcggcatgaatatagagccgtataagccagtcgatttcttcttcatcgccatgttttattcggccggtggcatcgcctctgtcgtcatgcttttttgttattttcacttgttgggcaatatgcgcaggctgagtcgattcatgcgctgggtggtggtggttttcctgttaacaaccttgacggaaacctattttttggtcccggtatttaacgtgtcgttattgttgctgtgccgtggaaaagaaataataaattctaagctggagggttaa

SEQ ID NO: 453059 - DNA, 159 bp, Serratia marcescens
gtggccgactaccagcaactgcaaaaacaggtgcagcaaagctcgccgttcgtcatcggcctgcaggcgcgcagcctgattgcggtgcgcgacaacctcaagggctatgtgcagggcatcaaccctgacatggtgttctacagcaaggtcagcaagtaa

SEQ ID NO: 453060 - DNA, 573 bp, Serratia marcescens
atgctctgtgacactcatcaggtgctagggctgtttgcggtggctgatacggtgaaggaaagcagccgcgaggcgataagtcagttgcatagtctgggtgttaaaacgctcatgctgaccggagacaatgcgcacactgcgcaggccattgccggtcaggttggtatcgatgaggcgcggggggatcaactgccggaagataaactgcgtgctgtagaaacatttacggcgcagggcacgaccggcatggtgggcgacggcatcaatgatgcaccggcgctggcccgcgccgatatcggctttgccatgggtgcaatgggcacggataccgccatcgagactgccgatgtggccctcatggatgatgatttgcgtaaaattccggcttttgtccgactctcccggcagacgtataacattctggttcagaatatcgttatggctattgggatcaaggcagtgttcctggccctgaccattgcaggtatggggaccatgtggatggccgtattcgcggatgtgggggcaagcctgcttgtcgtggcaaacggtctgcgcctgttgcgtaagtaa

SEQ ID NO: 453061 - DNA, 282 bp, Serratia marcescens
atgaacaacatgcctaccgtgctggttggcgcgctctccattgacggcagcaccgctcagggcgtggtgaaggaggcgatgatttacgccaacatcatcggctgcgacctcggtccgaaaatcacccctatcggtagcctcgctaccctgctgtggctgcacgtcctggcacagaaaaacataaccgtcagctggggctactacttccgcgtgggcatcgtgatgaccctgccggtactgtttgtgacgctggctgcgctggccctgcgcctgtctgtttaa

SEQ ID NO: 453062 - DNA, 552 bp, Serratia marcescens
  misc_feature (411)..(420): n is a, c, g, or t
atgaccaaaatggtcagcgatatgctgttcctggcacaggcagataataatcagctgatacctgacagggtcatgtttgacctcagagcggaagtcatgaaagtcttcgagtttttcgaagcctgggccgaagaacgcaatatcacgctcaaatttaacgggatgccctgtctggtcgagggagatccacaaatgtttagaagagcgatcaataatctgttatccaatgccctgcgttatacccctgagggacaggcaatcaccgtctcaataagaaaacaggggagcttttttgaccttgtgattgaaaatccggggaaaccaatccctgaagagcatttatcaaggctgtttgaccgtttttatcgggtggatccgtccagacaacgaaaaggagaaggcagcggcatnnnnnnnnnnggtcttgcgattgtgaagtcaatcgtggaagcacatcacggaagagtgcatgtggaatcggatatacgctcgacacgttttattttatccgtacccagactggagaaaatgattccggatccccaacactga

SEQ ID NO: 453063 - DNA, 462 bp, Serratia marcescens
ttgctgacctggctctccggttcgacctattcggtggagccggcgcaggcgctgcgcaccgcgctgatcgccgccggattgctggtattggcgccgctgtgccgccgctggctgaccatcctgccgctcggcggcgccaccgcccgttctgtgggcattgcgctgacgccgacgcggttgaccattctgttgctggctgccaccctgaccgcgatggcgaccctgaccgtagggccgctgagctttgtcgggctgatggcgccgcatatggcgcgcatgctgggcttccgccgcgcgctgccgcaaatggtgatcgccgcgctgctgggcggcttgctgatggtgtttgccgactggtgcggacggatgctgctgttcccgtatcagatccccgccgggttattggcgacctttatcggtgcaccgtacttcgtgtatctgttgcgtaagcagacctcgtaa

SEQ ID NO: 453064 - DNA, 576 bp, Serratia marcescens
atgggaaaagtacctgaacgttcttttaccgatgaggcaaaagaacctgtaattaatcgagtattccaattagtggatcgatacccatctagatctcaggctgctagggcttgggggatgaatgttagtaccctacagaactactacaagcgtaaggacatcgctcctacgccacgtaaagcacatcttttgaagattgccgaacaggagggggtttctttggagtggcttcttactggtcagggtaagcccttacatcaagagaacaaaaagaatgaaatgaccgatagccagagttcaaaacctgcatcaaaaaccaataccagcaaagtggatgagaagattttagaaatgctgtcttttctatcacttgatgaaaaagaaaaaattgttgaggttcttgtccgtaaaggagtggagattgttctgtgtcttcttgatgataataatatcaagctgttacagcttccagatgaggagcgggaacgtttgatggcgctacatgaggccaaaaagggggcatttgaagataatcaagacaatgagttgagccgcccaacgcacaaggccgggtga

SEQ ID NO: 453065 - DNA, 252 bp, Serratia marcescens
atgatgagccaaagagaagatctgcgtgctgactggcaccctgaaatcatcaaggcggagatccacaagcgtgggttgtcgtttcgcgctctttccctcaaagctggctacaagaaagattcgctaaagaccgtgttacgcacgccatgtaagccctatcagcagatcgttgctgatgctctgggggttgagcctgaaataatctggcctagccgttaccaaactgaaagctacatgcgcaaagcatcatga

SEQ ID NO: 453066 - DNA, 2046 bp, Serratia marcescens
atgtttcttgtcgcgaaagagttagttgggattccagggttaccagccacaatcaagggtattcgcgaatcgcttaataagtctgctggcggtttacctgagtttgttcgtaagcgctctggcaccaaggcttttgaatatcacattgattgtctacctgagcaggctcgtgaggtcgttcagcaacggcactataaatcagtgctggaacagtccggttgtaagtctgctgatgtgccagtcaagcgcagcaacacaatcaagcccagtgatgagctggcgcttatgcgccagtgtccggcactggttgagcgcgaggtttcagcgctgacggcgcaacagaagcttgttgcagatgcacgtgccgccttggccatggaagttgaacggctgcgtggcgctggtatgtcccgtgctggcgcagtgaaatatatcgtcaaggcttcccgtgatcggtcactcccttcacatctgcaaggccatgccgatattgctaatgcccgtaaaggcaccacacgcaccggggttggcgaacgtagccttcaggagtggctgagtatatttctcagcacaacatcaggtggcgagcgcctggctttattggcccctggtcacctcaaagccaagcggccggagcaaataaaatggttacctgatttcctggcccactggcgtgacccgcgtgggccgagtttgacagaggcttataaccggttttgtactgaatgggggcagacctatcatgatcagcctgcaatgctgggcgtctgcccctcttatgatgccgttcggcgagcaatggacaagctgccgcgcagggagaaagcgcgaggccgcgtaaccggttctgctgcgctggcgtatgaggtgtatcagaagcgggactggtcgcagatgcccgttaatgggtgttggatagctgatggtaagtcactcaacatgaaggtggcgcaccccgtacatgggcgtccatttacgcctgaaatgacgattattattgatggccggacacgctttgttgtcggctggagtttgtctctatcagaaagcatgattgctgttgccgatgcttaccgacacggaatgcagcattacggtaagccgctactcgtttattccgataacgggggaggtgaaaccaacctggcacttgatgcggatattaccgggatattcccacgtatggggataactcaccctaccagcacacccggtagagcacagtcacgcggcattatcgaacgtctgaacggcgttataccgcgctcaatagcgcaacagtacgatacctataatggccatggtgccgatgctgagtatgtgcgcgttacttcgcgagatattggctcagcaatcaatgctcaggataaagaccgggagctttcatccaggcagcgtaatgccctcgctaagctaccttcctggcgacagttgattgatacggtggaagaagaggtcaataaatataacaaccatcacgagcacagcgaattgccgaaagttaacggcaagcatcttaccccggcagcataccgccgtgctgtgttagaagctgaaggtgatgaaattgaatatctgtcagagcttgagttacgcgaagcctttatgcccgagcaaatccgtaccgctcagcgtgggtggctctcgttatttaataatgattacttcgctgaaactctgattaatgtagatggtgaggacgtcagagttgcttttgatatccacgatgctaccagagtaattgtgcgtcgaatggatggcagttttgtttgtgaggccatttggaacggtaataagaaagcagctattccagttaatgtcatggagactgccattgagaaacgtcgtcagcgtcgcatgaagcgtgttgatgagcagcgtagcgaaatcgaggctgaagccagaccaatgattaacgccaaggtagtacctgattttggtagtctgatcggctcggatgattttaatcatatagagagcgaagaaatattccttttacagtcacagcgtgacgagtatatgcgtaaaaccggcgcacaccgttag

SEQ ID NO: 453067 - DNA, 897 bp, Serratia marcescens
atgacagcgattatcgaacggttaaaagagatcatgcagcgtaaaggttataaccaatctcatattgctcgtgcgattggtaagagtcctgctgttatcagtagctatataaatgataaatacaacggcgacgttaaaaatctcgaagaagaactggccgtatttattcagcgtgaaactgataaagaccgtatccgtcgggtgctatccaaatttgtaccaacgtcaatgtcatcgcatggtctggaggtggtgcgtatggctcacctggactgtgatattaacgtgatctacggcgcagctggcttgggtaaaaccatgatcctgcgtgagtacgccacccgctatcgcgatgcaatcctgattgaagctgatcctggctacacggcccgcgttctgcttgaggagttgtgcaaccgcctgggccagagcaagcgtggcaacatgcatgaactgagtgagagctgtatcaccgctctgcgtgactcgggccgcgtaatactcatagatgaggctgagttgctgccttatcgcgctctggaagtgctgcgccgtatccatgataaagccggtgtaggtgtcgttctggcggggatgccacgcctcattattaacctcaagggtaggcgcggcgaattcgcccaactctatagccgcgtcgggtttgctctggatttacgtgatcaattaccgcaagaggacttgcttaaaatgctagtcagtatggtgccagaagccgaggacattgctgttggcgaggcattctgcaaagcagctaaagggaatgcccggcgcatgttcaaattggcgcgtggtgtcagtcgtgccagtgagattaatcagaagcctatcgataaggtcatgattaataaatttaccgaaatgctaatcaactag

SEQ ID NO: 453068 - DNA, 192 bp, Serratia marcescens
atggctgcacttgttttaatcagtatagagaggcaggaaaacggattgctgaaagtcgaataccaatccggtgagagtgatcgtgctgcatgtcagcatgagttgaacacggcaaatgaaatcaccaatgcaattaagattttcatttgcgaacgtaacatagcaaaaaaagaggtgatacatgcccactaa

SEQ ID NO: 453069 - DNA, 585 bp, Serratia marcescens
atggctgaccgtaaaggtcgtctggtgccaatagagcaagtgtctccgttcgatctcgaaatggacgcctttgtacgttctttggttgatgaagccgtaacggaaagcgtgcgtatcaaggtatttaaaaataaagcctttgatgattgctacgcctggctggatttggtggcggaaaagtataaccgccaacgtggcggtatgaaaggtaacgtttccttttcctcgtttgatggcagccaacaaatccgcattgctgtccaggactcattaacgttcggaccggaactgcagatagccaaagacattattgacgagtgccttaacgaatggtcagaaggtgcagacaagaaacttaaatccgtcattactgatgctttccaggttgaccaggaaggcaagttgaatacagggcgcatcctgtccttgcgccggatcaagattgatgaccctcgttggactcaggctcaggattgtatttcagagtccttattggttgcggtcagtaaaacttacattcgtttcttgaaaaaggatgatgaagggaaactggtcagcattccattagatatcgcggcggtgtga

SEQ ID NO: 453070 - DNA, 192 bp, Serratia marcescens
atgaccgccgaacagttcaataaactttacccggtaggctcgctattttatgaacaaacaaagcacgaccttattaacggccgtgcagtaaagactgtagcgaaagccggtgattttaaatgcgggaccattgttgaaattagcgtattgccttacttcgttaatatcaacaacctgaaaccggcaaagtaa

SEQ ID NO: 453071 - DNA, 180 bp, Serratia marcescens
atgagcatatttttgtcgggggctaaatgcccaagttgtggcaagtctcgcgctctggaaatggaagcggaagaagcggcgcatgatgagcagtggattgatattgttgtcacctgccttgagtgccacgcggtatttaattctttcatcaacgttaatgaaatggagcaattgccatga

SEQ ID NO: 453072 - DNA, 711 bp, Serratia marcescens
atgaataaagagcgttatttgcagaaaatcaaaaagctgttgaacctcggccgccgcagcactaacccgaatgaggctgggattgctattcagcaggcgcagaaacttatggccgcccacaacattagcgccggtgatgtcgatttgctggaaatcagcgaatttaacagtaaaggcgcaccatcaaacgctgccagcgttccaacctatatggctgatttatgcttgttgatttctagggctttcggtgtgcggtatttttgcacccacaccccagcgggttatcgttccacagctaaaaatgtggtgacgttctttggtccagcagagcggccgcagattgccgcctatgcctttgatgtcttgtcccgtcagatgatgaacggacgccgtgaatatatcggcgggatgcgatccaacactaaaccagcgaccaaaaccgcacgcggggacacgttctgcgagtattggattatcggggcttaccaggcaattaccccgctgacagttaccgaagccgaagaaacgttaatagcggcctatcgccataaattaactgaaagccaggggctgacaaccaaagatacacgcccggcgaataaatgccggggagctgatggtgcggctaacgcgggttatacagccggtaagaacgcgaagctaaatcagggggtaagtgccgagcagctaaaaataggaggggccgcgtga

SEQ ID NO: 453073 - DNA, 456 bp, Serratia marcescens
atggaaagcctaaataaaaccgaaacattgcgccaggcattggcaatgattggccctgcaaccagtaaaaagctggaagagtttaccggttttcctgctagccgcatcgggcctttgctaacgcgtagtaccaacgttggcacggttgtatgtggttgggagggtaacaagcggctctacggtttgccaggccagcttaaacccgccaaagcaaagcccgtttatgtgccagcggtgcgcactcggcgcgtcacttgccacaatgtggcgtttcaagttgccagcaacctggcggccaaggcggagcaggcttgcttatttgatagagctgccaacctgtggcgcgaagcggccgacctatcgatcaccccggagaacctcaactggtgcgagtcccgcgaactgtattgcaagcgttgggggccgtccattttacggagagcaggtcatgagtaa

SEQ ID NO: 453074 - DNA, 267 bp, Serratia marcescens
atgagtaaggaaaagcaattcatcaaagatatgatccgttgcaggggtatcgactttgcccgccttggaatgatggttgaagtctatggtgacctgggaaccatcgttggcatgaacggtagcgctaatctcgatgtcgttttcaccaatcagttgaaatatgggaaacataagcacaactgccacccgaccagtgaggttaagtattttgacgccgaagggaaagtcattgcggattacacaaaatccagcggtagcgcgggatga

SEQ ID NO: 453075 - DNA, 423 bp, Serratia marcescens
atgaccaagacacccaacgcgcgcggcctgattggcgcgattaaggcgggccaggctcacctgggctgggacgatgcgacctatcgcggcgttctatcgcgactcacgggtaaaacttctgcaacgcagtgttcgctgtcggagctgcaagccgtccgtgagtatatgcatgaacaaggttaccctcgaaaagtagcccaacatggccgaaaaccccgtgttgcggtcaacaagaagtcacttttaagcaagattgaagcccttttggctgacgcaggccgtccatggcaatacgctgagtctatggctaagcgcatgttcaaggggcggcaagcgatcgagtggctgacggaggaagagctgacaaaattgctgcaggcattggctatcgacgctaagcggcatggtcgcgggaggaggtaa

SEQ ID NO: 453076 - DNA, 435 bp, Serratia marcescens
atggacatagaacaggttcgtgagcttttaccagactccattctgcagatcgttgaactgataggatacccggcaacatcagctctgttggcaaaactcggtggagtaacgttcccgttctataagggattaagcgagcacgacagtgctcgcgccgcattgttacgcgaggctatcggcgatgaaaatgtgcggattcttgttaaacactttgctggtgaggtactctacgtaccgcgatgtgatagggcgttgcgtgaactgcgtaatcgcgcgttcctcaacgagtttgatgagctttgcaaaagtggggtatcagcgctaatggtcatgactcagctttgccccaagtatggtttcagtgatcggtttgcatgggggcttttggctgacaataaggccagaaaactaaacacgcaaagcagtcttttttaa

SEQ ID NO: 453077 - DNA, 510 bp, Serratia marcescens
atgaacttggctatttcaattattgtgtgttttagtgccttgtgggttatatatgatgcatcaaaaaataagcttcaatctcctgtggtatgggggctttcaattttatttctttggtttattgcattacctgtttatctttttaaaagaaagaaaatgattgtgaatgccacaggttttcacgagtcaggtgtggaagataatgcttggcatctaaacaaaagacagacccctgcatgggtaggatatgttttagttatcgctttttcagttggctattatagctggaacttatctaagggtgaacttcctctgtgtgaatccaaagaggtcgcggaggttttgagtaaaatcgtcgatggtgatagcatctccaacccagcgcagtatagttatgaaatgtttaatgaggttaggcattgcaacttaatgattaatgacacgcccaggtcatttactgttaaatggtacagtgaagataaggaccaattcctagttaagtttgactga

SEQ ID NO: 453078 - DNA, 546 bp, Serratia marcescens
atgttaaccaaagacaaaatcattgaaaatatcctcggcaaagaaggcggttatgtcaataaccccgacgatgccggtggtgcgacccgttggggcgtaactcagaaaacagcaagagcgaatggctataccggtgatatgcgcaatctcagccgtgaacatgcccgccgcatcttggaggctgactattggcatggccctcgcttcgatctcgttgctaacctctctccttccattgccgcagagctctgcgataccggtgtcaatatggggccaagcgttcaggctaagtggctccaacgttggcttaacgcctttaatcagcagcaaaaactatatcccgacctgattgccgacggtcagatcggcccgcgtactgtcgccgcgctgagtgagttcctggcggcgcgtggcaaggaaggcgaagaggtgttgctcaaagccctcaattgcagccagggtgctcggtatctcgaactgacagaacagcgccaagcaaatgaaaccttcctctatggttggctcaaagagcgtgtatcgctatga

SEQ ID NO: 453079 - DNA, 624 bp, Serratia marcescens
atgaggcttttcctggcgttgttaaaggcatactggccccagttgttgctggcagggtgtgcctttgccagtggctatagcattgcaaccaatggcaatgaaaagaccctcgctaaacaagaactggcctttaccaaaaaattcaccgaccaatcgtccgcgttcgaggccgaacgaaccgcctggctcaatgaaaagacccagacggctcgagaccagaatgccgctctgactgccgcacttgcactgcagcaacagtaccaggacaaagccaacttgctttctaatcagttggccacgactaagcaacaactggcggaatctaaagccaagtaccaaagggatattgtcaatgcgactcaaaatgatggtgtgggctataccggccttggccctgatgggctgtgtctctaccagcaggcccttggatacccctgtgatcaacgtctgcccgaaacccacagcggagcagctgcgtatcccgccgatgccacctccccccgtaccgggttattaccggaagacttactcgcgcactccagcgactacggcgaatggtgccagtcattaaaggcccagttggagagtctcaaccacatttataataatggaacaaacaaatga

SEQ ID NO: 453080 - DNA, 303 bp, Serratia marcescens
atgataaatgatattattacaagcaccaatgtcaatgcagttatttgcgcgcttattgccgtgcgcctgctgacgtttaaacgcaatggcgcaacgcatcgctattggggtggtttcctggcctatgcgttaatcgtcgctacggcatccgtctccattcgggtatttatggggcaatacagcaccacaacggatatctcggagctcgtgataaatatcgtgttgtgtattgcagtgtttagtgcgaaaggcaatgtggtgcaattggtaaagcgcctgggcgggagggaaaccaataaatga

SEQ ID NO: 453081 - DNA, 501 bp, Serratia marcescens
atggcctactcccaggaaaagcgagacggattgcgcagggcttatatcttcgggcaaatgtcgctagagattgcctcggcgcaagcgggcgtggcgtttgttacggctcgccgctggaagaaggatgcccaggatatcggggatgattgggacaagttgcgggctgcgcatgtcattgcgggtggtagcctggaggagcttggccgtgccgttttaaccagcctggtcacacagtatcagagcacgctggaagcgctgaccattgacaccgaactgactgcgcaaaagcgagtcgaattgctggccagcctggcagatgcttttaacaaggcaacggcagccagcaagaaaatattgccagagactgacgaactggcgaccgcttgtgaagtgatcaagaagctgagtgaattcattagtgagaagtacccacagcatcgcggtgtatttcttgaggtgttggggccgtttggtgaggaactgaataaacactatggctga

SEQ ID NO: 453082 - DNA, 204 bp, Serratia marcescens
atggctgacaagttaatcaaaattgcggagggtcagtatgtcatggccagctcggttactaacgttgagctggggtgtcatggtgatgtctttgtctcaacagaccaggggaaatacacccttgagctgggttatagcgaaggccgttacgatgggcttaaacgcattgtggcagaaatcaacaaagccttatccgatgaataa

SEQ ID NO: 453083 - DNA, 831 bp, Serratia marcescens
atgtcgctgtgggaaaaatgggaagagatccttcgcaataatggtgctgatggggaaatgctggccaacgccttctatcagcagcacaaggctgaaatggatgagggggcggtggtgtcctggtcagcccggcctattctcaccttgatgatgatccgggcgcgtgatggtcataacaccttcgatgcggagtatcagaatgacccagtgaacggcgaggatgccccattcactggctgtattaatttctgggtgaatcggctcaacgagtggatcttctacggcgcatgtgacccgagtctaggcaaagccggtggcagtcgtgacccttccgcgcttctggtgggtgggtttaaccgccacaccggcattcttgatgtggttgaagcggccattcgtaagcgcgtcccggataagatcatctctgatgttatcgagttacagcgtcagtatcgttgcctggtctgggccgttgaggctgtccagttccaggagttcctgcgcaccgagatggtcaagcgctcggccgcgctgggggttcccgttcccgcgcgtgcggtaacaccgcataccgacaagctgctgcgcatcgagtcgctgcagccccatatggccaatggcctgatccgtctgcaccctgggcaaacaacattgattgaccagttgcgtcatttcccgaaagccgaccatgacgatggcccggatgcgctgcatatgttgtgggcgttggcctcatctggctttggtaatttcagtttcacccgcgttccgaaccgtagcgatgatcgtgatgatgatcgtggtggtcggttcggttctggaggttggtaa

SEQ ID NO: 453084 - DNA, 1575 bp, Serratia marcescens
atggttcaaatcgttgaccagtatggtcgcccactcaatcgtgaagtgcttaaaagcccacagacggcacgcgtagcgcagtttacacgccaatggccaagccacccgtctcttgggctgaacatgcgccggttaccgcatattctgcaagcggccgagcgtggcgatctggccgcacaagcagacctgttcgaagacatgatcgagcgtgatggtcatatcttttccgagatggccaagcgcaagaacgcactcctcacgttggactggagtattgagcccccggagaacgccacggcggaagaacgtaaactggcggagatggtgtcggaatggatgaaagcgctgccggagtttgaagacatcactctcaatgcggccgctgccattggccacggtttttcggcacaggaaattgagcggtgggagttggaggataaagtctggttgcccaccaagattgtgttgcggccgcaccgctggttttcaaccactcccgatgagaaagacgagatacggctcagtgatggctcaatgaatggggccgaactctggccgttcggctggctggtacatacccataacgccaagtccgggtttattgcacagtctgggctgtatcgtgttcttgtctggccatacctctttaaaaactttgcagtgcgtgatttggctgaattcctcgaaatttacggtctacccatgcgcgtaggcacctacctggccggtgcaactgataatgagcgtgacgcactcatgcaggcgttggtcaccatgggccatgatgcggccggtattatccccgaaggtactgagattgattttaaatcagcggcaaccgggcaggctgatccgttcgtcacgatgatcgagtgggccgaacggactcaatccaaggttatcctgggcggcacactaactagccaggcagacggtaaaagctcgaccaatgccctgggcaatgtgcataacgaggtgcgtcacgatatcctggttgccgatgcccgccagcttgaagggttctaccggggctttatccgtatgctgctcggcatcaacggctataacgtcagttcccgccgtcagccacgcctggtatttgatacccgtgcgttggaaaacctcaaggatttcagcgagggggtagctactctggtcgagcgggctggcgtcgaaacgatcccggtatcctgggtgcataaaaaggctggcatccccgagccgaagaatggcgagccggtcttgaagcgccaggaacagttaccgcaagcggggttatcacggcagtcgccatatcgttcatttgctgccctcagtaccttggctgacgagatagacgacccggcgcaggttgccctggataatgcgcaatccgtaccagacgccatcaacgctgccatgcaaaaactgattgctcctctggtaaccgcgctgcgtgatggcaccagccccgatgatgccctggatattgtcgctgccagttatccgacgctggatgacactcagctgcagcagctgcttgcccaggcattatttgtggccgatatctgggggcgtttgaatgccgacagctaa

SEQ ID NO: 453085 - DNA, 1266 bp, Serratia marcescens
atgccgacagctaatgtcgatctggcctatgccatcggcctgcagccagaggaggccattcgctactttgagtcgaaaggctacacgatagggttcaactggcatgacgttgaggcccgcgctcatgccacctcgttcaccgttgccggagtattaaagcaggatgttctgcaggatattcgtgatgcactgagtgagagcctacgggaaggcaaaacctttgatcaattcaagcgacagctcacgccagtgcttgaacaaaagggctggatgggtaaagggttggtggccgatgaagatggggtgctgcagggcaagcaattgaccccgcgccggttgaaaaccatctttgaaaccaacatgcaggtggcatataacgcgggccggtatgaagaacaaatggcgaacgccgaatttcgccccatttgggagcgtatcgccatcatggatacgcgtactcgcccccgtcatgctgcccttaatggtttcactgcccgctatgatgatccagtctggcaattcatgtatacccctgatggtcacggttgtcgttgccgtattcgcagcaggacagaagcggatgtgcagcgcctagggctgaaagtcgaatcgagtgaaggccgcattgaaaccgtgcagcaagcctgggggccaaacgagactcggcaagtccaggctctgcgcatcaatggcgagctctatacgccggatgcgggttttggccacaatcccgcccagggaaatcttgccgcactggggcagcggttgatggataagtctgcgattgccacccctcgcctggcctcactggccgttaatgaaaccctcggtaatgaaaccctattaaaggccgtttcaaatgacgttaaaaagtgggttaaccaggtagctgtccaggctaaaacctctggcgcagtgcgtcatgtgggggctattgagccacaggtattgagcgccctggaacagcgtggccaggcacccgcatcggttgtactctccgctgtcgatacgtctgtacttgcggcaccaggcccgctctggggggagttaccggcgttgctgcgctctgccgaggcgacgttgctcgatggcgataacctggtatacgccatccgccagggcaagcagctctatggtgtcaccgctacccctgcgcctaacgggttgatggttgatgtgatgcaccgtggcgcggcattaactgctgacaacctgcaggcgctcaacaagttgcctgtgctttctggggggatcaatgtcccgtaa

SEQ ID NO: 453086 - DNA, 552 bp, Serratia marcescens
atgtcccgtaatattgagatcacatacaacatcaccgagtttgaacgtggcctgggcgagttgatccaccgtctggaacatcgtgaacccctgatgcgtgagatggccgctgcgatgggcgatgcggtggaagagaactttaagaatgagggccgacccgcctggatgggctggagccccgcttatgccaagaaacgggcaggtggtaaaatcctgcagcgttctggtcgtctggccagcagcgtagcgcagagcagtgataacgacggtgctacggtcgggactaacgttgtctatgctcgcattcaccaggaagggggaaccatcaagcgcaaggcgcgtaaacaggatctgcatttccggcaagacaagagcggcgaaatcggcaatcgatttgtgaaaaaatcaaagtctaactttgttcagaccgttgcggtcggagcctacagcatcaagatgcccgcccgtccttttctgcatatcaccgagcaggacattaacggcatggaaaacaccgctgaaagctatttcaagcgcataatcgacaattga

SEQ ID NO: 453087 - DNA, 1146 bp, Serratia marcescens
atgaaacaaaaacttttagtcgccgcactggccaccgaactcaataaaaccgcttctggggaaatccaacttttcccggccggggagtttcgggcccaagatggtcgtccaaccgagtgcgccaactggttaatgaccgccgaactggcgcaagtgctgattgcggcggcggatgcacgcaccacgccttatgtcctcgattacgaacaccagacattacgtgcagtcaccaatggccaaccggcaccggctgcgggctggtttaaaaagctggaatggcgtgatggcgttggtctgtttgctgttgatgtggtttggactgatgccgccgcagccatgattggcaacctcgaataccgttacatctcccccgttttcgcctatgacaaatccggtcaggttcggaagatacttcatgccgcgctgaccaacaccccggccctggatgatatggaggaggtagtgcttgctgccgcctcgctcctggccactgcctcaaccacagaaggtactaccacaatggatgaactcctcgagcgacttcgctggatgatgaacctgccaatcaccgcgacgcaagccgacatcattgccgaactgaacaagttgattgatcagctttctggcagtgaggcgggtacggcagcggcctcgttccaaacgctgtccgcaacacctttcaacctgatcgaaagactgactaccgatgcgagccagttggcagcattgtctgtccaggtggaaaacccagacccggccaaatgggtatctgttgctgtgatgcaagagtccattaatcaggccgtcgcccaggtaggggcaacctctgttgccgacctggccgcaaaagaatgtgacggcttgatcactgcagccctttctgacggccgtctgttgccagcgcaggaagcctgggccaaggggctggccaagtcgaacccggatagcctgaaaggtttcctggagaagcagccccccattgcagcactgtcgatgagccagaccgggggtaaaccgcccagcggtgccaagccgccgctgtcctctgtcgaagatgatgaggaactggatctggctgtatgcgccctgatgggcacagatcctaagatggtcgcagaattccataaggggaaatcaaatgagtga

SEQ ID NO: 453088 - DNA, 384 bp, Serratia marcescens
atgagtgatcgcaatacgctgcggcgtgacgggctgttattcccggtgccaatggccgcgaataccgagatttttggcggacatattgtttgcgtcaatgcggctggatatgccgtgccaggcgctaacgggctgacaccgctcggcgtgtcagatagctataccgacaacagcgccggtaacgccggtgatgaagtggtgctggtatcccgtggccgctcgttcaattttgccaatagtacgagcgaccctgtcacgcaggtgatggtcggtcagtcctgttacatcgctgatagcactacggtgcaaaaaacagcggcaggtacagccctggggactgtgttgggcgtggatgttgatggcgtctgggttttaatcaagtag

SEQ ID NO: 453089 - DNA, 909 bp, Serratia marcescens
gtgttagtgaatgtcaagaacgttaaaaatgtgtttatcaacctgaaggcgacgtttcaaaacgcgtttaatcagacgccgacggaatggaataaagtcgccatgctggtgccatcgacaggcaaggagaatgactactcctggctgtcgcgtttcccgaaaatgcgagagtggatcggggataaaacagtcagggcactggaagcctttaattacaccattcgcaacaaggattgggaggccaccgttgaggttgatcgcaatgatattcgtgatgatcaactgctggggtatgccattcaggctcaatctgccggtcagtctgctgcagagctgccgtcagatatcgtctatgagttgattaacaaagggtttgtgaacctttgttttgatgggcaacctttctttgataccgaccatcctgttgcgggcgcatcggtatcgaacaagggaacgaaaaagctgtccgttacttcacgagctgctgcacaggcaagttatggagctgcacgtactgccatgcggagcttcaaagatgacgagggagcaagcctccgcattcgcccgaccctgctggttgttccacctgcgctggaagatgacgccaatttcctgatgacagccgataaattcccagacggcacgcctaacacctataaaggcaccgctgaggtgttggttgtggctgagttgacctcggataccgcgtggttcctgtttgataccaccaatcctatgaagccgctgatttatcaggagcgtgaaaagccggagtttgttgagcagactgactacaacaatgacaacgtctttatgcgtaagaagttccgcttcggtgccgaagcccgagcgaatggcggttacggcttctggcagatggcgtatggctcaaccggggaggctgcataa

SEQ ID NO: 453090 - DNA, 453 bp, Serratia marcescens
atgccgattcaaatcactgcccgccgtgaggggttccgccgttgtggtatcgctcatagcgaaaaaaccaagacttatccggatggtttctttactgaaaaacagctgaaggagctggagaaagagtcgcagttgatcgtcgtgcgaatcgataacagccagcctgcggttatctctagcgggccaaagcttgaggacgtcgtagcagagcacctgaaattgcaaggcgaacacctgaatctactgggcgaactgcgtcataaaaccgccgttatcgatgcactgtcagatcggttggccattgagctcgactttggtacatcgctgcagcaggaactggaggcactgaaggtgccttccgtgcctgcccctgatgatcaggttgataaacagactggtgatccagcgggtgatgataaggccaccaacagccaggccaaaaccaagaaataa

SEQ ID NO: 453091 - DNA, 429 bp, Serratia marcescens
atgtatgcaactcggaaggatatggtgttggcgttcggtgagcgggagtgtatctcgctgactgaccgcgagttcactggccagattgatgatgaggtgttgaatgccaagctgcgccaggccagcgccgaaatcgatagctacctgtctgggcgttaccctacgccctggccagatacgccaggcgtgttggttgggcgttgctgcgatatcgcacgttatctgctgtgcggcgcgggaacgcaatgcaccgaggaaatccgcgagcgctacgaagatgcgactcgctacttcgagcgcgttgcagccgggacgatcaccctgggtaggatgccgaacggcgaagtcgtccagtccggcacccgtgttgcattctcatccgctggccgggcgtttgaccggggctctactaatggaggtgcattttga

SEQ ID NO: 453092 - DNA, 645 bp, Serratia marcescens
ttgattatcaccaggacagaacaagccattgtagaacgtctgcgtcaggggctcggcaagatggttcatggcgtagcgtcttacggcggcgagatggatggcgaaccagcggagatcgttcgccagttacctgccgcctgggtgacgttcggcggtgttctaaagaccgacaataccaatctcaccaagcgcaaatacaccgtgcatggtcgttttgtggtgattgtcggtgaccgtaacctgcgcagtgagaacgctgcccgactcggtggaccaggtgctggcgaagtcggcacctatcgcctggtaacggccgttcgacgtctgttgtccgggcaggatatggcactacccatcaagcatctgataccagggcgagtacgaaccctgttcaatacccaggtagaagccgctgcactgtctgttttcgcctgcgaattcgatacagcctggatagagatggccttggaggaaaaccgctttccgttggttgatgcacccgctgatcaccctgacagcctgtttaacgggttcggcggtattgccagtgctgatgatccacagtggcagcgtacccatttgaactatgacataccgcagtcggcacagtcgccggatgccgtggacattatcgatcatgaataa

SEQ ID NO: 453093 - DNA, 228 bp, Serratia marcescens
atgaataagatcaagattaaggcagcggccggggttcgtgttcccagggaagacaacgcccgccgctacatcaccgagcaagaagcggttaccgtgccgaactcagcctattaccagcggcagatcgtcgccggtgacctggtgattgttggtgatcaggatacggaagctgccgccattacccagggtaaaacagccaaagcggaggtgaagcgtggcgagtcctaa

SEQ ID NO: 453094 - DNA, 1422 bp, Serratia marcescens
gtggcgagtcctaacatttcgttttacgagatccccggtagcattcgcaagcctggccagtacatcgagtttaatactcggttggcagtgcgcaccttaccaggtaacccacaaaaggtactgctgatcggccagatgctggaaaccggtactgctacccctttggtggccatcgatatcttctccgatgagcaggcagcgttctcctttgagcgtggctctgtcgctcacctgatggccacggctgctatcagcagcaaccgctatttgcaattgcagatgattggcatcccggatgcaacggcgggcaaggcagcaaccggcacggtcaccgtgggcggtgcagcaacgggcagcggtactttatccgtgtgggtgggtgcagcgcgtgttgatgtggcagtgaatgccggtgatacggcaacactgattgcgtcagcactggccacagccattacccaacagacccaactgcccgtaactgcccaggctgccgtagccgtggtgacgttgaccgcacgtaacaagggccaggtaggtaatgacatcatcctccaggcgcaatccactgcagcgggtgcgatggccaccgtcaccgccatggcaggaggtgaaaccgatccggatatcgccccggcgttggctgcggtctttgccgctggtcacaacatcattgcggcaccgttctctacgcagacagcgctcaccgcgctacgtaaccacctggatgataccggtggcccgcttgagatgcgcggtgctctcggggttgctggctggcgtcagtcactgtcaaccggtacaaccctggctggccatatcaatgcggggcgtatcacgatggcctggcataacggttcggtcaagctacccgccgagatagcagcctcctacgctgcagtgatcgccagtgaggaagacccggccaggccgctcaataccctgcagttgaccgcgctggatgtgactgcgctggctagtcgccctggtcgtaacgagcaagagaacgccttgcacaacgggttgacacctttggtcgttggccctggtgaccgggtacagattgtgcgggctatcagcacctacacccaggatgctcaaggcgtcgatgatgtggcactgctggatatcaccaccatccgcaccctggattacgtacgcaaagcttgccgtgagcgtatcgcgttgcgtttccctcgcgacaaactgagtgggcgcactggcccgaaggtgcgcagtgaactgctggatgttctgctcaagctggaggaactggagattgtggaaaacgtcattgaaaaccagtctgccctgttggttgagcgtgacgagcaggatgtgaaccggttgaatgcggccatccccaccgacgttgtgaacggcctgcatattttcgccgctcgcattgacctgctgttgtaa

SEQ ID NO: 453095 - DNA, 387 bp, Serratia marcescens
atgaaagaatcaggctctttaatgtacggcgtgcaggttggcgaacagtaccatttcactttcacggtacgcctgcctgtggtgcgcgataccatgaaagccctggaagctacgatggaggaatgtggcaccacggaaggcccggttgcggggatgttctatcgcgcagcggtgatggcctcagcattggattcactaggagacatcccggttgagcagatcacacctacgttactgtgtgatgggctatccgatgatgactttgatctcatcgatgcccagatatccgccattaaaaaaaagcggatgaacttgaatccagccttcacggctaccgagccaccgtcctcgcactcggaaaatacggactcaccgaagaccgcatag

SEQ ID NO: 453096 - DNA, 630 bp, Serratia marcescens
atgcgtaatcttgccctggcgttaactctatccgccaaggatgccgcctctaaagtcctgcgccaggcaatgcaggatggcatcaagcagaccaaagccgcagagaaagctggtgataacctggccaagtcgcaacaacagaatgcggctaccggcgtccgggcatcacgtacccttgcagatgaatatcgccgctcatccagcgcccgttctacgctgggcatccgctccgagcgggagatccagcgcgaaatccaacagactcaggcggcgtaccagcgcttgacccggagcggtgtcatgtccgccaacgagcagagccgagccttttctgccatgacgcaacgtgtcgggcgtctgcgtgatgagctcaaagggacaggcaacgaattgagccgcatggagcgtgctcgcggctggggctctaacgtcatggccatcgcgggtggagtcgctgcagcgggtgccgttgttactcagccagtcaaaaaccagatgagctatgaacagcgcctggcgaacatggccaatacagcctacgccgaacaaggtgtgattggccgtagggctggtatgcaaagcatggatcagttaattcggcaggcggtaagcaatggagggggggactaa

SEQ ID NO: 453097 - DNA, 1449 bp, Serratia marcescens
atggagggggggactaaagaaggcgctgctgatacgcttgactcattgcttgcttccggtgcagtcagcatggattcagcgaaaacgttattgccccttattcagcgttactctacagccacaggcgctgcccccacggacttagcgcaaattgctatccgggcgaaacaaactttcggtatccaggatagtgatatgggaaaggcttttaatatggccatttccgctggccaatctggctcatttgagttagcagatatggccaaatggttgcctcaacaacttgccgccgccagtaatatcggcatgaaagggctagacgatttttctgttcttcttggtgctaaccaggctgcagcaattacgtcagggacaagtgatgaagcgggaaataacgtcgtaaacctgttggctaaaatatcgagctcagacgcggcaaaagcggctgcaaaaattaaagtaaatggtaagggcattgacctccctggaagtctttcagctgctcgtggtaaagggattaatacactcgatgcatttgttggcatcattgataaggttgttggtagtaatcctgcctacaaaaaactcgagggtaaactcagcacagcacaaggcggtgaacgtcaagaaacaatcgagtcaatggctaagattctagagggttctgcagttggtgaaatgatttcagaccgccaagcccttatggcattaatcggttatcgcagtaataaaaaatatgcaaaagatgttattggtgatgcaaataaacaacgaacgttgccagcagggcaaacagcgggcgaccttaactatgaactgatttctggtaccaatgcgtttaaagttgatcaattaaataatgcgcgtgactttggtcagatagatgcaattaaaccgctctctgatactttggggagcctgtcatctgcattggcggattacgcaaaaagttatccagtattaaccactgcgctctctggggctgaaatagcgataaaagcgatgacggccgctgctgttgtatttgcaggtatcaagttcttttccggtagtggtgggaaatccggtggtgggcttggcataccagggatgcctgggggattaggtggcggagttcctacagggggcgcaatccctgtttatgtcactaactggcaagatggtggtaaagagaagaatggcttacttgagtctgcctctaatttacctgggccagtgggggccgctgctggcagcgcatcatttgtattagcgcttactgatgagttagacagcaagaaaaaggaagcggaatccaagggggtatcaattggcgatctctttattcaagaaatgcaaaaggaaaaaaaccgttatttgatattgatccggcctcctggttcagtccaccaaccactgttggcactgggcctggtggtatcgccgcattcggtagcccatcttatttga

SEQ ID NO: 453098 - DNA, 1143 bp, Serratia marcescens
atgttggatgcctcatttcggggcataaccttcgatgtcatcaatacccgcgatacgttcgccagggacgtcgcgcagtatgaatacccgtttgttgatggcggtgacgttgaagacctgggccgcaagccacgtaacctgcgtatgaccgcgctgttctggggggatgattacgagagccgcctgcagacgttcctggtcgaactggacaaaaaaggcagcggtgagctgatccatccggtatttggctccatgccgaaaatgcagctgattgagtgccaggtatctcacgaagcagagaacgtcgattactgcgtggttgaactggtcttcattgaggcggcgaccaacgtgccgttctttggccaggaataccctacggcccaggcagacgccatctttaacaaggtacagtcagcgctggataaagagcagacattgctcgataacgcactggccccgttgcgtacctcacaacgattaatggccaaggcgaaggcactggcggcgacctcgctcaacatgatcaccatcttccgcagtgatataaccggctttgtcagcagcaccacggactttatcaactaccctggggcgtatatggctgacctgcagagtgcgctcagtctgacatctagcaactcagcctccagcgttcgcaacaatgtcggcacctacgccaccccgcaagtggccaacatcattgttgcggattggaatgaaggacgtaaccaattagccaccgtggccgaactgcccgccgcgctagcctcgggggaacgcaccgccccgttacccatgcctatcatcatcactgagggggatatcgccgaaatggtggtgttgacctatttgcagatgtccctgcagttggcgcttgatgctgccgatctgcttggtgacgagtcggttaatgccgccttatcaccggctgatatcgagctggttgccaatgacacccgccaggcactgcagaacgccatcgacaagcatcgcgaattgtatgaggcgacaacacaagcggtcagtgccagcacaaccgacgtcgggatcacctggcaaccggtagtcaatgagctaaaggatatcgcgctatccgtccagcaactggcggccgctatcatcaccactcgcccccactga

SEQ ID NO: 453099 - DNA, 1215 bp, Serratia marcescens
atgcctacgccagataatactgtcagtatcgtgattgcaggccgtttgcatagtgcctggagccgctatcagatagacagcgattttctgatcccttccgatgcctggagtgtaaccctcggcctaccaggtggtacattcccgacttacgtcgaacggggtgcgccggtgacggtaaaaatcggtactgataccgtcatggtcggccgtgtagccaaggtacaacgccgagtatcgcgtcagcagatgagcctcagccttaccggctgcgatggcgctaaagtcctggtggattgtgcctcccccatattcacctcccggcagttgagcctggaggaagtgatcgccaacgttgtccggccgctggggatcacccacatccgcattgatgctgagagttcgatccgtaacgataaggtggccgttgagcctggcgaacgggcttgggatacgctggtacgtgctgccgctggtcgtggcctttggccatggtttgaaccggatggcacgctggtgatcggcgggccagactacaccacagagccggtggccacactggtgatgaatctggacggccggggcaataacatcctcgatctcagcgacacatcctctatcgatggcacctactcagagctgactatcctggcccagggacacgctcagggttccaagtcttcggcggagcttggcatcgttgaggtggataccttctctgccatggcggctatagatgaggcaggcgacgaggatgagccagatacagcctcatccattggttccccggagacaggttttcatggcctgaaagccgttgtgcgtgatccgactgtgccgtattaccggccgcaagtgatggtggttggtgatgctgataacctggatcaggtacgctaccgcgcccggaaagcgatggcggatgcccgcttgagtggctatgacctggtggccatcgtcaaagggcatcgtactgaggctggccaactctggaagcctggacaacgtatccgcatcaaaagcgagccacacggcattgatagcgtttatttcctgatgggccgcgagttcactggcggccgccccgataacaccgtgaccaccttgcgcctcaaagaagatgggatctggataccggatgcctatccgaaaaagcgcaagaccaagaaacggaaatccaaaatgaataaagagttggcgattgtcgatgtggaataa

SEQ ID NO: 453100 - DNA, 654 bp, Serratia marcescens
atgtggaataatgttgaacagcgtattaaccgtgctttaaacggtattcgaaaagccttccgtggggtgttaacccgtgtcaatagtagcggccaggtgcagactctgcagggggaaggacttgctggcgaacagctgcaggacaacgagctgttccagcattacgggttcacctctcatcctttgccagggactactgctattgtgctccccctgggcggcctaacctcccacgcgattgttattgctaccgagcatggtatttatcgcctcaaggaattgcggccaggtgaggtggcattatataccgatgaaggtgcaaaggttgttcttaaacgaggccgtattattgaagtggattgcgatatataccgcgttaattgtaagacctatgaggttaacgcggagaataacgcagactttaataccccgatggtcaatgccagccaggaagtgaccgcgcaagaaaaaataaccggcaatgggggtatggcaattaagggtggtaatggtgcaacctttgagggtaatatcaagcagcaaagtggcagctttaataccgatggcgatgtgaaagcaggttcagtctccctcgttggccatgagcatcctaacggcgaaggcggaaatccaaccggcaagccaattcaataa

SEQ ID NO: 453101 - DNA, 1062 bp, Serratia marcescens
atgccgcactttaccccagatgttgcggccatccgcgatgcgctgttgcgtgatatccgtaaccagttacccgatgccaacgtaggcgaggacagcgactattttattcgagctgcctcggtggccagcgtggccgaggggatctgtcaggatcaaggttggattgtccggcaaatcttcccggatacggccgatactgaatacctggagctgcattgcaggacacgtaatatcacgcgcaaagcggctaacaccgcctcggggccggtttcattaacaggggagccaaatgctagagtgccagcagggttaacgataaaccgtgatggcgcgtcctggtcaacgactgaggctatcaccctgggcaatgacgggaaaggcacggtaacagcccgtgccagtgttgttggcgcaagtggtaatacaactgccgttatgtccgggatgctggccacaacgccgaacggcatcgatagcacggtgatcatcggtgtaatgagtggtggcacaaatcaggagtctgatggcgagctgctggccagactgctcgaattgatccgccgccctcctgcaggcggtaacaagtacgactataagcgttgggcgctggaagttgttggggtgtcgtcagcttacgtctaccctttacggcgcggactggggacggtggacgtagtgatcacctcagcggatggtttgccctccgctgacgttatagaacgtacacaggctcatatcgatgatgtacgccctgtgacggcaaagagttcattggtgctggccccaaccattaagacatttgatattgatgtaaaggtcgaattaaacggtctaaatatcgaagaggccacaacacaagttaaagctgccctggctgatttcgatggtcgcctggtgccaggtgcaacctttattcgcagtcaggcaggaacgcaaatatcattaattgcgggtgtcgttgatcaggatattgtcaatccccctgggaatgtcgttccggctgtcgatgctgataatatcgaatggttaagagtgggtgaaattaccgtggggctattatga

SEQ ID NO: 453102 - DNA, 675 bp, Serratia marcescens
atgagttacagcacattgctggcacttttattgccccaagaaagctacagcgtggaacaacccaaactggcggcagagttgcaggcagaaggtaatgccctggataaaacagctttgtatgcccaacgggtattaaacggtattacacccttctttgcagccgatctccttgctgattgggagcgcgtattagcgcttacacctggtgttagcgatacatatcaagcgcgtcaaacacgtgtgttagccaagctggccgagactggggggatgagtgttccttattttactcagcttgctctgggtatggggtacagaataacgattgatgaacttgagccttttcgagcaggtatcaatcgtgctggtgaagtgttgtactcagaggacagcatttggatatggcgcattaatgtttttagctcgaacattatcacctatcggtttagagcaggagcatctgcggccggtgagagtctgatgtcatttggcgatccaatcattgagtctacattcaacgatttgaaaccggcgcatacctattgtttctttgcgtataacgttgaccttgttcgtcgcccttattatgacggttcatttaaatttgatggtcggacgcgttactcacgtgacggaaacaccattttgaataacgccgacacggcgggagtgtaa

SEQ ID NO: 453103 - DNA, 720 bp, Serratia marcescens
atgaccggtggggtgctaaagggaaatgtctcggcccctggtgttgttggaatggatgaaggtctgagtgtaaaaagcgaaactaactcaggtgttaagttttttaatgctgctggaagtgttgaaaaagcatcgatatatacggagcccacgaatgatgggcatcgagtcgttattcattcaggttccaacgcctcctttggtggaaagtattatattttccaagctgacggttcacttatcatcccgaacagtgtcgtattgcaggcacaaggtgggagccaaggcgacattagcatcattaactttggcattggcctcagaaaatccattatgcaatggaatatggccactgctggcacctgggggatgtttcttgatcatcatgaaactatgggtatcacatttggtgttaatggtttaattaaagccgcatcagaaatcacatggggtaatgatgcttgtagagctcattcagatggcaatatttccgggccgatttggggggggtaccttcaaacatacctatctaataactttgttactcgggttcaacgtggtgctcaaggttcaataacaatggatggcggtcttgtagaagcgccagttgggtgcgtcttgaccggtggtaatggtaatgagggtaaccaagtcggtgttgcactctatcgcccgttgcagattatgcgtggtggtatctggatgactatagaggcgtga

SEQ ID NO: 453104 - DNA, 516 bp, Serratia marcescens
atgaaattgattaacctacaacgctatgtccctgacgaatatttttttggtgagggtgtgcaatattttaaggactcatcaggcaaggattggtttaagtcattacctgaatttacaaaaagatatgcgttagctatcgataatgacaccggaataattcgttctattagtgaagatgcatcccgtatttatccggcggggttaacggtagttgaggtggataccttacccgaagggtgtgacatatcaggagagtgggtttttagaggtaatcagatagagccaagggaagtaacacaacaagaacttatagccattgcgataaagaaaaaagcggggcttatgctgcttgccacgaataaaattgcgcccttgcaggatgcggtagatctaggtatctcaaccgatattgaaattgaacagcttgatgcctggaaaatttatcgtgtaagtctgaatcgtattgatgccactcaagcaccagatattgagtggccagttgaaccagaggtataa

SEQ ID NO: 453105 - DNA, 2109 bp, Serratia marcescens
atggctgatttaccagagacaccaggctgggaagctgcaattaaacagcttgaacaagaagatatggctgagggtggccggggtggcatggctaacttacaagcgactcagttggctaacaggacgctatatcttaaatcggaagttagtgcatatagcacattaataaaatccggtgaattaccattttcttctctagatgatgccagattggcgatttctgagggaagaatacaaaatggtgtacggttttccgttcgttcacaagattcacgcatttgggttgaggagtatataaacacagacggggaaccaatagcgacaggaaaaaaaattcttgatggtcagtctgtgtccattactgttttcccgacaaatgaagacccgactgggacagttaccggtcttgaggcaacattcccaggacaaactttccgtgttgtttttaccgatgaaaatggcggcgagcatctatatcgcaatgatgacaacatagcaaccttgctaagccaaactgttggccaatcgcaaattaatactatcaatgaaatgcttttttcggagtctacggcaacaccactggcttacttgagtgacgcagcgggcaacaatttcggtgtttttctagctgatggttcctttcaccttcttggcatgaatggcgcgttgcaagaccaatatgctatcacgcatgttgctgatataaaaaatgtcgtttcaaaatctccaataattgatgatttgtcttctattgtttctggggacgaagcaaacggcgcattagcagtatttagagctcaagatgataatgatttcctctctttttcacctgatggtggagcattcttccgtggttttgttggcgcattgcaagaccagtatgctctaaataatgcagggaagattaaagatgccgttggttcaattggcgaaatgaaggtgtcactggaaatcaagagaccagtattgattgatagagttttccatgcgctcaataaaagtggtgaacttgtcagtcaagccattcgtgttgcgagagttacacgaaaagagcaaaccggttataagcttaattcatggccacagggtaaattatgcgttgacagtgctgggcgtatctattgtggttataacagtaccaacgctcatggtggcagtggtggtgtccccatgcttacttacagtgatgatcagggggtaagttggtccgatccggtttatgttgtattaggtgagaactttgcacgtggtactgattggtggtcattgggtgttgatcaccaagatcacctatggggaattgttcgcagtcgtggggctaccaatcgagtcggtgtgacattccacaacctgtataaatccacggatagagggataacgtggcaaaaacttggtgaattaaccgccgccattcaggtgttagatggtgttgattacgtacccgaactgtatcatgacatgtgttatgtaaagactactggacgaatgattacaggataccatttcgcgaattcatcccgcgtaggtttcctatcgtttgatatcagtgccccactaaacacagcaatcacgcatgatgttatcgcccacggcgaactatccacaacagtgtattgtgaacctaccatcgcagttgaatatgatagaacatcgtctggcaccgtatatggcggacttcggactcagacaacaggcaatccatcgcagctttactttatgaatccagatctatctgggtttactcgctttgatgcccctgagtcagtgcaatatagccctatggcaataagacgcattaatggtcaatttatactgcttactattgagcgttttaatacaggagtgatgaatctctggttcggtacaccatttgatttctacagtatgacaccatcaaacttctggaaaatgcctgttggaaaaattgttgatgaaaaaataagcggtgcctctaacgttggagtgcatgacatggaaatatcaggtaataatctttacttttcctggtcgcatgaaaccaacaatagctacgcagataactattttggccgaatgaatatagttaaccctgcatcactgatgaataatgattatctggagggattataa

SEQ ID NO: 453106 - DNA, 762 bp, Serratia marcescens
atggctggcgcagttattctaaaatcaagaaacacgctcacggcaggacgatcacctatcgcattaggtaatgcgctgcatcttgaggcgtctcgggcatatctggcgaatgatatcgtacatttacctgactatctcaatagcgctttaacgttatcccccatcactgcaccgactggagatgttcccacgtcaccagtgatccaagtggtaagtggtttcgatgagctgaattttccgagaggtgcggggttggcgagtccatacgatgcgattagcggtgataaggaagtaacgttttatctggtcgcaaaggtcaacctgtcagcagctgatcctaacggtgtgattttccgctggatggcaaagtacacgggggttagtgcaacagatcagggattcattttgcgaaaatatggctcaaatcaatcgctacagttcctcattgattccggcagtccaacagcatcagtaacactggcatttaatcacacaggctatgttgttattgcgttcggatggtctgtagcgaacaaatcgcagtttctaagtgtgaatggtgctggcattacagactcgttgcctgacggtgtcgtcggtgcaactggcactgggaatttatcatttgcatatagccctgagtttaaaactcagcgttgccctatgggattacgtctagccctaggatatcgtgcttaccacaatgaattgaatcgccaggcgatgatcacaaagctaatggctgaaaacaatatttcttaa

SEQ ID NO: 453107 - DNA, 516 bp, Serratia marcescens
gtgcctcgcgttgaaccgattaaaaaagtctcggtagtcatcccggtatacaacgagcaggaaagcctgccggcgttgctggagcggactactgccgcctgtaagcagttatctcaaccttatgaaatcatcctcgtcgacgatggcagcagcgacaactccgctgacatgctgactgcggcggcggaaaagccggatagctacgtgatcgccgtcttgctgaaccgcaactatggccagcactcggccattatggccggtttcaatcaggtgaccggcgatctggtgattacgctggacgccgatctgcagaacccgccggaggagatcccacggctggtcagcgtggcggaagagggctatgacgtggtgggcaccgtgcgcgccaaccgtcaggactcctggttccgcaaaagcgcctcgcgcgtaatcaacatgatgattcaacgcgccaccggcaagtcgatggggggactacggctgcatgctgcgcgcctaccgtcgtcatatcgttga

SEQ ID NO: 453108 - DNA, 360 bp, Serratia marcescens
atgaacgcccgttcttatcaggaattactgaacagcaagcagcgcctggcattatttctttttctaatgatgaatgccgcctcttccatatttacgttattgttcccttttagggatgtcccttcttttactctgcctttattatgcatcccgttattttgtctggcggcagcgctattttctctgcatacgccgcggcaatacctgtacaaactcaacctgttcgccagcgtgctcggcctgctgtgggctgcacatatctacgttaaaagtcaatattgcctgccgaataaccaagattttttattaattagtttgttcagcatctttttttatcagcgctatttctctgacggataa

SEQ ID NO: 453109 - DNA, 258 bp, Serratia marcescens
atggcacacaaaaaggctggcggctcgactcgtaacggtcgcgattcagaagctaaacgtctgggcgtaaaacgctttggcggcgaagcagtactggcaggcagcatcatcgttcgtcagcgcggcaccaaattccacgctggtaccagcgtgggttgcggcaaagaccacactctgtttgctttgaaagacggtaaagtcaaattcgaagttaaaggcccgagcaatcgtaaattcatcagcatcgaagctgaataa

SEQ ID NO: 453110 - DNA, 426 bp, Serratia marcescens
atgccatcgaccaaacccgccaccaagaccgccgcccgccggcaacgctcgtctgggaaaacgtccccggcgtcctcaacgaccgcagcaatgccttcgggcatttcctgggagcactggccggagaaagccgtgcgctccagccgccaggggaaaaatgggcgcacgctggttgtgtgtctggaccccgccgccgcatcgcctggcgcgtgctcgacgctcaatatttcggtgtcgcccaacgccgcaagcgcgtgtttcttgtggcatgtggtggtgatgacctcgatccctccgaagtactttttgagcgcacaggcctgcgcggggattcttctgcgggccgcgcgccgtggcaagaagctgcccgcgctgctggaccgggtgctgcagcagcaggcggatacgcaggattcgctggactga

SEQ ID NO: 453111 - DNA, 324 bp, Serratia marcescens; identical to SEQ ID NO: 341295

SEQ ID NO: 453112 - DNA, 408 bp, Serratia marcescens; identical to SEQ ID NO: 358878

SEQ ID NO: 453113 - DNA, 624 bp, Serratia marcescens
atgccaaacaattctttcggtgaatcctcttgtacggctgcggccagcggcatggtggaagtgcgcggcgcgcgcgagaacaacctcaaagaggtggacgtttccatcccgcgtaacgcgctggtggtgttctccggcgtttccggctccggcaagtcctcgctggccttcggcaccatctacgccgaggcgcagcggcgctacttcgagtcggtggccccctatgcgcggcgcctgatcgaccaggccggcgtgccggacgtcgatgcgatcgacggcctgccgccggcggtggcgttgcagcagcagcggggctccagcaacgcgcgttcctccgtgggcagtgtgaccaccctgtccagcctggtgcggatgatgtattcgcgcgccggcgcctacccagccaaccagccgatgctgtacgccgaggatttttcgcccaacacgccgcagggagcgtgcccggcctgccacggcctgggccatgtgtacgaggtgaccgaggccatcatggtgcccgatccctccctgagcatccgcgagcgggcgatcgcctcttggcccccccgcctggcaaggccagaacctgcgcgacatcctggtcagcatgggctacgacgttga

SEQ ID NO: 453114 - DNA, 252 bp, Serratia marcescens
gtgtggaagcagtacgacaccgtggagctgattcgcaccgtgcaggagcgtttgccgttgctggtggatcagggcttgggcgacgagttcctggagagccagctccagcccgacctgctgcgcaaagcctgcgacgagacggggcacccgctcacgttgaatcttcgcccaggctacgaccacagctactacttcattgccagtttcattggcgagcatatggcacaccacgcatcggcgctgaaacgctga

SEQ ID NO: 453115 - DNA, 933 bp, Serratia marcescens
atggcgctctctgatctgaccgtccggcaggcgaagaccaccggaaaacgctacaccctctccgacaacgactgcctgggcctgatggtctcagccgcaggcggcaagtcatggcaattccgctactactggctgggcaagcaaaagcgcctttgcctgggcggctatcctgctctcagcctgcgcgaggcccggaccgagcgagacaaggcccaggccctgctcgctagggggatcgatccccaggtcgagcgcgaccagaaacggcacgctgccaagctggcgggcgaatacaccttcaagaccgtcttcgatgcttgggtcgagcatcgccgcaaggaactcaaggaaggccgtcagagcacgctttcccagatcctgcgcatctttaacaaagacgtgctgcccactctggggaagatgtcgatctatgatattcgccgccctcagcttctgggcgtcctggcggcgatcgagaagcgcaaggcgttcaccactgcggaaaaggtccgcacctggttcaaccagatgttccgttatgccctggtcatcgccgaggggctggaggtcaacccggccgcagacctggacgtggtagccgaacccaagcccccggtagcccacaacccctacctgcacctgcccgagatgcccgagttcctccagaagctccggctctacaacccccgtggctggcagacccagcttggcgtccggctgctgttcctgaccggggtgcgcaccggcgaactgcgattggccgaacccgaacagttcgacctcgacaggggcttgtggatcatcccaccgcagatcgtcaagcagctccaggatgaaatgcgcaaggcagggaagcggccgcaggatgtgccccctatatcgtgccgctatccctgcaggccatcgagatcgtgcgctatctcctgggggtga

SEQ ID NO: 453116 - DNA, 519 bp, Serratia marcescens
gtgatcaccctggacgccgacacgctggcgatcaccgccacccacgaagtgcaggccgatcagctgctgaatctggtgtatgatccggcgagtaatcgtctgctgggtgtcgatcagggtatcgatcgcgataactaccgcaatcatcatctggggcacgactacgtgaagcgcagcagcggccaccgggtattcgcgctggatgccgacagcggcaaggtactggccagcgagctgacggatgaggtgccgatcggcctgctgctcgacgagcgcagccagcggctgtacgtcgccaaccgcaaaggcgtacgcgtggatcacggcgccgggacgctgacggtgttcgacgccaagacgcttaagcgtctgcaaaccgtagacctgccgccgcatcctaacagtctggcgttggatccgaaaggcgacgcgctgttcgtgacggtgaaaaacgacggcgcttccaccaaggccggcaagccggaaagcgtggtgcgtattcagctgcacaccaactaa

SEQ ID NO: 453117 - DNA, 372 bp, Serratia marcescens
gtgcagatcctgttcggcgtgctgctgctgctgcctaatttcctgatggcgcaggatgtcggcttgaacggccataacctgccgctggtgctgttcgccggcattccggcttcgatcatcgccccgttcctgtggatccagggcgtgatgcgcctgggcgccaacaccgcctcgatcttcatgaacctggcgccggtgtttaccgccgctattgccgtgctgttcctgcatgagcagctgcacggttaccacctgatcggcggcggcatcaccctgctgggcgttatcctgtcgcagcggctgcgcacgccgctgacgcgtaaagccaaagccccggcggccaacgtcgagtcctgcaaagaacaggcttaa

SEQ ID NO: 453118 - DNA, 318 bp, Serratia marcescens
atgattgagcgggtgctgaccaacctgttggacaacgccattcgccatacgccgcccggcggcgacatcggcgtgcggctgtggcggcaggacgatcgggtgatggtgcaggtcagcgacagcggccccggtattccgcagacgctgcgcgccgatctgttcgtgcgcccgtctgtcctgagcggcgcccggcgcccttccggcggactgggcctgatgatcgtgcggcgcattttgcagctgcacgatagcgatattcagctgatcgaacaagcgcaaagcggcgcctgcttccggtttgccattccgccgcgttaa

SEQ ID NO: 453119 - DNA, 225 bp, Serratia marcescens
atgacacgcttttctctcgccgtcaccctgatgttaatgctgctgcggccggctttggctctcgatgtgggtgagatcagctccttcatgcctggcgacagcgcgcgcctgagcaaggaaatcaaaaacaccaccgacagcggccggctggtgaacatcaagatcgaacgcatttccagcccccctggcctcaggtacggcgatcccgatgagcagccgggatga

SEQ ID NO: 453120 - DNA, 222 bp, Serratia marcescens
atgccttatgtgaacgcttaccaacttaatgagaagacggtgtatttgctggccaacggctcgatgtttaacctgaccgccggctatggcgacagccttaacgccttcgatgtgacgctggcggtgatggcggccggcatcggccatatcgtcggcgccggggcgcggcaaacgccggggctgtacctgttgccgcagtcggcctggcagccggcgctgtaa

SEQ ID NO: 453121 - DNA, 1290 bp, Serratia marcescens
atgccgatcgaggcctccgcatttcgcattatcgcgtttatgggccaatcgttgatgattgcatccgatgccggcaacattcccaatcctggcagctataacaaggtgaatcgcgatccggcgttgcgtggtcgagccattaccgttaacggcggtaagccggaattttccggggatgctgacaccattatcagcgacgacaatctggataagttggctgacatggtcagcgcgaactatcggcaggggcaggtgataccactgaccaatcgcctgatttatgactgcgatgcggcaggcctggcaccgtcaattttctattccgcaaacagcgccagcggcggtaaatccttcgctcaaatctggaaaggtacagtcccttacaccaacggtctgcgcctggtgcaacgcggggcggacatcgccgcgggtatcggcaagccctgcagtgtcgatttcgttttatttgcacatggacaaacggacaacgggaacggcaccaatacctcccccggcgcctatgccagccgcatgacgcagcactttgcgaatgtgaccgctgattatacggcgatcacccatcaaaccaccgggccgctgtttgttatcgaccaatgcggcagcaggatcagcacagagcgcggcgaagtcgacgaagaaggcaacgtaaccgatcctgagattttatttaacttctctatctctgccacagaccagtgggattacgtcaaggctaaccctgaaaccgccttgatgaatgcgtcggaatggccgcttaattggcaactttctgacggctcgttatcgcacataaataactggggcaaagtgatccagggtgaatacatggagcaggcgttattttggcattacgaccccgcgcagacctcgccctggttgccgacacacgtcaaatctatctcactgcaaggcacgacactgatcacccagtggcacacgccgcggggcgggttggtgcgcgatgtcgccacgttcggcgattgcccaaatgacagcttttccctgcagctggccagcgccaacattttgcaggtcacgcaggagggcaacacggtttcaatcgagttggatgccgttccgtccacagatgacgccttgctcattggtttcaccaacaccactccggcgccaaacggtcatatttatccgatggtgccttatcgagattcttcaacgctgacatctcgctggtataagccggacggggtaaatttctatccgctctacaactgggggattttacagcgcatccccttggaggatttataa

SEQ ID NO: 453122 - DNA, 1077 bp, Serratia marcescens
atgcaaaaagcgcacaggacgcgggacgggaagaagtacctcctgtggtttcttgccggattgatgttcattatcggcctggcaatctgccttctcggcgccagattggccttcgtcggcggaacgttttatttcgtggcgatgggtctggcgatgattatcgccgccgtactgattgcccggcgccgtcgcagcggcattatcctgtacgcgatcgccttcgtcgcctccctgttttgggccgtcgccgatgccggctggcattactggccgctgttctcgcgccttttcaccctcggcgttttagcatttctttgcgctatcgcctggccattgatgcccggccattcggccaaaaaaggcccggctttaggcttagcggcgatcctggccatcgggttgggggtcagcttcgggtggatgttcagatcccaaccgctggtcagcgcgacgaaaaccatccccgtatttccagtagccgccggcgagcaacaaaagaattgggagcactggggaaataccccgtacggcgatcgcttcgccgcacttgatcaaataaacaagcagaacgtttcccgcttgcaggtggcctggactacccataccggcgatcttcccgtgagcaaaggttcgggcgcggaagatcagaatacgcctttgcaggtcggcgacacgctttatgtctgcatcccgtacagtaaagtactggctttagatgtggatagcgggaaagaaaaatggcgtttcgatccgcaggccgcctcgccgaactggcagcgctgccggggcctgggttactacgaggatcacgccgctcctgcagcaacaggctcgagtcgcccacccgcgatctgttcgcgtcgtttgttcctgcccacgattgacgccagactcatcgcccttgatgccgacacgggaaaattgtgcgacgcctttggcgatcgcggtaccgtcgatctcggcagcggcatgggcgaaatcaaaccgggctattatcaacaaacctccacgccgctggtggccggagaaatcgtcgtcgtgggggggacgcgtagcggacaacttttccaccgatga

SEQ ID NO: 453123 - DNA, 402 bp, Serratia marcescens
atggatgaaaataaactcaaagtgctggctgctgaactggccaaaggccttaaaaccgaagccgacctaaaccagtttttccggatgctgacgaagcttaccgtcgaaacggcgctcaatgcagaagtgagcgagcacctcggacacgagaaaaacgcgcccaaaaagctcaaagacccgcaatggctactcgttaaaacgctgctgagtgatgatggcgagagcgagctaagcaccccgcgtgaccgtgaaaatacctttgaacttcagttaccagacgcgtattacgcagatggacatccagatttggtccctctacgccaaaggcacgacctcccgcgaaatcgtcgccacgttcaaggaaatgtacgatacggacgtgtctcccacgctgatatctaa

SEQ ID NO: 453124 - DNA, 318 bp, Serratia marcescens
atgcacccggattctgacgaaccggtggcgcgccgcctgcaaatttccgggcataccatatttaccaacgagctggagatgctgcgcgccctgctcgaacagggctgcggctggggattcctgccgacgcatatgcatgccgaacggtggaaaaacgtcaacacgctgcgcaccgaagtgggcagccaggggatcagccaaaccatggtgaccatctggaagccgggcaatgaccggcgggcgctgattgatgagacgctggggttgttgccggggttgtggcgaggagctgagggggaaagatcgctgctagattag

SEQ ID NO: 453125 - DNA, 1353 bp, Serratia marcescens
atgacagactcagggcttgaaacgcttgactcgcctgaaaaaattattcgctttgcacgaaaagaatcaagtgacctggctaagggactagtcgatgaagggtataaacatctattacttggccttgcggtatctacaagccatttagaaagcatcagcgatcgtgagttagcctggattttaaatgaagaaagtgaaggaacctatgggctatctaaaaactcattaggatattcttttgggcgtcgcgaagaagatgaagttcttcccttccctgaatacactcccgagcctaagttaacctcaagcgatggtgataatcttgaccgtttggaaaaaagacacattcttcagatagatgatttggaaagaacgaattttacacatccattttatcgttctgccgctgaatcactatttagagaagctggcagacgcgaatttaaaaatattgaacgagcgttacgcaaagctattttttgtctttcgccatcaaccgccagagcaagcgcaagcaacctttactggatatatcaacaaacagactcagtttcaaataaagatttaataattaagatggcaatcgatgggttggattcaagctacccttccgtacgcgatatctgctttgattttctcattcagcaaactccgaccttaagtccagatatacagaaccagttgccatcgtggactcacaaagttaacaacaacagccatacagttcttcagtgggaaaatggacagccctggtacccgatgaacagtgagctcatcattagtactagatggttccatgaatatgacaagcaacacgttgaaactcttctagatgaaattgcgtcaggtttggatgtcatactcacttccaaagacgcttatgacattgttcatcacttggagacgtcacgggagagactcgatcataaactcatggctaaattgctgagtgtaaatgagcggtttattcgtgcactggctgcaaaaccatggatgcgcattaaccgagaaaatgattatgatattcttgatcgaatattcaatgaaacacacccggctgttgcagaatctgtcttccagtcggctatgaagggatggcatctgtattcagcagaaaggcaacattacgttctgaatgcacttgaacgcatcgcatctcaaccagttctggcaaatgctatcatacaattgctagttatatttgaacgagagcatgctacaggagatacccccctggcaggtctttgctcggttacttcctatcgcactttcctctctgacagcgactgtggatttaagttttgcacgcctcgcgcatgttgtcgaagaagctcagcaaaaacttacacctga

SEQ ID NO: 453126 - DNA, 1083 bp, Serratia marcescens
  misc_feature (1049)..(1058): n is a, c, g, or t
atgcaactctcattgttgaaggcgaaaggggggggggatgcggaaatttctgcagacattgacggcacgaagattgtgtatgagattcaggtgaaaggttctgaagagcattttggcctccctcttttggcagaatgcctcagccattttccagcacatgaggccactcactttttcctagaacgcctagttaacgatccaaatcgttttgccgtcatggtgatgtcggggcgcgcgaatgattctcttcaaaagtttataccaagagggaactggcgtggcaaagaacatagcaccatttatttcacacttcaggaagccgaactgctgattgatgcaatgcggagtcatgctgaatcgttgaaaggatctgaccttaaaactgaaagaaaaaaatatctgaatgactacttatcgggtattgacagaaaatccctagccacagcatttaaacgactcattatcattgatggcatcaaagatacagacctaagcgaagcttgcaggcaaatcctgcgaagtgattttttggttccagatgatttatttgatgcacagattaatggtctccggtcagtaataaagtttgggagatcttctcaacaaaatatcatggcggaatttattgccaagttgcaggagaatcccgttgagtctgtcaggcccagaaaatatgccttacgtggagatgaggataattatctcggcatacttaaaaatcaacatgctctgttgctttcaggcaagcctcgtgtagggaaaagcagtgtggctaggtggattgctgctacttatcaaaagcagggataccgcgttttacgcacacaagatgcagaagcggctgagcgttttttactggaccctgtgaacagccatcgacttgtattaatcgatgacccactgggtggtgcgcatgcaaccaacaaaccgcatgaaaaatggatgctgcttaaacgagtcatagacaatgccgacgcaggcagaaaagtgattgtcgcgcaggggcaagagcgcttgtatgagctcaatgggggggggcacgaactcannnnnnnnnncttggacatcactggaacgatttga

SEQ ID NO: 453127 - DNA, 1005 bp, Serratia marcescens
ttgtccctggctcatccgcgccagggtgaaggttccggctatacctcgctcggcgcgacctggcaacaacagcaacgtcaggctggcactctcagctacaacgtggcgcacaactggtatgccgatgctcgcggagaaaatgaatatggcgtgagcgcttccggcatcaacggcgattcgctgaatacctctgtctatacccgtcagggcggacagtacggtaacggcagcctgacgctgagcgacagctgggagcgccagtcccgccaccacaccctcagcagcagcggaaactacagttcgaccttcgcactttcccgttccggagtgtggctcggccgctggggcgacggacgtccggcttctgctatcggggtggatgtctcggcgcccgacgatcagcaaagttcccggattgccgtaacgcttgacagtggggggagcgcagaggttgccgccaaccgccgtgcgctgtttgccgtgccgggttaccagcaaaccacgctatcggtgaacgaatcattggaggtttcccacggcgccggcagcgaaatcacacagggttccggcagccgaacggtctttatggtaccgggcaaaatgctgctccgagaggttcgcacggtggccagctacacctggcttggccaactgctcgacgagcggcatctgccgttgtcaggcagcgtgccgctgaacgtcatcggctggagcgatctcggcgacggcgggttcagtgcgcagagcgaggcgccgatcgaggccttgtatctggtacgcaatcagcagttctatcagtgcgcgctgcaggtcaaaagcacgcgcgacgtcgtgcgctatgtcggcacggtggcctgtcgtgagctgactttctcggcgctgccggacagcgttcggcgccgggcgcaattaatgatggccggccgtgcacagcctgctggccagaccgccatgaataatcaggaaactacagccacagggagttcacgtgaaacgtttaattag

SEQ ID NO: 453128 - DNA, 630 bp, Serratia marcescens
atgaaatatgacacattagccagtgagattttggccggcgtcggtggccgcgacaatgtgaaaagcctggtgcactgcgccacccgcctgcgtttcaagctgcgcgatgacactcgcgccaacgcggcagcgctgaagaaaaatcctggggtcattatggtagtggagagcggcggccagttccaggtggtggtgggcaaccacgtggcggaggtgttcgacgcggtcaaccgggttggcggattggccgacggcgcgccgagcgacgacgcgggcggcaaaaaagacaacctgctcagccgctttatcgatctggtgtccggcattttcaccccgctgctcggggtgatggccgcttcggggatcctgaaaggcttcctggcgctgagcctggcctgcggctggctgctggagagcggcggcaccttcaaaatgctgttcgccgccagcgattcgctgttctacttcttcccgatcatgctcggctacaccgccgggaaaaaattcggcgacaaccccttcgtcaccatggctatcggcggcgcgttgacgcatccgctgatgatggcggcgttcgaagcggcgcagcagccggggcggtgcgcgagtatttcttcggcattccgctga

SEQ ID NO: 453129 - DNA, 249 bp, Serratia marcescens
atgcgcacgctggagaacaccagcatcggcagcgtggtggcgcccgggccggagacgaagctggcgatcaccaggtcgtccagcgacagggtgaacgccagcatccagccggagatcagcgccggcgcgatcatcggcaaggtaatgacgaagaacaccttcagcggcggcgcccccagatccatcgccgcctcttcaattgagcgatccacctcgcgcaggcgcgagctgatcaccaccgccacgtaa

SEQ ID NO: 453130 - DNA, 204 bp, Serratia marcescens
atgaggatgcgtctgctcggctgtgtcgctctgctgttcaccggcgttgcgcaggcggacgacggcgtgccggcgctgctgcagtttgccgagcagtatcaacggcagagcaccgggccgaagagcgaaaacgcggcgcccgccgaccgcgcgtcggggcaaaaaaagcgtgagccggcgaagcgcccgtcggacacccaatag

SEQ ID NO: 453131 - DNA, 165 bp, Serratia marcescens
atgatgataaagcccctcaatcgcaccctgcgcatgggcctgctgtgcctgttggcgttgagcgccgccgcctgtcaaaaccaaaaaatcgggcaaacccgctgtgaacacccaaaatcaggctgtgcaagcgccgtcagaagaggctttgcgcaagcagcgtga

SEQ ID NO: 453132 - DNA, 243 bp, Serratia marcescens
gtggcacataatgaacagtatagaaagttgatcaacggctatatgctgcgccataaaatgaagccgggtatcacggggtgggcgcagatcaacggttggcgtggcgagacggatacgttggaaaaaatgcaaaagcgcgttgagttcgatctcgactacattcgtaactggagcgtttggttggacattaaaatcgtcttcctgaccattttcaagggattcattaataaagcggcgtattag

SEQ ID NO: 453133 - DNA, 495 bp, Serratia marcescens
gtgacgctgcgttttctgctggtgctgtgggtgccggtagcgctcggcatcgccgataacgccacgccgacgctgctgaacgccatggtagccgtcggtatcgtggtgggagccggcgccgccgcgcgctttgtcacgctgaagacggtgaagcgctgcatgccggccgggatcctgatcggcgttgcggtcgcggtattcgcgctgcaaaccaccatgctcaatgcctatgtcttgttggcgatcatcggcatgctggggggctttttcgtggtgccgctcaatgcgttgctgcaggagcggggcaagcattcggtcggcgccggcaatgctatcgcggtgcaaaacctgggtgaaaacgccgccatgttgctgatgctggcgctgtattcgctggtggtgaagctgggcgtgccggtggtgggcgtcggcgtagggtttggcgtggtgtttgcgctggcgattagcgcgctatggtggtcgcagcggcggtga

SEQ ID NO: 453134 - DNA, 243 bp, Serratia marcescens
atgcgatcgcagcagtgcatcatcggcgagaacagcgtaaacagcagcgtgatgcagccctgcaccgcaatcgagaatggcaccgccacgccgatcgccactttagggtcggccttggtcagaatggcgaacgcggtgccgatcaccccgccgatcaccacgttcggcggttgggcgcccgccagcggcaccatccccatccacaccagctccagcgtgccgcccaccagcaagccggtgtag

SEQ ID NO: 453135 - DNA, 294 bp, Serratia marcescens
gtgggcttgccggtcgagctgttgttctcggcgtttaaccaaagcaccacgccgcgcgtcgagggtgaagtgacgctggtcggggccgatcgcctgaccgacgagaaaagcggtgcgccctattacagcgtgcgcgccaaggtcagcgaagcgggtctgcagcggttgaacgggttggaaatccgcccggggatgccggtcgaagggttcatccgcaccggcgagcgttcgatgatgaactacctgttcaaaccgctgaccgatcgccttcatctggcgctgacggaagagtga

SEQ ID NO: 453136 - DNA, 267 bp, Serratia marcescens
atgccagtccccagcgcctatggccactgtttattgatgaagcgagatgtgctcgaaaaggtggggctgctggatgagtctttcgaatcaggctaccacaccgatgacgatttttgccgtcgagcgattgatatgaatttaaaaataggtctggcgcttgactgttttgttttccatttttgtcattccacattccgctctttaggtattgattctaaagatgaaattgaaaagtcaatgcgcctattcaaggataagttcaaatga

SEQ ID NO: 453137 - DNA, 753 bp, Serratia marcescens
gtgaaatgcctattggccgacagcgttctgcaaagccggaacctgctcccccttcaaccctggcgcttgcgcgtgttgttggtggacgatacggccactaaccgcgatatcatcagcgtcatgcttgcacgcttggggcaagaggttcatcaagctgaaaacgccaggcaagcgttgcaattaggtcgtgaacatcgctttgacgtggtgttgatggatctgcagatgccggactgcgatggactgacgttggcacggtcatggcgggatgatgcacaggggcaggacggcggttgcatgattgtggctttgtcggcgcataccggcgcggaggaaaaagggcgcgcaattcgggctggtatgaacgactacttggcaaaaccggtcacgctcagccagctttctcaactgcttgaactggttgccgaatatcaaataagtcgcgatattagtattataaatcaattggatactggcaagcccattttggcgatggacgacgggctgataggtggcaccgtcacttgcgaattacgcagacttctggtggaagccgagcaaacctgtggccgaaagacggattttgcgaagacggtgcacacgatcaaagggatatgcggccaagccgggttgtcgcaggctatgccgttgatcgttgaattagaacgtcaaattcttgcgaaggagacgccgcagcaagaacgattggtatctctgctccgattgattcgcactcaactcaacattgattga

SEQ ID NO: 453138 - DNA, 660 bp, Serratia marcescens
atgacgttgcagcagttgcgcattcaacgacgttttctcattcatcccgcgcgccaacgtatagtcagcctgcagcccccaatactgcgaacggccattatagcgataatcggtgaagttgccggcgaaagtctggtgatagcggctgtctccgcccaacgcgctgaagcgccagtatccccaaggcaagctatagtacagggcgcggctttcattgcctttgcccggcggcgccagaatgctgcgcgccatcgacaggtaaaaaacgtcgcccaatgcggtcagattatcgagatacagcgcgccgccggtctgataacgccccgtagaacgaacgccggcatcatccgcccaggcggtaaagcgccaatatttatcctgttggcgcaggatctcgatatcgctttcgccagctcgttcgcccggagcaatgcggatatcgctgatgacgcccggtatccccccccatgttctccagcccttgctcgatactacgcaaattcagcacatcgccggccgcaatgggaaaaagcgcatcggggcggaaataggcgctgctgcccgcctgcattttcagctgaccgatgcggccataatgcacacgaaccttcagtatccctgccggtacctcttgaacgtcgagctgcacccgcgaagtga

SEQ ID NO: 453139 - DNA, 144 bp, Serratia marcescens
atgaatttccgcctcatgtcctggtttgtggaaaactcgggatatgaaagcccggcggtgatcattttgaaaatgatttcgcgatcgatgtcgagtatgccgacaataacccgcaaggacatactccatgcccgccatgtttga

SEQ ID NO: 453140 - DNA, 600 bp, Serratia marcescens
ttggaaattttacggcgcggctgttggaagccttcaggatcttgctgctttttttggggcgttttttttggggcagaattattttttgccccgttttttttgccccgcttttgcccttgcccctttagtacgcttccagccgtttttacccgccatgtaacgcagggcttttatcgtgattccgtgcttatccgctacatcctggagggaaagcacgccagcacagaaatcacgctcgattgctttcccatcaggcttgctcatcagtcactgtcctgttgtttctcgcgcctcagcaattcgctgtatgcctgtatgtccccattcttggcccgcctatacagcgcgccccttaactcagcctctccttttgcccgccctttccgtatagcgactcgaaatagcgatagctgctctctgtcctttttcagctcatccagagaaatatccaacacgtcagctatctgctgctcgctcaaacgacgggcggccaacgcttcgatgttcgctatgggtaaagtttgcatatttcccccgcgtccccctcgaacgggggcggtgactccgctatcgtccaaagcacggaggaaaacgccatga

SEQ ID NO: 453141 - DNA, 462 bp, Serratia marcescens
atgaacgaagatgatttcgaaatcggcagctgctctcattcagagttgatggcattgctggacagcgatgatattcagccaggatcaacggcgggctatcagacctgcaaaacggtctacctctaccacccgttgggcggcaagatggtggatcgtcccattaagatggcgatgaatgaaccgcgcaccgtgcatgttgctcagtcttatggccttgagcagcgcctgcgcgatgcgttcgagcgcgaatggaaagctatgggagctattcagcacattgccaacgctgcgcgaattgcccgaatttacggtgtgtcggcggtggcaatgctggtggataaccaggaaccgaatgaatcgctcgattaccgcacgctgtataaacacaacgtcagctttaatatcctcgacccgctgaacaccgcgggcagcatcgtgttgaatcaggatccgaatgcgtag

SEQ ID NO: 453142 - DNA, 780 bp, Serratia marcescens
atgggtatttttgattttatctttaaaatgaataaaaaagatgatagatatgtaaatgtcagaaatgcagaagagataacacaaaccccctcgcaatatataaatattgcaaggcaaaataaagatataattgaagggatgcagttccatgcgacatgccaacttcggaccccgatagatgtattaaaaaaacacggtgaagtttttaaaggtgatggcatcccacccacgtatggctccccaagagatggggtttgggtgccgaaactactagatagtacatatgattttctggataaaggtgctaccacagcttctgatgctgggccagtagatgcagatgagtatgttgactatgcgattggtttactgagtatttttgagtctgatatgactattgacgataagatggctcaagcgttagtttatgcgggaaataatgattccaaaaaaagaatagaaaacgggattttacgtttccatggagaaaaaaacatagttgacgtaatgtctttatatatatctaagcaagagtgttttaaattttattttgacaagccaaataaattaaccttagttaatggagttaatagaaaagtagccgctgcattagatattgcaggggtaaaaacattaagggcattgtctggtatgaatgagaatgacttaattgatattaacggcatcgataaagtcagtgctcaaaaaataataataagcattagagaattaagcggggctatttcctctaaaaaatccattaattcggtatctacttag

SEQ ID NO: 453143 - DNA, 630 bp, Serratia marcescens
atgaccgcattaagtgtttctcacacctcacgtgcagcgaccggccactggccggtgttgcttcccgcgctgggcattcacattactgcagggggccgggcgcagccttgcccggtctgtggcggcaaagaccgcttccgttttgataacctgcaggggcgcggcacatggttttgtaaccagtgcggtggcggcgatggcctgagtctggtcgaaaaagcgctggacgtgaccaccaaagaggccgccgcgaaggtggcaggggtattgggcgagccgtcggccagcaccttggcgaagcacaaccccgagcaggaacagcaggaaaaagcgcaggcacagtatcatgcagcgcaacaggccaaaaaactgctcgccagcgcccggaaacaggccgggaatgcctacctgaccgccaaggtctggccgggcactgacgccctgacattacagggggcgtcactgcgcgtgggcggtatcgcttaccagtccggcgacctgctggtccccctgaccgacagtaccggggacgtggtcaacgtccagttaattaataccgcaggcgtcaagcgcacgctggccgggggggcaggcaaaacacgcctgccatttcatgccggggcagaataa

SEQ ID NO: 453144 - DNA, 912 bp, Serratia marcescens
atggttacggcctatagcgcaaagaaaattacgttttcgtggtggaacacaagtttgtcgccacactcaaaggaaaatacagctagtgatgagcataaaacttatgttatgtatactttatttcgactaattaacgataagtctgtggatgttttatgtttgggtgaggtttctagagaagatattgattttattgatgctgttttatcagaaagtgatttttcaatttatgatggtgctattcgcgatggtaggaaaaaatttgatctgtgcgtgatatatagatcgaatctgcttgagtttgttgactcatgtgtaataagtaaggttcaagttacaaaaactttatatgcggggcaggaggttaatttcaaaataaaggcaaccagggagccgcttacattatatttggttcgctggtcaagtagaatatatgattatgaggattctccacaaaaagtcctacttggttctcttctaagagatgctgttatgtccagcattgaatatcgcaaagttagaaatgtaattatattgggcgattttaatgaagaaccatttaataatagtataactgatgcgttatgtgcatcaagagatatctcgcttgtaagaaaaacgcctagattgttatataatccattttggagacatatggtcagtagtagtctacatccaaataatcaaaatcatgttgggtgtggtacctattactataaaggtgatgaatcaaaccgatggaaaacgtttgatcagataatattttcatcaagttttgttagtggtgggcattggtttttaaatgaggagaaaactgaagtattttatgataatgaatttattgacttcatatttagttcgaaatcaaaattcgatcacttaccgataatttcttcaattgagagagtgtga

SEQ ID NO: 453145 - DNA, 231 bp, Serratia marcescens
atgaagctgaaactgtggggtgtgtggctggcggccgggttgttggccgggtgttccggttcagcgccggaaaaggaagcacaagtctctgaggcgggccaaacgcggttgcagctgggcctggagtacctgcagcaaggcgacatggacgccgcgcgccagaacctggaaaaggcgctggacgcggcccccgcaggattaccgcacgcagttgggcatggcgctctatga

SEQ ID NO: 453146 - DNA, 342 bp, Serratia marcescens
atgtcggcacccggcaccgcctacgacgatccgctgctgggcaaagacccgcagcccgccagcatgaaggattatatccagaccaaggaagacaacggcggcgtgcacctcaattccggcatccctaaccgcgccttctacctggcggcgacggcgctgggcggcttcgcctgggagaaagccggctacgtctggtatgacacggtgtgcgacaaagcgctgccgcaaaacgccgacttcgccaccttcgcccgcaccacggtgaaacatgcgctagcgcgtttcgaccagagcgtggcggacaaggtgcagcaagcctggcatcaggtgggggtggaataa

SEQ ID NO: 453147 - DNA, 234 bp, Serratia marcescens
atgagcaagggcgcggcgagccgcgcccttgggccgtcaacggaacagcgtttgcgcccagcgcgccagcccggcggtgaccgagccgaagtcgttgccgccgacgattggaatgcccggcaactgctgttgcagcgcggcgcgcagcaggtgatctacctgaccggcggcagcgcggcgctgacctgttcctggatgcgcatcaacggctgcgagatggcgtcggcgagctga

SEQ ID NO: 453148 - DNA, 147 bp, Serratia marcescens
atgttcttgagacacctgcataacatttttaattgtcttaatctctataccttcatccaatggatttttaacaaaacccgtcaactctatagacttttcagcgaagtttatggggagattatttgttacatgcaacgtttttcctag

SEQ ID NO: 453149 - DNA, 186 bp, Serratia marcescens
atggagcgccgcgtggtgtacgacgcgcgcgtcaacctgctcaccagccaggggccgggcaccgcgatggagttcgcgctgaagctgatagacctgctgctcggcaaggccaaggcggcggagatcgccgcacagctggtgctgatcccggggatgtacgattatcgcgacagtgaagaaaactga

SEQ ID NO: 453150 - DNA, 366 bp, Serratia marcescens
atgaaaaaacaacgcggtatggcgctgttgatggtgctgctgctgatgtcgctgatggcgatcgtggcgatcaatatcaacgacaactggcagcgttcgctggcgcgcacccagtctcaacaggatcggctgaaggccaaatggctgctgctgggcggggagatctacgcccaacagcggttgcggcaggcgggagagaagcgcaaggcctggggagcatcaggagcggcgttcagtatgcgtaccgaagagggggaggtggcgatacgcctgcgccgcgtcgatgcctgtttcaacctaaatgccctgatccgcgccgccggcccaacggaggccggggatagcgagggggggggaccccaataa

SEQ ID NO: 453151 - DNA, 996 bp, Serratia marcescens
gtgaaaaacccccttagcctgaagcctcacccggagcttgaaggcgagtttatgattaacgccggttatcggcgttacctggccgcacaggaagcgggccttgataccgtcccggcgtttatcgactctgacgccgacgagtacgataacgccgtcgataacattcaacgggaggggctgacggccctcgaaatggcccacttcatccagcgtcaaatcgacaacggagacaagaaatcagagattgccggaaagctgggtaagcccgcttcgttcgtgtctgaccatatcagctttttcgagttgccggattgcattcgtgagctgtacgactcgggccgatgcgtgtccgttcaagccttggctatcctgcatcgttcattcaagaactaccccgacgaggtggaaacctattgcatcgaaagcatggttgccgaggatggggacgaactgacaacggcagacgttcgccgcttctgtaatgacctgaagaacccgagcacggagccggacagtgacgaccagggcggcgcaggcttgccaggtgcagacggcgacaaagagccggacagtgacgaccagggcggcgcaggctggccaggtgcaggcggcgacaaagagccggacagtgacgaccagggcggcgcaggctggccaggtgcaggcggcgacaaggagccggacagtgacgaccaaggcggcacaggctggccaggtgaaggcgataaggacaagcaacagtcgttgaccatcgacggtgccccgattggcgggggcgggccggatgcggcggctaatgccctgctgaacgctgacgagcaacaaggcaaaatcaagaagccgatcattcaggtgcgctatgacgagcgaccggctcgcctgttgtccagtcgccgcgctgcatatggtttgggctggctgaagtacgacgacgacggggaagaaatcgaagttgatctgaaccaagttcagcttgttgctgttatcgagggctga

SEQ ID NO: 453152 - DNA, 198 bp, Serratia marcescens
atgaaaaagcacttcgtgaatcacctgagaaagttaacgaacttgctgcaaaagtacgtgctatacgatctgaagaaaagcaagtttacgccaaagtccgtgattgcttcaaaattagctcctctgattacgatcctaagtctcaggaagtacgcagtttctatgcccttctgcaggataagttccaccatgcaataa

SEQ ID NO: 453153 - DNA, 1173 bp, Serratia marcescens
atgaaggcacataataggaagccagtttactgcgctacggaattctatgaagattcactcacattaatttccgaacaaggggatgtaaaaattggacttgaagaaaacaaaaattattccactgggctaagctttaatagtgaaccagtaaaaaacacactagtcgcatttgctgatcaatatatacaatctttctcagacacaaaatccattgatttttctatgttttgtttagcaaaattagccgatgaaagtattagtaaccatctaatttccacttggctaccaaattttaaaatcacaactaataaacagactaactttagcatcttaaaaaagctagtttccaatgaaaatttaaccactgatgaattaactgtcgctaaaaatatattcatccaagaatatttgaatcaatatactatatatagtgataaagagaaaaaaatactcagtcgcgttggtggtcactatagcattttgtcagcgtggacagacgaagtgttttacgatttcatcaaaaatattaaattcatatttaatgatatcgatgatgatgcgtttgaagacgatgtgcttaatgatattaaagattgtgaatattataatcataatcattatggacgcgaaaatattatattatcttcattagagagtctttttaacaaacgtcagcaagagtctcgtgatttttctcgttttgtaagcgcatcagatgttaaagtcatttaccttgaaattgccaataatagcgaagaattcaagcctattgaccccgcttgggagtcatttgaaagcatcgatactacagaccaacgaaacctattagaaaaatataatgacgtttgcactgacgtcagcgataaaaaaatttcacgcttaagcttatcagcaaccaactctaggaaaaacgagtcaatatttggtcatgaatatgtttccctccgatgccaattatatgtgtggtgcagtgattacatagaaaaacattgtaaatcagaatattaccttattgacacattagactatcatttagacgagatgattgaaatatgctataataaagtcataaatttaaagtccacttacaggattagaattaatgacaaagaaaacatcagaggaattattttgaccttactagatgattgttacattgcatatgatgaatga

SEQ ID NO: 453154 - DNA, 144 bp, Serratia marcescens
atgaaattcttagatagagccttatatttttatcaatggatgctaaatagttatctaaagcgtcgaggttactttcgtgaaaagaatctattactagtgagtttgattttggaaaaatacttaattgagttatttcttcagtga

SEQ ID NO: 453155 - DNA, 759 bp, Serratia marcescens
atgactaacaaacaagacgcaatgaacgctgtaaatcgtgcaattggctttattcgtgctaccgctgactatgacgtatgtaataaattctcagaggaattaaatggcgccttagatttcattggaaacaccggaaaacatgaagagtataaggcggcctggttaaatattgtcaatgccattcacggtatagatccagattggcagaatcaagaaacgggtgaaagtgagtgggagaaggttgtcgcattcattaaaaacctgagtcatgagtcgaaagataaatcagacttcatcaccgatttaaaacatcgttacggcggtgtcgattttgaagtatccgtcagtggaaatattcatcagcagataatggaggatggtctatttaaagctggaaaacacacacatagcattttgcattatgacggcggggtatatttccgggatctaatgcgaagcattgccatcacacaaataaaagaagagctaaccgccgccgaagaaaaacatccgaattggccgacggacactgttcatgcaaccgccattctcaacgaagaagccggcgagctgactcaagccgccatcgattaccactatcacaatggctcgctggaaaaagtgcgccgcgaagccgcccaggttggcgccatggcaatccgtgtactgatcaatctgccatatgccaagcctggcggaaaacttaaaagcgatgccggctgccaagacgttaatgctggttggtgccagcgcctgtaa

SEQ ID NO: 453156 - DNA, 816 bp, Serratia marcescens
atgctggtatttgaaggacaagacgaatttgaaaacggctatctgccatcgtatgacctgacagaacaggaagaaaacattctgtacatggatccgtcgctgtggatcgaatcgaccagcggcgtgaatgtcagcgggacaaatgtcacgtcaattgatgaccgctccggcaatacgtcatggctgccgctcaatccaaacgcattcccgcgcgtgatcaactcggaaaatggtactccggtgctcaatttcgggctgggccgtggcccatcagcacccggcgcagtgctggcggccggtgaatacgaggccatcccgcagcatggcgtttttgtgctggcaatggtttaccgtgtaccgctgcgcaatcagggcggctatcagggctcagggggcaacattctcggtaataacgatgcagagcctaacctgttgcgcctccgcttcagggatgatggctatgtcaacaccgcgctatatctgcatcacggcgccatttcgccgatcaccgatgataactacccaatcaatacatcgtttgttgacgacgggttatggcatacggcatacatcgagatcaccccagagcaccatctgatggagatcgacggggttgtaaaacaaaagcgtgccgtgcccgctatccccttcaacacccccgcatcacgtcaggtgattatcggcggcgccgggagccccttcaaaaatggtttctttggcgatctcgccatgatgctgatcgtgccgggactggcgagcttggacgagcgcgcaatcatctatgaccgcctgaacgccatcaaagcgagcctgtag

SEQ ID NO: 453157 - DNA, 1149 bp, Serratia marcescens
atgccagaattcttcagcatcctgacccatgccggcgccgccaagctggcgctggccgcgcagaccggtcagcctatggcgatcagcgcaatggccgtgggcgatggcgccggcgccacaccaacgccatcaccagaacagaccgggctgatcggcgagcaataccgcgccgcgctcaacgcgctgactatcgtgagcgaatcggccaacgtgatcagcgcggaaatgataattccgccgaagttcggcggcttctggatcagggaagtcgggctttatgcggatgatggtgtgctggttgcagttggtagcctgcccgacacctacaaatcgcgtcttgccgaaggctcggggcgcaattcggtgatccgtgttgagctggccgtcagcagcacaaaggacgtgcagctactgatcgaccccacggtcatcatcgcaaccgtggattacgtcgacacgaagtttcgcgaagccaagaaccgggcggacgacgcctacgcgctggcggaaagaaaagcggcatttgatgatatttacccgccggggatcagtatcttctttgcgacgaacctgaaccctaacgagcagtggcccggcacactctggtactacaccggcgaaaacaaatcgatccgcatcgccaaagaagacggctccgacgttatgaatgagggtggttcggacacagctacgctaaccgtggagaatatgccgaagcaccgccacggcgttagtggaaccgtgggtgggtttgaccatggtacaaaaggaaccagcggatttgaccatggcacaaaaggaaccagcggttttgaccatggaatcaaaggcacaaatgagagcggcgatcatgcgcatcagggcggcatgagcgcacccggcgcggcttgggatggcgattatattgtcggttctgacaatgacagccatcgcaccagaaattggacaagcaacaacggtaatcacagtcacacggttgatattggtgcgcacagtcacacggtcgatattggcgctcacagccacacggtcgatattggtgctcacacgcacagccttgaactgatcatggaagacgcaggaggagggaaaccggttagcattgttgaaagacatatcaagttgatgtgctggtatcgagccgcataa

SEQ ID NO: 453158 - DNA, 534 bp, Serratia marcescens
atgaacagccaactcgtgcccgtattcgacggaaccattagcaacgaatctactttgctttgtaacgctcgtgacctccataaattccttggtgtgaagcgcgacttttctacctggataaatgagcgtgtttcagagtacgaattcatcgcaaacctagactacatcgagttttccccaaattcggggaaaaccggcgggcgtcgtcgcaaggactatcacctcaccctcgacaccgccaaagagctcgccatggtcgaacgcaacgagaaaggcaggcaagttagacgctactttatcaactgcgaaaaacagctacgtaataacgtctcggccacgcaacaaagcaacgctcttgattaccgaaattgcagggttcttcacacctacaatgagttaggtgtaatagtgaaatccagaatggcgaagaataatgaagacctcaccagtcctgaaaacgtcgccaatgttttacgcaaacgaggttgggtgatggttcgcattgacagcctaaaaagcgagaaatttaattaa

SEQ ID NO: 453159 - DNA, 288 bp, Serratia marcescens
atgaacatattcatcggtgtaattcgcaccctaatttttgtaacggcagtgcttctggcttctgccatgaaagtcactgtgtcagggactttcggttacttcatcgctggcgtgttactcagtctttactgctgggtatttctgaaagtgctggactacctaaaggatttcggacggaggggagtagtgattgattggtttaccttcgccctcctggttgccctgttcggtttcgttggcggtgttatcgcttttgcctggattatgatgaaggtcatccacgactaa

SEQ ID NO: 453160 - DNA, 213 bp, Serratia marcescens
atggctacgcctaagagcaatccaacagagaaaaatgaccaaggctggggattcccctacctagcgaaaaaagcgcactactttgctaacggtaacgctgcaagcctgtgcggtaaatggctcttcacaggcatcctaattgatgagcaccacgaacatcctgacaactgcgcagtttgcatgcgcaagcgggccgcggcccaggagaaataa

SEQ ID NO: 453161 - DNA, 159 bp, Serratia marcescens
atgaaaggtgtcagtgaagcgcagcaaaaagcctttgaaggcgtgtgtgcaatgattggtcgtgcagtaattgggttggatgagatggggcaccccatttcaaaggacttaataatttctgctttacaacaacttagggggagagtggatgaggaatga

SEQ ID NO: 453162 - DNA, 1182 bp, Serratia marcescens
atgagccgattaattcagttgctggaccggccgatagcctaccaaccggcgtttgccgatttacgtgtgggtaaaattaagtcgggtccagtggctgcggtgtttttgtcccaattagtctactggtacaaccgcatggatagcgaatggctgtacaaaacccaggctgatatcacgaaagagacaaaattaacacgtgatgagcaggaaaccgctcgtaagcgcctaatcgcgttgggtgtgattgatgagcagcgccggggagtgcctgggaaaatgcatttccgcatcaatgtggagcgtttagaggctctgttgatgggcgaacccattgaaaaacagaagaatgaggaaccgccgcaaactgaagagggggaacagcacaatgtggaaacccctcaatctacagtggtggaatcccacaatgtggaaacgccacattgtggagatgccacaaacaacaatgtggaaaccccgcaaagcacaatggtgcaatcccgcaaacaagaatgtggaaaccccgcattgtttcctacaggtgattacacagagattactacagagactacttcagaaaaaaaagaacctcccctaacccctccacctgtggataaccccggtgcggacaaaaaccaaacagcgggagaggttttttgctttttgaattcactgaccggcgctaagactcgacctgaccaccaggcactgagggctattttggaccggctggccgacggttactcccaggctgagctggaacttgtcgctgaacaccgcactgaccaactgctgaacaacgcggatctggcacacatgctggctccaaatcgaatgtttgcctccgatagctttggcgcatatctggccgcagccaatgcctggaatgcaaaacgggtcaaacaagctgtcattgcgagcgccaccgaacggcagcgggtggaattatctgggtttcgggttgctggtggttcgaatgagaaagtcccggagattgattttgacggttcgttcgatcggttattcgttgaggggctaccaccagagagcccagcagagaagctggcatggcagcacgttcaaaaatacggttttaaatcaccgggtgacgaggttgcatctcgcaaggaatggcgtgtgattttgaacagggcttgcgtcaaggctgggagggcagaggcatga

SEQ ID NO: 453163 - DNA, 756 bp, Serratia marcescens
atgactactcattatcacgggacccccatttggggaggtgcgggctatgttcaccgcattgccgttgcaggagctggcgccttcgtttcctacgttcgccctgaccaactgcagcaatcgttcattcatgcctcaaaagtcgcaatcgacaatggcgcgttttcggcgtggaggcgtgggttgaaaatcgactggcaggatttttatcgttggttgatgacacactatttcaatcctaagcttgagttttttgttatcccggatgtcgtcgacggaggcgaggatgacaatgaccaactgatcaaacaactacctgcgatgttccgcgataaggcgacaccagtttggcaccttcacgaaagtatcgataggttggtggaactatgtcaggaatggaagcgggtatgtttcggttcatctggacaatacgcagctattagaacaaaggcatggcatcagcggatgaccgaagcgttcgatgctatctaccgtcgtcatggtttagcaacaaaaatccatgggctacggatgctagatggccgcgtgttaggtaattacccgctcaatactgcggactcgacaaacctcgcatgtaatgtcccgaaaaccgagattaaataccctgagttaactaggcagttacgagcgctaggctgttctgaaaatgaagttaaggcggggaggtgcgcgattttgaaggcgtcgattgaacgagtgaccccaccgactatagacgaatggatttccagatcatga

SEQ ID NO: 453164 - DNA, 549 bp, Serratia marcescens
atgtgtaaagcaaagccccgcatctatcttgctggcagcagggtatcggttgatgactttcttgtagccccaaacataacaaaaggagaatatatggataataaaattcaacttactgtttatcaaaacagcccgcacatttgggctggcggactggagggtaaagaattagctctgtggctgcttggtaaagcaaatgcaattttgtcggttgagcgtcatcgcaagagcttggctgaagctagagaatcttttctagagcttcaggcatcagtgccactcattactgagtacgcaaaccttgggctatctcagaaagtgtcggatcccattcctctactgagcatggaggcaattctgtttgaccgggatattggtggtgaattgcacaggctcgaccattcctcacagaagcaggtaaggacaatacccccggtaggatattcacagctatcagatcttgttgaagtacgagaagagtttctgagaaagaaagcgcagttatctgaattggtgaccagccagtacggacaaatatcaggtgactga

SEQ ID NO: 453165 - DNA, 696 bp, Serratia marcescens
atgaatattgatataaaaagggagttatctttagtaactatcggcaccgctgttgcgtatctttcggcttatttttatcagcttggttttttcgcgtattttagcgtcccgtctggttttgtgtcgatccttgggccgtcattaatttattctgatgtttttgatgaaaaagaaatcacaaaaaaacaaaggatgtgtaatgtaattgttttctatctaatgttcactgtgatttacagtgttgcattttatgcgttgcaaaaattaaactctaatgctaaagagcttggcggtgcgatagaaataataaaatctgtaacagcctcgcttatttggaacgcatttgtattagtatatacatattatttttcaaaaatcatttccctcgtgctaatgcatccatggaaaaaaacacaatactttttcgctatgaacataagtccgatcttgctttttattgcttattttggtgggcttaattatgctaagattgatgttgctaaatatagctttgggaatgatggttactttgttgtgacagaaaactcaaaaggaatattagtggctaagtgtgatgcaaataatggagtgtcttttaaaagactagagtcatctttttctgacataaagactaatactaattccaaagagaaggctgaagttgttaactgccttaagatttggagagataagtag

SEQ ID NO: 453166 - DNA, 213 bp, Serratia marcescens; identical to SEQ ID NO: 441003

SEQ ID NO: 453167 - DNA, 159 bp, Serratia marcescens; identical to SEQ ID NO: 437577

SEQ ID NO: 453168 - DNA, 933 bp, Serratia marcescens
atgtggggcagtttggatatagagcattattatacggcaagcctttttttgaacagacttatctattgcaatagagtttgcgccaatacgacccaatcccatttctgctcctccccagcatggctgtttacatcaggtcttttaatcgtatacaatcccgttataatatggtctaaattattaaagaagaaaatgaatataatagaaaccaatgtagacaggctttgcaatatgcttagattgcttgctgaaactgctggcaatttgaatagacttaaacatattgatctggaagaagcagttaataacttcgatcgcgcatttgaaggtgttctagaggcattccacagtctatacgacgtaacgaaatacaacattgattattttgagcacgcagatacagccttgattattctccttcgtaatgcaatacatcaccgcgaccatccgcttttcaaaagctggaatgcagagatgaatttaaataaagggtataaaaattatattggtgcagaattcttactgtgttcttacgtgccgattgaaaaagacgctcatgttatgaaatattattataagctggctgatatttacgataggattgatcaaagtagaaattcaccgtatctagtaacacgaatcagcactcagaatatggaaaggcagttatccactatgaattctgagcttggttttaacaaaatatgtcaatatgcaaccgaaggccattatccgctggatcaaatctacattaacatcgcccctattttacagtcgggaatcaagagggtttttacggatttaaataaaaaacaattgtctataagtggttttgattctgatgtgtatttttcttttttccaaaaacatggttttttcaggcttgaagaaataatatacttcaagcaacgaatttacttgttaattgagtga

SEQ ID NO: 453169 - DNA, 672 bp, Serratia marcescens
atggaaaaagaaaatagtaaaattactagtaaatttaatattgtcgccacttgcgcccaaatattattagccttggcaacaatttattttacctacactataagtgaaaaacagaatagaatttccaaattggaatactctcctctatttgttttagacaagaaccagttgtatacaaaagactttataccaacaggaactgatgaaattaaaatcacaaacgaagggtatgcggttaacaattactcatcggacgttgatagcatactaacgatatattattcattcaatcatcaatcaaagactttgatttataacctagattatttttcagttatgtcacacaaatctggtggcaaaggtgaaatgacgagcggaattggtgaaaacaacatcaaaaaacttcttgagattaaaacaaaaaccaagagcatcctagaaaaccaccacccggactatattaattttgagttaaaacacatcgcaaaggttacctatgctaatatagaaatggatgaggggtatgcttatttttctgatgcaaacgttgttaatcaagaggattatgccaaattaaaacagacaattagaaacaaagaggtaatatcatttgagcagttacagccagaaaatttagcaaaaataatcatagaaagctttagccataaataa

SEQ ID NO: 453170 - DNA, 3156 bp, Serratia marcescens
atgccccttgaagctggcgacctcgttgactcgccttatggaatcggcaaacttattcgcattaacaataatgatgctctaattaagtatttcgattctcccgtaaatcatgaaggcatagagcaaactgtcgaagtaaaacacctaaaaaaagccgaactccacgcggaaagtctggtttatcgctacgactacgaggttgcacactggcagattgcacgtgttgttggtgccgtgcctggaggggtgcgtttgcattttcctaacaagcagcaggaagacgtcagcttaaatgatatctttgtgcgctgggatcgccctatcagcgatgctgcggcccttctggctgagcgcattacctatacccccttctggcaagatgcccgtctagcttatcagcatcagatgctgaaacaacgcaacgcttgtgctgggattacctcttcgctgtcgtccagtattgaactcgaaccttaccagttggccgtcgcgcgtcgggtgttatctgaccctattcaacgctatctgttggctgatgaagtcggcctcgggaaaaccatcgaagctgggctgatcgtgcgtcaacacgtcacggaaaatccgctcacccactgcgtggtgattgtggcgcctggagttctgcaccggcagtggcatcaggaactttctgcacgttttcacctggaggaactgcttaataagtcgatccatatcattgatatggccgccttcagcacaacggaccccctgtcgttccgccccgatatgctggtgattgacgaagctcatcaggtcggtgcctgggcatgggatgcagagtacgagcagcgctacgctagtgtgaactacttggcgcaacaaagtgaaaaattgctattactatcagcgacgcccgtaactggcaatgaaaagaacttcctggccatgctgcatctgctggatgctaaaaattacccactgactgacactggcttacagaaatttcagcagcgtatccagcagcgcgaagaaataggttcactgttctacgcgtttaactgtgataacgacaacatgacgctggaagagaacctggaagcgttgactaggatgtttcctgaggatgaagtactaaacgggatggcttcacagttgcttccccatttagatatgatgcaaccgctgcggagtgaggcgcgtgatctgctgatcaataaaatccgccactacattggtaaccgttaccgtctgcaccaccgcctgctacgcaaccgccgtagcaaccccgccattagtgtcctgatgcctggcttgtccggcctatcactaaaaaaatatgccacgacgaacgccagcaacgacatgatgatcgcctggcgcgaatcggcaataatgatgcacccacaagaccccacgttggcggcaatttatcagttactgtttgaagccgctatcgctacgccggaactactggcccggcttgcaaactatcgcttacagcaggagtcacttggtgccgcgcagggctttctctatagtgattcacagctcgcgctgttgcagcatccgctgtttgatggcgagaaggagatcctgcttgagttgatagaccgctgcaaaatggagtgtgacagcaagcgccagcgcttaattgatgtattggaaaaacttctggatagtaacgtcagagaactcccttatattgtggtgttctgtgaccagccatgggtagccgaccaggtatttaccgacctgatgataccatttattggcaaaatccagcgccataaccccgacaaagaagtgcgctttggcaagggaagcaaatgccagatcttagtgtgcgatcgccgggctgaagaaggtgtcaatctgcacggcgggcgcaagattgcgctgcattacgacttgttgctgtcgcctaaccgtatggaacagcgtcttggccgcttgaatcgctactgcgcgactgagagtgcgactactatcctcagcatggcgctggtgagtgaagcagagggtctgcaaaatcagtggctgactattctcaatgaagtgttcgatgtcttcgaagagtcgattgcaagcctacaatacttgattgatgaggaattacagcggcttatttccaatctttacccgctgggtgaagagagcatgatgcaactcagtgcgcgtctggctggtgaagatggccgccttacggtggaaaagcagcgcatcgaaatgcaggaagtcctgctgcaaattgatggcgatatcatcgaagccagagagtatgccgatgcactggcggatatagatgagaatgaagaggaattccgccgctgcgctcgtaatctgataggtaatgtactgaaattcgattttattccagatgagaaagatccatcgatattccgctatcgcttcaaccctggtgatagagggacgggcaccttagtcagcccacagcgcctacaaaaacactgcctgctgggctttgatctcaaccaatctagcggaagttcgcccatgacttggccgcttagctactaccgggctgatacctctcagggtaaaatccgcccggctcgcttgggtgaacctttccatgatgccatccttcaaatgctggattttgaagaacgcggtgttgctagcgcgattatccgcatcacaccaggcatgggcgatgaaaatatttttttccgctacgattttctgattgaagctgatgtcaatacaccagcactgcaacgactggccgaccatctgatgcctcctgaaaccattaccttgtggctggaccaggccggcgagcaggtcaccaacgcagaggtgttgatgatacttaatgaagactataaaccgaaggataagggcggacgccatctaaatctcaatgaggaacgctgggcgcagatttcccattgcatcagcgctaaagattggcgcacctggtgtaacgatagctatagcatagcccagcgactggcggtggaacagttcgccacacaacaggctctcagcctgagccgactggaacattatctaagcagcgccgcgctgcatcatgctaaccggcaggagacagggcagacgctgcgccagggtattgcacagccgaaaatgacctgcctggcgacgcgtgccttaatcattgcatcagaagctatattggataaggactcataa

SEQ ID NO: 453171 - DNA, 2568 bp, Serratia marcescens
atgaatctggcgcaactaattgataatgatgttatttcatcaaggttgagtgagtgcctgctgccagaggcgactgccggacacctcgaccgccgggcgttgatccgtgactggctgtaccgggaaaaacatgcccaccacaacgataacgaactgaccgtccctgatgacagccaccctggttggccaagacaggaggagtgggaagccagcggtattaactgtcaacgactaggtcagacctttctgctcagcgctggccctgcttggtgtccgcagtggctggagcagggaaacggcatgccttttctcgccagcgatcagcaccaattctgccgccaggacactcgagtaccgatggactatgtcctgcgccgttacttcaagaaggacaactatatcaactatcaggcaccgggccagcgtgatgcggtacgccgggctctgttcgccccaccgggcagtacgctgttggtcaatttgcccactggcaccgggaaaacactggtagcgcaagcattagctctgacagcctcagctcccggggcactttgtgtactgatcgccccgaccacggcgctggtgttggagctggctagccgtttcaggaagttactgattgaagcagggaacaaagcagaatctgtcaccggctggtatagcgacttaccggcgcaggataaatatgatacgtacatgcgtatccgtgtgggtgagcagcggctgatcgtcacctctcctgaagcgacctgcagttccctgcagttcgccttatttgaagcagcaaaacagggaggactgcgccatgttattgttgatgaagcgcatattgtcgtcagctgggggaacgactttcgcccgcatttccagcaacttggtggcttaattcgcgggctgaagcgcatcagccgtgaagcgaatcttacaccgtgctcaacactgctgatgagtgcgactatcaccgaagccagccgtaaaatcctgtgcgataccttcgatcaggagatgagcgaagtccatgcctgccatctgcgcccggaacctgcttactggtgttatcgggcaaaagaccacagcgacaaacgggataaggtgctgcaatcgctggctcatgcgccacgcccgctgatcctctacgtgacgcgaccgaaagaagctgaagagtgggcgcaacagttgcgtttgcaggggtatcagcgtttggcaacatttaccggtgatacaccgagtgaagtacgccgaagcctgctggaaaaatgggataaaaaccagctggatatcatgattgcgacctcagcatttggcgtaggtatggataaaaacgacgtgcgcacagtggtccatgccacagtgccggaaaacatggaccgcttctaccaggaagtgggacgtggtggacgcgatggctatgcctgcacctcactgctaatttacaatcatcaggatgtcaaacaggcagaacatctgtcctcacaaaagttgattggtcttgagttgggcctggaacgctggaaaaagttatggggcagtgccgaatcggtgggcgacaacctgtatcgtattgatatagagaggatccatagcggccttaatttccgcagcaaacaaaataaattatggaacttgcgtaccgtactgatgatggtgcgtgcaggagtgctggaactggatgccgatctacaaaacccgccagacaaaaaagactttgccgatgttaatcgctacgaagcggcaaaagagcaaatcatccgacagaacggaaattcactggtagtacgcatcctgcgtagtcaccacaccggagaagaattgtggaaaacacgtattatcccttcccgtgaagagacgctgcaagctgcaagggctaaccataatgcattaatcaactggctgcatacgccactgagcagaccgctgtgcgaggcacttgtggatctctactccatggcggaatttattccgggtcacgcctgtggtggttgccctgcctgtcgcgataatcaggcgcttactagtaattatccgagcccaccgacgctgttacttaacccgccagcgtcggtggcacagcaggcgttaagccgctggcaggcgctcagcggcctatcttactccagttgctttatcacctatccgccagttaacgacgatgagtgggaacgtgagaactggtatcaccgcatcgcgacgctactggtgcaactgtatcatagaggcattgtccagcgcgtctgggcagatcctgccttgttgcatagtatatttagcgccattccgcgcggtgagcgcctgatcttgttgagtgacgaattgcctgaacgtgatgagccagcgccggataacgatgtaatggccgagttggcagagttggtacttcccactcaagagtcctgcgccaatggttacctgccgcctttcaacccaacaccattacaactgacgctgatcccgcatgatatgcccgatcctcaccatcctggcggggcgcattacgttcttctcgataatcacaattggatcaccatcgaacaacttcaaaggaaactagacagtgtcgattatcaataa

SEQ ID NO: 453172 - DNA, 906 bp, Serratia marcescens
gtgtcgattatcaataatgcccatggtggcagccagtatgccgtgctggccgcattttatcaggtgctgaaagccagcccgaagaaccaactaccgcgtgaaaagctgatggcgctctgtgcaccggaaacattgcaaaccggcgactcacaaaatgcacgtggtaaagcgtctcaggaattaagagcatggctggacttggggttactgacggaagaaaaagtagaagagacaacacaaatcagtttcaacgcgaactatttcagcacaaaaagtatgccgctgcgtcaggctgcgcgccgctgtttacaggctcaggaaaataacagtgacctgagctcacgcgatgaacgcgccgtcgaccttacccttttggctgcgttgctgctggcgctggatgtctatcagaacgcagaaatcaaatcgggcaaccttgaagtgctggtgaacacgtttatacctgattttcgtatcaacagtaatgaaattgctgtcgttccggggtatctcagttggctgggctttgctcaacaactcactcgcgacagttacgccattgaccccaccgattctattcgtgaagagttaccgttccttatgcgtgttggcgaacaactttccatcggcgaagtgctgcaacgtcttaatcgggcgctcccggtgctagatggtggcagttatcgccagcaggtcgaggagcgtatcagtctgtatggctggcactctcttagccctaaccgcctttccacctcgctgtcgcgtgcgctgctgcggcttcagctttccggagtaatcaacatgaaggctgagtctgacgccagcggcgcaatgcagttaaccggccggaacggcagcgtgctgcgtaccgtaacccatctgaccttaaatgatgtgggagcccactaa

SEQ ID NO: 453173 - DNA, 3045 bp, Serratia marcescens
atgccacaactacatagctactggcccagcgagcagaacgttactgcctgcatcctaaccgaggctgagtcactggctgacagccagttgctggcggtgcatgaaccgatgcatctcgaccgcattgagtttcaaagtggtaaggtcactcaggtgggagagggggcgctgctggactttctgcttgaacataaccgcccgctgccgctaattggcgcttctggcgtggggaaatcccacttggtacgctgggttcatgctcagctcaaacgtcgtgaagatcatgcgaaataccacattatccgcatccccaaaaatgcttctctgccacgtgtacttgccgccattctggaaggtcttgacggcgaggagtatcagagtattcgtgaaaaggttaacggggttggaaagcaattaatccccgaaaacgttgccgaacatattgctcttaaattgcgtcaagcgctaaacgcagcatatacagatgccattgaagagcttcgccaagaaaaaatgggaaaaattcagctggaagaaagcagaaaaaagcagctggaagaaatccaacaacacgcagcatcatcccgactgcccgcgctgttttttgacagcgtgttgacgcagtatttcactgctcctggcgcctgtcttcacaatatagcgcagcgcttctgccagggagctaacgacgacagtattgccaacttgcggtatgaaatgtctgcggaagacttcaccttcaacggactggacttcaggcaggtttcaccaacagtgcttccctacctgcgcaaccaacagttgcttaccagtgatgaaaaaaagcaagcagcggctcgcgttgtcaacgtggtgcgcagccaagcgttagaagacaccttcgtcgaactatttagctttaaccgggccaatttccaggatctgatgcgtatgatccgccgacagctgctggcagaaggtcgcgacctgatccttcttgtggaagatcttaccgccacctcggcgattgaagatgtcctgatcgcctgtctgatagaggaagatgagtacgacggcaaaaaggttttatgtactctaagatcgattattgcggttactgagggtcacgatagctttaagcgcctacgtaatacactaggcacccgcgcccgctacgaatgggtgatccagcagcatgccagcgaaaacgatgtcgcgctgaaaaaacgcgttattgacttttgcggccgctatctcaacgctgcccgtcacggcgctgctgctctggaaacttatcacctccagcaggacgcgcagtgttatcaggagattcctgtatggcaggatcaggaggtgctggagaacgaatctgctgcgccagcgctggccagttttggcagcagtagcattggtcatccgctgtttcccttcaacccagcagccattgggcagttggtagaacgacactgcaaaattaaagaacaaggcctagtgtttatcccgcgtaatattttgcatgaaattttgcgcgagccactgaaaaagtatcgccagaattatctggacgggcagttcccgccatcacaatttgctgagattgtatgtaacccggcattacagcagagggtgcgcctggaaggcctcagccagcctgagcggattaattcactgctggctgtttgggggggaaatagtacaaacctggcaggtcttacgcccgccatctgtaaagagtttggtctgccggatgcggcagtactgttggggggcggtggaacgccaccggaaccagtaccggaatctgtaccagtaccggaatcagtaccggcaccaccatcaccacttgatgaatggaaactcgtgctggataaatggcaccagagcaagacgctcgagcaaaccagagcccgcgacattcgtaagtggctcctggaagcgctgaatgcccgtatcgactggtcaactgagcttatccagacctctctcatggccagctcagcaaaaactcagggtaggatccacttgcccggcgtgcgtgtagggaatcagtcacatccgctggtgaagcttgaagatactcctgagttgcgtagcgcctgtctggcgatggcgcacttcaaccattatcagagttgggattatgacggcagtgagatcgactacgccgcctttcatagtttcatggattgcattgagcacgaagtaaaactcaaggtgttgcaggaagaacgcgaggagctttctagtatcatcaacgatctgcagttaagtggtgcattccttgggttggatggattatcagcatcccacccggccacgctggtgcaggcactattaacggaaccgcaagtcgcaaacagcaaccatccactgctggatgagttcttaacccaagcgcgcgacaccgtgattgatgagcatctgaaacgtcgcgagcgtttaatcgcgcttacggcggcgaaaaaaccgggtgctcagccgtatgctattaacggcttaatgctggtggaggcgtctaaaaaacaaccgacagacgctggcaaacaaccgggcaagatccatgaagtcaaaagtaagctcggtggctaccgcaccctgctattgaggacccaagagagcatcactgaacgcctgagcgacggcaacagcgccagcctggcagcggtgaacctctgcgacaccatgaaggagatagtcgaactggcgaatagcgcggacgtcgcccgtccaatgggtgaaactgtaccggtactgctgaagttgctgaagagctggaaagatccagagctgaaaaaactgatcagacaactggaaaaactgacgttgccagccgataactcgcacatgttgatgagagagatccttgccatcaatggcgagcagtttgaggcgtttcgacagttattagagacttggggcaagttcgaagacgccaccgacaagtatgtgcaacagcgtataagcgataagggcggagaccaagttgaggatgcagaaaaccaagttacagataccctggcaaacctggctgaacagttaacgctgctggaggcggacttatcatga

SEQ ID NO: 453174 - DNA, 792 bp, Serratia marcescens
atgagtgaagtaaacatcaatgacgtggtaactcccgtagccagcgtaccggaagaacgcggtgtttttgcacggcgcagcggtgattttaaagcacgccttcaacgctaccaacaaatggagaaagctcaggatatccgcgataacctgctgcggatagcaaaaaaaatcgatactccaacccaaacactagcacaggccctctgtagctatagggtgttaaggcaggtccgcgacgatgaaacgggtaagccgattgttggtccgtttgaccgtgcgactttcggcaatccacaaatcctgctgacggccttttgccagcagtacgcgacgtatagacatgatgttgagcaagagggtgaacttgccctgcttactcaagaaattaggcgcttagccagcgaactcagcacgcacaccaccgcggcgtgggttaactatattcgtggattaaaagcgcagtgggaagtggatcagagactgttcagtaacttggcgcatcaggaaggacaacgaaaagtacaacagcactacagtgatctcgtggaaaagttcaccagcagtagccgggggctgccgaaaaccattgaagaatttgagacggtgagagacctgcatgagaaactctgccaccaacgcgacgcacttaagctggacgtgccagaagaggtcaatctcttcctcaaagccgtagccgggcaaggtgccacgctcgatatgttgacgcctaatgtactcagttggctgactgaagaagacgacccgacgcgctatcgtataagacgcctgtaa

SEQ ID NO: 453175 - DNA, 4530 bp, Serratia marcescens
atggaacagattattcgcgcagtacttgatgggctggagtcgcaggaggcggtactgctcacttggggtaacactcaaggttttttcactgagaccgagctccgtaatactatttctcaggtcttacataaccacccgctcgatgccaacggcctaactagttttggcatagcgaaagttatgatcgatcgcggattgctgctgcgccaccagcaaaatggtgtttcggtgtttcgtacccgcatggcggaggcagtgcggctttacagccagttgcgccagatgtttcctaagcacggctttaatgataattggcgtactgcaccgacgttggtgtccgactatcgcttcttacgccgccagcgcaaatacccgaagcgtgaccagcaggctgctgaagttttgcagcaacttgatgaaatagcaggttttacttctacgcaccgccaactactatcagccctgctcagccactcgagcggaatgtataacctcgcctactttcaacaagaagcctgcaaaaacgtactgcgcggattgcagcagagccagcaccgctcgactgctaccattgtctgcgccggaactgggactggtaaaactttggcgttctatctgcccgctctgacctttatcggcagtgaactggtcgccaaaagaaaagacgcggtgaaggctctggctatctacccgcgcaacgaactgctgaaagatcagtttattgaaacgttgcggcagacgcgcaaattgaacactgaactggcaaagaaaggtgtgcgcaaagtgcgtatcgccgcattgtttggtatggtgccaactaataaagaggcgatccatcgcgactacatgaaagatgcctggtgcaggcatcgcaatggcatggcttgtctgtacattccctgcccgacagagagttgtcgcggtaaaatggtctggcacaccgccgattatgataaaaaccttgaacgcctgcattgcgaaagttgtagccagaccatcgagcctgacgaagtgatcctgacgcgtaagcgtatgaaaatcgaactgcctgacattctattcactagcaccgaaatgctgaataaacagatgggcaacccgtttctggcatcgctgtttggcatcggcaaaaacgtagtcccaccgtcgatgatgctgcttgatgaggtgcatacctattccggcgtcagcggtgcacagaacggcatgctgatccgccgctggcggcatctgtccggtgccacaccgcactttgttgggctgtccgcaacgttggagcaggcgacgcgctttatggcttcgttaactgggctggaagagtacctggtggcagaagttagtccgattgaagatgatatggagacagagggcgcggagtacatgctggctctacgtggcgacccggcgtctcgttcaagccttttgtccaccactattcaggccgccatgctaaccagacgtatgctcgacaacggcgcagtgccagtcagcaacggtatgtatggcacgcgcagctttatattcacagatgatattgacgtcattaaccgcctctattttcagctgctagatgccgaggggcgttactcgaacggcaatatcaatgccaaaaaagaaccgctggcgatgctgcgcggcgacgctccaaatgaagagaaatttacctttggtcagcagtggccgctggccaaaatgattggtcatacgctcgattccgctgaccggagcaacgttaagcgcacctcttcgcaggatgctggcgttgaccatgctgcggatctgattgtcgctaccgcgtcacttgaggtcggatttaacgacccgaatgtcggtgccgttatccagcataaagccccgcgcgataacgcccaattcctgcagcgtaaagggcgtgctggacgtcaacgaaccatgcgcccgtggacggttgttgtgctgtccgactatggtcgtgaccgcatggcatttcagtgctacgaaaacctttttgagccggtactaaaggcacgccaactgccggtcggcaacagctacgtactgcgtatgcaggcagcctttgccactatggactggttctccagccgtaacgagtatcttaatcagtggaatcgcggtatctgggatgacctttccgtcccgcaggacaaaggtaagccatctgaagctcagtcaaagctggccgatctgattgaagaccttctgaacagcctgaaaacccagcaggagtttaactcatggttggctgaagctctggggattaaggacgaaaaacagctgcagtcattgctgtggcaaccaccgcgcgcgattatgaccgcgtttcttcctacggtacttagaagactgcgctccaactggtcgcgccttggcattgagaagaccgataactgccgcaaaagcacgccgatgcctgattttataccttccgcgttatttaacgacctctgtctgccggagttacagattaacctgccaggtgaaaacggccaagagcccaatgcgtacagcatgccgattttgcaggggatgaaagatttcgccccggggcgtattagcaagcgctttgccatcaaaagcattcgcgaatgccactggctagtgccgaaaaaacttgagctgaaagatggttcgcattcattcccgatcgatgattactgcccgccagacaaacgggagtccatgcccgattgtcacattaccactcgcactggcatggaggttatcccctgcttccgcgcctgggaagtgactgccagcacgccgccagatgaccttaaactgagtgaaacctcaaatgcgtttcttaactggcacagcgagatccgtccacctcagaacggcatccctgcggaagtgccatccaacaatgtctggcaggatattttccagcaggtggagttttacagccatcagcagcactgtccgatcgaagccgtgcgctttgctaccggatcacgtgccaatattaaattcagcgaccagcgtgaagacctgcagattgacttcaagtttgaacaccgaaacgaacccgctgcgtttggcttctcattatgggtagatgcggtaaaattccagtgtcggctacctaattttgatttcgctagcatcagcaacaaccgtgaactggtagccggattacgcacggcgcgcttcctgtatgaggtcagccacgacgaggccatctgtgttaatactttcctcggcggttggctggcagaaactgtcctggcaggtattggcagcgaagcagtattgaaaaactgcactctggagcaggcattccgcgcaatggaacgcaacagcgcagggatcgccttgattgacgttcctgcacgaatcttccagacgttgtatgacgtgcagactggtaaagagatagagcaggatctacagcaaaacttgcgtgaactgttggccaaggctccggtgatggcaagaattgccgactgggtggaactgctgtggcaaccgctggataacacctggctggagtggttgaccctcaacttcaccaacacgttgggtgcggcgctgctgcaaaccgctatgcagttgtgcccggatgccgacgacaacgacctaatccttgacctcaacgctgggccggtgcgcactgcgctgctcgcgcctgaccagcgcgaaatctggctgtcggaaaccaccgtgggcggtggcggcatcattgagaagctccaacagatttaccgtgaagatccgcgcagtttcttcgaatcgctagactttaatctcagtccaggcaactacgaaacaatggacaataatgtctggcacctgctgcaaactatggtaaacccggcatcatccctgcctgtgtgtatgaacgaaatgcggcttgccaacgatcatgccagccaggttcaggcgcagcgcaacttgctgggagaattgcagcgcagcggctttatgaccagccacagcttcctgtcggcgatcaacacccgcctattacggccagggaccgatgccagcagcgatgtctttttactgcaattgcaacaggattggcgacagcaggagcagcgactgggtattgaactcccacagcgtgtctatgcctttacctgtagtcagtccagcgcgcttgatcagcaactacaacaagctagccaagggcagcacaacttggagagttggcgtttaaatacctgtaatggcctactatggccacgtggccataccattcgtgatagctggctaacttggaacaacccttacagctttgccgggccaactgagcgcctcctgctggcccatgtggtgcagcacagttgtgctcaggtggagctcagcgaaccagactggatgcagcagtgtcaccagcatctggaaaataatggcaaatgcgagttagtggccaaaccgggcgatgcaataaatgggaccatcgcaactctattagtcaccccagtagaaatgtatgggttgttcttctacccgcgcgtcagtgccctgcaccgccacaacagtgacatcttcgccatgattgaaattccggaggcgatccaatga

SEQ ID NO: 453176 - DNA, 543 bp, Serratia marcescens
atgagtacccgtcgtatctttaaatctaggacctcacgccagagtgaagttcttgatgtactcagctccttgttggtagcggagatcgttcagcccagcgcggaattgtggattgtctcgccgtggatcaccgacctcgacctgctggataatcgcaccggccgtttcgactacctcgaaccggcctggggacagcgtcatgtgcagacctcagaactgctggcgcgtgcggtagccaacggcggtacacttaaagtgatgactaaccaaacccagcataacgcacgctttatccgccagttaacagaacgcgtcgccaactacggcatactggataacctatacattggccaaaaagaggtgctgcataccaaggggttccttggagataattttttcctaagcggttcgatgaatctgacgatcggtgggatcgtgatcaatgatgaacagattaacttgaccacagacaaaaccgctatcgtgcaggcattgttggcgtttaacgacttttaccaaccgacacagggaggtgtgcaatga

SEQ ID NO: 453177 - DNA, 2256 bp, Serratia marcescens
atgaacagcgctgatagcgaacagttcctgcgaacctttttccatagagaaaacaatattatctcttgggaaaaaatcgcgggtggcctgctacaagcatccacccaacagcggttgaccccttggcttgacgatgtccgcaacggatgcttcccggtgatcctgccgcgcgtagtgaagggctgcaacgataaagtcacttggtatgcaatggccggtgaggaacgagactatgcggagttgcgtgagttattagacgcgcacgtcggcacctcatggtctgactttaaccgccagcgcacgatgctggatccaagtgaccctgtggaaaaagcattgatcgactattatagcgatagagtatataaatttagctcgctttctcagtcgagtatcccagagattttcaatggcatagagcgcttgcgccaacaactcgctagccgcccgagtcaccagctcatacttctgcgcccgcgtggccgtattctgcgtgatatccgtgccgccttgcgccgtagtgatgtgccgcagactcgcctctatctgcaggaactacgtgaagctggtggcataggccatattaacgaactgtttatcgaactgcgctgcatggctctggaaggtgatgccaaaagcctgctagattcgactcagttgcgacaggtcttggatatgccgcacccgttggtgttggctgaagaagtgatgacggtcttctatcagcattttctgctgaagtatgagcagttgagcgacctcgccgcccaacgacaagcatttaataatttgttgttgaagaacgtaccgcgtctgttccaagtgacgcagggtataaacacgccatcggcaatcaaaaatattctactgtggttactttctgacacacaaagtgatccggcaagactgagggaacaggcacaacaagtggttgccggtatgaaaggggcaacagacgatgaccggcactggatccgccggttgctggaagcattcccgaccgttgcagtggcctccccaccgacggcgagcatcgatgaattgcttgccagagccgatgaatatcctgaaagcgttctgaaagagttactgttgctaccggtcagcgctcgcggcgcagccattgctttgcaatgtgcctgggtcgtaggcagtgcagaagttgctgtgagtgctgtcagttatctgcaacaactggcacaacaagagcgcgacttgttactggcgaaaccggccttccagcgttattacactgccttacagttgatgctgccatccaaacgaacagaacatgatactgcaggtatcaataattggcaggactggttgaaggaagtgttaaataaccctcaatggtcgggggcgatagaagcggtagaacaggcctgcggccaatggaacgcagcggctttccagcccgaggcatttgtttcgttgctggataaaaccaacaactgcgccagtatggtgttgcgcgatgccattccagtactgctcgagtggctggataaccatcaaacaagtgcttcctggcagtctgtccgattagcattgctgcaacaactggcgctggacgacaatagttctcgcgaagatatctttactgcctgtgaactagcacgcggttatttagagggcgatagtaatgcgcacgattaccgcgaactaatagaaaacctgcagatgatgatcgagagttcaggtaccaccagcgctagcgcctggctagatttgctggaactgttcttggtctacccaactgctgaccaacttgccagagaacaattattcaatctggtactcaacatgttttaccgcaacccagcccgctatagtgaattgcagtggagcctattggctcagtttgctggtgagtgcggacttgtctgtgaaattcccccacaaattttagaggacagtagggagaaaaatgatgaggttcgtgtcagatcaacattgaatgacaaggtagtgggcatttatacattgactgagtcggtagcacagcgtgtgaaaaaacaactactagccgattatcctcaggccgatattcgcctcaacaacgataaaggcggctcaaccatgctgcgctcattggctagagatgcggatgtatttatttttgcctggcttagttctaaacattctgcttattacgcgataaaggaagagcgaggggataaacctttattgcaaccttccggaaaaggcagtaccagtatgctggactgcatacgtagttatcttaaattgtag

SEQ ID NO: 453178 - DNA, 312 bp, Serratia marcescens
atgcacagccggtttagcgagctggtagagtgggctaacgagaactacgatctggtactcatcgatacaccgccgattcttgccgtgactgacgcagcgatcataggtcatcatgtaggaaccgcgctgatgatcgcgcgttttggcatgaatacggtgaaagagattgaggtgagtattcgaagatttgaccagaatggtatcgaaatcaaaggtgttattctcaatgccgtcgagcgtcgcgcaagtagctactatggtaattacggttattaccagtacgagtacaaatccagtagcaaagatgcttaa

SEQ ID NO: 453179 - DNA, 513 bp, Serratia marcescens
atggacaacgcaatgctctcacttaagacacttttacaactaccttgcggatggcaatacagccaacaagtgattagccctgatggtataaccctccatctccgtgccaaacgtaaaacatcactatgtcctgaatgccttaagcgcagcgactctgttcatagttgtcgccggcgccggatacagcatctaccctgctcaggccaggcgctatggttggtgtttgccgtccgccactggtactgccgtaacccagcctgttcacgcaaaatttttgccgagtcgctggctcccttcgcaggttcacggcagcagtcttcgcaggcgttacaaaatttacagcgtcagctgggattaatagccggagggcggcaacggcagcaggtctccgtagcagtgcagatactcttcttcgccgggttatcaataccccggagacgaaaccgccaggcacgccccatgtcggtatcgacgagtgggcgtggcatcggggccactgttacggcacgttaa

SEQ ID NO: 453180 - DNA, 795 bp, Serratia marcescens
atgaacgctatccttaaactacagcgtagcggtgctagctgtggccttatgctctccgccttccgggcgggcccttcaggtgatcggggatggtggatggccgccctccgccgtgtcttcgctgaactcccgtgggggcagaggttgcccacggcgcgggagtactggtattgtgaggtcagtgtatttattagtctggatgggaccactcagtacacatacggtaaatcctaccgccttcctggtgctgcatttgggtgcccaaagtggggggtgaccgacgtgtccgggacgagcggggatattgctgcacgtgtgttgactgcggccagtcccgtcccgtatctcaaagagttcaaatggcatggcctcgacgagtgtttatatcgtgtcaggtatggtgttggaagtgctggggctgccatcaataccgtatatgaatacccgtgcacttaccgccgcggggacgtcaattgtcaggctcatctaccgggggggatcgaacatacccctgcgctgactggtcgcgtcacgagaagggaggaaactgtgctccgcgtcgcctgcgaccaggttgcatccattaatgtcagcgtagcgtcaccggacctgctcctccgagacgggggacatgagattgcgagccggttctatgtaaactctgaagggcagactaattacaccaccgtcgtacagtctgagtcacacatacctctattaagcatcgtcgaaaccaccgtgacggccgctggggcgtacgctgggaatgcgatagtaatggtgagttgggattga

SEQ ID NO: 453181 - DNA, 810 bp, Serratia marcescens
atgcaggttcaccgtaggtacgataatagttgggtacagtggagcgcgcaagatgcgctggtgctgaaatgggtcaccttgcaggtggaagatcaattgcccacccatccaagttgcgtccacctaaaaggatgcggtgggggcagacagtctgtagcgcaggtttggcaggcgctcacctccggggagtatgcctttgtttatcggacggatatccgcggctattaccgtcatattcgcaaggcgcaagtgctgagcctggtgcaacagcatattgatgatccggtgcttatcgatctgattgagcaatatttgtattacagcgtcgaggacgggggcgagatttttaccccgcagcacggcatttgtcgcggttgtgcgcttagcccgctgattggtgccagtttattgcatcatgtcgacagttattttgccgcgcaggaaggaaccttttatgcgcgctatatggatgattttgtgctgcttacccgtacgcgctggcacctgaagcgctgcgtgaaacgcctgcacggattttttaatttgggtggttttgaaacccaccccgataaaacccaactggggagaattgaacatggttttgactggttgggcgtgtggtttatccctgagggcaccaccatcgcgcctcgcgcgttagaacatcaccgaacaaatcgcctgcggctttacgagcaggcccgtcggcgggggctgtcaatggcagaatccgtggcgcggctgcgggcgtatgatgttcggtggaacagatgggcgaacggcatgctgatgtgctgcataccacgataa

SEQ ID NO: 453182 - DNA, 1938 bp, Serratia marcescens
atggaagaaaatgttaaggattacccagtcacttatgaagataggtttctcttcaaagagataggttcaattgctacaagacccgacattgctattactgaaatcattgcgaacgctcatgatgcaggagcaacaactgtaaacataaccatcccagagggttcacaacgccaacttatcgttgaagatgatggcgttggcttgacaaaacaacagtttgaatctcgctggctgaaacttcgctacgatagaagtaagcatcaaggcccatatgtcgaaagcacactcaaaaataataccgcaacaaagaggctcgcttttggacgtaatggtgttggcagacacgcgggattatgcttcgatgatacttatgaggtttgcacatggcgggattcaattttaaacacttacaaaatagaggcttcatcagggcaatcaccgataagaatcgttagccatcacaccagtgaaaaaaccggacatggcacaataataagagcaaccatatctagaaatgctatcagtgaggatgagataaaagatgttatctctgctcgtttcttattcaatccagagtttaaagtctatattaacggaaagctaataaccttatctcagcaccctggaattgttagagaaaaaacaattaatcctgtgggcaatattgcaataaagctcacattagttgattcatcatcagcagcaagaaactcgaatcaacacggggtcgcattttggctcggggggagactacttggtcaaccatcttggagcattggaaaacatcaaatccttgatgggcgaaaatctttcgccaaaagatacacattaattgccgaatctgacaatttatttaactttgttgaaccagactggtctggttttaaatctgattttacgtcgctagatgttatagccgaggatatacacaaggtacttcgtgaatggtatatagaacttgccaataaagacgtacagcaaacaaaaatgcaagtcattgacataaatagaaatgaaataaagacattatccgcattggcacgtaaggaactaaatgagtttcttgaccaaatactgagtgaaaatccagatataaaaatagaaatgcttgaattagcatttagagcggcaattaacctagaaaaatcgcgctctggaatatctttattaaaaaaactatcagacatatccccagatgacatcgactctttgaatatgtttcttcaagagtggaatgtaacagatgcaatgacaattctcgctgagattgattctagaataaaattaattgaggcaattgaacgattgagtaaagatcactctgtagatgaattgcatactttacatcctctaatagaaaaagcccgatggatatttggccctgagtttgacacgcctgaatattcaagcaatagaggattaataaaaaccatggagagtgttttcaaaggaaaatataaaaaagaaaacttcgtaaatgccagcaaacgaccggatatagttgtcggtgaaaattcatcgataagcattcttggtttagatgagtttgaaaatgacatcaagaaaactaagaaagtactccttatagaattaaaaaaagggggcttcggtattggcagaaaagagatggatcaggcaaagtactatgtagaagatatatggcatgcaggcattggctcttcacatccatttataaaagcctttgtagttggtgattttatagagaaactaacgggtacttatcaagctattggtgaaaacgaaacaaaacagtatggtgaaattagagcaataacatacggcgaaatggtaaggacagctgaagcaagactgtttgctttaagagataaaattgctacgagatacgatgatttagaggatgatattttactttctaagatcttatccaagcctgaacaatcagtaataaactattga

SEQ ID NO: 453183 - DNA, 1947 bp, Serratia marcescens
atgggccaattaaaaattcacaagcttcattatgaaggtaaaaaatatttttttaactccccatgcttggatgagcacaaaataagcattatcgaagctccgaatggcagtgggaaatctacatttttccatttgctttattatgcgttgggtgggaaagtgccccaattcagcaaaactgaaaaagtaagacatccagaaattgcggatgatagttccaatatggttgaattggaaattttcattaatgaaaaaccattcaaaattattaggaaaattggtgagaatctcattacagtaatatcagaagaagatatttttgttaataacgaaaataaaggaaaacttattttacttcctattaacagaaatgcttcagatgattttattttctctgactggatcctggcaagcttaaacataccactcatagatatatatcattctggaaaagattttaaactaggaataaatgaccttcttcgccttgtatatcatgaccaaggtggagatgcgaacctaatatataaacccgcggatagcgttaattatgttagtgattccgcatttttaagaaaagctatttttcaagtgttaattggcaagaaattagtacagctttacaaggcatatggcctactaaaaaagaaacaaagcgaatatgatagagccaacgctttatttaatgaatacaaaaacattgtaagtgatatgcataaacagctaggtatcactcaagtcacgaacgatctatttttagaaaaagagattgataaactaaacattgaaatagaaaaaatcactagttttagaaatagtaaagttaaaatatcctcccctatcactagcaacactggtatattacgcactgaaaaaattaaagataggtatagtgcaaatgaattatccttaattgatttaaagaaatcagagacttataaattaaatgaaattgactctttaaataaaataattagccaaacaaaagaagatgctatcagactccaaaaaataatacatacacatcgtcaacttgaaatgtttacacccgacacatgcccatattgtttaaaaactgtggaaagagttactgacaaatgcgtttgtggaaatgcaatcgatgaaaatgactatcaacgttatttctacgaccctaccgaatactacaccctattgaaaagcaaggttaaatcacttgataccatgcggattgccatcgatactgcgaacaaagaattaaatgaacttagagaaacaattgaagatgctgcaaaagaaaatttagaattaaaagcagaattggctcgcaccttaaattcgatagaatatattactgatatagatttactagatcaaatcgaggaccaaataatatataaaaaagaattggttagccagtacaatcaggcattgattcttgagaaaaatcttcttcattatcaaaaaatcaaaaccacttccaaaaaagaggtcgatttagctagagtagatgcagataggttttcagcagcggcgcaacaagaaataattgaaaaagtagttcaattcaataaatattataataagttcatgaaaaaatcccttgcagattgccgaagtgctgagattagtagcgaagattatatgcctcttattaataatggagaatataaagaagcgagtgccgcggttcacaaaagatttttgtattttatgaccatgctacaactttctttactcgatgacacacccttcccacgtctattattgattgacacacctgaaaatatcggcatagacaatgaaaacttaaaaagattattagattgccttaatgatattgagaaccctaaaaacctagactatcaaataatactttctactggcgagggaaagtatcctgaatctcttaaagataatgttgttataaaactttctgatggaaataagttacttacaaagaaataa

SEQ ID NO: 453184 - DNA, 294 bp, Serratia marcescens
atggtcggtgtgacgatggccgtcgtagcgttttttggtaatcggctggttaacaccgtcgacacaactgaaagcgcaatctactcggtgaaagaagtgcaagcagcgcaaggtgaagctctgaaaggtctccagcgtgaccaggaacgatccgaacgtgaggccgaagaacttaaaaaagaagttggccgcttgaaagatgaaaacgctacgttgaaaggaaggctgaacattccgctgaccctaaactctactaaggctgcctccgggcagctttttttatggaaaaattaa

SEQ ID NO: 453185 - DNA, 1266 bp, Serratia marcescens
  misc_feature (1200)..(1209): n is a, c, g, or t
atgtatccgattgcagaaaatttaaaagttggaaataaccagctggatagttaccttccaatacgtaataagaataacaacattgactggcaaatcgtcacaggtttagtactgagctatggcgtgaagtataaaatcaatacttacagtctcgagcagtttcgcgaggattgtaaaactcatctacaaatattaattgatgagcccgcgttcttatccgtgctggaacggatgtatttttccagtcaggatatttttcgtgtctccccgctgttcttgctgtttcacgctcagtttgatggtgaaaagataagcacaggttctacagccgacaaacgccttggaactctgtttgccaatctgatgcgaggttttagccttaataaccctatacaagataagttaaattttattgaaaaagagatgctgaataagctcaataagaaattaatccgactgggagaggggccatttgcaaaagaacaaccttatttaccctatttggtaacgtgttttcagtctgatttggcgtttctggctgagcatccacaatatctattacaggaactgaccaatactctacgtttgtatgcctttagttggtgcgcacaactggcgctcaatttagacaactggcaagacggcgagccgcagagtaaatcattgttctttatcctcgatactgaaaaagccagctctgaacgagataaaataaaactgttcggctataagtggtttgcccgccaaagtgaaaaattgttccccatactctctgcattagaggtattacaagtaaaaggtgaggaaaaacgccctctttggcaggtatatcaagattgtttgggttattcagatacatcaaatcgattgctgaatgaactcaatgattatatacagaagttcattagtaaggaggagcgagatcttcctgaacgcgatcgtgctacaaacctagaagatgcctttaaacagctgttatctgttgccgttgaacagtttcacggtaagaaaactgaacgagcaacggtaaatcgaaaatacatcaacgagctggaaaaccagatttgtactgacttcattcaggttcgtggccgagcggggaaagtgctggtactgaaccaagatcgactattgctactaactaaccttaccgtgggtaaaaacaaaaaactccggctgcatgagctactacgtggtttnnnnnnnnnnagtctacacaaatgctggttgcgttttatgaacgcatggggaatgtggagagaatga

SEQ ID NO: 453186 - DNA, 1650 bp, Serratia marcescens
atgagcgcgatcacattacgtaaggcgttaggtgtacttgcgaagtcatcttcgttttctgtaaccacagaaactcatcggcaaaaggatgtgttcgatgagctaaaagaacaactctttgttaaacaagaaatcgaagaagagttacagcgttatctggatacagcgacttccggtgagatcatttttctatgcggaagtagcggggatgggaaatccgaaattttaacccgctgtaagtcagatccacgatatcaacataagtttagtttccatctggatgctacgcacagctttgcgcctcaacaatcagccattgatgcactgaatgatttatttgaaaatcatcacgcacaatcatacccgctcctcatcggtatcaacaccgggatgctcgccaactttgcaagagaaggttctgagtcccatatggctatccgcgctgctattgattcattcttgtcagcgcaacaggaaggtcagcgtccttaccgcaatgaacattgtacattctttgatttcgaacattatccaaagttcgagtttgacgaagagcaggaatactcccattttatcaaaaaattaatgaatcacttaacggggaatggcgacaaaaacctgttttacacaatttatcagcgtgatgaatcaataggacatgatttaaaaaccattgctaactttaaactactgtgcatgcccggtgttcagaatgttttaataacacagctatttaaagccagattaataaaagatcaattcgttaccacaagaaccttattggattttttacatcacctgctgacagggcctgggtacttatttgataatctgtttaatggtgcagaaaatgatctaattaaaaaggtttctgattttgatcctgctagattgcatacatacgagattgatcaatttattttacgctatgagcttggattggttgatcccgaactggatgagttcctaagtacccttgcacaattacctattacgtttgatcgtaaatgtgttaagccaggtgatgcagcttctttaattagacttttctggctactacaacatgaatctttagggaataactatcacaaagaattctctgtcttctttaaagaagcggtctttgaacgttattctgagatttggcatcttcataaaaactatacagcagatccggaacaaaaaagagcactgaaccgcttttactctttcgagcttatcgctggtattcagcgctatgcaaaccgtaaagcacctgaactgagtacacaaaaagaagagttctttttaggcgaatttggtgggattaaaatcacagcacctgttgcgctgaaaccggactgggattccatcctcaagaaaaatacagcccatacaacttctttcgatatctatttaaaagtaggacaggatccgctggatccgattagaatcggtcttaatttatttgagttattgagcaagctaaataacggctatcgcccaaataaatatgacaaaagtgcgattgttttacttgatgaaattgttgagctaattgcggaaaaagcaaaatccagcagcgaaatcaagttttatgacggtgtaacgcgagtttacagtgcaagagcggacgacgacatgattactatcagcggcatggagggataa

SEQ ID NO: 453187 - DNA, 519 bp, Serratia marcescens; identical to SEQ ID NO: 102560

SEQ ID NO: 453188 - DNA, 2190 bp, Serratia marcescens
atgtcctggcttaattctgtcttattggcgctcacctcggtgcaaccttatatggtgccggcaactgttatcggcctcgtcagttttgcattcctctgttttattttcttttatctttttagatcagttaaaattattaacagcctgaaaaagtacactcagtcgattaatagcatcgaaaataatgagccagatgatcaacttcagcatctgcaaaatttgtttgtacagcctgaggtaaagcacgcctggaatgaattcgaagaatcattgcactcacaatatgagctggaagatggggaagagaaaatcgtccgtattcgggctactgcaccaagcgccagcttcttctcggagcaacagctggtcgatattcctctgaacaccgaatttttcaaacatctgcctggtattctgacgggtgtagggattatcggtaccttctatggtctgatgattggtctcaaccacttcgaccccagcacaccagagcaggtttccagcagcgtcaataatctgctgcgtgatgtgttgtacgccttcttgggatctgcatttgctattttcgcctccattttggtcacctggcttgaaaaactatccatcgctaagtgctacaaatatctggaaaaattcacagctgccctcgacgcactttacgtcagcggtgtgggcgaggagtaccttgcctcactggtaaaatccagtaatgaaagcgcgacccaggctcgccatctgaaagagagtttggttaccgatttacgtgatatgttgctgaatctggccgaacgccagaaagtggagaacgagcggctggcaaccacgcttagcacgacctatcgagaatcagggcaacagtttgccgagcaagtcagtggcgcgattgaaaatagcctgaagtcgcccctggataaaattgccggcgcagtgcaaaccgcgagtggcgatcaaagcggcatggtgcagaacatgctccaggatgtgctgacggcatttatggcgaaactcgataccacctttggtcagcagtttacaaatcttaacgacatgatggggcaaaccgttggctcgattcagacaatgcaaaccggttttgccacgttgctacaggacctgcgtcaggtgagcgatgattcccgtcagggcagtgctcagctcattgagcaactgttgtcagaaatgaagtctggccagcaagctatgcaggctggcatgaatgacatgcttattagccttcaggcctcagttgccaaaatgggtgctgaaggcgaaggtgctggcgaacgcatggcccgccagcttgagaaaatgtttgccgtcagtgaggcgcgggaaaaagcacaggcagaacacatgtccgcctttattgaagccattcagaattccgtacagcagggccaaagtgccacgatggaaaaaatggcaacctctgtcgaagcgctcggtgagcagttgggtagcctatttgggcagattgacaagggccaacaacagatttcagcgaatcagcaagcgaatcagcagtcccttcacgaacaaacacagcgtgtaatgagtgaggtagacgttcagattaaacagctgatcgacactgttgccagccaacatcaggggacgactgaaacacttcgcttgctcgcagaacaaactaaccgacagattcaagatatgcaaaacggcgcggacaaaatgcgtctggctgccgaacgctttgagcatgcaggtgatcgggtgtcggaagcaaaccgccttaccgctgatgtgctgaataaagcgcaatcagcaggttcatcactctcccttgccaccagcgaactcgcttccgttgtggctgattatcgtaacaatcgggaagctgttagcaaatccattgccatgatggagctgctcgccgccaatactcagtctgaacaaaccacacgcaatcaatttatcgccgatcttaagcagcacagtgagcgtctgcagagctataaccgtgaagcacaagcctttatggaaaatgttagtaacgtgctcgggaaagggtttgaagacttctctgaaggagtttcacgcagtctggataaaacgctgggcaaactggacgtcgaaatggcgaaggcctctactctactcgcgggttctgtcgaacagatcggagaaagcgtcagcgagcttgatgatgtcctgtcacgcgttcgtgcctaa

SEQ ID NO: 453189 - DNA, 240 bp, Serratia marcescens
atgctgtgtctgcctgatacgttccatcacggcgaccatatcgtcaccgcgaagtccctggcctacctcgatcgccacgcattcacgaccaaaattatcgactacagtcaggacacggatccggcgtccgttgaacagatcatcagcaacaaaatccatgctccaacactgatccacagcggtcacggccgaacggatacgcctgagcctggcggtcacgtgccgccgcgggcgttttga

SEQ ID NO: 453190 - DNA, 930 bp, Serratia marcescens; identical to SEQ ID NO: 269214

SEQ ID NO: 453191 - DNA, 240 bp, Serratia marcescens; identical to SEQ ID NO: 269213

SEQ ID NO: 453192 - DNA, 411 bp, Serratia marcescens; identical to SEQ ID NO: 269212

SEQ ID NO: 453193 - DNA, 2994 bp, Serratia marcescens
atgccggtcggttttctgactcaagagcaacgcgacggttttggccgctatgttgattcgcccagccgtgaagagctggaacgttacttccacctgagcgatgaagaccgtgaagccatccaggtgctgcggggtaaccataaccgtctgggttatgccgttctgctgaccaccgtccgcttcgttggcgttctgccggacaagcccgccgccgtgccggtggaagtcctgcaggtgctttgccgacaactggcgattccagaccccgactgcctccagcgctatagcgatcatcgccgctggatacatgccaccgatattcagaaccgctttggctatcgtcatttcaccgatccgggcatcggctttcgcttgagccgctggctgtatgccctctgctggacgggcaccgaccggccgggagtgctgtttgagcgagccacctcgtggctgttcacacagaaagtcctcctgcctggtgtgtctcaactagagcgctttatcgcccagttgcgcagtcgggtcgaagaacgcctctggtttacgctgggccgcagcgtgactgaggaacagcgattgcaactgcaagacttgctgacggtggccgaaggcaaccgcagctcccggctggatcaattgcgctccggcccggtcatggtcagtggccccgcgttgattcgggcactgcgccggctcgatgacgtgcgcggcatcggcatcaccttgccggcggcggcgcacatccctcccagccgtatcgccgccctggcccgcttcgccaacacggccaaggtcaccgcgattaatcggctgccggcgtcgcggcggatggcgacactggtggccttcgcactctgcctggaggcgactgcgcacgacgacgcactggaagtcctggaggccttgctgcgcgacctgttcagcaacgcggagaaggccgacaagaaagcccgcatgcgcagcctgaaagacctggatcggtcggccgcgacgctcgccgccgcgtgcaaggtcgtgctggacagctcgatcagcgatgacaacgtgcgcgcccggctgttcaacgacctgccgaggaccaccctggaaaaggccctggaagaggtcaacgcgctgatccgcccggtagatgacgtctattttcttgcattggaagcgcgctaccgcagcgtgcgccgcttcctgcccgacctgctcaagcacatccgcttcggcttcagcccggccggcaagggcgtggcggctagtctggagtggctgcaactgaacctgccgcgccggaagccagaggatgacgcgccgcaggagatcgtggccaaggcttggcagaagcacatcacccgcgaagatggctccctcgacatgggtgcctatgtgttctgcacgctcgatgcgctgcgcacggccctgcgccgccgcgatgtcttcgtctcgcccagttggcgctatgccgacccgcgtcttggcctgctcgacggtgccgaatggctggcggcgcgaccgatcatctgccggtcactgggcctgaccatcgacgccaaaaccaccctggacgccttgtccgtcgagctggatgcaacctggctggcagtagccgcgcgcctgcccgacaacccggcgattcaactgagcgagaacaccgagggcaagaccgaactgtcgctcggggcgctggacaagctggacgagccctgctcgttgctgcaactgcgggcggccgtgtctgacctgatgccgcgtgtcgatctgccggaaatcctcttggaaatcgccgcccgcactggcttttccgaggccttcacccatgtctccgaacgcaatgcacgcgccgacaacctggtcaccagcctctgcgcggtgctgttgggcggggcctgcaacaccggcctggagcccttgatccgcaccgacaacccggcgctgcgccgtgaccggctgtcctgggtcagccagaattatatccgcgacgacaccctgtcagcggctaacgccatcctggtcggagcgcaaagccaactggaactggcccaagtctggggtggcggcgaggtcgcctccgccgatggcatgcgcttcgtcgtaccggtgcgcaccgtgcatgccggccccaatccgaagtatttcggcaccggccggggtgtcacctggtacaacctgatttccgaccaattctccggcctcaacgccatcaccgtgcccggcacgctgcgcgacagcctggtgttgctggcggtcgtgctggaacagcagaccgagttgcagccgacgcaaatcatgaccgacaccggggcctacagcgatgtggtgttcgggctcttccgcctacttggctaccacttcagtccgcggctggccgatgtcggcggtacccgcttctggcgcacgcgcccggacgcggactacggcaagctcaacgggctggcccgccagtcggtcaaactcgacctgatcgccgagcactgggacgacctgctgcgcctggccggctcgctcaaactcggccgggtgccggcgactggcatcatgcgcacgctgcaaacgggagatagacccacccggctggcccaggcgctggccgaattcgggcggatcgaaaagactctgcacacgttgacctatatcgacgacgagtccaagcgccgcgccaccctgacccagttgaaccgaggcgaaggccggcacagcctggcccgcgccgtgttccacggcaaacgcggcgagctccgccagcgctaccgcgaaggccaggaagaccagctcggtgctctgggcctggtggtgaacatcatcgtgctgtggaacaccctctacatgacggcggccgtggaacggctcaagcagcacggctatccagtgctggaagaggatttggcccggctatcgccgctgatctacgagcacatcaacatgctcgggcggtattcctttgcggtaccggaagaagttgcgcgcggcgagctgcggccactgcgtaatccagacgacgacctgtga

SEQ ID NO: 453194 - DNA, 213 bp, Serratia marcescens; identical to SEQ ID NO: 269210

SEQ ID NO: 453195 - DNA, 276 bp, Serratia marcescens; identical to SEQ ID NO: 269209

SEQ ID NO: 453196 - DNA, 351 bp, Serratia marcescens; identical to SEQ ID NO: 328417

SEQ ID NO: 453197 - DNA, 399 bp, Serratia marcescens; identical to SEQ ID NO: 269206

SEQ ID NO: 453198 - DNA, 183 bp, Serratia marcescens; identical to SEQ ID NO: 198474

SEQ ID NO: 453199 - DNA, 195 bp, Serratia marcescens
atgcgcattaaacacaatctcataagcatgagagatatcatcacgcaactgctcaacaaaatagcgttcatctacttcagtatcggtagaaagcaatacaacctgatggctggcttccgggaagtaatggttaatcaatttatcccgatgttgagagtccagacgacccaatggtgtatcaatgatcactggtaa

SEQ ID NO: 453200 - DNA, 156 bp, Serratia marcescens
atggctgagttcgccattctcgccggggatgcggtagctatcgtgaacctgcgagttcttgtcgaaactgcccagccagttaggtggctggtcctcgaaatggggttcaatttcgataaccgcagtatcggcaaccgttgctttgcgcagacgtaa

SEQ ID NO: 453201 - DNA, 519 bp, Serratia marcescens
atgaaaacaacgcggaacgagctaaaactacgggctgagaaatgccccatcaagcgatttaaggccttcatcggcaaagccaatacgcaagcaactctgtgcgccgatacaggcatcgaaattattggctggagtgggttcgatgcatctgatctgaatacaaaaagccaccgagtggaactggcccgttttattgcagcggctgacccagaaactattctcgcccttctagcagaactggaagccaaggataaacgcatcgccgagcttgaaggtcagttgcattctggcttcacgcctgaggcacttgctcaagaagagcgagcagagaacgcggagcagcgagtctccgagctggaagccaagctggctacgccgattaaaatagtgaactacgacgagttcttcatatgccatgtgtccggtgccagtgatgactactgcaagggctgggttgatgggcgtaatgcagctgctcatgatgttgggaaagctggtttcaccgtagaggataagtga

SEQ ID NO: 453202 - DNA, 600 bp, Serratia marcescens
atgtctggttactatttcggtatattggatggggctgaaacccataagaacaatattaaagaggggctgctgtttgatcatcagtgggggcagcgccttggtgatgatatgtttaacgagttccgtgccggttttgaagtttttatgggggcctcgcatggcagcctaaagagatatggtgttgacatcgataattttgttttcgaccataacgactcagagctcgctttcttctatgagcaaatagcgccattcttcaatggtttttcaaaaatagagcgtgtttattcgctatctgatcatgagatcagcaaagcggttaaaaagttttactttcgtggcgtgatgttgccgagtcgggttgaacgtgaaaaattttcgttgatcaaacactatgagaattttggcgtattcaactttagctcctttgggcagagtaaacgttcccccctgtcttattttaagcgcttggtgagaaatcctcgacacaccattggttctgcttggtggaaacctctggatttccatgcaaatggcgtatggtatttgaaatatccttattttttggtgaaaaaaataaagtttaaaggggctaaataa

SEQ ID NO: 453203 - DNA, 1305 bp, Serratia marcescens
atgtttttcaataaaaacaaacaactgctggacacagaaaataagctctcagaactacagtggcagcttgattcaataaatcgaaatgtcgcggaaatcagattcaggccagacgggagcgtaatctatgcgagcaatatctttctagagatgcttggttacaaactcgaagaaatagcagggcagcaccacagaattttctgcgaaaagaattatgctagcacagctgattattcgcgcttctggcagaaattggctgacggccatcctcaatcaggtttatttaggcggctgcgcaaagacggtaacttaatattgattgaggctacttatattccagttcaaaatcaagatggaaaagttattgaaatcattaagattggctcagatgtcactcagagagaaaacgagttactctcactaagagccgtccatgcagccatctcccgctcgatggcggagatcgagttcacacctaacggtgacattctgcatgcaaatgagaatttcctccgtgctatgggttatcgcctcagcgatatcaagggtcgacaccaccgaatgttctgtttcgataatttttatcaagaaaatacaaatttttggcagagtttaaagggaggaacttttctcagcgggcaatttgagcgcaagaccgcatcgggagagaccatctatcttgaggccacctacaaccccgtcgttgatgaagccggccaggttgtgaaagtgttaaaatttgccaccgacgtcagctcgcagaagcataaggctgatgaaatccgtcaagccgcagagctttccttcaccaccgccgaggagacatctcaaatttccgtgcggggcatggagtcccttgctagttcaattgaattatctcagagcacacttaatttaataaacggtgcggttattttgattacacagctaaatgctcaggctaaagatatcgagaaaattgttaccaccatccaaggcgtggcagaacaaactaacttactagcacttaacgccgcaattgaagctgcccgagcgggtgaaatgggccgaggctttgctgtagtagccgacgaggttcgtcagttggcagctcgaactagcagtgccaccgtggaaatccagaatgtggtaactgctaacggaaagcttactcagcaactgaatatagatatgaacagcatcgctagaagcgccgaagaaaacaacgatcagatcgcaactgtaacaactattatgcgtgaaatcagtgacggtgcagaccatgttgcccgtaccgtatcgacgttgttcaaagacaatagctag

SEQ ID NO: 453204 - DNA, 771 bp, Serratia marcescens
atgaactatacctcgagcaagagcagcaaaggcaaactcaatcagcaattaggactaagcggcaccgcactggaaaataaccagctcagttataacgtctctgcagctcaaagcggtacccgtgacggctattctggcaacagttcggcttattatcgcagtagatatggtgaaataggcgccggatacagctttgataaagatgtgcagcgaataaactacagtttgcgaggcggcgccgtggttcatcgcaacggcattacattatcccaatcgctgggtgacacaatcgctttagtcgaggtgccaaatgcaggcaacgttgaaatcatcaacagtaccggtgtcaccacagattggcgaggctatgccgtggtgccttatatcaacagttatcataagaatagaattaacttaaatccgcagtcctttgatgattcagtagaaatagagaacaacagccaaaccgttatcccgacgaaaggcgccattgttgtcgccaactttgcatctcacataggaaaccgaattattttcaaagtacatcatcgtgggacggagattcctttcggcgcagttgccacattgcgcagcgacccagggaaatcaggtatcgtcggcaacaataacgctgtctatatgagcggcatgccagacgctggaacaataacattgcgttggggagcgggaggaagctgccaaggaaattacagcatagagcctaacgattctgcctcaagagttaagcagattagcttgcaatgtgaataa

SEQ ID NO: 453205 - DNA, 324 bp, Serratia marcescens
  misc_feature (252)..(261): n is a, c, g, or t
atgatggagctgctcgccgccaatactcagtctgaacaaaccacacgcaatcaatttatcgccgatcttaagcagcacagtgagcgtctgcagagctataaccgtgaagcacaagcctttatggaaaatgttagtaacgtgctcgggaaagggtttgaagacttctctgaaggagtttcacgcagtctggataaaacgctgggcaaactggacgtcgaaatggcgaaggcctctactctactcgcgggttcnnnnnnnnnngtcgaacagatcggagaaagcgtcagcgagcttgatgatgtcctgtcacgcgttcgtgcctaa

SEQ ID NO: 453206 - DNA, 222 bp, Serratia marcescens
atgctcaaagcgttcggcagccagacgcattttgtccgcgccgttttgcatatcttgaatctgtcggttagtttgttctgcgagcaagcgaagtgtttcagtcgtcccctgatgttggctggcaacagtgtcgatcagctgtttaatctgaacgtctacctcactcattacacgctgtgtttgttcgtgaagggactgctgattcgcttgctgattcgctga

SEQ ID NO: 453207 - DNA, 165 bp, Serratia marcescens
atgaagaagcgtttttccgacgaacagatcatcagtattctccgcgaggctgaagccggggtttctgcccgtgagctctgccgcaagcacgccatttccgacgccacctttatacctggcgcaagaagtatggcggcatggaagtacccgaggttaagcgcctga

SEQ ID NO: 453208 - DNA, 273 bp, Serratia marcescens; identical to SEQ ID NO: 273084

SEQ ID NO: 453209 - DNA, 897 bp, Serratia marcescens; identical to SEQ ID NO: 273083

SEQ ID NO: 453210 - DNA, 570 bp, Serratia marcescens
atgacaaaagaacccattggttctttacctggggatggaaaagaacctgttatcgagagaatttttaagcttgttgatagatatccttcaagaagtgccgctgcgagggcatgggggataaacatcaataccttaaagaactactatcgacgtcaagatatacagccaacaccgagggagagccaattaaccaaaattgccgaggttgaaggcgtttcccttgattggttaaaaactggagttggagaagccccaaaagagccagaaagaaccggtcatggttctgtgagtgataagcttactgacatgctctcgtttttgacagagaaagaaaggcaaggcttgacaggcatcttggcccgcaaaggaatagaaacagttttgtatctgcttgatgagaacaacatacgactcttacagctacctcaagtagtgaaggatcaaatcctcgctgttcacagtgatgattcagtgcatgtggccgcagacgataaaaaagtgtgtgcttcaactgaggaaaaagacacgaccgaaagcagactagtcgccaagcacaagcaggctagttga

SEQ ID NO: 453211 - DNA, 270 bp, Serratia marcescens
atgttagcgaagctggccattagcgttaaattgcctaaaattgcactgagcagtacggcaggatgtgtgttgtaccggtacgggcaagcccgcaccagtccaacaccgccccttactcacctgcggttcgacggcatcctgctctgcgaggctgacggtcgctgccgcgacaaaggagccacgggcaccaaaaaggaggcgcaagccgggcaagacaacgacaccaatccgcgccatcgggcgcgatggaaaaggggcactgatgagtga

SEQ ID NO: 453212 - DNA, 312 bp, Serratia marcescens
atggaaatcaaattcagccgctacgacacggcggactatctcaagacccaggatgacattgcggcctatctcgatgccgtgatggaggatggcgaccccgcactgatcgcagcggtgcttggagacgtggctcgcgcccgcaacctcacccagcttgcccgtgacgtgggaatgagccgccaaggactggacaaggccctttcgggcgagggcaacccgagcttcgcaaccgtggcgaaagtcgcccaagcacttggcctgcggctcgctttagaaccgacccacggcgggcccacaccggccgggcactga

SEQ ID NO: 453213 - DNA, 183 bp, Serratia marcescens
atgaaagacaggtcacatgacacggcgatggctgagcacttccgcgccgatccgacctatgcggcggaattgcttgcggaggtctgtcacaatggtgatccagccgaactggccattctgctgcggcagatggccgctgcttcaggcaatgagaacgatgaagcgatcagcttgggcgtttga

SEQ ID NO: 453214 - DNA, 1236 bp, Serratia marcescens
atggaaagtgtcctgattcaggactttgatgcagctcaggcgcttagctattctacgttttctgggcgtgttcagcaaagtgacgatcagcatcgtcttgacatcgtggaaaaggagcgaaccagcgccttgccttggcggggacagttcagccctcagttaattgaatacctcctttcaaaacattgcaagaagggagactacgtccttgacccattttgcgggagtggcacagtcctccgcgaagccgctaggatcggcattaacgctctagggatggatgttaatcccgctgctgtttgtctagcaagagtcagtgagttggcaggggttgagccaggatgtcgttggtcgctcattgctcgcgtgcgcgagttttgtcgggatcttcaatcgctgagttatgagaatcaaggaaatgttgaggttgagcaggccgccactcttctctccagcttgaatctggacgaagaggaaagaattgctttggagggaattcttctttttctgttttctaacggaaggttgattgccggggataaaataacgagaggggttgagcgttatttatctgttgtttttgattcgataagctatcagggtcgactttccgcaaagctcggtgatgctaggtctgtggatgagtcagagaataccttcgattacttagttacgtcacctccctatataaatgtttttaattaccatcaaaattatcgtccgataatagaggcgcttgggcatcagccgctctctgcagcgaaatctgagatcggagctaataggaagtttaggcaaaacagatatatgactgttgtgcagtactgtatggatattgcgcaattttttgtagaggcagaccgtgttctaaaggatcgagcaaagatgactatagtgcttgggcgcgagtcgaatgttcggtcagtttcatttagaaatggagagttaataagcgctattgcttgtgaggggatggggtttgagcttgttgaatggaatgaacggaagttcatgaaccgttttggcgagtttatatatgaagacgttcttactatgatacccggtgaatgtgcgctagataaagctgtggagattggaagagcagtaggggctcaggcgctgacaaacgcactggagtattgtcctgaagagcggagaggggaaatctccgaagccgttgcttcagtaaaaaaaatcatgccttctccgctagttaggtactcagacaatgattga

SEQ ID NO: 453215 - DNA, 927 bp, Serratia marcescens
atgattgatgttgttcaagcgcgggcgcatggagataagttgcatgcgctagcgcataatgcaaaactccccgcaagtgacaagccgcgggttgaggcccagatacagacttataatacatgggtagcggaaatgaatgctctcagaagtgagggcgatgagctgctaaacgagttggtgagtcttcttaatgcatacaagaaatcagtagaatttgatcttattttttgttctgacgaagattttctctatcgtcagaaagggcagctcaagctagataatacgatccttgaagagttccttccgcgtttgtttgatgcgcgccttatcccaggctttgcacggcaaagggggcttgagtgtgggccgaaagcaagttttgccggcctttccttcgaaggtccactgcttgcgttgtctagcggaggcgtttacgtcaagagaaaagatcaagatttttctgtgacgcgtcagcataaactgcggatcacgactccatcaaacccagatgacttctttgagcaagattttcatatttcctattttgctacagaaataaagacaaaccttgacaaaacaatgttccaagaagcggctgcgaccgcaggggagcttaaacgagtgtcttctgggtcaaagtacgtgctgctctgcgagtggttagatatgacgccgatcaacacaaaactgacggcaatggatgaagtgattgtacttagaagagccaagcggctgggatctaatcagcgatcaactttctccactgcggcagggcggcgcgagaaaaggcaatggtatagtgattttctggatagctatccactgagttttgagggcttcaagagattgatatggcaccttaatgagtgttttcccgccgaagagcacgattctgaggatattgtgctagagcgtgggtatttctaa

SEQ ID NO: 453216 - DNA, 186 bp, Serratia marcescens
atggcaatcctgcagagcagccagagcagccagagcagccagagcagccagagcagccagagcagccagagcagccagagcagccagagcagccagagcagccagagccagtcaagaaaagcaaaaagtaaggtgagccatgctaaagctggaattggtgaaagagcattgccgcctggaacctga

SEQ ID NO: 453217 - DNA, 450 bp, Serratia marcescens
atgaaatttaacgagatcaagcccgatttaagccaggttgaagcgctgttgccgtcggtggtcattgagctgatctcactgattggctacgccaagaccgaggaaatgataagccacctgggcggcatcaccttcaaggtcggcaagtccgtgcgtaaaaagggcaaccggcgcggcgagctgctggtcgaactgcttggcaaggagacagcaaaggtgattgaaaaacactttggcagcgaaccgctgtacattccgcgctgtgacagcgcgttgcgcgagtggcgtaaccgccgtttcatcgacgaacacaacgccctggtggcggccggtgaaagctcccgttttgcgcgcatcacgctttgccctaaatatggcgtgactgaccggtgggcgcaaaagctgttggctgagcgacaggtatcgtcacagcaattagatctgttatag

SEQ ID NO: 453218 - DNA, 234 bp, Serratia marcescens; identical to SEQ ID NO: 423468

SEQ ID NO: 453219 - DNA, 234 bp, Serratia marcescens; identical to SEQ ID NO: 423468

SEQ ID NO: 453220 - DNA, 204 bp, Serratia marcescens
atgttgattacgatggaagatattcgcgccggcggcggttgtgcgcctggtctgcgcgccttctttgcccgctatgggctagaccttaaagccttcatccgtgatggcggtatcgatgccgagctactggccggcaccggcgacgccctggccatcaagattgtgcgcctggcgcaatccaaagctgagccggaggccaactga

SEQ ID NO: 453221 - DNA, 249 bp, Serratia marcescens
atgaaaaatgtcctgcgcaaaaccagtgccaaagactttaaccggcgttttccggtggggtcgcggtttcgctactaccccgttgtcggcgtgcctgacagcgaggaagtggtgacgcgctcggtggcctggcacctgcagaacggtaagaccgtggtgcgggtcgagggcaagattggcggcgtttccgtctaccgtctggagcctctggaggccttccatgaagtaccccaagggcagcgtggttaa

SEQ ID NO: 453222 - DNA, 249 bp, Serratia marcescens; identical to SEQ ID NO: 453221

SEQ ID NO: 453223 - DNA, 393 bp, Serratia marcescens
atgttgcaggcacaactggcacgtttccctgccaccggccatgtgttgcacttcatcgactgggccaagattgagctgatcaaggatacgctggggcgttatatcctcgccaatccagcagcgctaaccggcccgactctctggggcttgcctgttgtcgcgacggagtcttcggcgttcctgggtaaattcctgaccggtgctttcagcgcgggcgcacagctctttgaccgtgaagaggcaaacgtggtgatcagtaccgagaacgccgacgacttcgagaagaacatgatctcgattcgttgcgaagagcgtgtggcgctggcggtcaaacgacctgaagcgtttgttaccggtgcgttcaccgtgccaaccccaccaaccggcggctaa

SEQ ID NO: 453224 - DNA, 297 bp, Serratia marcescens
gtgagtatcaccgtcaatctgccggccggctcgcctgacggttggttttctggtggctatctggaatggctggcggatggcgtgatcgagcggcgcgggttacgcgcgcagagtggcaacgtgctggggttgtttggcggctcggctgggctggccgttggccaggtggtggcggtttttcctgggtgcgatcgcaccataacgacctgtaacgataagtttaacaacgtcctgaactacggcggccagcctcacatgccgggcaagtcgccgtatcagatcatcaaactgttttga

SEQ ID NO: 453225 - DNA, 3756 bp, Serratia marcescens
gtggcgggcaaccgcctgttggccgaaggcgcgcagattgacagtaaagaggggcgtattggcgtcagcgcgcgggacgtgaccattaaagacgcgcgcacccgcacgcaggaccaggacagcgaaaacaaacgcgagggcaaaaccaaaagccatcgcgaagagcaaaccgagcgcgaaatcagcaccggcagcaccttcagcggacgcgagggtgtgaccgtgatcgggcgtgaaggcgacgtcacggtcaccggcagcgccctgcacagcgaccagggcgccatcgccctgcaggcgaaaaacgatgtgatccttaaccacaccaccgacagcgagcatcgcgtctccaacgaggaaagtcgcggccggaaaaccagaggtgagcgcgccgaagaagtcctacgggaaaacgtggtgggcagcaccctcagcgggcagggcggcgtcacggtgatagcgcaggacggcagcatcatcgccacggcaagcaccctgcacagcgaccagggcgccatcgccctgcaggcgaagcaggatgtgaccctcaataccgccaccgaacgcgagtcggccctcagtgaagagcggtcacagaaaaaaggtttcctgaaaaaaagcagcagccacagcgtggcgcatgacgccaccacacgcgagaaaggcagcctgctcagcggcaacagcgtcagcgtcagcgccggcaacgatctgacggtcaccggctcggccattgccgccgaccaggacgtgaacctgcaggcaggccgtaacgtcgacatcggcgcggccaccgagagcgacacgcattaccggctggaagagaagaaaaaaagcggcctgctgggcagcggcggcatcggcttcaccattggcaaacagtcgagcaaacacgaaatcgacgagaaaggccggacccaaagccaaagcgtcagcaccgtcggcagcagccagggcagcgtcaacatcacggcgggcaaccaactgcacatcggcggcgccgacctggtggcgggcaaagatctggctcttaccggcgacagcgtgactatcgatcccggcgttgatgcgcgcacgcgtaaagagacttacgagcagaagcagagcggcctaagcgttgcgctgtcgggcaccgtgggcggcgcgctcaacaccgccgtcagctcggcgcagcaggcgcgaaaagaaggcgatgggcgcctgaacgcgctgcaaaacaccaaggcggcactgtccggcgtgcaggctgcacaggcctgggagcgggataatgcgctgaccgcctcggcggaggcgaaaaacgccgctgccggcttgcagccgggagacgaaggtgcggcgcagggcgccaccaatacggtgggtatcagcgcctcctacggcagccagtcgtcgaagagcgaaacccgcaccgacagccaccagtcgcagggcagcacgctcaccgccgggcaaaacctgtcgataacggcgagcggcaagaaccacaacgcgcaaagtggcgatatcgtcgtcaccggcagccaactgaaagcgggcaaagacctgtcgctcgatgcggcgcgggacattaccctgcagtcggcgcagaacagcgaaagcaccgtcggcaagaacagcagcaaaggcggcaacgtcggtgtcggcatcggcgcaggctcgggcgggtacggcatcagcgtctcggccggcgtcaatgccggcaaggggcatgagaacggcaacggcctgacgcatgccgaaaccaccctggatgcgggcagtaatctcaaggtgaccagcggccgcgacacccggctgaccggcgcgcaggccagcggagaaaaggttaccgtcgacgtgggccgtgacctgacgctggaaagccagcaggacagcgaccgctatgacgccaaacagcaaaacgccagcgcgggcggcagcttcaccttcggctcgatgaccggctcagccaacgtaagcgccagcaaggacaaactgcacagcaacttcgactcggtaaaagagcagaccgggctgtttgccggcaagggcgggtatgacgtcaaggtcaaagaacacacccagctcgacggcgctgtgattgcaagccaagctgacaaggagaaaaaccgcctcgataccggcacgctgggctggacggacatccacaaccaggcggactacagcgcaacgcacagcggcggcagcttcagcaccggcgggccggtgggcaaggatctgctgaccaacacggccggcggcatgctgtcgggcgccaaccacagcgggcacgccgagggcacgacaaaggccggggttagcgaaggtacgctgatagttcgcgacaccggcaaacagcagcaggatgtggcgcagcttaaccgggataccgagcatgccaacgacggcagcatcagcccgatattcaacaaggagaaggagcaaaaccggctcaaacaggcgcagcttatcggcgagattggcggccaggcgatggacgtcatccgcacgcagggggatatcgccgggctgaaggcacagaaagacccggcggcgctggcgcaggccagggaacagcttgagaagagcggcaaaccgacgaacgatgcggcggtgatgcagcgggcatacgacaacgcgatgcggcaatacggcaccggcagcgacctgcagaaggcggcgcaggcggtgacgggggcgctgacggcgctggcaggcaataacctggcgggggcgctggcaagcggcgcctcgccgtacctggcgacggaaatcaagaagcgggtcggtgaagacaacatggccgccaatgcgatggcgcatgcagtgctgggcgcggtgaccgcgcagctgaataaccagtcagccgcagcaggggggctgggtgcgggcggcggtgaactggcggcgcgctacattgccggccagctgttcccgggcaaaacggcgcagcagctgagcgaaagcgagaaacagcagctgagcgcgctgagccaactggctgcggggcttgcaggcgggctggcgacgggggatactgcgggagcggtgaccggcgggcaggctgggaagaatgcggtggagaataacgcgctgagtgatcttgttgacgctgtatctcagggtaagacacctcagcaggtagccgaagaacgtgtcgacgcagagaacgaacgttataagcagcaaaactgtgccggaatgagcgcggaagcgtgctcggtgaagatgtatactgagcgccgggaagaactgaaagatatcctgtcgacaggtgcagattttgtgccggtggttggggatatcaagagctttgcggaagcgcagagtgcgctggattacttggtagcggcgatagggattataccgggtgcgggtgatgccgcgggcaaagcgatcaaggcggcagagacagcgctgaagaaaggggatgttgctgaagcgtccaggctgattaacaaggccagtgatgaagtatctgccactctcccaatgggaagtaagcgcaatccgatgaatcagccaagtaacccatcttatcaacctgtaaggaatcagccgggtacgatcagaaatcgagaatattcagggcacgccttagacagaatgcaggatcgaggaataacgccttctgttgttgagaataccattaaaaatggaaaatcgactcctagccgaggcggaacaacagtacactttgatcctgagagtaaagtatccgtagttacgaacgaatctggtagagtggtcacggttaaatatggcgataaatga

SEQ ID NO: 453226 - DNA, 165 bp, Serratia marcescens; identical to SEQ ID NO: 453207

SEQ ID NO: 453227 - DNA, 663 bp, Serratia marcescens
atgtcgctgggtggtcggttgattgactcgcagcgctatatcacctctgcaagcgccaaagtgacatcaacatggcatgagtattcgacagaaaacttgcaattgctctttctttccggtgcgactaaccaggcatccgcgattgtgacgggcgaacttttacctaccgacattaaggcgggagataccatttcattacgccatcagaatgtattcagcgttgtcctgcattcgcttgtcgctggcgtggactatttaattgatccgctttggggggttattcgctttatcaaaacccctgcccagcagccggttattgccgactatgcccatatcggttacgcgacaatcccattactgaatgatgatgagccggagttttgtctgcgttatgagggcatcaaccttgccgagaaaaacgaaaatattttggttgaattgtatcgcgttaaattcgacccggttgaaaagatggatttaatcaacaacgagcaagatttagcagcattggaaaccagtgccacgacgttgctcgatgcctcaaaaatgattgacccaaacttagggcagttggggcgaattgttaagtttagaaaaacaaatgggatcacccacaacggcaccattttacacaatggtttttatacccacgggggaaattaa

SEQ ID NO: 453228 - DNA, 975 bp, Serratia marcescens
atgggcgcgccgctgcagccgttcggctggatacaacaccgccacaagtcgcgtagcggctatgttgcgcgtgcggggctgttgcgtactctgtcctggccgtatgtgtgccgcaacttcggcactcagagcctggcggagctgctggagatctacggtatcccgctgcgtatcggtaaatatccggagggcatcggcaagaaagagaaaaacgagctgatgcgcgccgtcaccgagctggggcgttatgccggcggcatcatccccaaggagatggaaataacgctgcatcaagcctccaacagctcgcatgagccgtttatggcgctggccgaatgggccgaaaagtccatgtccaaggccattctgggcggtacgctgaccacgcaggccgacggcaagacctccaccaatgccctgggcgtgatccacaacgaagtgcgtcacgacctgctttcctctgacagccgccagttggccatgacgctacgcagcgacctgttctggccgctgctggtgctcaatcgccgcgcaaacgccgacccgcgccgcacgccgcgcatcaagttcaaagtgcctgaaccccaggcacccgaacctgtcggggcaagtcgcaccgtgcaggttaatttgggcgcgccggcagcgccgacgccggcacgcagttataattcccaggtcattgccgcgttagtggccgcgttgagccgcaaacccggtgcggatgacacgcaaaccgggattgatgaggcattaacggcactgttaagcggcaataaacccgctgagggtctgattgccatgttgcagccggctatcgctgcgttgtccggggaactggacgaacaaagcctgctgggtgcgctggctgatgcgttccctcaacttgatccgaccttactgcaggctaacctcggtgatacgcagaccatcgcacgcctgattggcctgtatgcccagcaggaggggcagtaa

SEQ ID NO: 453229 - DNA, 189 bp, Serratia marcescens
atgaagcgcggcaacctggcgacgttcgccaggcgcagccataagcaagccgtcgcgcgcgccgtcaattacagcatcgtgatccgcccgcgtccgttcctgccggtgacggataatcagcagctcaacaagccgacctttgaggcggtgatgggcgtgttgaatgatgcctttatgaagtcccgctaa

SEQ ID NO: 453230 - DNA, 768 bp, Serratia marcescens; identical to SEQ ID NO: 439333

SEQ ID NO: 453231 - DNA, 672 bp, Serratia marcescens
atgagtcaactccgggccggccaatcccgcgctgacataggggcgcgacagctcaacatcgtacttgtccagattggctttccacacctctttgccggggttgacatcaaagcccacgtccgggaagaaggtcacagcctggccatccgggccactgaaccgcacaccgttcaccggggtgaaggttggacgcccgttctcgtcttcgccggtcatcacctgctgcacaacttcactgtcggtgcgcgaaataacataaccccattgcttcacttctcgctcggtcagtgcctcaacgcggcagcggcagttaaaaccgttcggcggaaagatgtactgccaaatcggatcgaggtaatggaagacgcggttatgcagccgggcatggctgggacgggtctttgcatccataacagccacataccgccagtacgggcggttttctgcgttagccagcatggattcatggcgcgccgacatataggccgcctgggtgttggtgcggtagatggtattgagccgggccgggttgccgagctgacgggtggtgatttcgccggtatcggtgtcgattttctcctcgctgccccaccaaccctttttacgcagtaccggctccagattcttgacgaaccattccggcgtctggccggcggccaggccttcgcgtaa

SEQ ID NO: 453232 - DNA, 237 bp, Serratia marcescens
atgatgcgcggcatctgttcggacaccgagttgaattcttccccgcgtagtgtgccggacgccaacccctggctcagctggatgatggcgttcgtggactcttcggccgtcgcaccggagacgatcgcggccttgttgatggtgctcgtcacctgcagcagttcggtctgggttgcgctgcctttaagcgagcgggccatgcgggtatacagttcggcggtcgaagcgatgcgttga

SEQ ID NO: 453233 - DNA, 297 bp, Serratia marcescens
gtgagtatcaccgtcaatctgccggccggctcccctgacggttggttttccggtgggtatctggaatggctggcggatggcgtgacagaacggcgcgggctacgcgcgcagagtggcaacgtgctggggctgttcggcggctcggccgggctaagcgttggccaggtggtggcggtttttccaggatgcgatcgcaccatcgcgacctgtaacgacaagtttaacaacgtcctgaactacggcggccagcctcatatgccgggcaagtcgccgtatcagatcatcaaactgttttga

SEQ ID NO: 453234 - DNA, 159 bp, Serratia marcescens
gtgaccacccgttacaaccagcgcattcgccagctcgaaaaagtggcgtctggccggttatcgctgggactggacaacgccggcgaggtgctggagccagacgacagcgtggtgtttgtgccagggcgcaacatgttccggagggatgggctgtggtaa

SEQ ID NO: 453235 - DNA, 534 bp, Serratia marcescens
atggatgggggcggtatctttttagggacgattttttctgcagagaaaaaggccattttgttttttttggtgtttttacattttctcctgctgagcggattgtggatggcgatttcattatgtatttcgctacgaggagatataacaggaatcgtccgcttggaaaaaaaggggagagcatatgatcctgttgcgatcaattttaagcttgttaactcctctgaacgcccggtgatattgagtcatatagaatggggcgatggaaaaagcgttttagggcgaattattccagattgtttacccatcagaattgatagcagggagtccaggtgtttacatatccctttgagtggtaagggtggtttggtgagttggctcgcgggggaaattgattttttcggcttggatatagatggtttaacatattgggttgttttatccactgggcataaatatccagttagaactggaagtaatatcagtgctgctctttccagagttatgagtaggattgtttttttatggaatggttag

SEQ ID NO: 453236 - DNA, 408 bp, Serratia marcescens
atgtgcatagtgatgcttatcactataatattattatttctgctctcatggttttttatgacgggtaatgcaggagctaaagctatcatttgggtgacaataagcctattattcttatgttgtgctgccctgtatttcatcgaattacttggtgtttttctgcttttttcaagcgtaggatgttttatttttggccgactgggcaagctaggtaattggggggaaagcactagctttaacttaatgagccttatttccctggccgtaggattctggatgacaatagtaagtgctgaaaaaataatagtgcaagatgcactacaggagttcaatatgagaatagaagaagataagcgtagaaagaaatgcccctctcctcctattttaccgcaaaccgcctatcgttga

SEQ ID NO: 453237 - DNA, 213 bp, Serratia marcescens
atgtttgtacggctgaaaaactgcctgctgcttgctcaggaaaagcatgagattgcgcagtctgcggattgcgaggccgttgccaggttttactttacggtgcagcaggggatggtgacccgcgcccgcgacggggaaactaaggctcagctggatactacggctaaatcggcgatgctgctttggccggcgttgactggttccctgacgtag

SEQ ID NO: 453238 - DNA, 420 bp, Serratia marcescens
atgaaacgaccctatgtgattcttttcgtctctatgctgattgcggcattgatgacatcggcatgcgcccctaaaaccagcgttgagcgccatgcacgacagtatgtttacgcggcagatgagggcttcgatccgcattttcgtattaaaaagtccgacagcgcccggttgatggtgccgttcttccaacagttccgggagatggggatcaaggacagggcggcaggtgtgtcccaggatgaggcaatgaaacgggtttccctgttccgtagtgaagatttcctgacatccattcaggggaaaacaacgtttgcggggcggacttacaatgataaccgaaacctttcaccaaaagagcataaggccatgggggacgcgattgagggtacctatttggacggctatgagggcaggccgtaa

SEQ ID NO: 453239 - DNA, 945 bp, Serratia marcescens
atgaaggctgctgtgttaattcgggccgcggggctgagcgccgcgctgttgatgacatcgttggcgcacggggcgatcggcgatgccagcttggtgctgggcgatcaggcgcgcgggctgcgcagtctggttgaggccgccggcgtgatgaaagatgcgccctatcagtatcggtgggccaatttccagggggcggcgccgctgtttgaagcgcagcgcgcagacgccgtagatacctcctatgccggggatctgccgatcttaatggccgcggcgggcggggtggattttaagctgattcagaccaacgtgggttatgcccagtctaacgggattatcgtgcccaaagattcaccgctccacagcatccgccagttgcaagggcagacggtggtggtgtcgtcggcgcgcggcagcatttcgcaaaatctgctgtatgcggcgctgcaagaggccgggctacagcgggaagatgtacagatccagtttgtgatgcccaccgacgccagcgcggcattcaataccggcagagtcgccgcctgggcggtgtttgatccctatctgggcgttgcggagcagaacggtgcgcgcctgttgcgcgatggccagggattaacgccgtcgcttggctttttgaccgccaccacgcgctcactggccgacccggacaagcgggcggccattaaagactttgccgaacgcgtcgccaaggcgcggcagtgggcgctcgacaacccggaagaatacgccaaggtttacgcacggctgacgcgcctgccgctcgacaccgcccgacgcattgcgagccgtacctccaaaggtgtgcatagcgttagtcagcaggatatcgacaggctgcaaccggtggctgatttgttttatcagttaaagatattaccgaaccctgtgcaggtgggcgctttggttgataagtcattgagataa

SEQ ID NO: 453240 - DNA, 1581 bp, Serratia marcescens
atgactgcctttgtctaccgtgattttcccacgctgcgcgccgcgttagtggcgggtcaggaactggcgttgatcgatgtgcgtgaagaagccgagtttgcggcaagccacccgctgtttgcggtgaatattccgctgagcaaactggagctggaaatctatcggcgtattccgcgccgtaccacgccgatcgtcgtctatgacgctggcgaagggttggctgagcaggcggcagggcgattgcggcagttcggctacgacgatgttgccctgctgagcggcggtctggcgggctggcgtgccgccggcggtgaaatttttcaggacgtgaatacgcccagcaaggcgtttggcgaactggtggaaaaccgcaggaacacgccatcgctgaccgcagagcaggttaaggcgcttatcgatcgccatgccgatgtggtcatcgttgatgcgcgccgctttgatgagtatcagaccatgagcatccccaccagcaccagcgtgccgggcgcggagttggtgctgaggatccatgcgctggcgccgaatcccgatacccgggtcattgttaactgcgccgggcgtacgcgcagcattatcggcacccagtcgctgattaatgccggcatccccaatccggtggcggcgttacgcaacggcaccatcggctgggggctggcggggtttgcgctggaacaccagcagcagcgtcgctacccggatagcgcggataatctggcgcaggcccgacagcaggcgcggcgggtagccgatgaggccggcgtaaggcgcattgaccgtgaaacgctggcgttatggcagcgggatacggcgcgcaccacctacctgtttgatgtacgcaaccccgaggcgtatcgcgccgggcatgtggcgggcagccacagcacgccgggcgggcagctggtgcaggagacggatcactatgccagcgtacgcggcgcccgcgtggtgctggtggacgatgacggcgtgcgcgccaatatgagcgcttcctggctggcgcagatgggctgggaggtcgcggtgttagacggcctgactgccgatgattttagcgagcagggcgatcccgccgccgtgctgccgccggcgccgccggctgatgaaatcactcccgtgcagctggctgaactgctggagcagccggggacggtgctgttggacttcaccaccagcgccaactacgtggcgcgccatattcccggcgcgcactgggttatccgctcgcggctgccgttggcattggaaaacctgccgccggccgaacgctacgtgctgacctgcggcagcagcctgctggcgcgctatgcggctccggaagtggccgcgctgaccggcaagccggtacggctgctggccggcggaacgcaggcgtggatcgccgaagatcggccgctggtgagcggggacgatcgcctgatctcaccgcggatcgatcgttaccgccgtccgtacgaagggacggacaacccgcgtgaggcgatgcaggcgtatctggactgggagttcgggctggtggcgcagctggaacgtgacgccacgcatggctttaacgtgctctga

SEQ ID NO: 453241 - DNA, 600 bp, Serratia marcescens
atgacaacgccattacctttagaccgtttacgtcagttcatcaaacatctggagcaactgcatcagcagccgctgagcgatgcggcgcgactggcacaggcagcgccgcggctggccgagctggtgcggcaggatgactggctggcggaagaatacgccgctcctcatcctcagcactatcaacagtacctgctgcatatggatgccgagcagcgcttttccatcgtcagcttcgtttgggggccgggacagattacgccgatccatgaccaccgcgtgtgggggctgattggcgtgctgcgcggcgctgaaattaaccagcgctacgtgctggacgcccaggggacgccccgagccgcgggcgatgccgagcggttaaccgtcggccaggtggcgaagctgtccgagcaggacggggatattcaccaggtccgcaatgcgtttagcgatcgcgtttcgatcagtattcatgtgtatggcggcaatatcggcgccgtcaggcgtgcggtgtacagcgaaagtggcgtcgtgaagcccttcgtttccggctactccaatacgcaaccgactcatatcttggacttttctaaggacgtgtaa

SEQ ID NO: 453242 - DNA, 888 bp, Serratia marcescens
atgcgtacagacgatattgatgcgctgctggcagtagtgcagtttgcttcgctgaaccgggccgcggaacaccttggcatcagccagtccgccatcacccgccgcctgcaaagctttgagcaaagcctgggcgccacgctgctggatcgccagaccaaaccgctgaaactgaccgccatcggccgccgcgtgtatgaacagtgcctgacgatcaaacgtgagaccaagcggctggaaagcttacttaatcaggatgcagagcccagcggcccgctgcggctggggatcccgcaaagtctgagtgaaattgccttgcagccggcgctggcggccctcggccaacattacccgcagctgcgcccgcaggtcatgtgcggctggggcgggcaattgctcaaacgtctggaaaacgttgagctggacagcctgctcgccatggggccggcgcagcaaaccttcgatgacagcctggaggcaaaagcgctgtgcccgctggaggttgtcgtgatcgccagtaagcacctcaatctcagcgccacccgcctcagcgactgcgcccaccacggctggatattgaaccccgacggttgcggcctgcgcgccggcctaacccgcgatttacagtcgcaaagcctggggctgaaaatcaacgtggaaaccgcaggcgcacagttgcaaatcagcctggtcgcacaaggcctggggctggggctggtgccgaaggccgcgttaatccacagcccgcatcagcatgagatcgccgtgatggaactggccgacttccagccgaaagtgcagctgtggcaggtcagcagccgggggctgggtaacctgcagcaacccaccactttttttgccgagaagatcgtgcaggaactgttgcactaa

SEQ ID NO: 453243 - DNA, 1218 bp, Serratia marcescens
atgccatcgctccgctctacgccgtcgcttgggcagcagcacattcacccgccgcttgaacaaatccgcgcgcagctggcgcagcaggccgccgagctcgaccgcagcggcgcgttcccgcacgccaatctggcctggctgcaccagcatggcctgctggggctggcctgcgcgccagattacggcggtgcgggcgccggccttgccgtcctgcagcaggtggtcagcgccatcgcgcagggtgaaccctcaaccgcgctcatcgtctgcatgcagtatctgcatcacctgcgcctggctgccgatgccgactggccagagccgctgcgctgcgccgtcagtcacagcgcggtgcggcacggcgcgctgctcaacagcctgcgggtagagccggaactcggctccccgacgcgcggcggcctgccccgcaccgtggcgacgcgcacgccgacgggctggcggctcaacggccataagctttataccaccggcattgaggggctgagctggctggcggtctgggcgcgcagcgatgacgctaccccgttggtcggcacctggctggtgccgcgcagcagcgcgggcatcacccttacccccagctggaaccacctgggaatgcgcgccaccggcagccatgaagtggtgctgcaaaacgttgaggtgccgctcagccatgcggtgagcgtttacccggccggtcagccgccggcgcccaatacggcgcggatccagaccgccgccaacgcccatacggccctgctggcggccatctatgacggcattgcccagacggcgcgtcgctggctgctcggctggttgcagcagcgcgtgccggccagcctcggcgtccctttggccacgctgccccgcgtgcaggaaaacgtcgggcagatcgatgaaatgctgttggtcaaccaaagcctgctgcgtcaggcggccgcgcaggccttcaccaccgaacaggccaatctggcgaaaatcaccatcaccgaaaacgccgtcaatgcggtgggcaaagcgctggcgttgaccggtaaccacggcctgacgcgccacaacccgctggagcgtcactaccgcaacgtgctgtgcggccgggtacataccccgcagaacgacagcgcatgggttaacgccggcaaagcggccttgaccggcgtcgcgcagggcactgactttacaccgaaggataaggatcactatgtggcgtcttaa

SEQ ID NO: 453244 - DNA, 975 bp, Serratia marcescens
atgtggcgtcttaaacacactctgggtgctgtactgctgctcgcactgaccggccaggcgctggccgccgagacgcgggttaccttgcgtatcgccgatcaaaaaggcggtatgcgttcacaactggaggcggccaacgcgctcagcaacctcccttacgcgatcaaatgggccgaattccctgccgccgctccgcttgccgaagcgctcaacgccggcgcggttgatgccggcatcattggcgatgcgccgttgctgtttgcccttgcgcaaggcgcaccggtgaaagccgttgcggtcgataaaagcaatccggcgggcacggcggttctggtcggggagaactcgccgctaaaaagcggccgggatctgaaaggcaaacgcatcgccaccggtaaaggctccatcggccactttgtcgcgctgaaggcgctgcagcaggccggcctgaccaccgcggacgtccagctggtctttttaggccccgtggatgccaagatcgccctgctcagcggctcggtcgacgcctgggccacctgggaaccctacacgacccagctggtgaaaaccgggcaagggcatgtgctggtcagcggcgccggcctgctgccgggcaacaccttcctggcggccaccgatgccgcactcggcgacagcgccaaacgccaggctctgcaggattacctcaatcgtctggccaaggcggagcgctgggcctacgccaatctcgacagctacggcgaaacgctggggaaaatcatcaggttcccgcccgatattgcgcgcgaacagttcgccagccgccggctacgctggcaacggattgatgaacaaaccgtttaccaacagcaagccaccgccgacttttatctggctaacgggctgattcggcagccgcttgacgttacccgcacctttgaccgggggttcagcataccgccgttgacgcaacaaccgcagggagaccagccatga

SEQ ID NO: 453245 - DNA, 789 bp, Serratia marcescens
atggtagctcaggccgcccagacgcagataaccagcgcgggcatcacgatagacgtgcagaacgtcagccacagcttcgccctggataaccgggacatcgccgtgctggacaacatcagccttagcattgccgccggcgagagcgtctctctgttggggccatccggctgcgggaaatccactctgctgcgcctgctggccgggctggaggcgcggcaaagcggccgcctgctggccgacgctcaaccgattgacgcccccagccccgagcgaattctggtttttcaggatcccacgctttacccatggcggacggtacggcagaacgtgctgctcgggccgcaggcgcaaaggctcggcggtcaggagcacaaggccgacgggctgattagccgtatcggcctgggtgagttcgcccatgcctatccccggcagctgtccggcggcatggcgcagcgcgccgcgctggcacgcgccctgctcaacgaaccgcgcctgctgttgctggatgaacccctgggaaaactggactcgctgacccgtatcggtatgcagcgcgaactgattaacctttggcaaagccggggctataccagcctgctagtgacgcacgatgttgaagaggcgctgctgctgagcgatcgggtgatcgtcctgtcgccgcgtccgagccggatcctggcgcagtttactgtgccgctggcttatccgcgccaccgtgacgatccgctactgatccagcaccggcaagacatcctgaaaatactgggccagggaatcgactggtga

SEQ ID NO: 453246 - DNA, 798 bp, Serratia marcescens
atgtctttggtgtctactccaaccgccagaaatgatgaagtcacacagggcgtcagccaggaagagtggcagatacgccttaaactggccgccgcttaccagctggcggcgctgtataactggaccgatcatatttacacgcatttctcggcgcgcgtgccgggtgcgcaagaacatttcctgatcaacgcctacggactgctgttcagtgaaatcaccgcctccaacctggtgaaaatcgatctggacggcaacattatttccgatccctccggactgggcatcaatcaggcgggttttgtcatccacagcgccatacaccgcgcccgccccgacctgcaggccgtgctgcacacccacaccaaagacggcgccgcggtatcggcgcagaaggacgggctgctgccgctctcacagcatgcgctggcctattattcgcgtattacctatcacgaatacgaaggcgtcgcgctcgatctggatgaacagcagcggttggtcaacgatctgggccacagcaacgtgatgattttacgcaaccacggtctgttagccggcggcgtcactattgagcacgcgttccgcgagctgcacggcctggagcgcgcctgcaacattcaggtggcggcgctcgccggcgggcgggacaacgtgcgctacgcacctcccgccgcggtcgaaaaggtcaaggagcagtcggcccgttttcgcagcggcaccgacgaaataacgcaaaaacactgggcagcggcaatccgccagctggaagccggcggcctgacccgctatcgccaataa

SEQ ID NO: 453247 - DNA, 984 bp, Serratia marcescens
atgatcaaaaccgaagcctggctgtggaaaaatcacgcctctccccttctgcttgagcgccaggaaaaagagctgccggaacccggggacaaccaggtgctgattgaaaaccgggccattggccttaatcccgtggattggaagctcatggccggcttatccgctgcctggcggcccgatcaggttcccggcgtagacggtatgggggtcatcagcgccgttggccgcaacgtcacccatctgcgtccgggcagccgggtgatgtaccacaccgatctgcgttttgacggcagttttgcccgccataccctggtcagcgccgatgccccgatcgccgttcctgatcttatcagcgatgccagcgcggcggcattgccgtgcccgggactgacggcctggcaggcggcgcacaaggttcctaatctcgccggtgagcacgttctggtcagcggcgccggcggtgctgccggcgggctgctgacccagttgctgattcaggctggcgcccatgtctacgtcacggccagcgctattcaccacgatcggctgcgcgcccgcggggtaattcatgcatttgattaccgcaacgcgtcgtggcaacaggcgctgaaagaggtactgggcggcaagccgctctacgccgcttttgacaccgtgaatcagcaaagcgccctgtctctggccagtttgctcggctattacgggcatctggtatgtattcaggatcggatcgaaacggccccgctgccggcgtttaccaccagcatctcactgcatgaagtcgctctggcggcgattcacccctacggtaccccggcccaatggggcaagctgcgtcaaggcggggagatgatgctccaacagatgggacgcggcgaactgaccctgcctcccatccagcacattgcgtttaatgatattccgcgtagcctcgaggcgctgaaacagaataatgacggcataaaatatgtcgccatcctgtaa

SEQ ID NO: 453248 - DNA, 855 bp, Serratia marcescens
atgaaacattttcgtctttgccttatccccgtgcttgccgcattttcactgccggtttttgcccacccggcgacgctggataccattaaagatgctgaaagccggcttcacggccgagtcggctatgctgagctggatctcgccagcggaaacatgatggatagctatcgcgctgatgaacgcttccccatgatgagcacctttaaagttattctgtgcggcgcggtgttagcgcgggttgatgccgggcaggaacagcttgatcgccgtatccgctaccgtcagaacgacctggttgagtactcgccggtaacggagaaacatctcgcagaggggatgaacgtgggggaattatgccatgccgcgatcaccatgagcgataacacggcggcaaacctgttgctctctacgctcggcgggccgtcggggctgaccgcatttttgcggaaaacgggtgactcggtgagccgtcttgaccgttgggaaacggcgcttaatgaagcgttgccgggtgacgagcgtgataccaccacgcctgagtccatggcgcggacgctgcataatttgttaacgggtgatgccctgagcgctgagtcacgccggcaattaatgcgctggatggaaatggataacgtcgccggaccgcttttgcgttcggtgttgccggcagggtggtttattgctgacaaaaccggtgcgggtgagcgtggttcgcgtggcatcgtggcggcgctggggcctgatggtaaaccgtcgcgtatcgtcgtgatttacctgacgggaaccaaggcaacgatggacgagcgcaataagcagatcgccgatatcggcgctgcgctgataaatcactggtaa

SEQ ID NO: 453249 - DNA, 180 bp, Serratia marcescens
atgatgtccgaaccttcagacgctattgattcaacctacccgctgtcaggctttcgtttcactgtgagcattggcgatgagaccatgcaggagagggacgccgataaaacgcagacccgcatcgggcaggccgctgtgcagccgacggagtttaatcaacaggactccagcgaagcataa

SEQ ID NO: 453250 - DNA, 606 bp, Serratia marcescens
atgtttggtgcggaaaaaagccgtttattgcgtgcaaatctggagcatttgctccgtagtaaaggtgaaacgcaagtttccattagtgaaagtaccgggcttaaccgcacaaccctgtttaagatattggacggccgcgtcaccagcgtacagaaacagacgctgcgtaaaatatccgattttttcggcgtcaccatgtatgagctacagcatgtcgatatcgcgacggcggaaaaaatcgatgccagtatttccgttcacggcaatatgaatgcggcggcgctgcccgttattcccctgacgtcgctgatcgagcaggtgcgcaccgggcgttccgtcggggagttaacgctctcctggccgctgacctactattatggccacgggcctaacttgctggccgtattggtggatagcaatccgcctgaacgctatcgctgcggcgatacgctgattattcgtaaaggtgtttataaaagcactaacctgaagcttctttttaagcgcggtgcgggtttttttaccgatgcgccggcctgcgtggacgacattgcggctgacatcaccgtattaggagatattcttgaagaacgttatggaaactga

SEQ ID NO: 453251 - DNA, 873 bp, Serratia marcescens
atgacgaagcagagtgaaagcaaggtatcagatgagcagcagcccgctacgggccacacccgccgcgatgtgctgaggctgggcagtctggcgtcgctgggggcggttctggggagcggagcgctgctcagcctgccggccgccgcgcagacgccggccgaccgtcaggcaggaggcaacgaggcgggcagtatggcgccggaccagccgctgaatatcgttatggcggtttaccagggcggcacgctgctcgactttgccggcccgagcgaagtattccaccgcctgccgaacaccaacgtgcgctacgccagcctgaacggcggcccggttacgctggagtttggcgtagtgtacggcgagaccgagcggctggcggatatcgacagggcggatctgctgttggtgccgggcggaccggatctgagcgagccgaccaaaccggagtatctggcgcagataaaacgcctggccgcgggggcgcaacacatcacttcggtttgcaccggctcgctggtgctggccgccgccggcgtgctcaaaggtaagagaagcgcctgccactgggcgtttgttaacgatctggccgactatggcgccattccggatccggcgcgctttgtggaagatgacaacggccgctttatgagtgggggcggcgtgacgtcaggcattgatttcgcgctgcgggtggcggcgaaactgcgcggccggctgaacgccgagtttgcccagctgattattgaatacgatcccgatccgccgttccgcgccggccacccgcgcgtggcgccgccggaggtgatggcgctggcgaaaaagaaaatgcccggcgggcttaaggggctgcagaagatccccggcgttatttag

SEQ ID NO: 453252 - DNA, 993 bp, Serratia marcescens
atggaagcagacgccggtggcgcaaaggacgtagttcccttaaaatacgccaccatgcataacattggattctttgtttttccggggcaccagatcctcgatctggcagggccgctcgccgtgtttgatatggtgagaaaggtcgccgggcaaccgttctacacgcttgacgtgctgtcccataccggcggcatggtgccaagcgacgccggcgtgccggttggcagccagcctgtcagtcaggcgacgccggatacgctgatcgttgtcggcggcgacatcgcttcgatgacggcgcccgaacaggtcagcgccgtggcggccgtagccgccatcacgccgcgcatcgccagtatctgcaccggcgcgtttttactggccgaaaccgggctgctcaacggccggcgcgccaccacccactggcgtctggcgcaccggctgcagcaaacctaccccgccattcaggtcgatatggatcgtatctttattgccgacggaccgatctggagctccgccggggtaacggcgggcatcgacctggcgctggcgctgctggaggccgatcgcggcgtggagctggcgcgtgaggtggcgcgcgagctggtcgtctaccaccgtcggccgggcggccagtcgcagttctcctccctgtcgcgcatggagccggcctccgatcggatccgcatcgccctcaccttcgcccgcgaccatctgcacgagccgctgccggttgaacgcctggccgaggcggcgcatctgagcgtccgtcagttcggcagaatgttccagaaggaaaccggcgaaacgccggccaaggcggtcgaacgcctgcgcgttgaagcggcccgcctgcggattcaggaaggcagcgaacccattgagcacatcgcacaggccgtcggcttcagcgatccggaaagaatgcgccgcgcgttcgtcaggctgttcggactaccgccgcaggccatccgccgcgcccatcagcatcgctaa

SEQ ID NO: 453253 - DNA, 744 bp, Serratia marcescens
atgcaacgcgcactgtatcaggcgctgcttgacggcgacgtcgccgcgccggcggggttaaccacctggaacggcagcgatccgtcctaccgctttgccgtttaccgcaacaacgtgatggcctcgctgattaacgcgctggcggaaaactgcccggtgctggtgcagcagctcggcgacgacttcttccgcgccatggcggccgagtttatccgccagcatccgccgacgtcgccggtgctggccggttacggcgcgcggctgcccgcctggctggccgactttccgccgctggcggagtggccgtggctggcggatctgacgcagcttgaactcttgtgcatcgaagcattgcacgcagcggatggggagccggcgcgcggcgcggaaccaacgctgtccgccgacagcacgctgcggctgcatccttcgctgcgcctgttcagctcgccgtttgccgtgttcagcctgtgggcggcgcatcagcaggatcccgcgccgacggagttggatccctggcgccccgaacaggttttactgtttcgccatcaggatgacgtgcgtctgatcgccatcgatgcggcagaactgcgctttattcgcgcgctgcaggcagaacggcccctgacgcacgcgctggcggcggcgctggcgcaagatgcgcagtttgacgcccgcccggccttacggcgcttacaccattacggcctgatcctctgcgtatccggccggcaggagaaataa

SEQ ID NO: 453254 - DNA, 597 bp, Serratia marcescens
atggacatttttttcacggaagaaacgggcggggttgataagaatcgccagactgctttccccttgtacggtaatgacaactattatatttacagcctgagcctgctgctggaggatctgctggcggatgaggacgcgacagagcggcagctgcccgctatctgggtgctgagcgggtttcaggatgttttatcctatatccaacagatgaagagaaatgcggagaatatcgtgattggcgatgagcggcattatcgcctgttgtccggtattgccagcattggcgaaatgttttttatccatgcttcactgcccgtcgcggagatcaaagaacgcttaaggtttgtgatccgccgtcaggcggaaggcaagatgctgtgcgattatcgttttcacgatatgcaggcattttccgccggggcgagaaaaacgattaagctgctgctcaaaggattgccgccctggcgcgtggcgcaggagtgcagcattcatcaccgtgccgtcagcgtatataagcgcaacgtgatgcggcggttgaacgttaataatactcaggagctggtgatcaagtgccggctgatggagctgcagtggtag

SEQ ID NO: 453255 - DNA, 636 bp, Serratia marcescens
atgcaaaaggtattgttggttgattttacccattctatgacgcagacgtttcactatttctttaatgcctattattccgggcgcgttttatatgaatccatgtcgccgccggatattagcagcatgatcagacgacggccggacgttaatcacgaaattgtgctgttttatctatcgcgtaatatgatccactcgccgcagcagttgcgcattatatcttcatttttcaacgtctatccggacgttaagggggcggcgctggtggacaacaacagagcggtggcgggcaggctttaccggcagtcgccgctgtcggtgatttatcagggggagccgttgtctgatatggtgcgtatgattaaccgcgtgctgcaacaccgtaaggtaatcagcgaaagactctgttcctatgaggaagaagtgcgtgattttctatgggaagagagagtacgcctgctgacgctgcaagagaagaacgtcatgattgatgtgctgcaagggttaccgctgtgcaggattgcgcgtaatcataatattaaaatgaaaactgcagccagccataagtataatgcctttcgtaaactcggcgtgttgcgaaaaatcgacttgctgcagttaaggattgagtggttttga

SEQ ID NO: 453256 - DNA, 981 bp, Serratia marcescens
atgataaagcgaatggtgtctatatttatttttggcgtgttcctggcgccacttcatgtaatggccgattgtatttggtatacaggatcgcttggaacaatgaatgttaacgtaggaacgttaaataatctatcggaagaacgcgttggggcggttattttctctagaactaactccctagatagtctgggtagccattttggtgttcgatgcggagcatatacgcgctttaatatttatgggagtatgagcggtagtccggagagtgggtatagtggtgtataccagacaaatattcctggtttagggattcgcatcagtatgtggagcagtaattcttactatgaaacacccatgacaccaacggttgccccttttacatgggatataaattataatactcatcaagatcttgattttaattatggttctggatttattcaagtcagggttgaattaataaagacggcggagtttgttgagtcaggagatctcaactatcaagttaataatatattagtcgccgaacagctgcctgtgcaaaaccttaatgttacagggcggatagtcggcggctgctccgttagtagcagcgctattaatgttcccctaggtgtcgttcctagccgtaactttactggagtgggagatatcgctcaacctacagacttcaatatttcattacgttgcagcgcagacacgagagtcagcgtcaggtttgacggtacggctgacagttctggtgcagcgggggtaattgctttggatcccccgtcaagcggtagtgcagctgaaggggtgggaatacaacttatttataatgatctgcccgtacggttaggttcggatctttatgttttaacgccaagcagtaatggggatgttgatgtgccatttactgctcaatattatcagacgagagagagtgttaatggtgggccggcagatggtacggtgacatttacaatgtcatatgattag

SEQ ID NO: 453257 - DNA, 1257 bp, Serratia marcescens
atgaaagcgcgcttaacgttactctctttttgcctgctggcggcgcaggcctcggccggcgggaacgctgttgataatgaagggctgcagacgctgacctcgattactcagcaaaacagcgatattccggcgctgttgaactatgccgagcggacgccggcgttgcctgctcatacttctgcgccgacggcgcctgcggtaaaaaacggcgaggcttcacggctgatgaaaacgctgcgcgaacagcaggcggagatggggcggcaggaaaaaacaatcgctgccctgcgcgcggagctgcaggcgctgaaacagcgcccgccggccaatgacgcggcgttacagcaggtggaaaaactgcagcaggcgctacagcaacagcagacgagctggcagcagcagaaagccgccatcgcggatacgcagcagcggttcacgcaggccgaggaggcgctgcagggcaaagaacgcgagctgcaggccagccggcagcagctggcaaagcagcatgccgagctgagcaccctgacgctgcagatgaataacgggcgtgaacaacgggaagcggcagagcgtcgggcgcatgacagcgcggagaagctggcggcgctgcaggcggaaaaacagccgccggtgctggatagcgagccgcagcagcaggcctatgcggtcggcgcttcgctggggggcgatatgctcaagctgctggccgatcgggcggcgcagggcgtatcgctggatcgtgaacgggtgctggcgggcgttcacgacgccttcagcggtaaatatcggctggatgaaaaggcgcgtaataaagccctgtatgacagcgccgtcgccgtcaatcagcatcagcaaaaagagaaggagcaggcgctggccgcaggtaaacgttatctggccgattttaaaaaaaagggcgcgaagtcgctgcctgacggcgcctggtatcacattgagtatgccggcagcggaaaaattgaagcggatagcacggtggatgtcgttattaaggaaagcctgccggacggtaccgtgattagcgatatggaacacagcggcaaagtcttatcgcaacggctggacgcttacccggccgtgttccgcgccgcgctgagtaaactggagaatcacggcagcctgcagctggtggttccgccggaaaaagcctatggcgatcgtggtctgccgccgaagatcccgccaggggcgacgatgatctatcagattcgtattgtcgacgtgcagaaaaagtga

SEQ ID NO: 453258 - DNA, 438 bp, Serratia marcescens
atgatgattgcccttttccatcagcgtgggcgcgccttacgcctgtgcggctgcgccgcattttctctgttgctgagcggctgcctgtctgctccggaagagacgacggcgccgacgccgacggtgcaggcggccccagcgccggcagaagcaacggtagcgccgccgcctaaatccgtgaattccattgagcagtgccgtaaggcgctggattcgctgcagaagattaatccgcagtcataccggcagaagaaagcgtattttgactcactgctcggctccgtcgcgcagtacagcgccgtgcgcggcgaggtcagcggcggcaccaaagacaccattgatgcgctgtacaagttcaaaaccaataaggtgtgcgccgatattgaaaatgaagtaatgaacggcctggtgcggcgggcggagaggatgacgccatga

SEQ ID NO: 453259 - DNA, 219 bp, Serratia marcescens
atgatgcggcgtaaccttcagtattgtgctggccgtcgggcattggctgcactgcacgtgttgctgattggcctcgtcgccgcggcggcgggcgccctgttggggctgctgtccggcctggcgattaacgcgctggcgtcggaatgcgccgtcgccgcgttaacgtcaacgtttcccctgattcacgagctgtatctggcattttggctggttctttga

SEQ ID NO: 453260 - DNA, 501 bp, Serratia marcescens
gtgacggcggataacggccagaccagcctcggcctgctgtaccgcttcggcgcgccggagcaggcggcagcgccgatcgttccaccgcgcgagcctgaactggaggtgaaaaccatcacgttgaaggccgacacgctgtttgcctttaaccgcgccgatctgacgccggacggcctgcaggaagtgcagatcgtcgccgaggggctgcgcgcccagcggctggataatctgcgcgtcgatgtctacggctataccgaccggctggggacggcggattacaacctggatctgtcgcagcgccgcgcccgcacggtggcggaagcgctgagcgatagcggtatttctccggccaatattaatgcgcgtggtatgggcatcagcgacgccatgaccggcagccagtgcgacggtgttcatcagcgtgacgcattgattgactgcctgtcgccggagcgccgggtagatattaacgtccgcggcgagagcgcctacgttttctaa

SEQ ID NO: 453261 - DNA, 516 bp, Serratia marcescens
atgaagaaaacgacggcagcactcagtttggtattggccgcttttaccgccggcgcgcaggcggccgtacagcctgaaagctggtacgccggcatcaaggccggctggtctgattattacaacgcttccattccgcagggcttcagcccggatgccgtcggcggtagccgctacggcatcaagggcagcaacgcggtgggcggcgtgtttctcggctaccaggccaacgactggctggcgctggaaggcggctatgactatctcggcaatatggatatcaccagcagcaacggcagcggcgggcgtctgaaggcgcaggggatacagctgggcgtcaaactgggcgcaccgctgacggcgcgctgggatgtgtatgcgcgcggcggcgcgatgggctggcgcagcgctgtgcagcgggccggcggctccacggtggataccggcctcagcccgatggcggcgttgggcaccgagctggcgctgagtgacaatctggcgctgcggctggagtattag

SEQ ID NO: 453262 - DNA, 2583 bp, Serratia marcescens
atgaccatcaatgtatgttcagctttacctcgcgtcagcggaccggaagggcgtccgacgccgttggcggtgctgattgccgttgccctgagcgtgccgacgcaggcgcaggcgcgcgatgaatttaacgtgcgcgcgttggaaataggtaacccgatgagcgtgccggcggatttatcgcagttttcccaagcgggaggacaggcgcccggcgactaccgtgttgatatctatattaacggcgagccgcaggatacccagaatatcaagtttgtcgccggcaagagcggcaggctgcagccggaactgacgccggcacagctggctgactggggcgtgaatctggcgtcgctgcctgcgtttcagggagtcgcgccagatacgtcgattgacgatctggaaaaatatatcccgcagtccaccacccattttgatttttcccgccagcggctggagatcaccgtgccgcaggcgtcgatgaacctgacggcgcagggcgcggtcgacccgaaatattgggacagcggggtgccggcgctgctgctgggatacagcttcaccggcggcaatagctggagcgacgcggcgcaaggccgtaacgacaactatttcctgaacctgcgttccggcattaacctgggagcatggcgtctgcgcaactacagcacctggaactacagcagcggcggcaacaaccgggacggcgcgcagagccagtgggattccatcaacacctatttgcagcgcgacgtgccggccatcaagggccagctgacgctgggggacagctatacgccgtccgacgtgttcgatagcctgcagttccgcggcgcgcagctggcctcggacgacaacatgctgccggacagcctgcgcggcttcgcgccgacggtgcgcggcatcgccaactccaacgccaagatcaccatccgccagaacggcacggtgatctatcagacctatgtgccgccgggggcgtttaccattaacgatctgtaccccacctcggcgagcggcgatctgcaggtcaccatcaccgaggccgacggcagcgagcgcagctttattcagccgttcgccaacgtgccggtgatgcagcgtgaagggcgggcgaagtatgcgtttaccgccggtaaataccgcgcgccgaatcactacaacgaggagccgatcctcggccaggcgacgctgatttatggtctgccgcacgatgtgaccgcctacggcggcttccagacttcggatgattataacgcgttggcgttcggcctgggctttggcctgggggaactggggtccatctcgctggacgccacccaggcatataccacgctcagcgacggcagtaataaaaaagggcagtcgtaccgcttccagtactccaaatcgatcgccgccaccgattctaccgtgacgctggccggctatcgctactccaccaaaggcttctacacctttagcgaggcgatggactaccaggcgtttgacaacagcaactacttcaatatgcgcaacaacaagcgcagcaagctgcagctgaatctgacccagaacctgatgggcggcgagtggggcgcgttgtcgttctccggctatcagcaggattactggaacgctgagggctacgagcgcaacctgagcgtgggctataacaacggctggaacggcatcaactactcgctgctgtatacctacagcgcctaccccggccggcagagtgacaacaaccagcaactggcgctgaacgtcagcattccgctcagccgctggttgccgaacgcctatgccaacaccagcgccacggtggataaaagcggccgggcgcgctatcaggccggcttcagcggcagcgcgctggcggacaacaacctcaattacagcgtgatggagagctacggcacccacggcgaaggcaacagcggatcgctgagcggcaactaccgcggcccttacgcgcaggtcaacggcggctataactacagccgcggctatcagcaactgagctacggcttgcagggggcggtggtggcgcacccgtacggcgtaacgctgtcgcagccgctgtccggcgatatggcggcgctcgctctggtgcgcgcaccgggggcgggagacgccaaggtgcaaaaccagaccggcgtctataccgactggcgcggctatgcggtggtgccgtatctgagcccttacaaacgcagccgtgttgcgctggatcctgcttcgctcggtgacgatgtggatatcgacaccaacgtacagagcgtggtaccaaccgccggcgcgctggtgctggccaacttcagcacccgggtggggcagcgcgtcttgatgacgctgacgcaaaacggccgcccgctgccgttcggcgctacggtgtccgtggatggcgatgacgctaacactggcattgtcggtaacgatggtcaggtttatttaagcgggatagccaatcagggcagtctgacggcgaagtggggtaacggcgcggataaaacatgccgagccagcttcacactggataatgatgcgaaaaataaaagcgcatcggagagcgtattaacggttaacgcccggtgtttataa

SEQ ID NO: 453263 - DNA, 708 bp, Serratia marcescens
atgaaaacaaccttggttaaagggatggctctgacgctgtgcgcgcttggcttctggctgaacggcgctcaggccggagtgatcgtcgggggcacccgtgtggtgtacgacgacggtaaacgtgaggcatcgctgtcgatccgaaatccggataaaacgccgtatctgattcagtcctgggccgataacgacgggccggacggcaaacagcaagcgggcgccaagccaccgtttgtggtcaccccgccgctgtttcgccttgaaccgcgcggagagaacctgctgcgtattatccgcaccgggggcgcactgccggaagaccgcgagtcggtgttctggctgaacgtcaagtcgatcccatcagcgccgcagagcgaacgcaacgtgctgcagatcgctgttaaaacgcgcatcaaattgttttaccggcctcaggggctgccgcgcatgtcggaggacagttaccagcaggtgagcttccagcgccagggcaaccagctgcaggtcagcaacccttctccttattttctaagtttcttctcgctgaaggtcaatgggcaaaccgtggacaccaccaacgtgatggtgccgccgaagggcagcgcgagctaccgtctgccggcgaacgcggcgggcagccaggtgagctggcagctgattaacgattacggcggcatcagcaaagtgtttgcttccccactgaaatag

SEQ ID NO: 453264 - DNA, 540 bp, Serratia marcescens
atgaaaaaacatttagttgcaatgctgatcaccaccgctaccggcctgggcatgatgtctggcgccaacgctgtagacggcaccatccacttcaccggcgcgatcaccgccgatgcctgtacggttgacgccgattctcaggatatgaccgttaacctgggcaccgtggccagcaccgcgttcagcgcagccggcgacaaggcctcaccaacgcgctttaccatcaatctgagttcttgcccaacctccttgaccagcgcatcggtgaaattcgacggcgttgcggacagcgccaacactgacctgctgcagctggatgcttccgccgatcctactgatgatgccagcggtgtcggcattgagatttcggataatgccaacacggtcattccactgttcaccgcctccaaagagtacccgattgatgcgacaactcaatcggccagcatggattttgtagcgcgttatgtggcgaccgccgcgaccgttaacgcgggtgtggctaatgcgacctctcagttcaccgtgaactaccagtga

SEQ ID NO: 453265 - DNA, 621 bp, Serratia marcescens
atggccagtgcgatcattgtcgacgatcatccgcttgcacggatggcgatcaagtttgtgattgaaaatgaaggacatacactgttagccgaaacaggggacggcacggaaacgctcacgctggtcgacaaatattatccggatattcttatcctcgacatcgacatcaacggaatgaacggtatagaggtgatcaaaaaactacgcgccgccagctaccctgggattattattattgtttccgccaagaaccccgagttttacgcccagcgtggaatagaagccggcgccaacggctttatcagtaaaaagaacgatctcaataatatcgtcgcggcaattaatgccgccatgagcggctacggctacttcccgatgaataaaaacgtctcggcacttaacgcctatcaggaagataaagataaactgcttacgctgtcccagcaggagtttcaggttttccgctatttgatcagaggtatggaaaacgtccgcatcgctggaaaaatgaatatcagcaataaaaccgtcagcacctacaaaaccaggctgatggaaaaaatcggctgtaaaacccagctggaactgtttgaattcgcccgccgcaataacctggaatag

SEQ ID NO: 453266 - DNA, 3621 bp, Serratia marcescens
atgtacatccgaggtctggtgatactgctgttgtgcatcatcttcctgccaacatgccgcgcggccgactctgccagtcagccagcattaaatctgttcagccgcgaaagcggtccaaaactggaagtggcgttacctaatagcgcctggcgctggctggggaaaaaacgcgtattgcgcatcgccatcgcgcaacccacgatgccgccgttcgatatgctgagcgccccggacacctgcgaaggcatcaccgctgattatctcagccttatcacccgtaatctggggctaatcccccaggtcacgctctatcgcagccgtgatgccgcgctggccgccatcgccgagggcaaggcagatctgttggcggataacgacggcgctctgcctcctgaagggttggagctaaccgccagtcgcagctatatcgccaacacgccggcgctggtcgggctggaatcccgggctaaccgccccatttctacgacccaagcgctgcggttggccgttgccgaaggctaccttgccgatagcgtgattaaagcgcactatccccaggcggttattcagcgctttccctccaaccaaagcgcaatctcctcggtggttgccggcaaaaccgattattttatcggcaactttctcaccgccaacttcctgattgagcgtaactacatcaacacgttgagcgtggtcgctctgctgccgaatcaacctatcggcagccgttttatcgtacgcaagagagaccgcacgctgctgctggcgctcaacgccgcactgcacgatgtctcgtctctgcggcgcaatgccattattcagcagtggttgaactcccccgatctgacgacgctgcgtaaaccattgaagctcaccgcccaggaacagcgttggctgcaacagcacccgcagctgcgggtggtgatcaaccccttttacggaccattcaccacgctggacgaacaccacaatttctccggcatcagcgccgatctgctgcgattgatccatctgcgtaccgggatgaacttcaaaccggttatcgccgacagcgttggcgaaatggtcgaattgctggatgccgatcgggcggactttctggccgccatcagctacagcgttgagcgcgagcagcagctgatttttacccgcccctacctgcaaacgccgtttgtgctggtggtgcgcaatggccccggcgcgccaaaggatttaaacaattcgctgacgctggcggtggttgacggcaacagcatgcaggcggcgctggcgcgccgctatccgggcatccgctgggtcaaggtcgccaacgccagtctggcgatgcaacaggtgagcgaaggcagcgtcgacggcgccattcataatcagctgggggtcaactacatgatggaaagctacttccgcggccagctcaaaatcgcccttcgcctggatgaatcccccgcatggctgggattcgctacgcgccgcaacgccccggagctaagcagtatcctgaataaagcgctggccgatattccacccagcgatatcagccatatcatctacaagtggcaggcggcgccgaaggtgcacttagaaacctggcgcctctacagcgcccgcttttacggcatcgctattctcgccttgctgctggtggtggtggcgctctgctgggtgctctatctgcgacgacaggcgcgcgtgcgtcagcaaacgcaaaccaacctgctcgcccagctaaaattccgcgataccctgctaaacggcgcgccaagacccatttacgtgatcaaccggcaaggggaaattatcagcagcaataaggcgttcagcgcgttctttgcccgcgttcccccagagcatctgcaattgccgctgttcgaccagcgccatccgctggcaaacgtactgccgacgctgatgccgctgatggatgacgcccctcctcccatgccagaggcattgacacgcacactgcagctgtacgacggcgttcagcagcggacggtgtcccactggtgcacggtgtataccgataaccacgacgccgtcgcaggactgatctgcggctggcaggatattaccgagcatgaaaatctgttgctggagctccaggcggaaaaagagaacgcggacaaagccagtcgggcgaaaagcgcctttttggccaccatgagccatgagatccgcacgccgatcagcgccattattgggctgctggaactggtgcgccacgatcgcaaaaaacgcattacccatgacgacgacgatgaggctattcgtctggcctatacctcggcgcaatcgctgctgggcctgatcggcgatattctggatatggcgaaaattgagtcgggcaatctggatctgctgcccgactgggtcgaccccgatacgctattggttgaaaccgtgcagatattccaggcgttggcggccaacaaacagttaacgctgcaataccactccctgctgcccgccgatcaggagatttgggtcgatcagcagcgtctgcggcaggtactgtccaactatctgagcaacgccattaaatttaccgagcggggagaggtgaacgtctatgccgaagccgtgccggccggcgacagcgagcgacaaataacgctgatactgcgggtgcaggacagcggcatcggcatcagcagccatgagcggcagcgactgttccagcctttcagccagttggaggcgggaaaaatgcagaccggcaccggtctggggctggcgatcagcaaagagctgctggcgaaaatgcacggcacgatgacgctggacagccagccgggccaggggacaacggtgacggtgcggctgacggtgccggcgcgcagcagggtgcccgacacatcagcgcataacaccacggccagcgcgcaagcccggctgaagatcctgattgtcgacgatcacgccaccaaccgcttactgctgcgacgccagctgaataccttagggcatgcggttgatgaggcgacggacggtgaaaaagccttcgcgctctggcagtcaggtcattacgatctggtgattaccgactgcaatatgccggttatggatggttttaccctgaccaaacgtatccgggccaccaacagcgcggtggccatctgggggctgaccgccaatgcacagccgcaggagcgcgtacgctgccaggaggccggtatggatgactgcctgttcaaacccctgcgtctgccgcagctggaagaaatgctggcaaccctcgccagtcgttccccggccgccgcgccgctggaaacgctgattgacctgccggcgctgcaaaatttggcgatgaataatacggcctttttacaacagatgctgctgcgcgcccaggaggacaaccggcaggatctggcgcaggcggtggagctatgccagcggcaagactgggcggcgctggcgatttgcgctcaccgcctgaccgggtcggcccagattatcgctgcggaggcattgatcccgctttacgaacggttggaagccgcctgtcgacatgccccggatgccgacgatatccaacggcagttgcttaccctcagcgaaaaaaacgcccgacttgaacaggcgataacggcatttattggccgcctgccgcaggaataa

SEQ ID NO: 453267 - DNA, 822 bp, Serratia marcescens
atgacaacgccactgacagactcagcccgacaacaaatcaacgccgtcgtcgacctccttacccgccggctcggcggcaacctgatggcaatccatctgtacggctccgccgtggagagcggactgcgtccctacagcgatctcgatctgctggtgacgctgcgcgcgccgctggataacgcgcagcgggcgagcctgatgccggcgctgctggcgctgtccgcgccgcccggtgcagcggacggccgacgggcgctggaagtcaccatgctggtgtatgcgcagctggtgccgtggcgctacccgccggtcagagagctgcagttcggtgaatggcagcgcgaggatattgaggcggggatctatgagccggcgcagcgggacgcggatatcgccattctgctgaccaaggcgcgtcacgccagcgtggcgctggtcggcgatgaggcggcacggctgtatcctgcggtgccgccgcgcgacctgcggcaaaccttgcaggatacgctggcgctgtggcaggaaagcgcggacctgctgggggatgaacgcaatattatcctgacgctggcgcgcatctggtacagcgtggtccatgaggcgattaccggcaaggaagaagcggcggcctggctgctgccgcaactgcccgccgggcatgccgccacgctgcaggcggcgcgacaggagtatctgggactggcgacgcaggactgggcggcggccatgccggcggtcgaagattttgtccgctacgccaaggcgcaaattagcgcgcggctcgacagacaagcggacggttcagcatcaccgccctactga

SEQ ID NO: 453268 - DNA, 1353 bp, Serratia marcescens
atgtcttccgtttccgccgcctcggtgaaaaagatggggctggtttctcttacgctggttaccgcctcaaatatgatgggatccggcgtatttatgttgccgaccaatctggccggcatcggatcgatttcgctgtatggctgggtgattacgattatcggcgtggtcgccctggcgctggtgtttgccaaaaacagcctggtgacgccgcgcaacggcggcattatcgcctatgccaacgacgccttcgggccgtttatcggttttcagaccaccatttgctactggatcagcgcctgggtcggcaatgtggcgctgctggtcgccggcgtcggctatctgagctactttttcccgctgctgcacaatccgctggcaagctccattaccgccatcgtgattttatgggggtttatcgccctggcatcgctgggggcgaacgtggccgggcgctcccagtcgttcaccgccggctgtatgctggtggtggtgctgggcatcggctttatcggctggttctggtttaagccggcgctgttcagcgaggtgtacaacagcaccggcggcagcgacgtctccgccatcttctcggccgcctcgctggcgctgtgggggtttttaggggtggagtccgccgtcgtttccaccggacaggtggagaagcccgagtcgacggtgccgaaggccacggtgctgggcctgctgattgccgcggtgtgctatgtcagcagctgtacggtaattatggggctggtgccacatcaggcgctggtgggttccgccgcgccgtttgccgacgccgcgcgctatatgttcggcgccatggcgggggagattgtctccgcgctcagcattattgcctgtttcggctctatttccggctggctgattttacagtcggaggcgccgagggccggcgcgtccgaggggctgttcccgcgcttcttcgccgaggtgaataaaaacgacgtgccggtgaaagggctgatttttaccggcgtgctgatgacggcggttttattaaccaccgcatcgccgaatttggcgaagcagtttcaggtgattgttttgatgtcggtgttcgcgtcgctgctgccgtatatttatgcgctggtggcgctgccgattattatggtggccaaacggctgaataaaggcggcggatttatcttttatctgttgatgtcggcgatcggcattttatacagcctgtttgcgctgtttggctcgggggccaatgcgatgttctggggcgtattgatgatgatgctcaccataccgctgtatgcctttgtcgccgccgcccgcgccaaacggggcgccaaaacgctctatctcgacgatccgcagtaa

SEQ ID NO: 453269 - DNA, 2316 bp, Serratia marcescens
atgaacgatgttaataatcaacagtttcccatactgctggtgtcgctgcatgaagatgcgtcagctgacgatcgtgcgttggagctggtgaagcaggcgctctcttcacacaaccattatgtcttacagacggcagcaacgaacaacctgctggacgttatcaaacatgaaatcggcatcggttgcgtgattattcacgagtgcgaaagcgtcgctgaagcggaacgcaaccgtatgatcagcaaaattattcagggcatacgcacctacaacagccgcattcccattttttttgccgcgtcacggccaattctgggccggttgccgacggaggtgatcaaagagattcacgaatacatcaatatttatgaagacaccgccaggtttatcgccggacgtattcatctggcgattgagcactatcggcgcggcctgctgcctccttatttttccgcgctgaagggctacgccagcgacagcccctactattgggattgtcccggccatcagggcggcgtagcgtatctgaagcatcccatcggccgcgaatttatcaatttcttcggtgaaaatattatgcgcgccgatatcggcatcgcgacgccggaaatgggcgactggctggagcacaaggggccgccgggcgagtctgagcgccgggccgccgagatttttggcgccgaccgcacgttttacgtgaccggcggctcttcgcagtcgaaccagatcgtcggccattcgctgccgctgcacggcaaaattgcgctggtggatcgcaactgccataagtcggtcaaccatgagctgacggtatgtggcgcgcatccggtttatttccagcccgagcgcaacggctacggcattatcggcctgatctcggccgaccagttcagcgcagagtctatccgcaacaaaatcaacggcagcgcgctggcgctgcgcgccagcagcccggacgccgagtacgcggtgatcaccaactgcacctacgacggcctgatctatgacgttgcggcattgacggaaaagctgggcgcatcgacgccgcgcatcaagtttgatgaggcctggtacgcctacgcccgtttccacccgctctaccgggggcgcttcgccatggatgtgccggcctcgccccggcagccgacgctctatgcggtgcagtccacccataaaatgctggccgccttttcctcggcgtcgatgatccatatccgtaattcgccgcgggcgccggttgattatgacgtctttaaccagtctttcaccatgcacggcaccacgtcgccgttctatccgatcatcgcctcgatggacgtggcgacggcgatgatgcagggccgtgaagggcggacgctgcttaacggcgcgattaatgacgcgattgagttcaggaaaaccctggtgacggtcggtaataaaatcaaacaggatattcccggcgactggttctttgacgtctggcagccggagcgggcagaggtggacggcgacagcgtgccgtttatcgacgtccctaccgagcagctggcgaacaacgccgactactggacgctgaaggccggcgaagcgtggcacggctttggcgagatgccggaaggttacgccatgctggatccgatcaaggtgacgatcacctgtccggggctgaacgcgcagggcgacatgagcgaattcggcattcccgcgccggtggtggctaaatatctggatatgcagcgcatcattccggccagaaacggcgattacacgctgctgattttattcgctttgggatcgacccaggggaaatggaatacgctgatcgacttgctgatgatgttcaaacgctaccatgacgacaatacgttgctgcgcgacatattgccggaggtttgccgcagtgatgaacgttatacaaccctggggctggccgacctgtgccgggaaattcatcaggccaatggcgaactgaatattgcccgcctgtctgaccgggcctgcgcgctggcggcgacgccggtgatgacgccgtcgcaggcctaccgtcatctggtggaggacggcaccgagctggtcgccgccggggacattatggggcgggtggttggcgtgatggtcaccccttatccgccgggcatcccgatgattatgcccggagaaaaagtgacgccggaggccggcgccatcgtcgagtatttagtggcgctgcagaccttcggccagcgtttccccggctttgaacacgaactgcagggcgtggagatcgacgataacggcaggtattgggtgcgctgtattaaggagagcgcgctgaatccttcgctgtacgcctag

SEQ ID NO: 453270 - DNA, 261 bp, Serratia marcescens
atgagcggccagaggccgagcgatctgttttccgccaaagaatggaacatcattttcctattgctgcagggcttttctgaaaaagaaatggctcagtgtcttaatagaacattacgcaccattaagtttcataagacgaatatattacaaaaaacccactgcgcgcatacgcgggattttgtgctgctggcccgtcgccacggctggcaatactttattccgccggtttttttacagcctggctattttatccggccctga

SEQ ID NO: 453271 - DNA, 399 bp, Serratia marcescens
atgacacaggttgcattaggggcattaaaagcaaaggcggagcggctctccttgccgattcctgttgaaatgttggcgtcctgggaaaatagccaagaggcgtggtgtgtaaaagatattcacggggtcgtggtttatcttaatgataaatatcaagagtttatctctttgttgcaggggtgcccggcggtgtatccgcaaggcgtcaatcagcatgatgagcgggtgttgcgcgaggtgaggacagtgattgccgttggcgtctgttttgaccacggattgaatcgctgttttcctttttattgtgagcgcagcccctattttaaccgactggcggaggtggccggtattatcagtcacgtccggccggttatttctctttctccctcttttttttaa

SEQ ID NO: 453272 - DNA, 618 bp, Serratia marcescens
atgaatatactgcacattgactgcagcccgcggcgcgattcgcacagccgccggctttccgccgccctgctggcgcggctgcgggccgccaaccctgacgctagcatcacgcgccgcgatctgggcctggcgccgatagcccatgccggcgacgattacgcgaacgcgttggccgctcccggttcgccggcggcggacggcgcactgcacctatcggaaaccctgattcaggagctggagcaggcggatgcgctggtgctgggcacgccgatgaacaatttcaccgtgccgtcggtgctgaaggcgtggctcgatcaggtgctgcgcatggggcgcaccatcgccagcgcccccgacggtgagaagatcggcctgttgcaggacaagccggtgtatatcgccatcgccgccggcggggtattcagcggcgaacgcgccagacagccggattttctcaccccctatctcaccgccgccttcggctgcatcggcctgcattcgctgcagttttttccgctgcaggcgacggcgtttctcgaccgcgagcagctggcggccgcgcaagagcagctgctcaccactctgaatcttacggctgcagatccatcacgggcttaa

SEQ ID NO: 453273 - DNA, 948 bp, Serratia marcescens
atgataaacagcgcgctgtggtaccgggaatttggcgcgccggaagcggtgctccggctggaaaacgcgccgccggccgcgctgacggcggggaacgtgcgggtcgccatgcggctcgcgccggtgaacgcctccgatttgattccgctgagcggcgcctaccgccatcgcgtcgtgccgccggccgtcgccggctatgagggcgtcggcgtggtgacggagacgacgccgggggcggagcatctgctcggcaggcgggtgctgccgctgcggggcgagggcacctggcagcgcgtggtcagctgcccggcggcgctggcggtgccggtgccggacgcgataacggacctgcaggcgtcccgcgcctatatcaatccgctggcggcgctgctgatgctggatttgtataacccggcggggcggcgggtgctgctgaccgccgccggttccgactgcggcaggttgctcggccagtgggcgctgcagcgcggcgcggcggaggtggcgggcatctgccgctccccggcgcatgccgacacgctggcggcctgcggcattaccccggtggcgcagagcgagcggatgcgcattgaccagctggccgccgcggcggatatcgtgtttgacgccaccggcggcgcgctggcgcagcagctgctggaggcgatgcggccggacgggctgtttgtctgttacggcctgctttccgggcagccgtttacgctgcagcggcgctatccaacggtgcgctggttccatatccgcaactgcctggccgacatcggcacggcgcagtggcaggccctgttcgggcggatatggccgctgctggcgcaaagccgctgcggcggggcgcgcatttatccgctggaggagtggcgggcggcgctggcgctgtaccgccagccggggcggcaggttaagcccgtgatggatctgcagccgtaa

SEQ ID NO: 453274 - DNA, 345 bp, Serratia marcescens
atgaatttcgccagctacgcgcaatacaccgagcaggacacaagagaatacgcgttttataccccggaactgctcaagaaaatgccgcgtatatcagaccactatcaatttgactataccaacgtatccgggccgcaggccctgatatatacggtgacgttttacgacgccgatgacacccggcaaatcagcgattatctgaccgccgccggttaccaacggcagcctgagtgtcttgttgccggtgagtgctggatgtctgccaacacccactatcgggttagcgtagtaaagcccgagggcttcagagaggtttcggtacagctcgaagacagttcgcaatag

SEQ ID NO: 453275 - DNA, 1380 bp, Serratia marcescens
atgtcgagacttgtggtgatttcaaacaggaccgttaatcctcatgagtcccgctctggaggattggctgtcgcactctggagcgctttgaaaaaatcaggaggaatgtggatcggttgggacggtaatgtatgtcgcaatgataatcctgaattaaaaaaatgtcaggctgatggcgtagagttttacaccactgaatttacagagtttgagtatgataatagctatatcggctatgctaactcagtattatggcccgtatttcataaccgtatagatcttgccaagtatgatccggaatataaatcctgttatgagaaaaccattaaacgcatggcttcattttgctcaaaagagataatgcaggatgacgttatctgggttcatgactatcaaatgatccctttcgggatggagttaagggcgcagaggatgcaaaacagtataggctttttccttcatattccttttccaccggaagaattaatgagaagcatccccgaacaccgttggcttattacttccctatttagttatgaccttattggcttccaaacggaaaatgatatgagaaaatttcataactatattattaattatactgatgtcgatgtttttggcgataaatgttatttatataaaggcaggaaatttagggtcggtgtgttcccgattggtatcgatccggaagaaatcagaaacacgctggatacggaacgcagtcgggagttggaaaagaaatttattcgcgagaatcccagggagatgatcgttggtgtcgaccgtctggattattctaagggcatacttcatcgtatccattccatcagcaagttttttagtatgtacccagagaaaaagagggctgtttcactgttacaaatagctgcccccagtcgggaaaaagtagtagcttatgaggaactgagtgaatgtatggattgtctctgtgggaaaattaatggcgagctgggggatttgcactggtcacccgttagttatattcatcgtaatatagcaagagaggatttacctgtaatataccgagtcagcaaagttggattggtcactcctttatgtgatggtatgaatttggttgccaaagagtatattgcttctcaggatccaggaaatcctggcgtgcttattctttccgaatttgcgggcgcggctcagcagttcacggatgcattactggtcaatccttttgatatcaatgcgaccgctcatatgattgcacgcgcattgactatgccactgcaagaacggcagcttcgttaccagtcgctgatgcgatgtgtcgtccataacgatgtccattggtggtgcgatgcgtttctatcatccctgaaagaacgtgaagtgcggctggcaggttaa

SEQ ID NO: 453276 - DNA, 633 bp, Serratia marcescens
ttgaaaattaccggtcaacaacgcagcttaaaacggtcgtggatttccgctaatcgtaactggcgcagttatatgcctgcgccagtcatttatggatttaacattgagatattaactatgagtctgcctgaaagctcagatgtatgtgttgaaacattattaaagaatgccatgagaaatacatgcagttccgtttatatcgtttcagcggggacgtctagaagaaataaaaatgcgataactattacgtcatttacttccgtttctatatctccgccaattattttgttttgcgtgaataagaaatcaaggttttctgagttaataatgaatcacgataggttttccattaacttcatccataatgaacagatcggtattgctcagctttgtagtggttcagatacagcgattaaatttaaatctggcaattggaaatataaggaaggggttccctatttgtcagatgctaacaacgttcttttttgttcaaaaatttccctggaagaacaagggactcatcttttggtctgtgggaaagtagacgacatatttgccggaactaataaaaaaccgcttgtttatcataaccaggcatatactgaaattgttaattcaatgccaatattataa

SEQ ID NO: 453277 - DNA, 1062 bp, Serratia marcescens
atgaaaaaaatgaaggctattcatttgatatcacccaaaaaaactgagctggtcgatatccctgtaccgaaaacgccaaaggatggattgttactgaagacgaaatgcgtatccatttgctccaccgatatttcatactttgagggttacctccgcccatctgaataccctattattatggggcacgagtttctgggggaagtggttgagattggtgatgactataaagatgacaatatcaaaattggtgatagaattgtttattgggggcaaaccgattttagtgggtttgccgagtatcgtacgcttcgcccgatattctcaggtcagattaaaaaagacgaattctggacagatcgttacttctgggatgattatcatgcctccgcggttaaaattccggacgatatggacgacctggtcgccccattgatcgagccaacaacggctgcgatgcgcgccatactcactcatccgccaaaacctggagataaagtgcttatccttgggacgggtcctattggcattattgccggccagattattaaaaaagtttttgcaccacatagtattgtttcaatggacaataatcctatgcgcaatgaacatgctgagaaatttttctctgaaaaggcatatttacctgaagagctggctgcggcactggagaatagtagcgttgactatgtttttgatggcctccctacgatcaagaatgttgatgaagagcgcgatccccgccgtattgcgatgagaaagattgttccacggggccggtacatcttatacggcgcttcccaggaaatgcagaagtttgataattggctgatgctttcaaaagggattaacatcagttctgcgccatttgatgtgcaaagcttccccatgcataaaactgcaaatgtcattcagtctgcttttcagatgatttactcaggcattgttgatgcgaaaggcttaatttctacggtatgcccatttaatgattatcaacgcctcgtgagtatctttgaaaattaccggtcaacaacgcagcttaaaacggtcgtggatttccgctaa

SEQ ID NO: 453278 - DNA, 1176 bp, Serratia marcescens
gtgagttttatacagcgcccgttaaaacctgaatatcaggatcatcgtattgatattgaggccctgcaacaaatcattaatgagtaccgttataaaggtgataaagaccgacgtacgccggcggtagtcatggaagccttgatggaagctggcattcaccgaatttgggtttctagagcttttgggggtctgcagctcagcctaagcaccggtatggcgcttatcgaagccattgcacgtcaggatgcatccgctgcctggcaaatgggggttcagggggcgctgagtcggctttcagattatttgcctgaatcatctgcgagacatcttttccagaaccattcgaaacttattgtcggcgtggttgctcccagcggtaaggctgagcgggtcgacggtggttttatcgtgaatggttcgtggtcctttgccagcggttccgcatatgccgattggctggcatgcgccgccgttgtgacagagaaggggcaggcggtgatgactgaaacaggcccgctgacccgaatgctgtttgtacccaaaaaggattatcgattacttgatgattggtacacgacgggactgaggggaacggccagcaacgccttcgaaataaaagatgtatttgtacctgaggaattcactatcgctggctcggctctcctgtctccgccgccggcacggccatcgcgcgcttttggcattggttactacgactttgggccgtttacatccgtgccaacgacattggggattgcgcaagatgcgctggactcttttaaagaaatggctatcgcgaaagttcccctgggagggaaaacgccgttgaagcgcagccataccgtccatgaaaaaattggctatgcctggtcgctcctgctctcctctaggctattgattgaaaatgccgcttcgcaggctagccagaatggggattctggggaagctctcagcgcgctgatccgcttatcggcatcgacaatcgcctgtaacgcaaagaaggttgtagacattgtacacacgctctcgggggcgacttccgtatatgaaggcaaccggattgaaaaatgttttcgtgatattaacactgccgtaaaacatattacgctggcgccggcaagtattgaaatggttggtcagtttattatggaggaggagctgctcgtcagacgatag

SEQ ID NO: 453279 - DNA, 1431 bp, Serratia marcescens
atgacattgcatgaaaatagccatcaacatcggctaggctggagcttggctctgcttgcgttcgctcaattaatcatctctttggacattaacattgtttttgtcgccttaccggaaataggcagcgctcttggcttctctgagcagactttacagtgggtggtcagcgcgtataccgtcttctgcggcggatttctactctttggcggccgggcagcggaccttctgggacagcgccgcatgtttgtcggcgctctctggctctatgccatttcatcattgattggcggccttgcctggcgccctgaaatcatcatcgctgctcgcgcggtccaggggattggcggtgcatttttgttccctgcaacgctttcccttattaatcgcttgttccatgaaggccctgaacgaaatcgtgccctggcggcctggggaggcgcgggcgccagcggactgaccatcggctcgctggcaggaggattactcaccagttacttcggctggtcctctgttttctatgtcaacgtgctgttagccggagtcgctattattgcctcgttcctggtgatacccgccgacccagcacgccaggagaagcgcagctttgacctgccgggcgttcttactgtgacggcggcttcaacattgttcgtcttttcactggttcaggggccagaatatggttggaatacccccgttatacgcaatgcccttatactggccgttgtcagcctcgttctgtttgtgatcattgaatccagaagtaaagatccactgatgccgatgaggcttttccgcaataaaaacctggtggcaggtgtctctatcacatttatttatatgggaacattcggagcacttccttattttgaaacggtacttttccaaaatgtgatgaattacagcgcactggaaaccggcctggcctttattgtgccttccgttgcgatatttattggcactcaggccggcgctcgttttaccaacggcatggggactcgcaatgcgcttattgcagggtgtgttatcggcatcgtcggtacgctgctgatgatggccggagcttccgtctctgcaacgtataaagatattctgccaggactcatcgtttcaggccttgggcaggggatcgtctggacggctatgtggatcgcggcggcaaccggtgtggaacataacgaacaggggatcgcttcagggatggcctctaccaccctgaacgtgggtaacgctatcgggttggcgatattaattgctatttcgtctgcaatggctaaaccagaaacgttacctgacaacgcttccgtgctggctacaggtgcctattacgcgttcctcctggcggcggcgggcatggccattgccctcttaatctcctttagccttcccggcaagaaacatacgactatgccaacaaaagaagttgtataa

SEQ ID NO: 453280 - DNA, 774 bp, Serratia marcescens
atgtcagacaacattacgttacctcaccctgcattaactgatgcgcttacccgctatgcctttcttctcgacatcgacggcacgcttgccgatatcatgccaacccctgaagacgtcaaaataaacgataccgtttttaactttttttcctttctctcacagcatcgcatcccctatgccttggtttccgggcgcgccgtgacggatattgatcggctgttttcatcgaggatcgtcgcttgtgccggggtccatggcgcagaaatccgctatgccaacggcaaatatgaaagactcactatgcgcgcgagtgaagtagcctgcgtatgggagcggcttaagctttcatgctcgcattacccggccctgcggcttgaaaacaaagggatatcattcgctatccatttccgagacgcgccagaactggccggcgaagcaacatggattgccacctctctggcggaactctatccggatacattttcagttcaacacggtaaatgcgtctgtgagctgcggccggtaaaagcgaataaaggctttgctatcgcaagaataatggcctcatcctccttttctggtaaaactcccgtctatattggcgatgatattaccgatgaggccgcattcaaggcagtcaacgaaatggcaggctattcaatcaaagtaggcaatgaagaaactgcggcgcggtacgctctgagagacgtcgagaacgtgcatatgtggttacgcaagttgatgactggagcttgtgaaagtgcaggccgataa

SEQ ID NO: 453281 - DNA, 786 bp, Serratia marcescens
gtgactcgcattgttgatgatattttgcaaacgctgctggacagggatccgccggggcaggagatccaccgtgaggcggatgaatacggcgatattatcgtcactgaacataagcagtatcgcatgctgcgctttgacgagctgtatgagcagagcaaggtgagcatgcgcgcgcccgcctcgccgatacatcactatatcaaagcgatgctgatggcgattgcctggcgggaagagggcgatgtgctgctgctggggctgggcggcggcagcctgctgcgggcgctgcacgcttacgatcccgagcggcggcttgatgtggtggaactgcgctcccgcgtgctggcggtggcccgcagttatttcacgctgccggaggccggctgcgtgaactatcacatcgacgacgccggccgctatctgcggcgggtgccgatgcgccgctacgggtttattttttccgatctctattcggcgttcagcatgtcgccgcagcagggcaccgaggcgtttctggaacgctgccgcgacgcgctatgcgacggcggctggctggtgctcaactatctggaaatgccgcacagccagacgctgctgtaccatgccctgtaccgggtgtttaccgacgtctttttctgcgaaaccggcagcggcaacgtggtgatctacgccagttacgcaacgaatgcctaccggctgcaggcgctgcagacgcaggcgctgcggctgagccgcgacggcgtggcggaggtgggccatctggcgcgctatctgacgcggctgtag

SEQ ID NO: 453282 - DNA, 444 bp, Serratia marcescens
atgacggaaccgatccgctcgacggcgattgcccgggttttaccgcatcgttacccctttcaactgatcgatctggtgctgtcggacccgcatgaaatggcgcagggacgggtgagagcgctgaaaaatatcagcgccaacgataccttactgcaaggcggcgcgctgaccgcgggccgttttccttccgtattgctgctggaggcgctggcgcaggcggcggggatgctggttcatcatcgcctgacgctgctggaagcggggcagccctgctatttcgccgcgatccggcgcgcgcacttttacgcggcggcccgggcgggcgatcgcctgcatttggatgttcgtctgctgcgccagcgccgcaatatggtgcgcttttccggcgtggcgacggtggcggggaaacgtctctgcgtggctgaatttacctgcgccagctga

SEQ ID NO: 453283 - DNA, 987 bp, Serratia marcescens
atgtctgtcgacatctcttccctctaccgcccgggcacgggatggccgggcgctccggctgcggatgatgcctggacctccgccgacttctcccagcaggccgcttccggcggcacggtgcagttcgccacgccgggttccgggcacagcgtcaatttcggcgcgccactgaccagcgcctcgtcgacgccgaccgacgggcagtccaaccccggcgataccctcagccagctggtcagcacgctgataaaccagctgatggcggagctgtcgcggatgatgcagggccagagcggcagcgagcaggaaacgacgcagcacaataccaacgcctccgcaacctcgccctcatccggcaacgacgctgcggcgctgaataacgaccacgccgccacgccggtgacgcagtcatcgtccaccaacggagccggcggcccgtcggccggcagcgggccgcgcgccttcaatatcaccaatacgcaggatcacgacatcaatatcggccagtttgatcagcacaatcagctggttggcgagatcaccctgaaacccggggaaagcggccagatgcgttatcagaacgactttaccggcctgctgaaacaggccgacgccgacggcaactaccgggacgacgccagccgcctggagttctataacggcttcgtcaataccagcgatatcgacggccgcaacgccgccattcacgccaccgaccatcaggggtttgaaatcggcgatcggcagagcattgccgaccgcgcaccggcagatattgtcagcaccgattccgccggcaataaaaccattgccggttactacgacggctccagcgacaccatgcgcaagggcggccagtttatgaccgacgcgctcggcaccggtatgacctatatgcacccggacgatgaccggctgccggagggccagaacccgatgcgccataccgacgccatgacgctggacgtcaccttcggcaaggcctga

SEQ ID NO: 453284 - DNA, 912 bp, Serratia marcescens
atgctctctgtatcatccaaccccatcccgcaacccttcgggcagagcggagacttcagcaacctgagcgataatctgtcgcagaaaaccgtgctcaacgcctcagacggcggcgcgccgctgccgatcagctatggcggcgcccaaggcaccgacatggacagcctgctcggcggcggcgatatccagcagcagctgcaaagcgccatttccgccaccctgctgcaaatgctgttcagccagatcgtgccgccgtttatgcagctggcgcagcagctgctgtccaacggccagaacggcggctcgcagacgccgcagcagggcagctcgtcaacgccgggcgttaccccgcagaccgcgccggagcaaaccagccagcaaccggcaaccggcgcgacggaaagcaccacgtccgcctccggcgcttccggcaacctgcatctgcctgagtcgctgaagccgtatcaagacgatatccagaacgccgccgataaaaccggcgtgccggcggaggtgctggcggcgcaaatctggcaggagtcgcgcggcagcctgggcgccagcacggtgaacggcggcaacggcctgcaggacagcgggctgatgcaggtcaacagcaatacctttgccgatctgcagcgcaaaaaccccgatctgctggggccggacgccgacccgaacagccctcgggataacattatggccggcgcgctgtacatgaaggagcagctgaacgcctttgacggcaatatgggcgcggcgctgcgcgcctacaactccggcccgaacaacgtcaacctcaacgatctgagtgatatctccaaaaccggcaccggtgacgccacctacgtcgataaggtgctgaacttcgccaatatcatcaaaaccggtcaaggcgaactgccggcctga

SEQ ID NO: 453285 - DNA, 780 bp, Serratia marcescens
atgacactcaatatatccggttcaggcggtactccgccgctggtggggcagctgattgaaaacgccagtgaaagcatagaaaaacttgaacaggccgtctcgctgccgcagcaaaacggggcggtgaaattcagcaatggcggcaacgcggaactgatgccgcagatgacggcgcgcgagggggcggcgcagcctgcgcagcaggacgggctgatgcagaagctgctgatgctgctcggtctgcagcagctgttgggcggcggccagacgcagccggccgaacaggcgtcacgccagccggaaaacagcgcgccggccgggcagtcgtcgtcatcgggcggcgtgggcggcgtgatccaacaggtgatgcagatgatgcagcagctgatgcagatgatccagcaggtgatgggcggtaaaggcgcgcagggcgctgacggcgtgcagaacggccagaatgggcagccggccacgtcggcccgcagccagccggaggcgtcggcatccggcgggcagtctcagggcggcgtgaatggtctggtccagcagctgatgcagatgatgcagcaactgatgcagatcatgcagcagctggcgggcggcgggcagaagagcgcgacgtcgggcgagggcggcaatgcggaatctaacggcgccgctcagccggcacagcagcagggcggcaacatgctgagtaaactgctggggccgttgctgcagatggtcgggctggacgcgctgatgtcgaaactgggcggcacgcagaacaacggaggctaa

SEQ ID NO: 453286 - DNA, 582 bp, Serratia marcescens
atgagcgacgccgacgtcacgctgcgttggctcgactggtggcacagcggcttctggcgcgacgcgcatcccagctggcggccaacgctgccgttccccgcgccggccgccgcgttggcgcgcgtacacggtgcggcgctgcgccggcggcttggggtgacggatacgccgctgccccggccgcagccgcagttgctgacgctgctcgcccttgacgccgacgcccgcgcgctgctgctgacgctggtcgccgaaatctgcaccggcgagacggcgctgcccggcgatctgaaaatctggtgccggcggctggccaaagggctgcgcccggaaagctggctgccgacgccgcccgccggccagacgccggcgatcgccagtctgacgctgctgcaggcgcactatcccgactgctggccgcgcctgcgcatggcatttgaacatgatgacgtcagccgctgtccgccgtcgccgccggcgctggagccacggcggctgcagccgctgtgggaagcggcgctgtggcagtgtcagcgcgtgctggcggagaacggcgaggagcatcagcatgtggcaacttag

SEQ ID NO: 453287 - DNA, 615 bp, Serratia marcescens
atgtggcaacttagaaaaattcccctgcgtcagccgccggcgccgcaggccgtgctgctcggccgcgacacgctggccgtcagccgtcaggccgagcagctgatcgccgacgccgagcgcgaggcgcagtccctgctcgaccaggcccgggcgcaggccgacgcactgcgccaacaggccgcagcggagcgcgacgcgctgctggcgggcgcgcaggaaaccttctggcagcaggcccagacgctgtttagcgactggcagcaacagcgccgcgccgagcagcagcagttgctcgacgccgccgacgcgctgctggcgcaggcgctcggccgcctgctggaccaggtgccgccggccgggcagctggatatcctgctgacgcagctgcgcgccaaacagccatccgccgtcgccgccacgctgtactgccatagtgaacggcacgccgcggcggcgcactggctgacgcagcggccggagctgcgctggcagccggcggtcgacgacgcgctgccgccggacaccctgctgctgaccaccgaacagggcgaactgcatatcagctggcaggcgctgcgtcaggcgttgggcgcggcggacgccgaggccggctga

SEQ ID NO: 453288 - DNA, 1053 bp, Serratia marcescens
atgagtacgccgctgcggctgcggcggcagagcgccgccgaggcccggacgcgcggccttatcggccacgggctgcgtctgccttttcaactgggcgacagcgccggcgaactgcgtgtcggcctggacgccggcgagccgcgggctgcgggcacggcactgcgctgtgcggccggcccgctgtggctgagcgaggcggaaggcgtctgcgggctgctgtccgactgtccgtcgctgccggcggacaacgatgaggatcgcctttggtactggccgctgttcagccacgggttgagcgcgccgcttcgtgcgctgttcggtgagctgagcgccgccgacggcgagccgcccgccggtgcgctcagcgtgcggctgacggtgacgctgggcgagctacgggcgcagagcgcgctgacggcggcgcccgaggtgttatccgacctgctggcggcgccgggctggcagggtgaaccgcacgatgcgctggcggcgctgccgctgaccctgccgttctgcgtcggcgcgctgagcttatccctcgccgaactggcgcgcctgcggcctgacgatgtgctgctgccgcgcgaaaacactttcaccccgcacggcgcggggacgctgcgcttcgcacatttccgcgcccagggcgaactggtcggtgcggaagggcgaagcactggtttttatcttaccgatctggagacaacatccgtgacatttccctacaacgataacgagacagagagcgacgtacaggacaagagcagcgtggaatggagtgccgattcagagccggccggcgtaacgctcgatcctctaccgctggcgctgaccgtgcgctgtgggcatctgcacctgacggtgggcgatctgcagcggctggcgccgggcgccaccattatggtggagcacgtccagcccggcgaagcgctgctgtgtcacggcgactacccgctggcgaaaggcgagctggtggatgtggaagggcggctggggctgcagattacccatatgctgccgggcggcgtcaatccgctgggacaggggcactga

SEQ ID NO: 453289 - DNA, 696 bp, Serratia marcescens
atgatctccccgacgcagcaggaacaccgcgctgcccgcgagcgcgccaaacagcgggaaccggagccgcagcgcccggcggcgcagcggcgtcaggaagcggcggcgcgtcagccgcatagcgggcacgcgccggccggcgacgaccatcatccgctgcgtaaggaacgcccggcggggaaaagccccgcgcgtacgcctgaacgcggacgcgcggcggccgaacgtccggcgcttgccgggctgcccgccgccaggcgggatgaagagagctccgcggcgacgccggacggcaacctgttcagcatgctgatggatcgcgatgaggcgtccttgcccggcgcgctgcacgttgcgccgcacgccgccgccacgccgcatccggcggcaacgccggcaagcagcggcgccggcgcgccgatggcgctgtggcagccgctggaaaatgagctggaccgggcgctggtcaatccgccggccggcccggtctccgtcacgctgctgctgccgcgcctgggggatgtggacgcccggctgcaggcgctgccggcgggcggctgggacattgcgctgcgctttgcgccggcggcactggacgcgctggcggcgcatgaggagcgctgtcgccactcgctgcgtcgccgtctggcgtgccgggtgcgtctgcgctttgaacagcggggggagtgggcatga

SEQ ID NO: 453290 - DNA, 462 bp, Serratia marcescens
atgcgccggaacagcaacattgatcatgagccgcagccggacgacggcgatcgggcgctcggccaggcgctggcgctgatgctgccgatccgccgtcagcgtctgcagcgcagcgagcgccgccagcggcgggaggagcagcagctcagcgcctgccggcggcagctgcagcagacgcagagccagctggcggcaacgcggcaggattatcagcagcggcgggaacagtttgaccgacgctatctgggccggcagccgctggagcgtctgcagcacgggcttgatggcgaacgcagcgcggcggcggcggtggagacgggtcagcagcagctgctggccagccagcggcgcagcgaagagcagcagcagaaactgcaggcggcgcaggccgagacgcgtcgccgccagcgcgagttggagaagctggagtgtctgctgcgggaacaggaggaggcgccatga

SEQ ID NO: 453291 - DNA, 870 bp, Serratia marcescens
atgaaactgaatggtcatacattaaatgaaatagaagaaaaggcgctggcgattattcatcgtgaggtggatgagcacacgccgaaaataccggtaatgtatcttgaaggcggccattacgatccccgttatccggttaatgagtttgcgcagaaatcattgcgccacgcgttggatattgccaataacgcgatcgcccggcataagaaagacctgaagatatcgctgggcatcttaattgacgatctggggctgcaatgcggcgttgaatcctgcgagatagcgccggagctgccggagaatagcgatggtgcggaggaacacggcgaactgcccaacgcgctggcggcgattttggcgcagtataaaatcgtcaagcgggagcggatggtgatacagggcgaaagggcctgtaagaaccgggggatacagacgctaaaacgcattcttgagcgccataaaaccacgccgtttccggaactggagatagaagagtcggcggcgctgacgaggatatttttcgtgaatgaagaggggcagcgggtactgctcgccgagtcgaaagcgaaagacgtatggacggcaaagtgcccggtgattatggcccagcactacagcgacgtttatgaccgggtggcaaaactgcatccgcagagccacgcgctgcatattatcgacttttcagaaaccgatgattacaacaaagtgatcaacggcgcggacgtggcgatgaaacttttcctgcgtaataaatcggtcggcaaccgggcggtaaaaatcaccaatatcttcctgtcatcatttgatgatgaagactacatcattcactcgacgtctcactgcgccgattttgtggcggtagaagcgtaa

SEQ ID NO: 453292 - DNA, 519 bp, Serratia marcescens
atgcaacgctggctgggaagtttgttactgctgctcgccgcatccgacggctatgccgatgtgttggcgctcagtaggcaggataacggttacctcctgccgctgcgcgggcgggcaacgctcagcggcacggttctggctgcaggatgcgccattaccttggataccccatcccaattgctgtatgtcgacccgcagccattaaataacggtcagcgaacgctcaattatcctttatccattcgtttcgataattgcacgctatcgggacaaagcagtgaatatgcaaaagataaagcgattaaaatcagctttaaaaataaatcagcaccagggaatatttttattattaaaaatgcggaaaacaaaacgctaaccagcggagaagattacccggtctattatcgccaggcagaacgacacagcgcccaaccggcaaccgccacctaccttctggaactgacgccgaaggcgcccccctattacgccgtattagggctgaagatgcgctacgagtag

SEQ ID NO: 453293 - DNA, 540 bp, Serratia marcescens
gtgaaccggtatctgggaatctgtatcgcgctgttatcggctatcggcgctatgggtaacgcgatggcgaacagcagccccatcgagctgaagttcagcggtacgctgctggaaaaacagtgtatccacgattcggcagaggacgcgtatcgcgtcgaactgccgctgctgtcggtgaagtatttccagcactacggccgcggcccgactacccgctttgccctgcgctttaaagactgcagcaccgcaacgctgaacaagcaggtgcagatggtgttccacagtccgcaggtggtgaacgtcgacggcgtgagcatgctgcccaccgaaggcggcaccggcgtggtgctggggctgaataacgccgacggccagccgatcgtgctggaaacgccgttcaaggcgggcgtgattacccagaccggcatcggcagcagcaacgagctgttttttgaagtctatccgctggtcatcgaccgcaacgacgttaaccccggggagtacagcgccacggtgacgtttgaaatgagctatctgtga

SEQ ID NO: 453294 - DNA, 582 bp, Serratia marcescens
atgtcaggaaaaggtcatttccgtagcagacgtccgttagcctggtgcgccctcgggctgcttttctggtgcgccggcggtctggcggacgtgccggtcaccgttaaggcgacgctggtcaccccggcctgctacatcgcgggtacaccgggaccgtgggacggcgatgtgggaagtatacggtttgccgaaatggccattgattttggcgaagtaccgattggcgatctgggcaccagcaatgcggaaaaaaccgcttatctttggtttgcgtgcgccaaaacgacgaataagacattgaatctttacgttaaacccacggcgtatggcacgctgccgtcgctcggcaaccacgtattggctacctcaaaagagaatctgggcatcgccatcagcatcgacggccacaatatcgcgctggaccaatgggtgccgctgccgggtgaggttatcttgccgggtgatgctctcgcagaaaataaaatcatcgtgacggcgcggctggtggcgcagggcgataaggatgcgttgagcggcggccagtttcaggcctcggccaactttattctgcactatttgtaa

SEQ ID NO: 453295 - DNA, 957 bp, Serratia marcescens
atgtctttgtttcatctgcgcgccgccgttgcgcccgccctgctgctgggcgccagcttcaccgccggcgccgctggctacgatgtcaccgccattgacggagcatcgactgtggaaattaacaccgtgggcaccgtcacccagggacatattgccagcttcgttattgatgcagcaaccgtctccggcgatgtgcactgcggcgatcgcaatttgcacagttcccttggcaaacagcggatatttatcgacctgccgcaggaccccgttaccggacgttttaaaatcaataataacctctcggtacaggtaacctcgctcgtatcaacagaaagctgggggaatggcggcgggatcaccagcgtttgcgacatgggcacatccctggaggtctatcccgccagctttttgagcgcagctttcccgataacgctggatttttatttggacagagagaccattgacggcgtaattacaataccggccatgcaattggggggatactcacgccgatttgacaccgtcgaccccggtaattacaaaccggcaaaatataccattccaatcaagttaaccggcggtaaaattaccataccggcgtattgtaacgcctacccaaacgcgatagaattagatcacggaatgttatcttcggataatacctatgacacggcgtttgccgatcttacctatacatgtgcttccccggttaatacaacggtaactattaactatcaagaaaatgccaccggggatttagacctcttacatacggacggcagcgttggcgccagcagtaaattaaccatcagcgataccagcagcggagtgcagggaaaagaaatatccacgcatatcgatgccagtaaaacgttccgcatcaccagcgaactgacaaaactcagcggtgaaggaaccatacagggcagcgcctggattatcgcctatctggattaa

SEQ ID NO: 453296 - DNA, 447 bp, Serratia marcescens
atgaataagtcaaccagaaccgcgctggtgtggggagggctgtgcgccctcctgctttatcgcacgctgcctgcggatgcgattatgtcgtggcagatgttccggcaatacggggttccggtgagccagctggcggccaacggactggtgcagctgctgcccgcgctggtgccgctgggctgttttttcgcattacgcgccaacgcggcggaacgccggctggcggtgctgaccctgccggtagtcgcctggctggtcagccatgtgattctgattacgctgctctatgccatcgcggtgaaaagcggcggcgtgccgccgtattccgaagggctgtcggccatgatgctgcggatgctgaatatcggctggctgagcaacgtgctggtcgccgcgctgacgatcgtcgcctgcggctacgcgttctggcgtgaaagccgacgctaa

SEQ ID NO: 453297 - DNA, 306 bp, Serratia marcescens
atggccaatatcaatatcacctttacggtgacggagttttgtctgcacgccggcgtctcgcaggatgaactggttgaaatcgtcgggctgggggtgatcgagccttgccggccggccggcgatgagtggctgtttgacgatggcgcgctggcggcgttccaccgtgcgcagcggctgcaccgcgagctggcgctggattggccgggcatcgcggtggcgctgacgctgctggatgaggtcgaacagctgcgcggggagaaccggcagctgcggcagcggctggcgcgttttatggaaaacgtctga

SEQ ID NO: 453298 - DNA, 309 bp, Serratia marcescens
atgatcaccgtaattgcagaaatcaaagtcaaaccgggccaccgtgagacggtattgaaagccattgagaagctgatcccgtcagtgctggcggaagagggctgcggcggctaccagccgctggtcgatatcaaggcgcaggtaccgtggaaacagtcgctgccggattcggtgttcatgctggaaaaatgggaaagcatcgcgcatctggaaaaacaccttgagatggagcatatgcatcggcatcgcgccaccatcaaggacagcgtgctggatgtgaatatccaggtgctggaagaagcgctgtaa

SEQ ID NO: 453299 - DNA, 1011 bp, Serratia marcescens
atgaatatttctaatgtatatcgctataagttagaaagttttttaaacacacggggatgtttgcaggatctttctccgttttattacaaagaagatgagcaggatctttatctgctggcaatgaaaaatgatagggggaggttacaatcactgagtcgttggcatgatgttttttccattcgccgtctggctaattggctaaacaagctggggtatagtgcggatgacgtctacttcattaacatcctgttgtcacggttaggatatttatttgacatagataaccgggagcgtttggataaggatatatttattctctactacacgctacagcttgttagtctgaaaggttcaataatgtcagataaggaaaaacaccagaattacatgctacgatttctatgttttgaactaggcatggaacatgagtgttactcaaagttaaagattgctgataattgcatttttttcgaaaccgaaaatcttgggcttattccggttaaagagatcgtaagcaccattttccagttttttgatgttgatgaaaaaaatgaaaaggagttgctagccggtattgttaacttccagttatcatcattggattttatttgtgaggatgatgatgagttgtttaggataaacttcaatgataccaatgagtaccttatttatcctgatgagtttatgagcgcttatatgaaagataaaaaagtagtgttccaggctattagcgatagttttaatgaatatcagtcttcttataatcttcttatttctaattttataataattaactatgcttattatattttgcaaagccgacctaagtgtctattggcgttacaaaaatatattgccgacgataggttgtttagccaaatagtgactacattggcttaccgtaaggtcggcattacccatgcaggcattgagaagttaggactcggtgacttcgttaagcctgggttaaatgaacggacacgtcttttcaatttgatttatgccaaatga

SEQ ID NO: 453300 - DNA, 1620 bp, Serratia marcescens
atggctcattttgcgtcatccccttatctcgttattcatcaattaacctgtcgctttgccgacggtgaaacgctgtttggcccgttaaacctgagcctggaccgccgccactgcgcgctggtggggcgtaacggcgtgggcaaaagccgtctgctgcgcctgctggccgggcgggagccgccggcggacggccatatcgaaacccgcggtctggtggcctgggtgcagcaacagtcggcggtagagcccggcgttacgctggcgcagtggctgggctacggcgaggtgttcgccgcgctggagcgcgtggcgcgcggagcgatgctggccgaagacgtcgagcggctggaagggcgctgggatctggccgaacggctgcaggccgcgtttgccgaggccgggctgagcggctgccatgcgcagcgcccggcctgtgaactcagcggcggcgaacgtatgcgcgcggccttgtgcggcgcgctgctgtccggcgcggattttctgctgctggacgaaccgagcaaccatctggatgcggcggggcgcgactggctgtaccgccagctggcgcagtggcgcggcggtctgctggtcgccagccatgaccggcaactgctgatgcgcatgcagcgcatcgttgaactgacgccggacggcctgcacagttacagcggcgactaccaggcgttctgccgccagcgtgaacaggaacggcaggcggcgcgtcaggcgctggatcatgcggagcaagcgcgtaaacgcgctcgcgcccggctggtgaaagagcatgacgccagccagcggcgcgcggcgaaaaccctgcgggaggtggataatctgaatatcgcctctttcgagcgggtgaagtacaaaggcgccgccaaagagagcctgggcacgctgcgccggcagcatcagcagcaaaaaagcgcgctggacagcgcggtgcatcaggcgcagcagcgggttgaggcggaaaatccggtgctgttcaccctgccgggcagcgcgttggcggcgggcaaacaggtactgacgctggagcagctgcgcctgccgttcagcacgctgccgccgctggactggcggatggacggcccgatgcgggtggcggtctgcgggccgaacggctgcggcaaatccaccctgctgcgcaccattctcggccaactgacgccgagcgacggccgctgccggctggcggtgaacgccgcctatctggaccagaccctgagccagttcgacctgcgtcgttcactgatggatcatctggcattggaacggatgccgatggcggccggggagctgcgcacccggctggcgcagctgcagctgggggccgagcgcctgacgctgccgctggcgatgctgagcggcggggagcggctgaaagcggcgctggcctgcgcgctgtggcgtgaaagcccgccgcagctgctggtgctggatgagccgagcaatcatctggatctggcgtcactgcaggcgattgaggcggcgctgcacggctatcccggcgcgctgctggtggtgtcccacgatgaggcgttcctgcaagggctggggctgacccaccggctgcagtggcggccgcagggctggttagcgcaggttctctag

SEQ ID NO: 453301 - DNA, 435 bp, Serratia marcescens
atgcgctggttgtttgccatgctgattgctcttttttgctggaccggcgcggtctccggccagcagctctatacgacgcaaccggcacagccaaacgcccaacccaaccacaacgcaaccgcccaggacgactacccgcaggcgctgcgcccgccggccgacctgcgccgtaaggcgccgggaaaaaaatggccgctgctgctgccgcgcaacacgtccagctacatctcttcgctctctgttgtttcaccgatccccgcctatgctttaacagaggcgcggcgagagagccgctatccgcgccagacggcgccggcatccaaccgcctcgaacaggttaactggatgctccgctcctcccaccagcaaagccgggtcggcggctggcaagcgagcaacatgctgtaccgaggaacgctgacttaccactcatga

SEQ ID NO: 453302 - DNA, 564 bp, Serratia marcescens
atgaccacagccgattcacgcagcgcgcgcgagcgcattattgaaaccgcccacgacctgttctaccgcgacggcatccgcgccaccggtatcgaccggattattaagcagggcggggtgaccaaagtgaccttttatcgccattttcccgccaaaaacgacctgatcctggcgtttttacgctaccggcatcagcgctggatcggctggttccgtgagacgctggcgcgggagatgacgaacggcggcacgctggtgcaggcgttgcccgctacgctggcgcagtggttcgccacggcggattttcgcggctgtgcgtttatcaatacggcggtggaaatggccgacagtctgccggagacgctggcgctggtgcgtgagcataagcaggatatgcggctggcgattgccgcttttctgccgggcgaccagcagggggcgcgcgcggcgcacaaactggcgttgctggccgacggggcgatagtgatggcgcagcgcggggaaaacggcgacgagacgctctctttgctgcgcgactgtgtggcggacagcctgagaggttag

SEQ ID NO: 453303 - DNA, 441 bp, Serratia marcescens
atgagcttttatttgatgttgattggctcggtgctggtattttcgggcattggtttttttatatttatcatgctgtacttcggcgtaacgaaaaagaaatacgaaacaatcgtatcgggctacctgtcccgcgctctgccgatgcctgatgtttataccgttttttatcatggcggttttttcaccagctttttactggtgagatttatgaggcaggtgttactagggaaaaagattgggctaggtaagaaaggttatcggctccccgccgagtcatatgactatttcaacacgttgccgaatgagctgatcgtctggataaaaaagtattacatgctgcatatcatcgagctgtcgatcatcatctctggatcgctcttcattttgttagacagcctgttaagggctgttgtacccggatatgcggcatattccgggtaa

SEQ ID NO: 453304 - DNA, 786 bp, Serratia marcescens
atggagccgattaacgttgagcaggcagatttcctccagcgtcattatgtcgccattgcgaccatacttaacggcaccagccggggaatgggaatagccagcgatgccggcaagcagtattttatgcgcatcgaaaaactccttaaacagatcgaggccagctaccaaaatcagttccggactcaggggacgctgattggccagcagttttttgttgaaaggcagcggctgtttaatgagttgaaaatcctgctggataaaccgatttttagccggctcacgcgcaacatccttaacctgcgtccctatgagagcatcaagcgtgcgctgaacctctccagccgttccatcgtgcatgagtggtcaacggtgggcgttggggcaataaaaggctactcgagctacctcgagggcgccggtaaggcggtaaagtttatgaaaggtgcgggctggattggtatagcgctctccggaaccagcacgaccaatgatatttatcatgcttgtacccttggtcgtgagaaggaatgtacgcgggtggcgttaacagggtatggtgcttttggtgcgggcactgtcggaggaatatatggcggagccctgggaagcttggttggtgttggagtttgtacggcattggggattatcagcgctccagcaggaggggcggccgggttggcctgtgcgattatcggtggtacggcaggcggtttggcaggtggtggcgcaggggaatatatcggtgagaaaggtggagcttttgttgcagacatgcttttaaagtaa

SEQ ID NO: 453305 - DNA, 444 bp, Serratia marcescens
atgacgacaaatgcatttgttggcagctggtcactggtgtcttcggtattcaagagcgaagagggtgcgccaagctacccgctcggcgagcaggtgatagggcgcatcaattacgaggccaacggcaccatggcggcacagctgtatagcgcggtgcgcccgcgctttgccgcggacgatctggcgcagggcagcgaccaggagctacgcgtcgcgtttaccaatatgctcagttattttggccgctaccagattgatgagccggatcagcgggtgattcatcaggttgaaggctgctcgtttcccaactgggtcggcacccgctttgtgcgtttttacagtttttccggcgataggctgacgctgcgcaccgcaccgctgcaaatcggtaacggcgtacagattggcgagctggtctggcaacgcatcgagatgcccggatga

SEQ ID NO: 453306 - DNA, 951 bp, Serratia marcescens
atggcaacaggatttaacaagatcgctctgctgacgcttgctctgacattaaacgccaatgcgtcggccacccctcttcaatgcgacgacaggggctttacgctgcaaactctggggtccggtgggccgatcaccgacgatcaacgcgcatcctcaggcgaagtcatctggataaacggtaaatccgccattctgatcgatgccggcggcggggtctttttacgtttcggccagtcaggcgcacggctggaagatctcaagtttatcggcctgactcactttcacaccgatcacgtctccgatctggcagccattctaaaaggcggttacttcgtcaagaacaaacaggagatcacgctggccgggccggaaagcggcggtgcattcccctccatgacgcaatattttgccgatttgtttaacaaagagggcggcgcctacgcttacctcaatggcttatataacgcgacggatgggctgaagatcgccagccatgtcaaagatatcagttacaccagcgtgcagccggttctcgtttatcaagatcaggagatgaaaatcaccgcgctgggtattcctcacggcgacgtgccctgtctcacataccgcatcgaaacggcaaaaggcacgattgtgatttctgccgaccagaacggcagcaatcgcgccttcattccttttgccaagggcgcggatattttagtgatgccgctggccattgatgaaaatgccgataaaggctcgaaatttatgcacgccgcgccggatgtggtggggaaagttgcggctgaaattaatcccaaggtgctggtgctcaaccactttatgggcaaaggactccgcctgaaggatcaatccgtcaatattgtgaagcagtactaccacgggcaggtttacaccagccgcgatctctcctgtttcccgatttctttagccaataataaggaataa

SEQ ID NO: 453307 - DNA, 300 bp, Serratia marcescens
atgaaaaaagacatcgtcctttccattgtggtgggttcaatcatggcaaccggcatgacggcctacgcgtcagcggcagacgcgccgcagcctgccagcaaggttgaacaccaggcgccgaccagcagcggtaaatgcgccagcggcaaatgcggtactgagaagatctacggccaggcaaaactggagcacgatcctcaggatctattggtacgcgcgcgcgacggcaaatgcgggccaagcggtcagggctttcaggccaatgccagcaagtgcatcaacggcgtatgtggcaaatag

SEQ ID NO: 453308 - DNA, 819 bp, Serratia marcescens
atgtggcaaatagcgaacaatcatgccggaatcgggctgcgcagtgagcacattccggcattgatcacgcagcccaaacgtcaggatatcgactttcttgaactggcacctgataactggatgaacctcggcggggcaaaaaaagagtatctggcggatatcgcgaaaaaatatccgctgattgcccacggcctcagtctgtcaatcggcgatgtctgtccgttgaacagcgcttatatacatgatattcggcgttttctggatgagtatcatattgatatttacagcgaccacctgtgtttctcacgggatcggcaaggttacctttatgacctgctgccggtacccggttatgccgacgcactgccgtacctggcgtcgcgtattgagcaagtgcaggatatgctcggccgtcaattagtgctggaaaacgtttcatcttaccagcgctatccggacgaaatgccagaggcggaattctggcttgagctgctgcatcgcagccgctgcggcatgctgttggatatcaacaacgtctatgtgaacgccttcaatcacggcttcgatgccctggattacattcgcgccatcccatcggcagcgattgtttattaccacatcgccgggcatctggaatatgaagaattccggctcgacacccacggcatgccggtattggaggaagtgctgcaattggcgcaacggacgttcgccattcatggcaaccgccccttgctgctggaacgggataacaacgtaccaccgctggagacgctctgcgcggaattaacacaaatcagagagcacatcgcatcgtaa

SEQ ID NO: 453309 - DNA, 726 bp, Serratia marcescens
gtgacatcacaacatagggtaccggcttcactggcggcggcagaggccgaatttagcggccaactgcgttctcgccatgcaaatacctattcaaaaggcatgaggctttaccggaaaattattcgggagaacatttatagcgtcctgctgaatgtatttcctctgtactgccgtcagaaaaaggatgaggcgataacaacactgatcgatgcttttctttatcagcatcaggccagccaacctgaatttcatcagatcgcgacggaattattgttgtttatgcgtcaacaaccaaagttctctgacggggaaatggcgctgattgaatatgaatggctgatgtatgccgttgaaattgatgacgcccaggtgccgcacggacagaggttcagtccaagcgccaaattgctgcctcgcttggtcatcacgctcaacccgacgctcaacatggtggcgttgcctttttggttaaataaaaacgagccctgttacagcagagaaataccgctgcactattacgccatatatcgcaagcgtgataatgcggtttaccaaaaaaaactcaataacgccgaggtccggttactggccgaaataaatgatggtgaaacacacgcgacattattacaggagaagtcgtcaaaatatctaccaaccaccgctttttacacctggctggacgccagcaataacgacgagctgttatcattaacactgaagggataa

SEQ ID NO: 453310 - DNA, 597 bp, Serratia marcescens
atgctgactaaaataatttcctggtaccaatgggtggtatccaaagttaaaaaggctgactttgtaccgctgctgctgatccgactctatttgctgccggttattttcgaaggggcgcattcaaaagtattgggtttcagtaataccgtggcctggtttgccacgccgaccgccgaaggggggctgggcatgcccttcccctggctgttggcctttctggcgacctcaaccgaagtcgttgggctggtctgcattgcgcttggtttattcacccgcatcatagcgattccaattatggtcgtgatgagcgtagccagcctgatggtgcactggtctcacggttggctggcgattgccagtaacgatatggaatcggcccagcgtatgaccgcatttctccaatggctgatgcagaacttccccggtcgttacaattacattacccaactgggcgatcctgtcatcctgaataacggcattgagttttccgccacctatttcattatgctgctggttctgctggtatggggcgggggtcgttatattagcgccgactactggctgaaaaagatcaccccagcctggcgcgaacgataa

SEQ ID NO: 453311 - DNA, 1674 bp, Serratia marcescens
atgataaaaaaaattaccgcgctgacgctgttgatcagccccgccctgtccgcagaaaccttgccggccgcccacgggatgatcgatatgtcgatgggagaatcgcgccgcgcgctgcaggacagctcgcgcgaggtcacccatctgattgaacaacggcgctatcgccagctgatgcagcagagtcagccgacagagccggccacgcctgcgctgccgcgctccgcacagtgcctgccgatcgccggcgtctatctgcagggcgtcactctgctgtcgccggccgatctttccgccctgagcgcgctgccgcagcagtgcatcagcagcaacgacatcaatcgtctgacgcgggaattaacccggctgtacctgcagcaaggctatatcaccgcgcgtgtcgcgatcgttcgccctaattcacaaggagaattagggttgcgcgtgaccgaaggatttattgagaaaatagagggcggcgatcgctgggtcaacagccggttattatttccgggcctgacgggcaaaccgttgaaattaaccgacctcgaccagggattggatcaggccaaccgtttacaatccaataccgccaaactggatatattacccggcagccggataggcggttcggtaatccgtttacgcaatcaacacggtaaaccctggcagattaccgccggcagcgataattacggccagaaaagcactggccaatggctgggacgcgccaccgccacgctggacagtccattcggcctgtcggatttcgtcagcctgaacgccagcagcacgctggaaaacccggcctatcgttacagtcgcgccgcgaccctgctctactcgttgccgtacggcgcctttaccttcagcggcttcgccagcctgtcgtcttatcaaaaccaccagccgctgcagcacaacgtggtcagattgcacgggaaaacccagcaatacgggctgcgcggcgactacgtgttttaccgcgatcgcgaccagatcgacagcctgaacggccaactgacctacaaacgcattagcaacgacttcgagaacgtacgcctcgaggtcagcagcccgacgctgacgctgttggaactgggcgccagccatctgcaaatcctgcctcacggagtattcagcgccaacctcagcgtcgagcaaggtctgccctggctgggcgccggacgtaacccccacacggcgcacctcgacagccagtttaccaaggggaagctgttcgccaacctcagccagcgcctcactctgggcggtgcgacctatcagcttaataatttgttctacggccaatacagccgcgccgccctgcccggcgtggagtggctgagtctgaccgatcgcagcgccgtacgcggcttcagccgcagcacccaagccggcgataacggctggtatctgcagaacacgctgtcgcgcagcttcacgctggcggcaactacgctgacgccgcgcatcggcgccgacgtcggccgcattctgccgcgtcaggataattcaggctggcgcagcagcgccggactgagcgccggcgccatgctgcgttatcaacgggcgctggtcgatcttgaagttagccgcggccggatcctgtcgcatcacgccgcacctgacgaccctgttcagctgctggcccgcttctcttacaccttttag

SEQ ID NO: 453312 - DNA, 669 bp, Serratia marcescens
atgaaaatacgtcctctcttcgctatctgtatgttcctctccgccacagcctatgcgccgttagctgccgcagaatcagggttgttctgccacggtatggaagacgagcaaccgcaagatcgtgcgcagctggctgaaatcaccaccaagagttacttctttaactatcgctatccggatgactggaacgataacccgaaattggaaaacggccagctgcggcaggaaagtcgttatctgatcgccggcgaccgtctggtggtcgggccggaacagcgaggttaccgttgcggttattacattaacggtaagggtatccaaacggccaactggataaaggcggatacgctgcgggtgctgtccgatgttgtcccggccgattggcgcggtgtctgggtaagcaatgacggccagcgtcagctgaagatcatggctcgacaggctgagtatcagtttatcggcggtggcagcgatcctggccgtatcagtacggtatttccgtttagcgtaccagcgagccaagtggatgcacagctgacctccccaccgccgacggatgctccctgtaaactgaaactgcatcgtttaggggagtatttaatcatcaccaatggcgaaagctgtggcctgatgaacgctaacccggacggggtactgcgtaaacgctga

SEQ ID NO: 453313 - DNA, 657 bp, Serratia marcescens
atgcagcatgcgtggcaggaggtagatgaatatctggaacgctgtttggcgtgtcaggatgataatttgacgcaaaccttggcgttgaatgccgagcgtggtctgccggcgtttgatgtctcaccgctgcagggacagtttctgacgctgatggcgcaaatcagcggggcgcgccgggtattggaaattggtacgctgggtggttttagcacgcaatatcttgcccgcgcgctgccggaggacgggcgcgtggtgacgctggaaaaagagccggccaatgcggcggtggcgcaggaaaatcttcagcgcgccggcttgctggatcgggtgtcgattgtggtgggcgccgcggcgcagacgctgccgacgctgcagtcacagccgccgttcgatctgacgtttatcgacgccgataaacaaaatagcctgctgtacctgcagtgggcgatcaagctgagccgcacgggcagcgtaatcatcatggataatgtggtgcgcgggggagctatcgtcgcggctcggcgcgatgttcatgccgaaggcatccgccaggcgttggaggcggtgcaaaatatgccagcattaagcggcaccgcatttcagacggttggcgagaaaggctgggacggtttcgcagtcttgcgcgtggaaaagtga

SEQ ID NO: 453314 - DNA, 315 bp, Serratia marcescens
atgaaaaacgtatttatcttatcggcgcttggcctgtctctgctggcttctgccaacgttatggcggcggaaggactcatgcccgatcgtgaaaggtcctcagccacatacggcgatcggattctattccaaggcaattataatacttacagaacctccaactatgccctgagtgatttggaaaaatttgaaagtaagttgcaggatcatgaaaatgagctgaaacagctgcgggatgaaaacaggaataaggatcgtcagatcgatgagctgaaacgttcgttgcaggaactgagcaataaggtgaaaggctag

SEQ ID NO: 453315 - DNA, 756 bp, Serratia marcescens
atggcgtgtcattttgtccgatggaactcaacccccgacgctctggatacctccaggctttccgccgcgctgatcgccgatgccgacgcttacgcggaaaagcgccgccagcgttttctgcagggccgcattctgctggccgaaaccctgcatcatctgtacggcctgcccaccctgccgcctatcgccaccacgccgaccggtcgcccctgttttaacgatccgcatctgccggacttcagcctggcctatgccggcaataccgtcggcgtactgctcagcaatgagggcaaggtcgggctggatattgagatgctgcgcgcacgcagcgccagccagcggcagctgcagcgccagttccgcaatgcgccggaaagcgcctggatcgacgcgcaggacgatctgctggaagcagaaacccagctgtggagcatccgtcaaagcgtgcttaagatctccggattaggcaacagcggccatggaacgctgacgctgcacccgttttccggccagctgcgctccagcgtcacgccgcaggtgcaggtcatgagcgatagcgacgattatcaaagctggtcgtgcgcccgcgagccggcgctggagcggttgcagtgctggcagtttgacccgcagtacgggctggagaaatgcgaagaaatttcagcgcaatcgccggcaaactccctacgtttcatcaagttgaccagcctgagcaattatcacaaaaatagcagactgaaagaaaaaataggctga

SEQ ID NO: 453316 - DNA, 258 bp, Serratia marcescens
atggcgtcgccactgtcggcaggctcgcgcatcctgatcgggctggtgcgcggctaccagctcgccatcagtccgctgcttgggccccgttgtcgcttccagccgacatgttctcattacgcaattgaggcattaagcaggttcggcatgataaaaggcagttggttggcagtgaaacgcgtattaaaatgccaccctttgaacccaggtggcgatgatcccgtgccgccgaaaaccgacgataacagagaacactaa

SEQ ID NO: 453317 - DNA, 1158 bp, Serratia marcescens
atgtcacacatcacgacttcgaaattaaacaagttagttgcgcgcgtcagaaaagctcaggaggcatacgccgactattctcaggcgcaggttgacagaatttttcatgctgcggcgctggcggcagccgacgcccgcatcccgctggcgcagctggcggttgacgagtctggcatgggcatcgttgaagacaaggtgatgaagaatcagtttgcctccgagcatgtctatcatgcctacaaggacgaggtgacctgcggcattctggcggaagacgaggcgttcggcactctgaccatcgccgaaccgatcggggtcatctgcggtatcgtccccgccaccaaccccacctcgacggttattttcaaggcgctgatcagcctgaaaacccgcaacgccattatcttctctccccaccccagagccagcaacgccgccaataaagcggcggaagtgatcctgcgcgccgcggtggaggccggcgcgccggccgatattatcggctggctggacagcccgaccgtcgagatggcggatcagctgattcaccacccgcaggtggatctgattctggccaccggcggccctggccgcgtcaaggcctcgtacagctccggcaagcccgccatcggcgtaggcgccggcaatacgccggtcgtggtcgatgaaacggcggatatcaaccgcatggtcgcctcggtgctgatgtccaaaaccttcgataacggcatgatctgcgcctctgaacagtcggtaatcgtcgtcgacgcggtgtatgacgaggtgcgcgcacgctttgccgccgccggcggctatctgctgccggagccgcagcggcaggcggtgcgcaatatcattatgaaacaggggcggatcaatgccgatatcgtcgggcaatccgcgctgaaaatcgcggaaatggcgggcattgaggtgcctgccgacaccaaagtgctgatcggcgaggtgagcgggatcggcgacgatgaaccgttctccggcgagaagctgtcgccgctgctgggcatgtatcgcgcgcagcacttcgatgatgccatcaataaagccgtcgccctggccgcgtttggcggcggaggtgggcgcggagccgaccctgacgatggtcaacgccggcgcccggcgcatgctgcagtttaa

SEQ ID NO: 453318 - DNA, 1929 bp, Serratia marcescens
atggcggtattgcaaacactgacgagccgatacacccatcttagcgtagggaaaaaacttaccctcggcttcttcctgatgctgctgttggcggccatcatcgccggcgccggcgtctactacctcaacatcatcaatgcccgttccgaacgcatcaatttcagcgatcggctgaactacgagatcaatcaggcaaactactaccgggcgctttacggccagggctaccgcacggagtttttggaaaaacaccgggtgcacgtcgagaatgccgcaaagctggtgacggacggccagaaaatggagtgggaccggctgagttaccagcagctgcgccagctggtgaaaatgatcgatgaataccagcagcaacagcagcagctgcttgaggcgatcgccgccaaagacgccatacgcagcagctgggggatggcggaagtcctggaaaacctgcagcaggctgagcgccagttgggcggcggcgaattacagcttccgttcatccggctccgacaaacgctgacgcaaatccgctacgacgcccgcggcttgctgctcaacctcaaccatgaggccgaagcggcgctgctcaccgcaatcgccaaggcgcacgacaatactcaggcgctgatccagcgtctgccggaacagcaaaaaccgcagctgcagccgctgctgaacgcaatagacagctatcaggcgcatatcaaagcctatatgcctgcctatgagcgtgaactggcgatcagcaaggcccaaggggataatgcgctcaagatcggcgcactggcccgcatcttcctacaggatgaattaaccaacaccgagggcgatatcagcaaagcgcagctggccatgggcctgaccacgctgatcgccattatcgtcgggctgctggtgtcatggcgcattacccagcagatcacccggccgctgaacaatacgctggagattgcgcagcgcatcgctaccggcgatctgcgccgggtggatgttcccgaacgccgcgacgaactgggcaaactgctgcaggcgatggcgaccatgaaccagaacctgcgcgatatgattgaaaaaatccagcagggcgtcggccaggtttacaccgccgccggtgaaatctccgccggcaataccgatctctcctcgcgcaccgagcaacaggcggcggcggtggaggaaaccgccgccagcatggagcagttgaccgccacggtgaaacagaacgcggacaacgcccatcacgccaaccagctggcgtcggacgcctccgataccgcccagcagggcggcaagctggtgggcagcgtggtcgccaccatgcgcgatatctccagcagttcgcaacgcattgccgaaatcaccacgctgatcaacggtattgccttccagaccaatatcctggcgctgaatgccgccgttgaagcggcgcgcgccggcgagcagggccgcggcttctcggtggtggccagcgaagtgcgcagcctggcgcagcgctgcgcgcaggcggccaaagagattgaagggctgatcggcgagtcggtcaaccgcgtgcagagcggcacccggctggtggaggagaccggcagcaccatggagcagatcgtgcaggccgtcggccacgtgcgcgatatcatggcggagatcgcctccgcctccgacgagcagacgcgcggcatcgaccagatcggccacgcgatcgccgagatggatcagaccacgcagcaaaacgccgccctggtggaacagtccgccgccgccgccgactcgctggaagagcaggcggaaatcctgcagcaaagcgtggcggtgttccagctggcggacgcgtcgtctcccggcgttacggcgaccgacgcgccaacgccgcgcccggccaagccggcggtccccgcccagaacgagcaggataactggaccaccttctaa

SEQ ID NO: 453319 - DNA, 606 bp, Serratia marcescens
atgagcaatatcaaccatcaactggcgcacagcgcggcgccgccgctgcagagcgcgggcaccgtcacccactgctttgccgacggcagcctgagcgtggagagcgaagggcgcggctggcactgtcagcgcgccgccagctgcgtgatcgccccgcaggcgggcgaccgggtgctgattgccggggtggacaaccaggtgtggctgctggcggtgctggagcgcgccaacccggcggcggcggagctgagcgtgccgggtgacctgcatatccgcagcagcggtgaactcagcctcagcagcgaggccctgcgcgtcagcgccggacagggcgactgtcatatcagcgagatgaattacagcggcgacaagctgtccgcctgggtcagcctgacccgtacggtgggcaagcgcgccgaatcggtatggcagacggtgacgcaggtcagccagaacctgttccgccagacccgtaataccgagcaggtgcgcgccgggcagctggatatccgcgccgatgattacgcgcgtctgcatgcgcacaacacggtgattacctccaaggcgatcaccaaaatcgattcagaacagattcatatgggctga

SEQ ID NO: 453320 - DNA, 393 bp, Serratia marcescens
atgtttgccaactgccaactgatgggcgtcgatctggcgtttcccgacgtctgtctgacgccgactccgacgcccacgccgatcccctacccggatatcgccatggggccgacggcgatccccaatgcgctgaacatcctgtttatgggcatgccggcccacaatatggcgacggtgacgccgctgaccaacggcgataatccgggcgtcgccaccggcgtggcgtccggcacggtgatggggccgtcgcgccacctcaccggcgcatttaccgtattgctcaaaggcacgccggccacccggctgaccagcgtcagcctgcagaactcgaccaacgccgtcgggatgcgcgtggtgcccagccagttcaaggtgctgatgctggcgccctga

SEQ ID NO: 453321 - DNA, 2310 bp, Serratia marcescens
atgtttgaccgtattacggtgacaacgccggcgggcgccggtgcgttgaagttctggaagctcagcggggtggaacaggtttcacactcgttcgagctgcaggtgatgctgctcagcaccgacgcccggctggaccgccgggcgatgctgggccagccgatcacactgaccatcccgacgcagggtctgctgtccgcgcagcgctatctcaacggtaaggtcacctcggtcaacgtacacagcgccgacattaacggtgcgcgctacgccgtttacactctgacgatggaatccgacctgtggccgctgaagcgggaccgcaaccagcgcatcttccagaaccagcgcgtgccggatatcgtcaaaacggtgctcggggagtacggcgtgcagctggaggagcagctctccggcagctaccgcagctgggagtactgcgtgcagtatcaggaaagcagctacgactttatctcccggctgatggagctggaggggatttacttcttcttccgccacgaggcggataaacacacgctggtgctgcacgatgcgccgcagcagcatcagccgttcagcggctatgaggcgattccctaccacgccacgccgtccggcggcagcaccggcgaggaggggatcggccagtgggcgatctccgagcgggtgacgccggggatctacagcatcgacgactacgatttccgcaagcccaacgcctggctgtttcaggcgcggcagaaccccagctcgccgcagccggggcagattgactactacgactggccgggacactttgttgagcacggcgacggcgagttctacgcccgcgtacggcaggaggagtggcaggcggagcaccagcgcatcagcgccaccgccaccgcgctgggcatcgtgccgggctgcacctttacgctgcttaacccgccgttcgtcagtgacagcggcgagtatctggtgctgagcgccagctacgatctggaggagaacagctacgccagcggcggcgacgaggcggtgcaccgcatcgatatgacggtgatccccgccgatacgccgtaccgctcgccgcagcgcacgccgtggccgcgcacccacggcccgcagaccgcgcgggtggtggggccgcagggcgaatcgatctggaccgacaaatatggccgcatcaaggtgaagttccactgggaccggcaggccaagggcgatgaaaccagctccggctgggtgcgcgtctccagcgcctgggccggccagggcttcggcggcgtgcagatcccgcgcgtcggcgacgaggtggtgatcgattttatcaacggcgacccggatcggccgatagtcaccggccgggtgtataacgaggccagcatgccgccgtgggcgctgcccgccggcgccaccatgatgggctttatgacccgctccaaggacggccacagcgacaactccagccatctgttctttgaggacaaggccggctcggagatggtgcagctgcacgccgaaaaggatatgaatatttcggtggagaacgataaaacggtgaccattgacggcaaccgcaccaccaccattcagaaaaagcagcaggacgaggtgttcggcgacgccaggttcacttaccacggcacgcgcaccaccacggtgaccaagaaagagaccaagacgtttgaagacggcgagaaggtcaccatcagcaacggccgcaactcggagatcaccagcggcggtgaacagctgaagatcaccggcgaacgcagggtagagacggtgggtaccgaagagcagatcgtgtcgaaaaaggtgacccggcgctataacgaaggcatggatttttatctggaaggcaaacgctatgaccaaatcaccgggaaacgccacgttatcgtgaccgatgacgtgaccgacgactaccagggcaacctgaatcagaccatcaccaaaaatgtcgataccaaaattctcggcaactggaagcaggatgccaaagagggcatgacgctgacctcggatcagatgattaccatcgacagtaaggtgaaggtcagcatcaaaacgccggcggcgcttgagtacaaggaccataaagagaccgtgtcgatgttctcgttcgatttcacggcggcgaaggtggtgacggaaggctattccaccaccgttaccgtcggcggtaaactcggtctggcaacgatgaaattcgacaagaccggttttgacctctcgaccaaagaggggcgagtggagtttggtcaggcaatggtgcaggtcgggcagattatgtcgcagtttaacggcctgacgattatgggctga

SEQ ID NO: 453322 - DNA, 330 bp, Serratia marcescens
atgaagttcgctatcattatttccgtgattatttttgcgggtttttttgcctatatcgcccacctgttttaccgcgatcacaagatagacgcccagggacgggagctgttggcgcacgtggaagaggtgcattaccgcagctccaacgataacggcagcatcaatatccgctaccggctgtcgtggcaggagggcgacgccaccaaagaggtggaaggcaaggagaccatcccggccctctattcgtcgaaggtgcagcaaggcagcgacgtgacgatccgctacctggacgacgaccatattgcgtttgtgttcgatcgagaccgttag

SEQ ID NO: 453323 - DNA, 321 bp, Serratia marcescens
atggaagtgttatcgcccaaaaagaaggaaatacggcagctaaaacagcggctgcttcacgcattattaaccttgtctcccccgttaactcaggagaaagaactacctccccagcatgaatggctatctacccgacaactggcggaatatataaatgaaggcgtgtatcgagccagaaacttattactggaaatggtcgccaatggcgacgccattgtcagccacggatcggtaaaaaactcgctgagatggtatcccgccgccgctgagcaacaaaaggatgtttgccgcctgccgcaacacggcgcgcgcgcgctttaa

SEQ ID NO: 453324 - DNA, 408 bp, Serratia marcescens
atgaccgataactctgtgcgcctggtcgtccgggcgggcattctgacgctggcgctgctgggcggcgcggcctgccaacaggctaaacccaacgccgccgccaagccgcagccggcgtcgtccgtcgagccgcagcgtcagcagcgcgaggcccaacgtttacagcagtgccagcaggcgctgacggcgctgcagaaaatcaatcccgaaggttatcaggaatatcagcgcgccttcgacagcctgatgagcggcgcatcgcagtatgccggcctgcgcgcccgggtgaacgacgacacgcaggagacggtggatgcgctgtaccgctacaaggtcagccggctgtgcgcggcgattgaacaggcggtgatgaccgggctggtcgagcgcggggagcaggttaaatga

SEQ ID NO: 453325 - DNA, 1218 bp, Serratia marcescens
atgacgcgccgtgcatccgtggcggcgtgtctggcgctggcggcctgcgcgctgccccgctgcgccctggccgatgacggcattcccgccctgctgcagtttgccgagcagtatcagcagcgcagcgatacgccgccggtgacggaacgtcacaagccgtccgccgcgccagcgcagaaggccagtccccgcccggcgacgaacaagccggccgcgcccgccgccgtgacgctgacgccgcgccgcagcctgcaggagcgtgacgagcagctggcccggcagcggctggagctgcaggcgctgcggcaggagaacgccgcgctgcgcgccgcggcgcatgagacgcccgccccggcggcgctgccggatctgaccccgctgcagcagtggctggccgggttgcgtcgcgcctggcagggcacgccggacagccgacgcgccgcagagctgatcaaacttgcgcagcagcagggggcgcaggcggagcagcagcagcgggaacaggcgcagcgctttgccaaggagcgtgacgcgtggcggcagctgcaggcgcagtggagcattacgccggaacagctgcaggacgagaaccaccgcctgtcttacgccgcaggcagcgcgctggggcgcgatattcagacgatgatgacggagcgccagagctggggcgtgccggtggaccggcgcagcctgctggccggcgtgctggataacctgacggggcgcgaacggctgtcgccgcaggtgctgaacgcgctgatggccaaggctgatgcggcggccggcgcggcgcgcgaacgcatcgtcaacgcgcagcagcagcgggaccgggagtatgtggcgcagttcagcaaacggccgggcgtgcagcgttcgccgacgggcttttggtaccgggtcgactacgccggcgaccgcgcgctggcgcaggacgcggtgatcgacgtggtggtgaaggagacgttgacggacggcacggtgatccaggatatggatctgaacggcaaggtgctgtcgctgccgctgtccggtttcccgccgctgttccgcgaggcgatcggccggctgcgcgaccacggcagcatcaccatggtggtaccgccggcgctggcctacggcgaaaccggctacccgccgaaggtgccgccgaacgccaccatggtgtatgaactgcgcatcgacaacagccgcgcgccgcagccggcggcggatcgctaa

SEQ ID NO: 453326 - DNA, 621 bp, Serratia marcescens
atgaatgccgtaacgacactggccgtactggacggcaaccgctatttcgccgccgggctgcaaaaagcgctgaccgcgcgcttttacgccgccggcgtggagacccgcgtgctggaggggccgcaggcgtatctggccgacctgttgttccactattttccgcccggcagcccgagctgtttctgccgctatgcggaaaaacggccgggcgccgcgccgctctattttgccgtgcgtcaggcgcagggtcatgacgctatgcgggccgactgccgcctgcaggccggggtgatcgtgcagaacatgccggttgccgccgcgctgcgccaggtggagaacgcgctgctgcagcggcgtatttcgccgccggcgccggtgcttgaatattgcccctgccagcgctattcgctgaccgagcgcgagcgggaaatcatgctgtgcctgcgccaggagatgcggatcacggagatcgcccggcggctggcgatcagcgtgaaaaccgccagccagcataaaatcaacgtgatgcataaaatgggcttccggcgcaacgcggagctgtatgactggctgcgccaaggttttgtcggcgagcggccgtttgaggagcgcctgagctga

SEQ ID NO: 453327 - DNA, 291 bp, Serratia marcescens
atgcttttgaccactaatattgacattatgattgaaggtacgcttaatcaggactttgattatattaccggagcggagacgattgatgatgccatcgacatctatacaaaagggctaacaacgcaagaccgtcaagatttgaaaaaagaagtgttagcgttcctgtcgaacgatgacagtatcatcgagtctgaatttaaagagcgttatttcaattcttttgcgccagaagatggcaagggattgcttttacgcgtgcttgagggcatagagaaagctgagcaggcgtaa

SEQ ID NO: 453328 - DNA, 285 bp, Serratia marcescens
atgtctgcacaaacagggcccgctagtcatcaagttatttttgatggcgcgggcatcggtgacttttgtcctgaaacgtcgctgctggaaaactttgaaagattaaatatagatattcccaacctatgccggaaagggaagtgcggctgttgcaaattacttttaatcagcggaaatgttcgccatgaaaaacagagtgcgctgtgcgaggaggagttagagaataatattattctggcctgctgcgcctattcacaatcggatattgaaatcgaactttattaa

SEQ ID NO: 453329 - DNA, 813 bp, Serratia marcescens
atgaaacgcattgaggtgcaccatcgcggacgttgccatcatattgaccaccgagagccgctgcggctctcggccagactgaacttcgccgataacccaaccaacctttatggcgtggcgcctgctgactcggcgccgctgagttacggcgatgccgtcgccagcgtgcgtcagggcggggcctgcaacgccgagcgcatcagtctggtggcgcactgccacggcacacacactgaatgcatcggccacattcttcccgacgcgcacaacgtggctgatctgcagcttgaacctttcattgccgccaccctgattcgcgtcgcaccgcagcgagcgaacacgaccacggagagttataacgccagcgctagctctgaagattggctgattacccggtcggctctcgatgacgcgttgacgccgttgtccggtgactatctgcaggctttggtgatagggaccgacgcggggagcgagttccctgcgtcggcctgcgccccctatttcagccatcaggccatggcgcgcatcgttgaactcggcgttcagcatctgctggtggatataccgtcgatcgaccgtttatacgacggcggacgtatggacaaccatcgctgtttttgggggcttgatgtcccagacaggcggcaaacagcacgccggcacgcctccgtgaccgaactgattcaggttcctacgcatgccgctgcggggcactattttttgaccattcaactgccggatctggccggggatgctcttcccagccggccaatcctattttcgttttctacagggaaagtgacatcatga

SEQ ID NO: 453330 - DNA, 1491 bp, Serratia marcescens
atgaatgaatttgtcaatgccgtcaacggcgtgatctggagcgaggcgctcatttatctctgcctcggcaccggcctgtatttttctttacgtagccgatttttgcagctgcgccacctgaaagggatggtgcgtctgatcttcaagggtaaggcgaatgccgccggggtctcttccttccaggcgctgtccatgacgctggccggacgggtcggcaccggtaacattgccggggtggcgaccgccatcaccttcggtggccccggggcgctgttctggatgtgggtggtcgcgtttctcggttccagctcggcctttgtggagtcgacgttggggcaggtttataaggagaagctggacggcgagtaccgcggcggcccggccttctatatcgagaaaggtctgggcatgaagtggtacgcctggatttttgccatcgccaccatcttctcctgcggcgtgttattgccgggcgtgcaggccaactccatcggcgccagcctggatatcgcgttcggcatcagcccgaatgtgacggcggcaatcattgccgtgctgctgggctttatcatctttggcggcgtgaagcgcattgcgagcttcgccagtaccgtggtgccgtttatggcgctgggttacatcatcgtagcctgcgtgatcgtggcgctcaatattgaccagctgccaggcatcattttgctggtttggaagagtgcgttcggccttgaggccggattcggcgcgattttagggctggctattatgtggggcgtgaagcgcggcgtatattccaacgaagctgcgcagggaaccggcccgcacgcgtcttccgccgccgccgtcagccatccggccaagcaggggctggtgcaggcgttctcggtgtatatcgacaccctgttcgtgtgttccgccaccggatttatgctgctgattaccggcctgtacaacgtccaggggccggacggagccgcaatttataccgggattgccggcgttgccgccggtcccggctatgtgcaaaccgcgatggaaagcatgatgcccggttttggcagctacttcgtcgccatcgcgctgttcttctttgccttcaccaccatcgtggcttactactacatcgctgaaaccaacgttgcgtatctcaaccgtaaaatacaccgcccatggcttaccctggtgctgaaaatcggcctgatggcctcggccgtctacggcacggtgaagacggcggacctggcgtgggggatgggcgatattggcgtggggctgatggcctggctgaacatcatcgccattttactgctgcgcaagacggcgttcacctgcctgaaggactatgaaaagcagctggcggaaggcgtcgatcccgtctttcatcccgagaagcttggcatcgaacgggcggattactgggtgagcaaccgcgccgaggtaaacctgctgcgtgagtcgacaggaaagattgatgaaaatgcagggtctgcctag

SEQ ID NO: 453331 - DNA, 1467 bp, Serratia marcescens
atgcctgttgaagaggtgccacccggcaagccgctcagccgatatcgccagcttaccgagcagataaagcaggcgattgacgccggtctgttgcctcccgatacgcgtttgccgtcggtcagaaccctcgccacgcagtacaacatcagcctgaccaccgcgctaaaggccttgcgcacgctggaggatgagcattacgccgtggcaaaacccaaatccggcttttttgtcgcgccgcggcaacggcggcagccaaaaccgccggccgttatcgagcagccccgcgagatcgcgccgcttgatgaacaaacagaactgcatatggcgatggtcggcgagaattgccgcgtgcgtctggatctggccaacggcgacagcgcgctgtatcccatcaggaagctggggttgatcatgcggcagctgggctacagccagccctccttgctcggggatacggtcaaaggcaccggctatgggccgttaaaagcggaaatcgcccggcgggcgatcgactacggctgcacgctcaccccggagacgattttagtgaccaacggctgcatcgaggcgctgtcactcgcgctacgcgcgacggtcccccccggggatgcggtcgccgttgaatcgccctgctattttgttttattgcagatgctgcgcaacctcaacttacgcgtggttgaagtcgatgcctgcccggcaggctatgtcgacagtgaaaagctggtggcgcttttccaaagcaaaaccgttaaggtctttattaccctggccaatattaataacccgctggggaaaaccataccgaacgaggaaaaggcctatatcacccggcaggcggatgaaaacggcgtaattattattgaagatgatacgtttggtgatacggcctttggcgggcagcggccttttcccatgagggcctttagcccgcacgtcattttgtgcagcggtttttctaaaaccgtggcgcccggcattcgcatcggctgggtgcacagtaaccattacatccgcaaaatcacctcgctgaaatatacctcgaccatgggctcgcccctgttatcgcaggcggcaatcagcgagctgctgcgaaacggcggctatgacgcccacctgcgcaagctcagacgtgagctcgccggccagatcggcaagcttcgccagcaggtgctgcaaaccttcccgccggggaccagggtttcccagccgcagggcggctatgtgctgtgggtcgagatgccgccggacaccctgaatgtgcgcaccctgtttatcaaggcgcgcaacgccgggatcggcattgcccccgggcatatttttgccaccgacaaccgttacgatcgctgcttccggctgaatgccgggtttggttacaacgccgacgttgaacaggcgatagcgcagctggcgcaatggtgtattcagtcgcagcagcaggacgagtcaggccagaacggacgttga

SEQ ID NO: 453332 - DNA, 900 bp, Serratia marcescens
atgtcggtgaaagatatgctgttggccctcggtgtgattgtggcctggggatttaatttcgtggtgataaaactggggctgcagggcatgccgccgtttttactggccgggctgcgttttatgctggtggcgtttccggccaccctgttggttaaaccgccccgggtaccgctccgctggctggtggcgtatggcatgaccatcagctttggccagttcgcctttttgtttctggctatcaaactgggtatgccggcggggctggcgtcactggtgctgcaggcgcaggcttttttcaccctcttgctgggcgccctgatgctgggcgagtcattgcgctggaaccataatgccggtatcgcgatcgccgcgattggcctgttcctgctggccggcgcgggcatgggagggggcgtcacgctcaccaccatgatgcttaccctggcggcggcgctgtcgtgggggctgggcaatattaccaacaaggtgattatgcgtaatcacccggtgccggtgatgtcgctggtggtctggagcgcgtgggtgccggtggcgccctttcttgccgcctcctggctgtttgagggccaggccgcgataacggacagcctgctgcatatgcaggggacgacgctgctggcgctgatctatctggcatttattgccactatcttcggttacgccatctgggggcggctgttaagccgctatgagacctggcgtgtagcgccgctgaccttgctggtgccggtggtcggtatcctgagcgcggcattcattctggatgaaaggttgtcggccccgcagctggccggcgccctggtgatcattatcggcctgttggtgaatgttttcggcggtctgctgacctcccgccggcgtgcgtaccaacagccctga

SEQ ID NO: 453333 - DNA, 597 bp, Serratia marcescens
atggaatattgtgtggccaaggtggctgatattgcacaggttacggcgctgctccgtcgctatcaggtggacaccatcagcgacgaggacaggaaagacgggtttgtcaccaccaggctgacagaagcgcagctggtggcgctgattgaacaggagcgcgggctgttcgtcgccaaacaggcgggcaaggtggtggcgtttgtgatggcggcgtcctggtcgttttggtctccctggccgttattccagcatatgatcggtcggctgggggaatatgaattcgccggccagcggttaaccgtcgataactcttaccaatacgggccgatttgcatcgatgtctcggtgcggggcagcggggtgctggaagcattatttgcgtttgcccgtgaatgcatggcacagcgtttcgatatattggtcacctttgtgaataaaataaatccgcgctcttacgctgcacatagccgtaaattggggctagaggtgctgagtgagtttacctttaacaataacaattattattggatggtctgtacgacgcgaccgcagacagcaacggcggaggaaacagagcgttccgccttgccgcagtaa

SEQ ID NO: 453334 - DNA, 1221 bp, Serratia marcescens
atgccattaagctcagtgcaggcgctgtgtttgctcagtttctttatgtcggatgttcgtgatggactaggcccctttttgggcgtttttttgattaacgaccgctggagcgccgaagatattggctacgtcatgaccgcgggcgggattgcggggctggtggcgacgctgccggcggggattctggccgatgcctccgcgcgtaaacggcttctcgtttcactggcggcgctgctgattatgagcggtacgctgctgctgtggttcttcccccatccgctgatggtgtacgccagccaggtgacggccggggtgtcggcggcgctgatcggcccgctgatggccgggttgacgctgggcctggtcggacagcggctgtttgcccatcagctcgggcgtaacgaggcctacaatcacggcggcaatatgctgtcggcgctgctggcgggcgcggcaagctggttctgggggttaggggccgtctttttactgatgatcgtcatgacctgcggcgcgctgatggcggcgtttgccatccgtgagcaagatatcgatcaccgggtcgcccgcggcctgaagcccgatgaaacgccggcgcagatgccgtcgctggcgacgctggtgaaaatgccggccctgatgttaaccgggctgacgctgctgctgtttcatctctccaatgcggcgcagcttcccatgctgagtatgcaggtcgcctccggggaacaggcccgcgcctttaatccggggctgtacgccgcgatgacggtggtcatcgcccagtgcgtgatgatccccgtcgccttgctggtgtctcgctacgtgcggaaatatggttatcaaaagctgatcctgctggcattaatggtgctcccggtacgcgctatgacggccgcgctatggccgtcgccctgggcggcgatacccgtgcagatttttgacgggctgagcgccggtatcctgggggtcgcggtgccgggatttatcgcctcgctgctcaacggcaccgggcacgttaatgccgggcaggcgctggtgatgctggtgcaggggttcggcgcggcgctcagccccgccgttgcgggcgcgatcgccacgcactattcgtggcgggatgcctttatgagcctcgccggcattgccgtcatggcgctgcttatctggctgacgttttcgggccgcagacggccgcttgccgctgtcggagcgccgcaaaaataa

SEQ ID NO: 453335 - DNA, 987 bp, Serratia marcescens
atgatacatcgtctctctccgtggaatctcggcgcaacgctctatatgcccgccacccggactgatatcgccgacgccgtgatacgcggcaaaatacccggcctgcgttcgctgattatctgccttgaagatgcggtcagcgatgcggatatcccgctcgccttgcaaaaccttaaacagctgatgcaggagctgaatgcggccaaggccgccaaggggaatgacggctggccgctggtgtttatccgcccccggcatgcggaaatgggaaaacggctgatcgagcagtttgatttaaccgccgccgacgggatggtgttgcccaagttcacgcttgcctcactgccggcctggtggacgctgatatcagatacgcatttgtgcctgatgccgacgctggaaaccgcagacgtctttgatatcgtgcaaatgcgtgagctggcgacaacgctggtttcacacccctgccgcggcaggattattgcgctgcgcattggcggcaacgatctgatgaacgtcatctcattacgccggccgcgcaacctgactctctatgacggcccgatgggctacgtgatcaaaatgctggttgccgtgtttggcccgcagggtttttcgctgaccgctcccgtctgcgaacatattgacgattatgcggtcatggccaaagagttatccctggatatctcgcacgggctggtgggtaaaacagcgattcatccggaacagatcggcattattgagcaagcgctgatggtctctgcagacgagcacgcggatgcattgcgcatcctcaataccacacaggccgtatttaaatctcagggcgcgatgtgcgagccggccacgcatcgccgctgggcggccgggatcctgaagcgcgccggcatttatgggctctacggcgagcagggcgggagcgcaacggccgttgacacctccgccctgacggctcacagacaacagcccgtcagcgtgacgtcctga

SEQ ID NO: 453336 - DNA, 1080 bp, Serratia marcescens
atgcggcacattacacctttttccggctcttatttacctgatgacgtgcagtttttgttaaaaccgctggtgatggagatgacgccggtagaaaggaaagaggagctgatccagtcaggccaaaagcattactcggatatgctgagccaggagccggccccgacgccctggcatcttgatctcttctcccaggccctgaagcggggcgccgacaggctggcgagagaagtcacgcaaatcgccatcgaactggcgcaccggttcggtgatgaacccattgttttagtcagcctggtcagggccggtgtcccgctcggcgtcatactgcaccaaacgctgcgggagatgggcaagacatcctatcactatggcatcagcattattcgcgaccgggggattgattcatcagctctgggaatgattgaaggccgtcacggcacgcagggaatagtattcgtcgacggctggacgggaaaaggcgccatcacgggtgaactgatccggactttggctggacgggcgggctatccgcagcagcctcgcctcgtggtgctggccgatccttgcggctgttcatggctggcggccagcgatgatgactggctgataccgttcggcattatgggcgcgccggtctccgggcttatctcacgctcggtatggtccgccaccgggttacacggctgcgtcatttgcgaccatctgcaggaatatgagtgcagccgcatgctggtggacaccgtcgcccgccaccgtaaacaacttgccctatcctcgcttgcgccactgcgctggcgcagggaaaacaatgccgcgctctggcagaccagccgcgatgttatcgcccatcttgccgacgcctacgccgtcgacagcgtaaatcgcatcaagcccggcatcgccgaggccaccagggccgtgctgcgccgcgttccggaccacgtttttgtccgcacgatagacgatcctgacgttgccctgctggtcgctcttgcccgggataaagggatcgccgtgactgaaatgggcaacgccattggccagtacagagccgtcaccatcataaaaaaggttctttga

SEQ ID NO: 453337 - DNA, 774 bp, Serratia marcescens
atgaataaaccggttgttctcagcgatctcgacgacacgcttttccagacccggcgcaaaatggttggcgagctggcgcagcagccttttcgcaccgcggcactcgacaaggatctgcacccgcgcagctttatgaatgaagaacagtccatgctggtggactggttactggcgcaggcggagctcattccggtgacggctcgcggcacagaagaaatcagcagggttaccatccccttccgctcgtggtccatcacgacacatggcgctgtcattctggcgccggacgggacgccggaccaggagtggcaggcaatgatgctgcagaatctggcgccctaccgggaaaggttgttgtcaatgcaacagtccattacccgaatgatggcaaccgcgagcattaacgcctgggccagactcaacgtcgaatatgacaacacgcccatctatctggtgatgaaacaccgggacagcagccgtctcgatgagctgtattccatggctgatgacctcgctcagcgcttctctaccgagggattttacattcaccgtaacggcaataacgtcgcctgggtgcctcagcccgttgagaaagggctggccgccacctggctgttggacaaactcagagcggaacgcggcgttttcccggttatcggccttggcgacagcctcagcgatcatcggtttatgaaactgtgtagctggttcgcgatccctcaccagagccagttcgccgatgccattgcacgacgtattttcggggaaaaataa

SEQ ID NO: 453338 - DNA, 1143 bp, Serratia marcescens
atgtctttaatcactgagggtaccgcttatcgccgggcactgcatagcggtacgattcaggttatcccccagcgcggcgattatgcgcttgagacgctgtttgagattgccgaaagacgaaatccgaaacgggcctttctgttcgtcagcaaggtgctggggaggcatatcccggtggcgccgcgggtaatgcgtcaggtctatcgccagctcgccggccagttccccgcttcactccctgagcctgtgctgttcatcgggatggcggaaacggccgtcggcctgggagccggcgtatttgatgaagtcagacggcaataccgtcatagcgtttacctcacctccacgcgtcacccggtcgagggagagctgctgtgtgaatttaaggaagagcacagccacgctaccgaccatcttatttatctgcccgaatcccctgaaatgcgtcgcagggtagcgaccgcccgcactctggtgctgatcgacgacgaggccacgaccggcaacacctttatcaacctgctgaccgcgttacgcgccacgggaaagtttgcccagttggagcagattgtcgcagtaacgctcaccgactggagcaacgacgcattacgccaacgcagcccgctccccgtcagcgcagtatcactggtcagtggccagtggcgctgggaacccgcgcgggatgcagcggtgccggttatgccctcggtgaatgtcacctcccgcggcgcctggaacattgtgggaaaacagacctggggccgtctgggcatgaccgagcctgccggcgatttcgggcgcaatattacggcgtcatccgcggaacgtatcctggtgctgggaaccggcgagtttgtctgggaaccctacctgcttgcagaacggctggaacaggcaggcgccgccgttgtttacagttcaaccacccgttctcccatcgctaccggctttgccattaagtcagcgattgccttcacagacaactatggcctgggcatcgccaattttgtttataacgtggcccaccagcgctttgaccgcatcctgctttgcatcgagacgcctgcgcaaagtgtggacagcctgctgttaacagcgctggccgacgtggctcccgtggtggaggttgtgacctatgaataa

SEQ ID NO: 453339 - DNA, 582 bp, Serratia marcescens
atggtttcgttaagcaagaatcagactgtgtcactcagtaaacaatcatctgcgttaagccgtttacaattcggactgggttgggatccggttaagaaaaaaggattgctggcaagcctttttggcaagaacgatgagattgatttggacgccagctgtgttcttatggacagcgcaggcaataaaattgacaccatctggtttggcaagcttaaatccagctgcggttctgtcattcatggcggagataatctgaccggggaaggggatggcgacgatgaagtgattaaggtgaatctgagcaagcttcccgccaaggttgaatatcttgccttcaccgtcaacagcttccgcgggcaaaccttcaatgacgtcgacaacgctttttgccgcgtcgtcgatcagtccgatactgaactggctcgttatgcactgaccgagcagggatcgcataccgggattgtgattgcgtcattacgccgtaataacaatagctgggacttcaccgcccacggcaacgccagccgcggccgcacgattgacgatatgcacgatgacatcgtcgccaccgtggtgcgctaa

SEQ ID NO: 453340 - DNA, 1020 bp, Serratia marcescens
atggtgttttacggtcagccccgcaacgatgacgactcaatcagcctggtcaatgaaggccagagcaccctatttaccgtatcgttaaaccggctgcatgccgatgtgcagaaagtggcgtttacggtcacctgtgacggccagcagaccgttgcggcgctgcgtagtctgcgtatcgacgttgagcagggcgcttcatgccttgccggcgggcaggtcgagcttgcggggcgccaggaggcggcgctgatactgggtgagttctatcggcgcaacaatgaatggaaattccgctttgtcgcccaagggtttaacggcgggttgaaaccgcttgccgagcactatggcgtggatatcgctgatgagccgactccggcgcccgctccccccgccgccgcgacgccgccagaaaatacaatcagcctgagtaaagtctctctgaccaaagaaaaaccggcgatcagcctgaccaagcgcgacaatttcggtgagatccgcatcaacctgaactggcaccggggaagcagccggtctggtttggccgggatatttggcgccaaaggcattgacctggatttaggggcgttcgtgaagctccaggacggctataagaccgtcattcaggcattgggcaacgcatttggcagctaccacggcgaaccctacgtgcagttacagggggatgaccgcaccggagacgtttctgacggcgaatggctgcatatcaacggccacgagtggaaacacattcatgaagtactgatttacgcctttatctatgagggcgttcccagctgggataagaccgatggcgtcgtcacgattcatgtgccggatcagccgccgatcgaaacccggctcaccgaaggtgaaaaccgtcgcaccctgtgcgcgattgccagactcgttaacgagcagggttctatcagagttgagcgcatcaatcagtattttaaagggcagcaggagatggacagggcgtttaactgggggtttcgttggaccgccggttctaaataa

SEQ ID NO: 453341 - DNA, 456 bp, Serratia marcescens
atgggctttattggcaaagtaaaaggcgtattcaattcgggtcgtgaagaattgacgcgtcaggttggccgttataagaacaaaaagtttatgcagggcacggttgccatttgcgcacgcattgccgtggcgagtgacggcgtaagcgctgaagaaaaacagaaaatgatgggttttctgcgttcctccgaagaactgaaagttttcgacaccaacgaagtgatcgaatttttcaataaattggtctccagcttcgatttcgatatggagatcggcaaaggggaaaccatgaagtatgcccttgcacttaaagatcagcctgaggcggcgcagctggcgttgcgtgtcggcatcgccgttgccaaaagcgacggcaattttgatcgggatgagcaaacggccgtgcgtgaaatcgccgttgcgttgggcttctccccggcagaatttggtctctga

SEQ ID NO: 453342 - DNA, 681 bp, Serratia marcescens
atgccacaaacgattaaagcaaaaagtcatgtacttgctgtctttgactttgacggtaccttgaccagacatgatagttttctgccatttctacgcttcgcatttggcaaacgacgctttatcaaaaacatgaccaagctcgttatcccgacgctcagatgcatgcggcgaaaactcacccgtgatgagcttaaagatgtactgatcaccctgtttcttaccgacgttgatgaggcatggttaaaggccaaagccgaagaatactgcgatcggtattggacacaccttatgcgcccaaaaggtttgatggccgttgccgccgaggtctccgccggtgccgaagtcacactatgttcggcatcgccaatgctcgtcctccagccctttgccaaccgcctgggcatcaaacttatcggtacgcagctggagagcgttaacggcgtacttaccggccgtattgttggccataactgtcgctgtattcagaaaatccgccggcttgaatcaatctatggttctctcagcaactttcaccttaaggcatggggcgactcgcgcggggattatgaattgttggccgccgcaaaggatgcccactggcgacatttccatcccgtctggcgctccaggaaacgtccgctcgccccgctgcataccaaacatcttggtgaccagcgataa

SEQ ID NO: 453343 - DNA, 1236 bp, Serratia marcescens
atggtttctgttcctgcgagtccctccccgttgagccggcaacgattattcgccctgacggccctgttgctcggcgcgtcgctgccgacctccaactttctgatgaacgtcgctctgggtctgacgctggtttgcctgctgtggcaacgggatggccggcagtggcaggccgtggcgaggcagcccctggtatggctgccggcgctgatcgttgcgttgttggcactgtcgctgctgacgcacgactatgcgtacgggacggcgatggtcggcaagtataaaaagctgctgtatgtgctgccgctggcgctgttttttctggccgatcgccgcctgccggcgcagtttctccgcggctttttgtgggccaacgcgctgatactggccatcagcctggccggcggcgccgggctggcgacgcgctggggcatcagccctgacaacccgacggtgtttaagctgcaaattacccagaacgtctttatggcgctggccgcgctggtctggctgacgcgcgccgttgccggccatggcgcacggcgctggcagtacggcgcgctgacgctgctggcggcggccaatgtgctgctgatggtgcagggccgcacgggctatgtggcgctggtggttggtgcgggcgtctggctgctgttgacgctgcgccgccgccagcggatggcggttatcgcctgcggcgtcgtggccgtcgccatgctggcgctgatccctaatctggcgatggagcgattgacgttgggggtgcagcaggtgcggaattgcgtgctggcccccgcagcaacggcttatcaagcctgcgataactcgatgggacagcgcaccgcctttgcccgcgaatcgtggcggctgattcaacaggcgccgctgctgggcaacggcgccggcagtttctggtacggcaatgcgcagaccggctacagcgtgcataatccgcacaatgagtatctgctggcaacggtgcaaaacggcctgctgggcctgacgctatttcttgcctggatgtggtgctgctaccgcgtcgcctggcggcagccgacggcgcgccgtaacctgctggtggcggtgctgtgcagctatatggcctgccacctgtttaactcgttcctgctggactcctccgaagggcacctgtttgtggtgatagcggcgatgctggccgggtgggcgctgacgccgcgggagaacacgcctcaggacattcattacatgaataagtga

SEQ ID NO: 453344 - DNA, 9936 bp, Serratia marcescens
atgaataaacattgctatcgcctgatctttagccgcactcacggggagctgcgggtggtttccgagctggcgcgcagctgcagcaccgaaccgggccaaagccgcggcgggcatgcgccgcgcctgtgggtgacggtgcgccgtgcggtgtggctgttggggctggcgctgttcgccggcccggcgctggcgggcggcatcgtcgccgacggtccggcggggcagcgtcctgaggtgatcgccacccagaacgggctgccgcagatcaatatcaccgcgcccaaccaggccggggtgtcgcataacaaatataaacagttcgacgtcgaccggcagggggcgatcctcaataactcggcgacgatgacctcaacccagctggggggcatgatccagggcaacccgaacctgaaccccaacggcgcgccggcgcgggtgatcctgaacgaagtcaacagcaacaaccccagccagctgcgcggctttttagaagtggcgggcggccgggcgcaggtgatcgtcgccaacccggcggggattgtctgtaacggctgcggcaccatcaacgccgggcgcatgacgctgaccaccggtaagccgcagctgaacgccgacggcagcctgggcggttatcaggtggagcgcggcatggtgcgcatcgaaggcggcggcctgaacggcgacgcccgccacgacaccgaatatgtcgatattctggcgcgcgcggtggaagtgaacgccggcgtctgggccaaacaggggctgaaggtggtggccgggcgcaaccgcgtcagcgccgacggcagcgcggtaacgccgctggccgccgacgataaaaaaccggaactggcgatcgatatgggccagatgggcggcatgtacagcggctatatccagatgatcggcaccgaagcgggcgtcggcgtgcgcaatcagggcggccatctgcaggcgggcaaaacgctgaccgtcagcagcgaaggcaaactgagctggcagccggcaaaacaggaggcggtcacccaggccggcggcgatatccaactggccgcccgcgacgacattgactaccacggcaagctgcacagcggcggcacgctctcggtgcagagccgtgacggcgagctgcgccagtccggcacgctggcggcggccggcgacgtgcggcttaacgccgcgcgcggcatccgcagcagcggcaacctgctggccggcagcgatgttaacagccaactggtgcgcgaggcggatctgaccctggccagccagggcgaagtgcaggccagcggcaaattactgagtaaaaaaacgctgaaggtcagcgggcggcaggccgacctcagccaggcgacgctcagcgcgcgccgcactgaggtcagcgccgcggcaggcggcgtagcgctgcggcaagccacgctggacagtcgggagctggcgctcagcgcgacgggcgatatcgacgcgcagcaggcgcgcatcaaggccgggcgctgggacgtcagcggcaacagcctgttcggccaaggggcgatctggtcgcagagcggcgacggcgacagccgttttgcgctgaacggcatattggataacagcgacggcagcattgaggcccggggactgcagctggataccgcctcgctgaacaaccagcgcgggcgtctggtggcgctggacggtgcggcgcagcgctggcgggtcggcggcctactggataaccgcggcggcgtactgggcggcaacggtagcctgacgctgacggccggcgagctgcacaaccagagcggcgtggtgcagagccagtcggcgctggatcttcgcgcggcggcggggatcgacaacgatcgcggccagctgctggccggccggcagctgacgctgaacgccggcggcgcgctgaccaaccgcgacggtgatatcaacggcacagggctgcagctggcggcgcacagcctggacaacgcgcagggccggctggtcagccagagtgggctgcagctgacggcgcacacagggctggacaaccggcaggggctgctggaagcgggcgatgaattaacgattaacagcgcgggcgactgggataaccgcggcgggcgcgccaccggcggccggcgggcgaccgttaccgcccgccagatcaataacgacggcggcaggctgcagtccggcggcgcgctgacgctcaacagcgccggcaacgtcagcaaccagggcgggctgttaacggcgcagcaggggctgagctggcagggcgctgcaggcagccggctgaacaacgacggcggcaaggtgctcagcgacggcgatctgtcgctgcagggcggcagcctgagcaaccggcagcaggggctggtgcagagccggcaggcgctgacgctggctctggacggcggctgggataaccgggacggcacgctgctcggcggcggagcgacccgggtgcgcgccgacagcctgctgaacgccggcggcgcggtgcagtcgctggacgcgctggatatgcagtttacccgccagctggataacggcgacggcaagattttcagcaagctgtcacagaccctgcgggcggaagatctgctgaaccatcagggctggatgggcagccagggcggctggtccgccgtcgcccggcgttttgacaaccggggcggcagcgtccaaagccagcaggatgcgcagctagcgagcgccgggctggacaatcagggcggcagcatccagtcggccggggcgctggcgctgcatatcggccaggatgtggataaccgcggcggtaagctcagcgcgcaggggcagctggcgctgcgcggcgcgaacgcgggtgaggccgccggcacgctgcacaacgcggcgggtcagctgctggccggtgacgcgctcagcgtggcggcgcagagcctggacaaccagcagggcggcctgctttacagccagcgggcgatgcggctgaacctgaacggcgcgctggataaccgccaagggcggctgcagagcggggagcagctgcagctcgacgcgcagtcgctgcttaacgagggcggcgcgctggatggccagcagcaggtggcattgcggatcctggggctgctggacaatacccgcggcgcgatcagaagcaacggcgcgcagcaggttagcgcgcagcaggtcgagaaccgcgaaggggtgttcagcagccgtggctcgctggcgctgagcgccgggcggctggataacctgaacggcacgctgattggtcagggcgacggcgactaccgtatcgacctgctgaataaccagcagggcaagatccacagcggtcaggcgctgacgctgcgcggccagcggctgaacaaccagggcgggcagctggtttccaccggcgcccaacggctggaggtggcgcagatcgataaccgcggcggcgccgtcaccagccaggatcggctgtcgctgcagagcagcggcctgaacaaccgcgacggcggcctgctgatgggcacgacgcacaccgacgtaagcgcgcagacgctggataacggcggcggccgcctgcaaagcgccggttcgctgacgctgtcgctgctggatacgctgaacaaccagcagggacgcgtagtggccaacggcgcgctggcgattaacggccagcagcgcgccgtctccgctctgcagctgctgaaccagggcgggctgatccagagcggcgccacgctggcggtggacgccggcacgctggacaaccagggcggcacgctgctgagccagcaggcgctgacgctgtcgctgcagcaggattacacccagcgcgccggcgatacgctcagcagcaacgaagcgctgacgctgacgctggccggcggcctgaccaacctgacggagtggctgctgccgggcagcctgaccgtcaacggcacgcatatcaccaaccttggctcgctggtgggcaaaacgctgcggctgacgaccggcgcgctgctgaacaaggggcggctggaggctgacagcatgacggtcgacgccgacacgctggataacctggcgacggtgatgggcgatgacattacgctgcgcgctaaaacgatcgacaaccacggtcgcgatgcggtgatcgccgccaccgagcggctgcatctgcaggccggcgaacgcctgaccaaccgcgacggcagcctgatctacagcgccggcagcctgtatttgggcagcggcgatctgattgagaaccgggcgagcaatatcgaggcggacggcgacgtgacggtggaggccaagcggctggacaacctgcgtgaagggctggagattgagcgcgaggcggaaagcagcgactacaagtggcaccgttacaactactactggcgttcttacggctccaaggtcaaccccgacaaagagaccatggcgccgaccacgcagaacctgacgttccgcgatgacgcggcggcggacagcaacccttacggcactctgctggcgattgacccggcgggcaaacgcgcgcaggtgcgggtaaaaagcgcgcagggagagatgctggaggtctgggtaaactacctggcgctgaagccgaacgacgacggcggctacgccatgaccttctacgagacgcgcggcttccggcagaacagcgtgccgacgccgtaccacaatacggtgtggcgcgagcacgatcgcggacgtctggaacagtgggacccggaaaagcacctcgatatcatcaacgcgccttttgttaccgattacagcaacttccgcgagcgcaccactaccggcacggtcacgcgcgaccggctggtttccgccggcatcggcgggcagatcctggcgggcggcaatatggtgctgcgcatcgccagccagctgttgaacgacgccagcaccatcgccgccaacggcaacctgacgattgacggcgacggcaaggtgatcaaccgcggctattcggtcaatgagcggcgtcaggaatatatcgtcgatcactatgacaaggacacccaccactggtacccgacgtttaaccgcgacgagaccacggcgctgaccaccattgacggcattatcagcggcaacggcagcgtcgccattcgcggcgcaagcattgagaacaccacggtcaaccaggcgcagattggcagcgtggaggcggcgcagaaggcggcggaggccgagcgtgcggagctggagcgcaatccgctggcggtgacggtcgacggcgtggagtggcagtccggcgatacgcagctgacccccggcggccggccgctgacgccgggcgagctggcgctgaccgacaagcagcatctgggcgacgtggcgaccgcgatcccggacaacggcctgttccgtcagcatctggaagcggacagcccgtatctggtggtgaccgacgagcgtttcaccagccgcagcaaatttatcagcagcgactatatgctgcagcgggtgggctacgacccggcgcaggtgcataagcgcctgggcgacggcttctatgagcagcgcctggtgcgcgagcagatgctgaagctgaccggccggccgtcggtgcgcggcgaagacgcgatggcgcagtaccagcgcctgatgaacaacggcatcaaggtggcgcaggacttccagctggtgccgggcgtggcgctgcgccctgagcagattgcggcgctgacgcaggatatcgtctggctggtgagtgaaacggtgcagaccgccaatggcccgcagacggtatgggtgccgaaggtctatctggccaatgacacgctgcgcctgaacggcgacggcgcgctgatcgccggcggcgagctgcagctgtcggcgggcagcatcaacaacgccggcaatctgtttgccgacaaagcgctgaccatcgacgccggtcagtttatgcatcagagcggcgatatccgcgccgacagcatcaacgtgcaggcggacagcctgaccatgagcaccaacctgcaggacgcgctgcgtcaggcgtcgatgagcgccaatgacatcagcctgagcggcggcgatatccgcctgcagggggcgaagctggacgcgacgcagaacctgagcctgagcgcgcgcaacaatctggagatcggcgccgccagaagcagccacacggcggatctgcaggtgatttccggcgcgatgggcaaccgcaccagcggcgggatggaagaggccggctcgcggatggcgcaggtcagcggcgagtggcagcaggcgcagggcagcacgctcagcgccggcaacaacctgacgctgaaggccgggcgggatattacgctgcagggcagccaggccaaggccggcggccagctcggcgtgcaggcgggcggcgacgttaaactgctggcggagagcaccaccaacagcacgcagctgacggccaacagccgcacctcctcggtgaagaacagccgtgaggaagagcgcctgcagctcagcaccctgagcggcgaccagggcgtgacgctgacggcgggcaacaacctgctggcggagggcgcgcaggttgacagccaggaaggaggcatcggcctgagcgggcagaacgtgaccatcaaagaggcgcggcagcaggttaacgaccgcgacagcgagaacaaacgggtcggcaagaccaagagccggcgtgaggaagagagttcgcgcagcgacgcggtgggcagcaccttcagcggccagagcggcgtgacggtggtggcgcgcgaaggggacgtgacggtcaccggcagcacgctgcacagcgaggatggggcgatcgccctgcaggcgaaaaatgacgttacgctgaacagcgccaccgaaagcgaggcgacgtactcggaggagcgttccgagaagaaaaaaaggttctggaggaagcaaagcagccgcacggtgaaagacgaccgggtgacgcgcgagaagggcagcctgctgagcggcgacagcgtcagcatcagcgctggcaacgatctgacggtgagcggttcggcgattgccgccgaccatgacgtcaatctgcaggcgggcaacaacgtcgatatttccgccgccaccgagaccgatgcgcactacctgttggaagagaagaaaaagaaagggctgctcagcggcggcggactgggcttcaccatcggcagccagtccagccggcatcagattgacgagaagggcaccacccagagccagagcgtcagcacggtgggcagcaatcagggcaacgtgaccatcagcgcgggcaagcagctgcatatcggcggtgccgatctggtggccggcaaggatatgaccctgagcggcgacagcgtgcagatcgacccgggctacgaccagcgcacccgtacggaaacctttgagaccaagcagagcgggctgagcgtggcgctgtcgggcgcggtgggcagcgcgctgaataccgcggtcagcaccgcccagcaggcgcgcaaagagagcagcggccgcctgcaggcgctgcagggcaccaaggcggcgctgtccggcgtacaggcgatgcaggccaatgagcgggtcggactggaagacggtgaaaaaggcagcggctttgcggtgagcgtatcgctcggcagccagaagtcttcatcgacgcagaagcaggaacagagcatggccagcggttcaacgctgaacgccggcaataatctgaaggtgaccgccacgggcaaacacggcgaggcgggcagcggcgatattgctatcggcggcagtcagctgaaagccgggggcgatgtaacgctggacgcccagcgcgacctgctgctgagcggcgcggcgaacatgcagaagaccgagggcagcaacaagagcagcggcggcagcgttgggatgagcctgggcgtgggcaagaacagcggcctgagcatcttcgccaacgccaactcgagcaagggttcggaacacggagatggcacaagctggaacgagaccactatagacagcggcaacaaggtcacgttgcacagcgggcgcgacaccacgctgaagggcgcgcaggtgagcggcgagcaagtgagtgcggacgtcgggcgcaacctgacgttgcagagccagcaggacagcgatcgctatgacgcgaagcagaccagcgtcagcggcggggtgagtgtgccgatcggtgcgggcagtggttcagtgaacctgagcgccagccgcgacaaactgcacagcaattacgacagcgtgcaggaacagacggggatctttgccggcaagggcggttttgatgtcaaggtgggcgagcacacccagctggacggggcagtgttagccagtacggcggacaaggaaaagaatcgtctggagacggggacgctggggtggagcgacatccacaacaaggcggactttaaggccgagcacagcggcggttcgctgagcaccggcggcccggtgggtaaagatttgctgaccaacatggcgggcggcatgctgtcgggtgctaataacagcggtcatgcggaaggcaccaccaaggcggcggtgagcgaggggacgattgccattcgcgagcaggataaacagcagcaggacgtggcggaactgagccgggatacggagaatgccaacggcagcatcgggccgatctttgataaagagaaggagcagaaccggctgcgggaagcgcagctgattggcgagattggcggtatggcgatggacgtcatcagcacgcagggcgatcttaacggcctgaaggcggcgaaggagaaacatccgggatggagtgcggataagctgcgggagacgaaagagtaccaggcggcgatgaaggagtacggcacgggcagcgatctgcataaggcggcgcaggcgttgaccggcgcgctgacggcgctggcgggtaacaacctggcaggggcgctggcaagcggcgcgtcgccgtacctggcaacggaaatcaagaagctgacgaccaatcagcagaccggtgaggtgaatgttacggcgaatgcgatggcgcacgcggtgctgggggcggtgaccgctcaactgaacaaccagtcggcggtagccggcgggttgggggccggtggcggcgaactggctgcgcggtatatcgccgatcagctgttcccgggcaagaaactgagtgaattgagcgaaaacgagaagcagcaggtgagcgcgctgagccagctggcatcggggcttgcaggaggactggcgacaggcgatactgcaggtggcgtgacggcggcgcagaccgggaagaatgcggttgagaataatgcgctgaacccgaacgacttcggtaagggcatggcggacatagggatgtcacaaacctcactcggtgcttccatgttgcaaagtggcgcttcaccggatgaaatcgcagcagctctggtcaagaacgcccaaggagatatgccagaaggtcaggatgcagttaaaggtctgttgagcgcctggggcgagttcttcggggtgccggtcagtgcattaactgctgatggagaaatgacgccgcaaagagcggcggagatcgtggcaagtggtgtgccgacgagtgaagctaagttagttcagtatgtggcggcgaaagctgttctgacggtaacgaagacattaagtacgggctctacaaatgccgctgaaaatgcgaccaaaacagttattgattccaagaagtttgattatctctttggtaatgtgaaaagtagtgagcataacgctgatcgctctacccaattggctcagacaatgaaccgcttgggattagaaaccaatgagaaaggggcaagtgtacttaccgaacacttaaagcaggtagtgaatacgaagggtaatgttgtagatacctatacaaaaggaaatcaagcctttgaagtgcgggagtcattgctttttggtccttcaggaaaggcggctaaattagaaactgcttttgagatcatgcctgatggctctcgtagatttgtcacaactattcctaaagatggtaaaaagtaa

SEQ ID NO: 453345 - DNA, 345 bp, Serratia marcescens
atggagaatgctatccctatgaaaaaaaatgagatatatgtaaaaatgttatctctttccttgccttacatcaggaatgtccagtcgttagataaaaaggataaaggtcgagatatatcgtgctattttgaagctgaactagtgcataatataatgcatacattactaatttcggaatttgttgagcatgatttatggttcttaaataatcaggctaaatattattttgaaaaatgtaacgaggatatatcacctaattataaccaacacgtcgaatatattagagccttattcaaaatggtgcctgatagtttaaaatctaagttgttatggcaaggtccttga

SEQ ID NO: 453346 - DNA, 687 bp, Serratia marcescens
atgctggggcagtatatggcgcaaaatggtgcctcggcggcagaaattgcgcaggctgaagtttttttttgtggaagtgtcagtaaaatcaaaattttatgttttgatttaaaattaaatgataaggatgtttatatgaaatatggtttaatttttatgttgcctgctttttttcttactggatgctcagtagatgtaagcagttctatgcctgattatttggggagagataaagctttcattcgagtagacaactctttccagccaacgccttttcgattggagaaaatgttgtctgatgaaaggtgtatgaaatctgaaggtgtatacggattaacatcaaaagttgctgttatgggcattaaaagcagttattctaaaagagtagatggagctgcgccaccttctcaatcatttttgaatagaggctatcttgagtactctatccaaggtggaaaagcatataaaatatggtggcgtcacgatgaaagaagtatgtatggtatagatcttggtcggacattttcaaatagctttatggctaaagatggacatacctatgagattaaaacaaaaggtaatgatatcgttatatacgatgtttcggaaggaaaagaagcacccagcgtcgaaattaaagagtgcgcttatgacgtaacaatgctgggtaaaaaagaatatttgtaa

SEQ ID NO: 453347 - DNA, 1533 bp, Serratia marcescens
gtgatcgccggcgccgcgctgttttttatttacgccgccagcgtcttttgcctgtggggcatcggcgccgcgctgattgacccgccgtggcaggcgctgctgctgtttccgttcggcctgcggatgggcattctgctgcaaagcccgcgccgctactggccgggcattctgctggccgacgtgctgctgatactgctgctggcggatcagttcggcgcgacgcgggcgctgtgggcgtcgctgacggtgctggcgctgacggtgctgctgagctgtgcggcctctccctggctattgcgccatcagcagagcgacagcgagtggcgctggccgctgcagcagggcgcggtgctggcgttggccgccgtgctgcaggcggcggtgtggcagctgtttagcggcgacggcgcgcgggcgctgctgctggggctgacgggcggcttcaccatcgcgccgacctgtctgctgctgtggcactatctggcgcgtcagatctgggtgccgctggagccggggctgatccataagccggtgcggctgcggctgcgccatctggcgatgtatctgctgctgtttgccctgagcatctggctgcagcagcaggtgaacgtcgccgagctgcggcggtttgcgccgttctgtctggcgatccccatcgtgtttatggcctaccgctatggctggcagggcgccttgctggcgacgctgctgaacggcgtggtgctgatggccggcgaaccgccgcgcccggacgcccaccgcgatttactgctgtcgctgctggcgcagagcctgaccggcctgctgctgggggccggcattcagcgtcagcgggagctgaatcagcagctgcggcggcggctggcggaaaaccggcagctggcgcgggcgctggtgactgccgaagaacggaccaggcgcgaggtggcgcgcgagctgcatgacgaagtggggcaaaacgttaccgtgatccgcacccaggccagcattgtgaagcggctggcgccgcagccgcaggtgcaggcctgcgcagacactatcgatgcgttggcgctgcgggtgtacgacggcgttcacgacgtgctggcccagctgtggccggcggcgctgaacaacctgccgctgtcggcggcggtggcggcgatgctgcgcgatcagctgccgcaggacgactcggtgaccggcgtactgctgtggcaggtgccggaaccggcgctggacgacacgctgaaaatcaccctgtaccgcatctgccaggagggggtgaccaacgtgcgccgccacgccgacgccagccgcatcgagctgacggcgcggctgcatacgccggcggacggacaggcgcaggttgaactgacgctgcgcgacaacggcgtcggtatcgatctggcgcgtcatgagccgggctatggcctgcgcggcatgcgggagcgcgtcagcgcgctgggcggcacgctgcggctgacggtggagcagggcctctgcctgcatgtgatcttacccacagtttcgccggagaagcggcaaaactag

SEQ ID NO: 453348 - DNA, 1608 bp, Serratia marcescens
atgacgagttccttgaccaaatcggggatgctgaaattcggtataggactggtggcgctgaccgtcgccgccagcgtacaggcaaaaacgctggtttactgttctgaaggttcgccggaaggctttaacccgcagctgttcacctccggcaccacctatgacgccagctcggtgccgatctataaccgcctggtggagttcaagctcggcaccaccgaaatcgagccgggcctggccgaaaaatgggacgtcagcgaagacggcaaaacctacaccttccatctgcgtaaaggcgtgaagtggcaaagcagcaagctcttcaagccgacgcgcgagtttaacgccgacgacgtggtttactccttcgaacgccagctggatgcaaaacatccgtaccataaagtctccggcggcagctatgagtacttccagggcatgggcatgcaggatctgatcgccaaggtggaaaaggtggacgatcacaccgtgcgctttgtgctgacccgtccggaagcgccgttcctggccgacctggggatggacttcgcctccattctgtcggcggaatatgcggacaacatgatgaaagccggcacgccggaaaaggtcgacctcaacccggtcggcaccggcccgttccagatgatgcagtaccagaaagactcgcgcatcctgtataaggcgttcgacggctactggggcaccaagccgaagatcgaccgcctggtgttctccatcaccccggacgcctcggtgcgttacgccaagctgcagaaaaacgaatgtcaggtgatgccgtacccgaacccggctgacctggcgcgcatgaagcaggacaaatcgatcaaccttatggaacagccggggctgaacgtcggctacgtgtcgttcaacgtcgagaaaaagccgctggataacgtgaaggtgcgtcaggcgctgaccatggcggtcaacaagcaggccattatcgatgcggtctatcagggcgccggtcaggcggcgaagaacctgatcccgccgaccatgtggggttataacgacgcggtgaaggattacgcctacgacccggaaaaggccaaggcgctgctgaaagaggccggtatggccgacggcttcaccattgacctgtgggcgatgccggtacagcgtccgtacaacccgaacgcccgccgcatggcggagatgattcagtccgactgggcgaagatcggcgtgaaggcgaaaatcgtttcctatgagtggggcgaatacctcaagcgcgccaaagacggtgagcaccagacggtgatgatgggctggaccggcgacaacggggacccggataacttcttcgccaccctgttcagctgcgccgcggcgaaagacggctccaactactcgcgctggtgcgataagtcgttcgaagcgctgattcagccggcgcgcgccgcctctgaccataacaagcgtatcgaactctacaagcaggcgcaggtggtgatgcacgaccaggcgccggcgctgattatcgcccactccaccgtgttcgagcctgtgcgtaaagaagttaaaggctacgtggtggatccgctgggtaaacatcacttcgagaacgtatccctggattaa

SEQ ID NO: 453349 - DNA, 1662 bp, Serratia marcescens
atgaacgataaaaacacgacgcacaccacgcacgcgctgtggcgctactggcgcggtctcggcggctggaactactattttctgattaaattcggcctgctgtggttcggctatctgaacttccacccgctggccaacctggtgtttatggccttcctgctgatgccgatcccctcactgcggctgcaccgctggcgtcactggctggcggtgccgatcggcatcgcgctgttttatcacgacacctggctgccgggcctcagcagcattctcagccagggctcgcagctggccggcttcagcgccaactacctgctggaactggtaacgcgctttatcaactggcagatggtcggcgcggcctttgtggcgctgatcggctacctgttcctatcgcagtgggtccgcgtgacggtgtttaccgtcgcggcgctggtgtggctcaatctgctggcggtcggcggcccggcgttttcgctgctgccgtccgctcccagcaccgccgccacgccgccgccttcagccacgccgacacccggcgccggcgaggccgacggtcagcagcccgtcgccagcgggccgccgaccagcgccaatctgacggcctacctcgaccagttctatcagctggagaaaaagcgcgccaccgccttcccggcgtcgctgccggccgatgcccagccgttcgacctgctggtgatcaatatctgctcgctggcctggtcagacattgaggcctccgggctgcagaaccacccgctgtggtccaaaatggacatcatgttcgacaacttcaactcggcgaccgcctacagcggcccggcgtcgattcgtctgctgcgcgccagctgcggccagacgtcgcaccgcgatctgtaccagccggtgaaccagcagtgctatctgtttgataatctggcgaaactgggattcaaagagcagctgatgatggaccactccggcgtgttcggcaactacctaaaagagctgcgcgagcagggcgatatgcaggcgccgctgatgtcgcaggccggcatcggcaatgagctggcctcgtttgacggcgaaccgatttacaacgacctgcagctgctgaaccgctggctggagcagcagcaaaacggcggcgaggcgcgcaccgcgaccttcttcaacctgattccgctgcacgacggcaaccgcgccgtcggctcgaaaaagaccgccgaatacgcgccgcgcgcgcagcagctgttcgatcagctgaacaccttcctcgaccagctggagaaatccggccgtaaagtgatggtggttatcgtgccggagcacggcgcggcgctggtcggcgacaaaatgcagatgtccggcctgcgcgatatccccagcccgagcatcacccatattccggtcggcattaagctggtcggcatgagcgcggcgcaccccggcagcccgctgcaggtgaaaacgccaagcagctatctggcgatttccgaactggtggcgcgcctggtcgacggcaaagccttcagcgccgatcgggtggactggcagacgctgacccagggcctgccgcagaccgcgcccatttcagaaaatgataatgcggtggtgatggagtatcagggaaaaatctatattcgccttaacggcggcgactgggtgccttacccgcaataa

SEQ ID NO: 453350 - DNA, 204 bp, Serratia marcescens
atgatcaatctggacgacattgtgcagctggtgctgctgtgcgccattatctttcttcccctgggctatgcgctgcgccgccgctttccccacggctggcggaatatgaaaaaccgtgttctttcaccgcgttacctgcagtcggccggactgtggtcgcgcgacggttccacctctcagattaagcgtaagaaaccgcaatga

SEQ ID NO: 453351 - DNA, 1500 bp, Serratia marcescens
atgcagtcccctggattttattggattaatagcgaccgccaactcgacgccaacctgctttgccgtcagatcatcgccgcgcaatccgccgacagccgcgccgccttaatctgcagcggcgagcgacccgacgcgctgctgaatgacctggcgtcgccggcgctgcacaagctgccgctgtacaccctgccggaaaaaaaagccgcgctgctgagcctcagcgacgatctgacgcgcgcgctgaaaccgcgcaaccgcctgctgatcctgctggcccacgccagcctgtggcagaccttcacccgcgacgaaattcacgcctggctgcgcgaactgggccactggctgcgccgccgccagtgcaccctggtggtgctcagccacggcaacggcgtgaataaactgcgtggccagctggcggcgcagcaccgcgtgctggacgggctagccaacctgcagtggcagcaggacagcgcgcagtacctggtgaactggtggggtacggcaagcggcgtcaacgccaaccagctgctgacgctgtacgccgcgcagcagggctggcagggggaagacgaccaaaaacccgttcccagcgccgcgcgcaacgacgaccacctctatctggcggagcagcgcgtgctggaaggcgcgccgccgctgtcagccaactggcagctgctggcaaacaacgcccaactggcgcagcagggcatgctgatgctgtccgccacgctggtgttcgccctgtaccacagcgaagagattgagacgctggcgcagcagatccacagcctgcgccggcagcgcggcaacgggttgaaaatcgtggtgcgcgaaatgcgcgccagcctgcgctacagcgacgaacgcctgctgctggcctgcggcgccaacctaatcgtaccgcacgtcgcgccgctgtcgcgttttctcaccatgctggaaggcattcaggggcagcgcttctcgcgccacgtgccgacggatatcgacgtgctgctgtccggcctgcgtccgctgcagctgaagggctacctgcgtcccgatgacttcaccgcggcggtgcattcgctgatgggcaataccctgctgccggaagacggcaaaggcgtgatggtggcgctgcgtccggcgccggggctgcgcgccgagcaggcgatgacgctgtgtcagctgcgccgcttcggcgacgtgatgaccgtagcgcagggacggctgctgctgttcctttccacctgccgcatcaacgacctggacaccgcgctgcggcatatcctgcgcctgccggtggaggaagccttcagcaaccgcgtggtgtggtatcaggacgccgatatcaactcggaaatcaaacgcatggcgcagggcatcgccgcccccgcccggcaggaaacgccgatcgtcgccggcgcggcggcgaaaagcgcggacgccgcgccgcccgagcgccgccggccggtcgccatcaccctgtccgccgctcaggagaaaccggcatga

SEQ ID NO: 453352 - DNA, 723 bp, Serratia marcescens
atgattctccgcgctaccgtcgacccgctaacctgggaaagcgactatttccgcattaacagcgccaagctgaatattgccgactcggcaccgccgttgaccgccgccgcgctggatcgctttgcgctggttcaggccaaaatccccgctcaccgtctcgatcttgccgatgcgctgaccgcgttgggttttcagctggcggagggcgaggtcgatctggttatcaatattggcacggaacgtgcttctaaaccggcgtctggcgtacgtccggcgacggtggccgatattgccgtgttacgggcggcggccgggcaggcgttcgctgccagtcgtttccgcgcgccctggtatcagccggcggacagcggacggttttacgccacctggattgagaaggcggtgcttggcaccttcgaccatctttgcctgctggcgctggatgatcacgggcagccggaaggttttgtcagcctgcgtgatattggcagcggcgaggcgcgtatcggcctgctggccgcgtttcccggcgccggcggcaggggtatcggcgcccggctgatggctgcggccatcggctggtgtcagcagcagcaattacagcgcctgcgggtggcgacacagataagtaatagcgccgcgctacggctctatcaacggcacggtgccgttatcgacagcaccgcgtattggttatacagaggttcacatgattccatttaa

SEQ ID NO: 453353 - DNA, 1086 bp, Serratia marcescens
atgaccacactgattcacgtattgggatctgatatcccgcaccataatcagacggtgctgcgcttttttaacgacgtgctggccactcagctgccgtcgccgcaggtaaaccggtttatggtcgccgccaaagatgtggccgcgctgggcgagttcccggcgttgacgattgacagctatccggataagaaaagcctggcggaggcggtgatcgcctgcgccaaggccgaccgcagccgccgttttttctggcacgggcagtttaacccgacgctgtggctggcgctgctgagcggcaaaatcaagccgcagcaggtcagctggcatatctggggggccgatctgtatgaaaatgccaccagctggaaattccggctgttctatctgctgcgccgggtggcgcagggacgggtggggcacgtgttcgccacgcgcggcgatctgattcactatcagcagcgccatgcgcgggtgccggcgtcgctgctttacttcccgacgcggatggatccggcgctgaccggcgttgaggtcgagaagaacgtcgccgggccgatgaccattctggtcggcaactccggcgaccgcaccaatcgacatatcgaagcgctgcacgcgattcatcagcagttcggcgataatgtgcgggtgattgtgccgatgggctatccggccaataacgacgactatatcgggcaggtgcgcagcgccggcctgcagctgtttggcgaaagaaatctgcagctgctcacccagcaggtggcgtttgacgattacctgaatattctgcgcgagtgcgatctcggctactttatcttcgaccgccagcagggcatcggcacgctctgcctgctgattcagttcggcgtgccgtttgtgctcagccggcagaacccgttctggcaggatctggccgaacagcgcctgccggtgctgttttacggtgatacgctggatgaggcggtggtgcgcgaagcgcagcgccagctggcgtcggtggacaagcaggatatcgccttctttaacccgaactatattgacggctggcggcaggcgttggcgctggcggcgggagaaacggcatga

SEQ ID NO: 453354 - DNA, 432 bp, Serratia marcescens
atgttaaccacccgcactgccacgctggctgagatccagcagctctatcagcacatccctgaatttaacgccgcccaccgcctgcaggatctgcagctgcgcatcggcgacgcgatgcattacgcgctgattgccgagctggacggtcagccggccggttttaaactgggctatcaaaccggtgacgacaccttctacagctggctgggcggcgtgctgcccgcctttcgccgccgcggcgtcgccgggcggctgctggaggagcaggagcgctgggcgcacacgcatgggttcctccggctgacggtgaaaacgcgcaaccagttccgcggcatgctgatgctgctgatcgctcgtcactatcagattattacgctggaaaagaagggcgaagtggctgattatcggctattactggaaaaaacgctgtga

SEQ ID NO: 453355 - DNA, 330 bp, Serratia marcescens
atgatgaaagacaaactctggggcatcgtgctcctgctgctggcggccgcaccggcggcggcggaaaacggcgtcacaacgctgagcgggcagcagcagttcctcaatcagcgtacgcaacaacagcagcagcaacgggtgctgaacaatcagcagctggatcagcgccgcctgcagcagcagcgacagtttgacaacaatcagcagcgcctgcggcaaatgacgccgaacggcagccagacgttgccgaacggcaatcagccccgcaatccgttcgaccgcactacgccggcggtgcccgccgccccgcagccggccggcgcgcgttaa

SEQ ID NO: 453356 - DNA, 537 bp, Serratia marcescens
gtgtttgacattgggtttagtgagctgctgctggtactggtgattggtctggtggtgctggggccggaacggttgccggtcgcggtaagaacggttgcgggctggatccgtgcgctgcgctctctggcggcgtcggtgcaaaacgaactttctcaggagctgaagctgcaggagctgcaggacagcctgaagaaagcggagaaggccggcctgcagaacctgacgccggagctgaaggcatcgatggacgagctgaaagaggcggccgactcgctgaagcgttcgtatcagcccgatgccgatgtcaacactatccataatccacggaccgacgaacccgaggcggcgcacgacgacgtgatcaccggcgaggcggcgaacggcgtcgcgccggcagccgtcgcgaaaaccacgccgccggccgcggaagcaccggcgcaggagcctgtcgccgcggcgccgagcgtagccaaggctcccgtcacgtccgctgcggagcataccccagcgtctcactcacctaatggcgaccgttaa

SEQ ID NO: 453357 - DNA, 783 bp, Serratia marcescens
atgtttgatatcggtgttaacctgaccagttcgcagtttgccaaagatgccgctcaggtggttgagcgcgcccgagaagccggcgtcacggggatgctgattaccggcaccgacctgccggagagtgaggcggccagcgcgctggcacagcatcaccgcgggttctgctggtccaccgcgggcgtgcatccgcatcaggccagcggctggagcgacgaggttgcgcagcagataggcgcgttggccgctagagaggaagtcgtggccatcggcgagtgcgggctggattttaaccgcaacttttctacgccgcaggagcaggaggcggcgttcagcgcgcagctggctctggcggcagagctggagctgccggtatttttacactgccgggatgcgcatgaacgctttgtcgcgttgctgaaaccctggctggataaactgcccgccgccgtcgtgcactgctttaccggtaatgcggaggagctggcgagctgtctgtcgctggggttgtccgtcggcattaccggctgggtctgcgatgagcgtcgcggcctggaactgcgcgcgctgctgccgaacattcctgccgaccggctgctgctggaaaccgacgcgccgtatctgttgccgcgggatttgcagcccaaacctgcttcgcgtcgtaatgaaccctgttttctgccccacatcatccgtcaggtggctacctggcgccaggaagatccgcagtggctggcgcaggaaaccgatcgtaacgcccgccggttattccggctggcatga

SEQ ID NO: 453358 - DNA, 807 bp, Serratia marcescens
atgggtttttactctcctgaagacggcggtcaggcgctcgacctgagcgaaaaagatgcccgtggtttgccggtattcggcgtcgccgtacgatacccggcaggccatatcgtgccccggcatcggcatgcgcacggccatctgatctatgccaatcaaggcctattacgcgtggaagcggaaagcgggcaatggctggtgccccccacggcggcggtctggctgcgctccggcgtggcgcacggtctggctgttcccgtggcgctgcaggcgtacggcctgtttgtgcgcgatgatatttgcgcccgcctgccgccgcatgattgcgtggttcacgtctccggcctgctgcgcgagttgatcatggcgctggcgcaagccgaccaccagaccatcgccgctaagcgcctgcatttgctcggtgaactgttggtcgaagaactccacgcccagccggctctgccgcttcatctgccgtggcctgcgggcgatgctgacagcccgatacagcacgtgtgccgggcgctactggataatcctggcgatacggccagcgccgttgagtgggccggcaggctggcgatgggggataaaaccttccaccggcgctttcttcgagcaaccggcatgacctttggcaaatggcgtcagcaactgcggttgatgtcgtcgctgacgctattgatgcagggaattccgataacgcaggtggcgctggcgagcggctatgacagccacagcgcctacaccacggcgttcggtcgacaattcggacaaccgccttccgcctttgcggcgaagagataa

SEQ ID NO: 453359 - DNA, 273 bp, Serratia marcescens
atgagcgagctatctaccctaacgataaaaatccctcttgaactgaaagaaaaagtcagagcggcggcgatgaccggcgaatgctcgctgagcgcggaagtctgccggcgtctggcggacagcttcgccgcaccagccgccgggcagagcaaggcggttgagatcgacagctcagaaaccgcagaagtggtggaagcgccgttgagccagaaagagttgagaaagctgcgtcaactgctgaaggtcaacgggaaaaacggcaagaagaaatag

SEQ ID NO: 453360 - DNA, 963 bp, Serratia marcescens
atgaacgacccggactttaacctactggccgccctcgatgcgctgctggccgaaggcagcgtcgccggcgcggcgcgccgcctggggctgagcgcctcggcgatgagccggaccctcagccgcctgcgccaggtgaccggcgacccgctgctggtcagagccggacgcagtatggtgctgaccccgcacgccgaacagatccgcgatcgcgcccggcagacgctggccgaggcgcgcgccctgctgctgcccgcggccacggggctggacctgcaaacattgcggcaaacgttccgtctgcggactaacgaagggtttgtcgaaacgttcggcgccgcgctggtggcggcggcggcgcaggcggcgccggaggtgtgtctgcgctttgtgccgaaaccggagaaaagcccgcgctcgctgcgcgaggacgatattgatattgaggtcggggtattacacggtatggggccggagattcatctgcagacgctgttccgggatcgttttattgtcgccgtcaggcagggacatccgctggccgcacagacgcccgtcacgcccgagcgctacgccgcctgtcagcacgtgatcgcctcgcggcagggaaagcgtactggcccggtggataaggcgctggccgaacaggggctgacgcggcgcatcgccgccgtgacgccggatttttccgccgcgctggccatcgccgcccagtccgacctggtggcgctggtgccggcgtcgttttttatccagaaaatgcgcggcggcggcggagagaagctgcaggggctcaggctgccggtcgccacgccggagatcaccgtctcccaaatgtggcacccgcgcagaaaagccgaccccgcgcatcagtggctgcggcaactgctgctgacggtctgccgccgacaggccgccgaactgcaccgcgccgctcagcgcacatggccggcatggttccgttaa

SEQ ID NO: 453361 - DNA, 1164 bp, Serratia marcescens
atgaaaaggaatttagatatatcaatcacggcagggcgcttcagaaaaatcagggagtggaatagaagaaagaattactacattaaagagttaaggcttaatgtaaaaatatatattgcaaagcttgtctgggataagcgcaggaaaaattcgctggacatcaatgctgtcaaaaccatattaatcctacgcaatgaaggaactattggcgatgtggtggtgacatccccgttggtaagacgtctttgccaggagggttatattgttgatatgttgcttaccaaagcaagcagcgtagcgatgaaatacaatccttatatcagaaatgtctacgaggcagatgattgtcataatcgtgtgtttttaaaggacttccaccatacggttgcaccggaaactattgatgaacttaatcgtaatcagtatgatctggtgattgatccctgcctgtttgatattcccgtgcatcggatgaagctgctacgccatatcaacgccagatttgttcttggtgttaatcaatggaattgcattaatcattacagcaagtcgatatctttcgaaaatggtaaggagcatgtcacgcgcgccatttctttgattgccgactgtattgggattgattcatccactttgggtccctatgacttatacgttcctgaagatgtcgctgaagacgtgaaacgttatcttgctgactgccaggtcggtaaggtgattattattaattcatttaccggtagtaccgagaggaatttttcacaggaacagctatcaagaattattgctatgctcaatgatattgattgcaatacaagaatcatcatccttgaccaccgcaatgagttgactattccgctgcctgataatgttgttaaaaacccattcaggacgttgcaccatgttatggcgctgattaaggatgccgacatgattatatcacccgatacttcggtggtacacatgtctgccgcatgggaaaaaccgttggtctcggtttataaggatgttgtcgacaacaacgatttatgggggcctgggtatgataatgccagtcagatcatcgttcataacaggaaaatatctgatgtggatgctgtgccggatttgatactgagtgaggtcaagcgcagaaatctcttggagagtggcttatccagttag

SEQ ID NO: 453362 - DNA, 1077 bp, Serratia marcescens
atgtcgtcacatcgtttgcatagccaaggagtaatggagagccacggcgcttataaccagcatgctcatatccagaactgcggcaacctgatggtgatccccctgattgaacaactgctggccgacagcgcactgacaccgacaggctcgcccatctttctggcggattacggtgcttcgcagggaaaaaattcgctcttgccgataggtgcggcggtcaaaatcctgcgacaacgctttcccgccctgccgattatcgtggcgcacaacgatcggtggaacaatgatttcaacacgctgttccaggtattggaacaggatgaaaaccggtatatcgaccacaccgcccaaatctcctactgcgctatcgggcgttcattttttgtgcctgttctccctgccggctcggtgctattcggcctatcggcgtatgccaccctgtggctcagccagatgccaccagccaattgggatcatatcattgcgtataaaacctcagatgcgatacggcatctcctggcgctacaagcctcccacgactggacgatgttcctgaacgcccgcgctgaagaactgcagccggggggcaagttactggttgtgcaggcaggtctcgacgataacgcagagtccggtttctgcgacatcatggagcatgccgttaaggtgttggacaccatgcagcgagaaaaatacttctccgtcgctgagcgtgaacggatgaaaattggcgtctacatgcgactcgcccatgaaattcttgcgccgttttcaactgatgatagctctccagccttggcggtcgaacatttttccacgacggttttacccgatcccgcctggcagcactatgtacaccatggtgatgccttgatgctggcccaaaaacagagccggttcttccgcgcaacctttatgcctagcctgctctccgcgttggatgcgcgacgcgataacgcacagcgccagcaaatcaataatatttttgaagaaaaactcatcgcccgctgtgccgcccatccggccccaatagaacaacgagcgcaaacgctaattgtcgttaagccatcatgttga

SEQ ID NO: 453363 - DNA, 1182 bp, Serratia marcescens
atgtttgatttttccaccccgatcgaccgccacggcacctggtgcacccagtgggactacatcgccgaccgcttcggcagcgccgacctgctgccgttcaccatctcggatatggatttcgccaccgcgccctgtattctggatgcgctgcagcagcggctgcaacacggcgtactgggctacagccgctggcagcatgaagatttcctcggcgcgttgcgtcactggtatcagcaacgcttcaatacggcgatcgacaccgccggcgccgtgtacgggccatcggtgatttatatggtttcccagctgatccgccagtggtcggcgccgggggaatatgtcgtcacccatacccccgcctacgacgccttttacaaggcggtgctcggcaatcagcgccagctgctggcctgcccgctgcaaaaggtcgatgaccagtggcgctgcgacatggcccatctggaggcgctgctggcccggccgcaaagcaagatcctgctgctgtgcagcccgcacaacccgaccggtaaagtgtggagcgccgaagaactgcagcagatggcgacgctgtgcgaacgccatcaggtgcgggtcatcagcgacgagatccatatggatatgacctggggcgagcaacgtcacctgccgtggagccaggtggccgctacgccgtggacgctgctgacctccgcttcaaaaagcttcaatattccggcgctgaccggcgcctacggctttatcagcgatgccgcgtcgcgcgacgcctatctgcagcagctcaaaggccgcgacgggctctcctccccggcggtgctggccatcgtggcgcatatcgccgcttaccgccacggcgccccctggctggacgccctgcgcggctatctgcaggacaacctgcgctacgtcgccgaacggctcaatcaggcctttccacagctggcgtggcagccgccgcaggccacctatctggcgtggatcgatctgcgtccgttaaatattgatgaccatgagctgcaacaggcgctgattgaacgggaaaaggtggcgatcatgcccggttttacctacggcgaagaggggcgcggctttgtccggctcaacgtcggctgcccgcgcagcaagctggaggacggcatgaaccggctgatcgccggcctgcggtttgttagcccgcaggcctga

SEQ ID NO: 453364 - DNA, 762 bp, Serratia marcescens
atgaggttatgtttggcgtttttttcgttttttgcatttttcccggcgcttgcggatgaagtgactattcaatcacaacgcccggacgattttgtcaatgtagaaaggctaataccccaaattcagaccgatatacggtatttctctgcaaacaactttgttggaagacgagtagaaggctatcaggagcccgtatgtttattgacaaaaaaaacggcgctggcactgaaaagcgtcgttgcatcactgatatccagagggttaaccataaaggtttatgattgctaccgcccgcaagaagcagtgaatgattttgtcgaatgggccaaagtgctaaaagacacaaaaatgcgtacggaattctatccctcggtggataaaacacgcctgtttaccgatggctacatcgctgcgcgatccggacatagccggggtagcacgcttgatttaaccattattccccttggcagtaagatcccggcagaagatacaaaacgcacgctggagaactgtaccaaaccaaaattacaacgctctcctgataacagcctggattttggtacgggtttcgattgcttcagcccggtatcccatcctgattatctggccatatctgcacaggccagagcaaataggctattactacagttattgatggagcatgcgggctttaaaccacttgatactgagtggtggcattttactttgattgaagagccttacccgaacacatatttcgacttcccagtcaaaaatcaatag

SEQ ID NO: 453365 - DNA, 918 bp, Serratia marcescens
atgagcgcgatcctgcatttgctgcccttctttgaggccgtcgcccgcctcggcagttttacccgggccgccaaccagctgggggtcacgccgccggcggtatcgcaaaatattcaggcgttggaaagccgcctgggcgtgcgtttgtttaaccgcaccagccgttcggtcaggctgagcgaggaaggccagcgtttttaccacagcgtggcgccggcgatgcgcgatatcggcatcgcggccgacgacctacaggcgcgtcaggcaacgccgagcggccagttgcgcatcacgctgccgcagttggccgcatcgctgctggtgatgccgctgctcggcgagtttcaggcgcgttaccccgacatacagctggagctgtgcaccgacgatcgctttgcggaactggtgccgaacaattttgatgccggcatccgcatgcacgccatgctgcaaaaagagatgatcgccgtcccgcttgaccgcggacagcggcgcgtgctgattgccgcgccgggctatttggctgcgcgcggcaccccgcaacggccggaacagctgcgcgagcataactgcctgcgctaccgctttcccggcagtggtaaactggagccctggtttctgacgtatcgcggcgcgcatcaggtgctggaggtaaccggcagcctgatcttcactgaagatcggctgttaaaagatgcggcgctggccgggctggggatcgcgcagcgttttcacgcgacggtagcgcaggaactggcgaacggacagctgatagaagtcatggcggatcatgccagcgaagcggccggcttctttctctatttccctgccaaccgctatattcctcctcggctgcgggtatttatcgattttctgcgcgagaagcgcgaatacccgttgaggggaaacggtcaatag

SEQ ID NO: 453366 - DNA, 1161 bp, Serratia marcescens
atggcgggcaataatcaggcggttattcaacggttacagcaggtcaaccaacgggccgtggcgcagggcaggattgtcggcagcgtggtgctggtggcgcagcatggcaaaacgattgccgcgttggcctgcggcgaggccgatcgtgaacggcaacggccgatgcggcgcaatgcgctgttccgtctggcgtcggtgtctaaaccgtttatcacgctggcggcgctgcggatggtcgagcagggcaagctgacgctggacgatgcggtaagccgctggctgccgtggttccgtccggcgctcggcaacggcgaaacgccggttattcttatccgtcatctgctgacgcacaccgccgggctggattaccgctttaaacagccggcggacgggccgtatcatcagcgggcggtgatggacgggctggagttgtcgacgctgacgctggagcagaacctgcggcggctggcggatgtgccgttagcggcggaaccgggcagccggttcagctattcgctgtcgattgacctgctgggcgcggtgctggagcaggcggcagagatgccgctgccgcagctgttcaaccactgggtggcacagccgcttggtctggaggacagcgggtttgtcgcccgcgacgccgggcggttgacgggggcctactacaataccgacgccggtccggcggtgatgcaggatggcttgcgcgtggccctgccgcccgaattcggctttgatgtcgaatttgcgccgtcgcgtgcgctggatgcggcggcgtacccgtcggcgggcgccggcatggtcggttcggcggatgatgtactcaggctggtggaaaccttgcgcgccggcggcaacggcctgctgcagccggcgacggtggcgctgctgcagcggccgcacgtcagcgcggcggaggaagtgcaggggccgggctggggatttggctttggcggcgcgctgttgacggatgcggaactggcgtcgacgccgcagcataacggcaccttgcagtggggcggcgtttacggacacagctggttctgcgacccgcaggcggggcttagcgtggtggcattgaccaatacggcgtttgaaggcatgtgcggcgcgtacccacaggaagtgcgcgatgcggtgtatgccggcctggcgaggtaa

SEQ ID NO: 453367 - DNA, 1335 bp, Serratia marcescens
atgaaacagcaaaataataaatcattaaaaatagaaaaccactattcatccatgctagatgttaaatcagcagataacacacgcgcacgcaaacatatgcttacccacacagaatcatataacttaacaaacaccaataaatcactaaaaaacataagaaaagaaagaaacaaaaaagaacatggtgattatggcatgggtataaccataagtgccgcaataattattaaaaacgaagagcgttgcatcgctcgttgtattgatagcctactaccactatttgatgaagttgtaattcttgatactggctccacagacaacacaatcagaataataagagattacaaagacgaaaaaataaaaatatttttttcaaactgggaggataatttcgcaaaagcaagaaatgaagcaatgaaaaagtgcaattgcaaatatatatttttcatcgatgctgacgaatacatttcatccgacatcacagagttcacatgtgaacttaaaagaatagatgaaataaacaacacaaggaacaatgatgcatacgcttacagtccaataataaaagatcacgaaaacaatataacaaaaaacattcgaagagtattcataaactgtagtgaattttattattttggctatattcatgaggagctaagaaggaagggaaataaaaaaataatagataaggaaattaaaataaccatacagcacgatggatataaaaaagaaataataaaatcaaaagacaagcaaaaaagaaatgaaaatttaaatttaaaaaacttagatgccgaacccaaaaaccttaggtggatattcttccacttccgggactcatttgaaaatctccccccgaaaaaaatataccaatcactttatagtgaaatagtaatagacaaaaaaaacaaaataagcacaaagaatataagaaatgatctttacacattcggaatactagacttaatggcaagagcaaagttaaaatcaatgtgcggggattcagattttcacaatataataaatattatgggcgaattgatccctttcaatagcaattcattttactacgaattgatttatgatatttttaaatggaagatcaaggcaaaaaaaagaataaatgatattttttctttcaaaaagaatagaaagcaataccatgatggaatgataaattcagagggactgcatattgatgcagccctatcattttacctttatgaagttgggttattaactcaggcaaaagaattattggaaagcgttcaaaggagtgggttttcatctgaattaactcacctatattctctaaatgcaaaacatcaggaataa

SEQ ID NO: 453368 - DNA, 3711 bp, Serratia marcescens
atggagcaaattattcatcaggaattggggccggactccctacaccagaatgaatatcggttgtatatattgagtgagcatgaggtgatatggttttcctgtattcaccatatcgccttcgatgcctatgtgtaccatttgctttatcagcgtgttgctgagcactacaacgtcctgttgcgtggtggggaagcgacatcttgccggtttgctgcactccgcactctgtatgtagaagaccaagcatataaaaatagtccgcaatatgcccgcgatcgggattattggcggtatcgctgtgcgcagatgccagcgccgacttttattggtgcatcggtgcaggaaacaacggtggatattattcaggccgacgcgcgtattgatgatgaaatctgtttggcgctggatgccttttatcaacaaagcaggatcgctttgtccgatctattgattggtgtattcgccagctatttttcatcctgtttggcgggggaacgccagttgttgttcggactcccttgcatggtcaggcaagactcccttggtgctcaggcggcggtgactcgcagtaatattttgcctttgctgctaacgttgccacaggatgccaattttcaggacgtttgcgccgttgtggcaaagaacagacgcgaattgcatcggcaccagcgctatcgcagcgaatggattagcagggacattggacgagtcggcaatgcgttaccgctttacggtattgaactgaatatattgccctgtttcccttccccagattttactgacttagatgcttcggttcgacatatcgccacggggcccgtgcgtgatattaacgtgcatctggagctcggggcggatctacgcccgcatacactcaggttacttgcccacgcgtcacgacacaatcagtccgaattacagctacacgtgcgtcgtttactacattggatgaaacagttgattgcgtcgccgtccgcgccattgaggatgttgccgttggctatgccgacggaattggcgcaaattactcgatggaatgacaccaaacatgagctgccgaagcacggcattcttgaactatttgaacagcaggtacggactgcgccgcagcagattgccgtaatggatgaaagcggcgtgttgacatacggcgaactggaactccgctcgcgcaggtttgcatgtgctctcgacgactatctgcaaggcgctggtggaaaggttatcggagtggcactggaacgcagtatagagttggaggtggtgttgctggcaatcctgcgtgccggcgccgttattttgccactgtcgttggatctgcccgaattacggttgcgaaagatgctcaaccaggcgggagcctgtctgacgatcacctcctctgtagggcaagaagggttgccaaccggacatccgagtttggatcttgtcacgttgacgcagatcgcagaacttttgaatgctgaaacgtcgccacctaagtcagcagggcaagacgcaggcgttcctgcctacattctgttcacgtcaggatccagcggcgagccgaaaggcgtgatggttgggcatctggctttagccaaccggttgcagtggatgcaggctgagtatggtttgcagccgacggaccgagtgttacagaaaacaccggcgacttttgacgtatcaatgtgggagtttttctggccgttgatcggtggcgctacattggtaatggcacgttcaggcgggcatgctgaaccagaatatattattgattgtataaggtattttgatgttaccaccgtgcattttgtaccgtctatgctggcgttgtttcttgatgaaattgagcgtcagcctgggccgctgaagttgcgcagggtttttgccagcggagaggcgttgtcctcggagctggcccagcgttatcgacggctgctggttgcgccattacataatctttacggtccgactgaagcggcgattgatgtcacttatcatgcggtcggtttgggagtagaagggcgaggcgtaccaattggtcggcccatttggaatacgcgaattcacattctcaatgccgaagggcgttgtacgccgatcggtatggcaggagaactacatattgagggaatttgtctggctgatggttatgtcggccagccgtccttgaccgcagaacgtttcgtgatgcgcgatgatggcgtgcgtctctaccgtaccggcgatctggctcgttggctcccgaatggtgagattgattaccttggtcgtatggatcagcaaataaaaattcatgggcaacggattgaattagcagagattgaaacggttattagtgggcattctcagatccatcgggcgtgcgtaactctgtttgaaggagagcttattgcttatgccgtagcgaatgatatcaggccgactgaggatatattggtcgcgcattgtcgtgagcatcttcctggctatatgttgccgcagcgctgggtatggctggcggaactgccgttaaatagcaatggcaaactggatcgtaaggcgctaccggagccggtaaaacggttacggaaagacgtcagcgcgccgtcgaacctgaccgaacaacgactatgcgagtattttgccgatgcattacagttgtccagtgtaacgcctgaagaaaatttctttgagctgggtggtaattccctgagtgccgttgatgctgccgccagaattaacactggtctgggttggcatattacgcttgccaacattttcgcccatccttctcccaaagcgctggccggatatggtcagcatgacgacgtggacatgctggataccatgttgcttttgcggcctgttcggcattctgtccgcggtcggttgccgacgctgttttgcattcatccggctggaggcatcgcctggtgttacagtggactggcccgctttctcaaagcgccgtgtgaaattgtcggcatacaggcgcggggactcacagcgggcagtcgcattacaccatcaatggatgagatggctgaagaatacgctaaacgcatacgcgctcatcaacctcaaggtccgtattggctgctcggctggtccgtgggaggcatgatcgcccatagcgttgccgtacatctggagcaacaggggcaaacggtggcgctgttggctatgatggattcctatcccagcgatctatggcgatgttttgctgctgaggtgttgaacgctagggaagaggagaccatggcgctggccgccttgctctttattgccggaatcgctttgccttttgaccaagggttgccatctttgctggtaccgaaaggtcaggtgcttgaacgttcgcagactatcggattattgagaaagcagggcaatgcgttagcctgcctcgacgacccgacgttggatcggctgatcgatgtggtaatcaacagtcgtcggctggtaggaagttcaaaccatgatgtttatcacggcgatatgctgttcttcacggcagcggcgccgagggttgaaacgtggctggatagggcggcgtggcgtccttatgtgagtgggcagatccataatattgatattgattgcgatcatcccgcgatggccagagcggagacgctacgtgaaattgccggacatctggactgtgcctttacagcactgactggatatttaccggctgttccgcagagcattgacagggaggatacagtacaggaggttgaaagatga

SEQ ID NO: 453369 - DNA, 1557 bp, Serratia marcescens
atgagtgagcgcccaactttgacggatcttactgcaaacctggttccttttactgcccatcaggtaaaaacttcgctgatctggagtactgctgatgagggagatggggaagtattacgcgatgcttgcagttatttggtcgattctgatgacacctgtgcagctaaagtatttctggctgagcgctatggcggcagcggtattcagcgcaatggcggcggtgcccgctgtggttttgatggccgctatcaaattaaagggatcggtgctaatcctctggtggggcagggatcagactggcatcactctaacggtgcgctcggcgccggccaggcgatttatgaagccttatggggagatattctggcgcagatattgccctatggtgctgtagctacccgggccattttacttactgacaattatatcgatatcgagtttgaacgcagccgaggacgttcccgacgcgcgttgttgatccgtgagccagtgattcgcccggcccactttgagcgggcaccatattttcggcctcagtcggcatataccgggcaactgatgcacgatgctcaaagagtcagagcggtgattggtcatctaccggcttgtttgccgactccttcggacggtttcagcaccgaagcccgatgcgatccgcgcacttggtgtattgaaggattatgtgaattggcgcgccgtcaggctcagcagatggcctattgccagacccggttcctgatgttgaccacatccccctccaacattgcgatggacggcagggtgttggatttcaacgggcttaactgtctatttcccagcgatcatcgcgatgattttgaatatcgccttaaaaccgctcagttgataggtgaaccggcgatccttaaacaaggtttgtctgatttatgcctgtatctcggcaaatacatgttcgagccgactttcacgcagcttgctcgacagcaggtgacggcctgttttcagcgcgattttcaacaggcttgttatcacggctatgcgacgttgcttgggataccggtcgaacttttgcagcggggggggccggcgtcactggaaaggctggtggacagttttatgcgattgctcaacagccgcaggggcactttgtaccatgcagacaatggagaatctccgctggaacggctggttgttacactgattcatcgtagctgggggctgccggttcatgacgatgcctgtatggcaatggatgtccgttttgcgcacacgcaggaattgtttaatgaggtcatgcattgggctaatactacttgccgcgtcgaacaacgaaattcgttcgcgttcatgtcagaaatcgagacgcaggcgcgtgagaggctgaagcccagaaggtgtttaggcaaagtgcaaatgctgcgggagattgatgagttactggaaacttgtaaggacgatgagaggcaactgcggttagcactggcggaaatgaaaactagagtgctggcgtttgccacggttgcacttggttgccagcagactatcggccacggagctgaaaacaggggaaacgtatga

SEQ ID NO: 453370 - DNA, 792 bp, Serratia marcescens
atgaaaaagtataatctgtacctggcgctgctgtgcctgggtgcaccggcattgtcttttgctcagcctgcaaaccataataagattgccgtcggcgaaaaatcgccggcgccatttcacggcacgccgactcagcctatttctcgtcagcagttatgttataacggcgggaatttccattggccgccggatggcgccaatattcccgatccggcgtgtaagattgcttatcagcataattataataaatacaaagataagttcgataacgaaaatcagctgatcgagcagtcaaactatccctttgtgcaaaaagatgaatttgccaaactgatacctgattataataatcaggataaagtcaaagaagccattccggacgggcagctgtgttccggcggtaatgtcggtacggaaaaagacagcaagaaggattatctgtggaatgataaatccgggatggacgttgccgcgagctggaccgccagcaatgttaagctgaatgacaacggtgaaatagacattgtttatcatgcaacggcgacgcataaccccagctttttcgaagtttatttatccagtgcggattataaagccagcgagcggccgctgaagtggagcgatctgacgctgctgaaaaaggtcaccgatgccaaattggaagggtcggattataagttctccgcaccggccaataatgccaaaggtgagcgtgtgctgtttattcgttggcaacgcatcgacccagccggtgaaggcttctacagctgcagcgatattaatattcaataa

SEQ ID NO: 453371 - DNA, 426 bp, Serratia marcescens
atgcgccagcgagtaatagtgtgcccagtgattcaaaatgaaggtgagtttctgctgtgtaaaatggcctccgaccgtggggtattcccgggacaatgggcgctgcccggcggcggaatggagcctggcgagacgatggaaactgcactgaggcgtgaaatcagggaagaactaggcgaagtactgcatatcacagacgttaaaccctgggcctttcgtgatgatatccgtactaaaacgtacccggatggtaccaccgaggacatttacatgatttacctcatctttgactgtatcagtacaaaccggacgattacgtttaatgaggaatttcaggagattgcctgggtatcccctagcgcactgaaaagcatggatttaaatgaggcgacccggatcacatttgcccagaaaggcctcctttaa

SEQ ID NO: 453372 - DNA, 273 bp, Serratia marcescens
ttgtcgcgcgataaaacggattaccgcaagcggctggcgctgatcgcacagctgcgtcagcagccgagcgacggcggccgggcgattttgcagcgtatgctgcaggaggacttcgtcctgagcgtgcggcaggcggcctggcaggcgctgcatgaacagggagtgagctgcaagcgtcccaaagcgccaaagccggtgccgctcctgccgccggagcggcgctgcagaagggtgctggaagcgatctatgacctgctgtggccgtggacgtaa

SEQ ID NO: 453373 - DNA, 657 bp, Serratia marcescens
atgaaaaaagtctttattatcggcggcgcaggcaacgttggccgcagtctggctcaacaactgacccgggcgggccatcaggcgctggcgatgtaccgtcatccggaacaggaagcgccccttaaattgctgggcgccacgccggtccgcggcgatctgcagtcgctggatgaacaggcgctggcggatcttatcgccggcagcgatgtgctggtgttcagcgccggcgcaggcggaaaaggcggtaaggagatgactaacgccatcgacggtcgcgggctggagattgccgtggctgcggctcagaaggccggcgtatcgcgctttctgctggtttccgccttcccggaagccgggcgcggtaagacggcgccttccgataccttcgaaaactatatggcggtgaaaaaacaggctgatgtgcaccttgccgccagcccactggactgggtgattctgcgccccggcaccctgaccaataacgccggcagcgggcggattaacgcgggcctcgctattccttatggtttgatcccacgtgaggatgtggcggcgacccttgccgcgctgatcgacacccctgccgtcagccgcaaaattattgaagtcaccgaaggcgatacccccgcacttcaggccatgcaggcgctggcttaa

SEQ ID NO: 453374 - DNA, 459 bp, Serratia marcescens
atgtcaaagaacatcgcgctgacgccggtatcccctgcgctatgcggactggcgcaggcctccgaactgctgggagaccgctggacgctgctgattctgcgggaggtgttttacggcgttacccgctttgaacagatgcgtgaacatatcggcgccacgaaacagacgctcactacccgcctggcgaaaatggtcgagcaggatctgctggcgaagcgcagctatcaggaatccggaatgcgtgaaagatatgaatatgtgctgaccgataaaagccgcagcctggggccggttctggccgcgctgatggtctggggccatcagcatatcttacatgatgagccgcatctccagctgacggagaagcacagcggccagccggtgcagccggggtttgttactgcggaaggcaaacccgtcgcgcaggacgatttaatcctgacgccgctgcgccgctga

SEQ ID NO: 453375 - DNA, 228 bp, Serratia marcescens
atgccatttgtgaacgtacaaaccatcaaaggtatccttaacgacgcccaaaagcgcgaactgctaacgcggatcaccgatctgatggtggaagtggaagggcgcggcgacgccgcatttcgccagtcggtgtgggtcagaatcgacgagcatgaacctgagcagtggagcctgggcggcctgcagccgacggcggccatgattgcggcgaaattcccgccggcctga

SEQ ID NO: 453376 - DNA, 912 bp, Serratia marcescens
atgatggatatcaccagacgaatacggattggcgtcagcccgctgtcctggactaacgacgtgctgcaggatctgggggacgatattccgctggcgacctgtctgcgcgaggcagcggcggcgggctatcaggggattgaactgggtcgtaaatttccccgtacgccgcaggcgctgcggccactgctggacgcggcggggctgcggctggcctccgggtggtttaacggttttctggccgaacgcgatacggtagaagagttggcggcggtgcacgaacatgcgcagttactgcaggcgttgggttgcgaggtcatggtgtacggcgagtgcggcgctatgccgggcgatgcgccgctggatctgccgttgtcgcgctcgccgccgctgagccaggtgcatgtggcggagtacgccgcgcgggtcagcgaatttgcacggcggatccggcagcgttatgggttgcggctggcctatcaccatcatctgatgatgctggtcgagcgcgatgacgaggtgcatgactttctgcaggcctgcgacgagcaggtcggcatcgtgctggactgcggccacgctgctgctgccggggtggatattgcccggctgattgagcgttatggcacacgtattgtccatgtgcatctgaaagacgtgcgcggcgatgtattgcaggcggtactcgcacagaatatgagctttaaccaggcggtgcggcaggggctgtttaccgtgccgggcgaaggcgtggtggattaccgaccggtgatcgattttctgcgcgcttctgcctatcacggctggattattatcgaggcggaacaggacccgcgtcaggctccgcctttagtgacggtgtcacgtgcgcgtgactgggtacgacggcagattgaacgacaggaggcggattga

SEQ ID NO: 453377 - DNA, 993 bp, Serratia marcescens
atgtcctggcgaatcagcattctggataaaagcccgatcgcggaaaacgaaagcgccgctgaggcgctggcacgtacgttgcgtctggcgcagctggcggaggccgccggttttcaccgcttctggctggccgaacaccataataccctccaactggcgagtccgtcgccggaactgcttatcgcctggatcctcggccagacgcagcgcatccgcgtgggttccggcggcgtgatgctgcagcattacagcccgtataaagtggcggaaaacttcaacctgctggcgtcgattgcgccgggtcgcgtggatctcggcgtaggcaaagcgcccggcggtctgcctctctccacgcgggcgttgcagcacgggcacaacccgcaggagaaaggcagttttgccgaccagctgacgcagctggaccgctggctggcgcccggcggcgacgagccggtgcgcgccacgccgctgccgccgcagcctgcgcaaggctttttgctgggagccagcgtcgagagcgcgttgctggcggcgcggctgaactggcgctttgtctttgccgcgcacctgaacggcgatgccgaactgctgcgtgaggtgctcagcgcctggcgggcgcacggcgggcgggaaacgctggtcgccgtaccggcgatcgtcgcgccgacgcaggacgaggcgcagcggctggcgagccgcgtcgaggtgtggggcgtcgagctggcaaacggccagcgcgtcagcgtggccagcgaagagcaggcctacgccttcgcccgccaggcgggcagtgagccgctgcgcatagcccggcgcgcgcagtcgctgctgaccggtcagccggcggcggtgttggaacagctcgaagcgctgcatcagcgctggggcattgatgaattcattattgataccccgatcgccgacggcgaggcgcgcctgcgctcgctgcagctgctggcgcaggcctggcaggcccgggaggtggcggcataa

SEQ ID NO: 453378 - DNA, 1317 bp, Serratia marcescens
atgtccgcaccacgacagctgcgtctgggcacgatgctgcacggcgccgccggcaatatgtccgcctggcgtcacccggcggtgaccgccgacgccagcattaattttgagtttgccaaagccacggcgctgaaggcggaagagggcaagttcgactttctcttcgtcgccgacggtttgtacatcaatgaaaaatcgatcccgcactttcttaaccgttttgaaccgctgaccgtgctgtcggcgctggcgagcgtcacccgtaatctggggctggtcggcacgctctctacctcgtacagcgagccctttaccgccgcgcgtcagttcgccagcctcgatcaccttagcggcggccgcgccggttggaacgtggtgacgtcgccgctggaaggatcggcaaaaaacttttcccgcacccagcacccggagcatgccctgcgctatcgcattgccgacgaatatcttgaggtggtgaaagggctgtgggactcctgggaacaggacgcctttgtgcgcgacaaggcgagcggccgcttcttcgacccgcaaaagctgcatacgctgaaccatcacggcgatttcttccaggtggcggggccgctgaacatcggccgtacgccgcagggacggccgattatcttccaggcgggcgcctcggacgacggtaaaaaactggcggcgcgccatgccgacgccatctttacccaccataacaccctggccgacgcgcaggcgttttaccgcgacgtaaaacagcagctggagcagcacggccgccgcgctgatgagctgcacattttccagggcgtcagcgtgattgtcggccgcgatgcgcaggaggtggagcagcaataccagaacaccgcggcgctggtttcggtgccggatgcgttgaattatctgggccgctactttgaacatcatgacttcagccagtatccgctggatgaccccttcccggagctgggcgagctgggacagaacagcttccgcagcaccaccgacgcgatcaaacgccaggcccgcgaacgcggcctgacgctgcgccaggtcgcgctggaggcggcgtcgccgcgcccgcgctttgccggcacgccggagcaggtggccgacggcctgcagcagtggttcgccgagtacggcgccgacggttttattattcagggcggcacgccggagagcttcccgcgctttgtggatcaggtggtgccgatcctgcaggcgcgcggcctgttccgacgcgactatcccggcagcacgctgcgcgccagcctggggctggcggagccggccaatcagttcaccgcacgctaa

SEQ ID NO: 453379 - DNA, 933 bp, Serratia marcescens
atgcagaaatcattgcttcttctggcgctggcgctggccgtgacgccggccgtccgggcagagaatgtcactattaacggcgccggcatcagcctggacgccaataaaacgccgatccacagcgtgaaaaacgccgccgccatcgcgcagctgccgccggggcatcgcttcgccgtgccgggcaagctgaccgtcgccattgccgggctgaacgtgccgccgctgacgctgttcgccgacgacaataaaacgctgctcggcagcgaggtggatatcgcgcgcctggtggccgacagcctggggctggaactgaacgtggtgcctacctcgtgggaggactggccgctcggcgtcgcctccggcaagtatgacgcggcgatcagcaatatcaccgtcaccaaagcgcgcaaggccaggtttgatttcgccacctaccgcaaagatatgctgggcttttatgtcaaaacgggcagcccgatcgcctcgctgcagaaggcggcggatattgccgggctgcgcattattgtcggctccggcaccaatcaggaggcgatcctgctggcgtggaatgcgcagaacctgcaggccgggctgaagccgtttacgccgatctacaccagagacgatgcggcgcagacgttggcgctgcagtccgggcgggcggacgcctggttcggccccaacgtcaccggcgcgtggaaggcggcgctgaacggtaaaacccgcctggcgggcagcgtcgacggcggctggccgaaagcggcgcatatcgccgtaacgctgaaaaagggcaacggcctggcgctgccggtccagaccgcgttgaacggcgtgatcaacaacggcgactacgccaaagtgcttaatcgttggggggaaggcgtggagcgcatcaccgcctcggaactgaatcccgccgggctgggtgattaa

SEQ ID NO: 453380 - DNA, 510 bp, Serratia marcescens
atgaacgaacgctttcgtgacgtatcgccggaggacgccgaactgcagccgatcctcagcgggctgttcggcgagtacgccgcgcgttatgacgactacttttcccgccatacggaggtggagctgacggaatggtacctgccgccgcaggggctgtttatcgtcctggagcgcgacggcgcgattatcgccaccggcgcctataagccgtatgacgcgcagaccgccgagatcaaacgcatctggaccgacagggcgctgcggcagcaggggctggccggccgggtggtgcaggagctggagcgccgggcaaggctggcgggctaccgccatatctatctgaccaccggctttcgccagccggaggcggtgaaactctacctgagccagggctatacgccgcagttcgatcccagccgcgatccggaagagtacgcccggccgccgtttgacggcaagctgcgctttatcaaaaccctgctgcacgccgcgctgcgccaaactgcataa

SEQ ID NO: 453381 - DNA, 912 bp, Serratia marcescens
atgaaaaatggtgaaaccatcaaagtggtgccggcgcgttatccgctgcgcgccgtcggcgccgtcgtcgcgctgctgctgctggcggcggtggtgcagtcggtggcctttaacccgcgctgggagtggcgggtgtttgcccgctggtttttcgacccggcgatcctggcggggctggggcagacgctgctgctgacgctgatcggcacgctgttaagcgtcatcgtcggcggcatgctggcgctggcgcggctctcctcgtcctggctgctcagcacgctggcgttcggctatatctggctgttccgttcgctgccgctgatcgtggtgctgatcgtcctgtataacttctcctacctgtacgacaccttatcgttcggcgtgccctttaccggcctcagctggggcagcttcgccaccatcgacgttctcggccagttctccaccgcggtggtcggcctgacgctggtgcaaagcgcctacagcgccgagatcatccgcggcggctttttaggcgtcgatcacggtcagtacgaggccgccgcggcgctggggctgtcggcgtggcggcgcaccgtgcgcattatcctgccgcaggcgctgcgcaccattctgccggccggctttaacgagattatcagcctcgccaaggggacggcgatggtgtacgtgctggcgatgccggagctgttctacaccgtccagatgatttacaaccgcacgcaggaagtgatcccgctgctgatggtcggcgcggtctggtatctggcgatcaccaccgtgctgtcgctgatccagtatgccgtggagcgcgggctggcgcgcagcgaacgccgctcggcggtcaatacgacgcgcgccgccggccgggtgcgcacgccaaccccacaggagcctgtccatgtcagctga

SEQ ID NO: 453382 - DNA, 768 bp, Serratia marcescens
atgtcagctgaaggtcatatttccattaccggcgtcagtaaatacttcggccgccacaaggcgctggacgatgtgtcgctggagatcccgccgggatcggtcacggtgatcctcgggccgtccggctccggcaaatcgacgctgctgcgcgccatcaaccatctggagcgggtagatgagggctttatccagatcgacggcgactatatcggctatcgccggcagggcgaccggctgtatgagctgaaggaaaaagcgatcctcaaacagcggatcaacgtcggctacgtattccagaatttcaatctgttcccgcatctgacggtgctggaaaacctgattgaagcgccggtggcccacaggcggctgagccgtcaggccgccgtggcgcaggcgtatgaactgctggaggtggtcggactgcgcgataaggccgacgcctggtcgcgccacctgtccggcggccagcagcagcgtatcgccattgcccgcgcgctggcgctgcgtccgcgggtgatgctgtttgacgaaccgacctcggcgctggatccggaactggtgggcgaagtgctggacgtgatcaaaaagctggcgcgctccggcaccacgctggtggtggtgacccatgagattggctttgcccgtgaggtggccgaccaggtggtgtttatggtggatggtaaaatcgtcgagcagggcagcggcgatgaactgctcaaccgcccgcgccacccgcgcacgcgtcagtttttgtcgaaagttctgtaa

SEQ ID NO: 453383 - DNA, 915 bp, Serratia marcescens
atgaattttgagggtttcgatctcaatctcctcgcggcgtttaacgcgctgatgacagagcgcaacgtcaccaaagcggcggcgatggcgggcgtcagccagccggccatgagcgcggcgctggcgcgcctgaggcgggtgttcgatgacccgctgtttatccgcagtgcggaaggcctgctgccgaccgctaaagcacagggcatcgccccgccggtcgccgaggcgctggcgcgcatccgcagcgttatgcagcccgccgagaccttcgatccggcggcgcaggcgctcagctttaccctggggctgacggagtatccgctgcacatcatgctgccggcgctgagtaaggcgtttgcggcgcaggcgccgcacggcacgctgcatatccgcgcctttaccgatcgggatgaaacggtggcgctgctggacagcggcaaaattgacgtggccctgagcgtcacgcccagcaagacgcaaagccggatcctgtccgttccgctgctgagcgatgattttgtcaccctgacgggaaaaaacggcgacgcggcgcccggcgagatgaccctgcagcgctttatggcgatgaagcacattctggcgtcgccggagggcaaccgctacggcctggtggatgagatgctcagggcgcgcggactgagccgccaggtggcgctgacgctgcccggcatgttcgccattccggcgctgctgcccggtacagattatgtcagcacgctgctgcgccgggcggcggcaggggcggcctgtcgcgacgcgctgctgagctacccgccgccgctggcgatgccgccgattgagtttcatctgctgtggcatcagcgtacgcaggagcctgcggcgcaccgctggctcagaacgatgattgccgcggcgtgccgggagattgagtga

SEQ ID NO: 453384 - DNA, 441 bp, Serratia marcescens
atgactcataccgacgatctgacccgacgtttacaggcggagcgcgccgccgtcgaaacgctgtaccgcgctttcaatgataaaaacccggagctgctgaaccaggcggtcaccgacgactggcaggatataccgctggcgccgggacaagggccggggccggaaggattcaaaccgctgctgatcgggtttatcgccgcgtttcccgatattcatatcactattcacgagatgctgcaggagccgggcaaggccgcggtgcgcgctgaaattaccggcacgcacctgggcgatctgatgggtatcgcggcgaccggccgccgcatcagcgtccggctgcacgagttccacaccctgaacggcgaacgcgtcaccgccacctggcacatggaagactggctggcgctgtaccagcagctgggccagctcccgccgctataa

SEQ ID NO: 453385 - DNA, 738 bp, Serratia marcescens
atgtcagtggagagcaaaagcgccatagtgaccggcgccagtaagggcatagggcgcgatatcgcgttggcgctggcccgtgacggctttgatatcgtgctgggcttcggccgggaccgcgcggcggcgcaggcggtggcggaggagatcgccgcgctggggcggaaaaccgttctggtggcgggagacgtcgcgtcgccggaggtcgtgacaaacctgttcagcgccgcgcagcgtacgtttggccggctggatacggtggtgatcaatgccggcattatgcgtatggcgccgattacccgcgccagcctggcggattttgacgcgatgatgagcgtcaacgcccgcagcgcgtttttgatgatggcggcggccggcgaacagctgcggagcgggggcagcattattgcgctgtcgagcagcgtgattgccaaatcgatgcccggctatggcccctatatcgcctccaagctggccgtcgaggggctggtgaaggtgatggcgaatgagctgcgcggccgggatattaccgtgaatgcggtggcgccggggccgaccgccaccgaactattcctgcacggtaaaagtcagcagcaaattgatgcgctggcgcaggccgcgccgctggaaaggctgggcctgccgcaggacatcagcgccgtggtggcgtttctggccggcggacaggggcgctggattaacgcgcagacgatcagggtcaacggcggttttgcctga

SEQ ID NO: 453386 - DNA, 606 bp, Serratia marcescens
atgccacagatcaaaaacgtcttcagcaacaaccgcgtcaatcagccgcagcagcaagaaacctcgcgccccatcaccgtggcggatctgctgcagcgcggccacgaccaaaacgacagaagcgtcgatccgaccggtttccgctccattcatgacctgcgggacttcgcccgcgacaacccgctgcccacgacgctgtatcgcgcgcacgttgccgaccgcgatgagatcgacgtttacggtctggagcgctccgaggaaacggataaaaagcgcggcgacgactatctggcggatattatcaaacacaccgcgcgcaccggcggcagccgcggcggcgtgctgtcgttgagcggctcactgcaaaccgccaaccgtttcgccgccggccgcaccgtggtgcaaatcgacgccaccgccttctccggccgctttaaaaccaccgcgcagatcctgctggacgatgcggaccgtctgatggcggcgcaaaaagtctcgccgaacaccgtccgaaaagcgctggaaaatctgtgcggcgaagcggagtccgaagccttctatctggacggcgatattccccgcagcgcagtgaagcaaatctactga

SEQ ID NO: 453387 - DNA, 438 bp, Serratia marcescens
atgaaaatcagcgagctggcgaaacgttccgggttgaacgcctcacgtattcgtttctatgagcgggtgggattattgaaggcggttaagcggcaggccaacggctaccgcagctatacgccggacgccgtgcaggaactgcgggtgatcgtagccgcgcagaacgccggtttcagcctggatgagctgcgcgcgctgatgccggtgacagccggccagtgggatcaccagcggctgatcgacaccttggccagcaagctgcgggatattgaacggcttgaggcgcagttggcgcagagtaaggcgcagctgcagacggtgatggcagatattctggccaagccggcagagctggactgtgccgacaatgccaaacgggtgctggcgaatattgaatcccagagcgtagcggacgcagacgctaaaccgcagcattaa

SEQ ID NO: 453388 - DNA, 1230 bp, Serratia marcescens
atgaatgtatttgacgaattagtgttgccgaatggttcgcgtatccccaaccgtattgctaaagccgcgatggaagagaatatggcggatgcggatcatgcgccttctgactcgctgctgcagctgtatcaaacctgggccgacggcggcgcggggctgctgattagcggcaacgtgatggtcgacagccgggcgatgaccggtcccggcggggtggtgctggaggacgatcgtcatctggcgcgctttacccgctgggcgcagaccggccaggcaaacggcgcgcagttctggctgcagatcaaccatcccggccggcagatgccggcagagctggggcaaaccgcctgggcgccgtccgccgtgccgctggatttgggcaacatgtccaaacacttcgccatgccgcaggcgatgagccaaccgatgatcgacgaaacgatcgcccgttttgccaccagcgcgcggctggcggagcgggccggattctccggcgtggagatccatgccgcccacggttatctgattagccagttcctgtctcccctcagcaatcaacgcaccgaccaatggggcggttcgctggaaaaccgcgcccgcctgctgctggcgatcgtccgcgccgtgcgcgcggcggtgtcgccgcagtttgccgtggcggtaaaactgaattcggccgatttccaacgcggcggcttcagtgcggatgaggcgctgcaggtggtcggcatgctgaatgatttagcggtggatctggtggagctgtccggcggcagctacgaagcgccggcaatgcagggcgcggcgcgcgacgggcgcaccctggcccgcgaggcctatttccttgagtttgccgcggcgattcagcaggtggccaagatgccgctgatggtgaccggcggcatccgccgcctgccggtggcgcagcaggttatcgacagcggggtggcgctggcgggcatcggcaccgcgctggcgttggatccggcgctgccgcgcgcctggcggcaggggcagcacagcgagccgcgcctgtcgccgatcggctggaaaaataaaacgctggcgtcactggcgaatatggcgctggtcaagttccagctgcgtcgtctcggccgagataaaaagccggcgccgcaggtttcaccgctgcgcgcgctgctggcgcagcaggtgatcaacgcactgagcgcccgccgttaccggcgctggatccgcgccagagagtga

SEQ ID NO: 453389 - DNA, 366 bp, Serratia marcescens
atgcagttatcaatcggcgagctggcgcaaaaaaccggcgtcagcgtacgggcgatccgtcattacgacgcgcaggggctggtggcctcggcgcgcggcgagaatggttaccgctatttttccgaacgggcgatcgttcaggtgcgccagatacggcggctgattaccatcggcttcagcattgcggagatccgcgcgtttccggactgcatgctgctggtggagggcgccgccttctgcccggaaactcaggcgctgcagtatcaacgcctggcggatatcgaacggcagattgaagagctggaacagcggcgggcgcagctgatggcgacgctggccggcgcaccggcgaggaagagcgcttaa

SEQ ID NO: 453390 - DNA, 201 bp, Serratia marcescens
atgcttaagaagaaaaagacgctgatgcgcttatctattagcttacttatctatttttcttttctttatttatcaaaaaattacagcgaaagatttgtggtttccgacttacctggctttattgttttatttttctttgttatcggtttttccgtatcagtgaaattcattatagataaattttttaaaataaaaatttga

SEQ ID NO: 453391 - DNA, 1323 bp, Serratia marcescens
atgatttctgttgagaacttaacccaggacgtatcagacgatgaggatatttaccgcaacaccaccggcaccctgctgatgcacctgaagcgttccggcattcgggacgtggaggtgattgccgaacagatggacgccctgcgccacaggcagtcccgcgagggcatttacagcttcgacgccttttcctgccgcggcagcgacgccgcctccccggtggcgacctcactggaggacgcgccgcgcgactgctccatctggtcaaccaacctgtacctggggttaaaccgccacccgaaggtgattgccagcgcggtcgaggcggtgcggcagatgggcaccggctgcggtacctcggccatctccggcgggatgaatattctgcaccggaaaatcgaggcgacgctgcagcgctggttcaacaaggaagcggtgatgctgttccccaccggctttaccgccaatctgggcacgctggcggcgctgtgtcaggaaggcgactgcgtgctgatcgatgaggagtcccacgcctcgatccgcgacggcatccggcagtcgccggcgcggcgctgggtcacctttcagcacaacgacattgaggatctggcgcgtaaactcggcgaggcgcagcaaacctgccggggaaaaaccattgtgattgttgagtccgcctattcgatgagcggcgacatctgcccgctggcggagctggtacaactcaaacagcgctataacttcctgctgtttgtggatgaggcgcacgccttcggtatttacggcgacggcggccgcggcctgtgccagcaggccggcgtcacggagcaggtggactttatcgcctccaccttttccaaggcggcggcctctctgggcggctttgtcgccatgtcccgccgctatgcctcttacctgcaatggagcgccaatgcctatgcgtttcaggcctgttttaccccggccgacgccgccgcggtgctggcggcgctggagattattgaaacggagccggagatcggccgtgaactgcatgagaagaaccgctatatgcgcgctcagctgcaaaaggccggtttcgacctgcgcaacagccagacgccgattgtgccgatctatattccggataccagaaagctgctgaaaacctgctttgagctgtacaagaatggggtgttttccgtcccggtcgcccacccgatggtggcggaacatgacggacgcatccgttttatcgtcaatgccagacacagctatcagcagattgaccagaccgtcgccctgctggccgcactggccgagaaacatgcgctgttcgcgccatcctga

SEQ ID NO: 453392 - DNA, 1314 bp, Serratia marcescens
gtgaggctgtggccgcgaacgctgctggcgcgtttactgctgatcgtggcgtgcggcctgctgctggccaacggcatgaccctggtcagcctgatgatcgaacggatgagcagcgccaaaagcgtgatgctgggcaacctggagtacgacgtggcgaccagcgtcgccattctcgaccgcctgccggcggcggaacggccgcagtggctgcccaggctggcgcgcggcaattaccgctaccaactgacgaaaggcgacagcggtccctatcccaccggttggcgcacgcgcggtgcggtgcgctcactgcaggaggcgctgggcggccgttacgccatcaacatcagcgccattccggggccgcgcgagcatattcaggtgcacctgacgctgcacgacggcgccccgctgacgctcgatctctggccgcgcatgccggcaattgcgcgctggctgccgctggtgctcggcgggcagctattgctgctgctgtgctgcgcctggctggcggtgcgtcaggtggtgcggccgtttacccgctttacccaggccgtcgatgcgttgaaaccgaccgccgacgccgcgcagaccatgcctgaggacggcccggcggaggtgcgccaggcggcgcgggcgtttaacgccatgcaggcgcgcattcaggatcacctgaaggagcgcgcgcagatcctcgccgccatctcacacgatctgcagacgccgattacccggatgaagctgcgggtggagatggcggaacagccggcgctgcgtgacaagctgctgggcgatctggataccatgagccggctggtgcgggaaggcatcgcctttgcccgctcggcggaaacgctggaagagccgcgtcagcgcgtcagcctgaacgccttgctcgacagcctggcctgcgactatcaggacatcggcaaagccgtcgtcttcctgccgtgcagcggcgacgaccgtttcgccgtgcggccgcaggcgttacggcgcatcatgaccaacctgattgataatgcgctgaagttcggccgccgggcgacggtcacgctggcggcgccgcagcggggccaggtgacgctgcacgtgtgcgacgacggccccggcatccccgacgatgagctgcaggcggtgctggcgcccttttaccggctggaggcgtcgcgcaaccgccacaccggcggcaccgggctggggctggcgatcgccgcgcagctggcaagccagatggccggcacgctgacgttacgcaaccagccgcagggcggtctcgacgcctgcgtgacgctgcgtgaaataaccccgccataa

SEQ ID NO: 453393 - DNA, 741 bp, Serratia marcescens
ttggagcatattgataacatcctcgtggtggatgatgaccgcgatatccgcgaactggtcacggattacctgataaagtccggctatcgcgccgtcggtgcggcaaacggccgcgaaatgcgcgcggtgctggccgctagccatgtcgatctggtggtgctggatatcatgatgccgggcgacgacggcctgacgctgtgccgccagttgcgcagcgacgcgcaacgcaacctgccgatactgatgctgacggcgcgcaatgaagacaccgaccgcattctcgggctggaaatgggggccgacgactatctggtaaaaccctttgtcgcccgcgaactgctggcgcgtatcaaggcgatcctgcgccgcacccgcgcgctgccgcccaacttgcagattaccgaggccgggcgcgtgatcgcctttggcgactggcgtctggacaccgtcaaccgccacctcctggacagcgacgataccatcgtcgcgctcagcggcgccgagtaccggctgttgcgggtgtttcttgatcacccgcagcgggtattgtcgcgcgaccaactgcttaatctgacgcaggggcgcgatgccgaactgttcgaacgctctatcgatctgctgatcagccgcctgcgtcagcggctgcgggaggatgcgcgcgaacccgcctatatcaaaacggtgcgcagcgaaggctacgtgctcgccgcgccggtggtgattgaggaggccaggccgtga

SEQ ID NO: 453394 - DNA, 996 bp, Serratia marcescens
atgaaaaaactgatgcaacaatctctgctggcgacgctgatgctgaccgccgcaggcagtgcgctcgccgcagcgcagaccaccgccgattacgcagcggcatttgaccaggttaaacaggtgaacgccggggtgctgaacgtcggctatgtggatatcggcccgcgcgacggcgaagcggtgatcctgctgcacggctggccgtatgatattcacagctacgcccgggtggcgccgcagctggcggcgaaaggctaccgcgtgatcgtgccctatctgcgcggttacggcagcacccgcttcctctcggccgccacgccgcgcaacggccagccgtcggcgatggccgcagacgtggtggcgctgatggatacgctgggcattaaacgggcggtgtttgccggcttcgactggggcgcccgcacggccgatattgtcgcggcgctgtggccggagcgcgtgacgtcgctggtgtcggtcagcggctatctgatcggcagccaggcgctcggcaaacagccgctgccgccgcaggcggagcaacaatggtggtatcagttctatttcgccaccgagcgcggccgcgccggctacgccaaaaacacccatgatttcgccagactgatctggcaacaggcctcgccgggctggtcgttcagcgagacctctttccggcaagcggcggcggcgctggataaccccgaccacgtggcgataaccatcagtaattatcgctggcggctgggattggaaaaaggcgaatcccgctatgatacttatgagcgcaagctggccgcgctgccggtgattagcgtgccgaccatcaccatcgaaggggataacaacggtgcgccgcatcccgcgccggcaacataccgggcgaaattcagcggtaaatatcagcatcgcacatttagcggcaatatcggccataacccgccggcagaagcgccggacgactttgtccaggcggtggtggacgccgccgcgctgtaa

SEQ ID NO: 453395 - DNA, 1320 bp, Serratia marcescens
atgaaccgttcagataacgagttacccgatgcatctcgccggcgtttactgctggcctccgcggcgggcgccgccgctatcggtttgctggatcacgcctgggcgacgccggtccgccagcccgttgtgccgccgaccgacgaccagatccatccgtttaccatcgccattgccgacagcgagctggccgatctcaaattccggctggcgagaacccgctggcccgataaggaaacggtgagcgatgactcacagggcctgcagttacataaaatccgtccgttggtggaatattgggcgagcggttacagctggcgtaaggtggaaagccggctcaacggcctgccgcagtatgtgacccgccttgacggcctggcgatccattttatccacgtgcgttcgcgccagcgcaacgccatgccgctgatcatgacccacggctggcccggctccgtgctggagtttctgaaggttatcggcccgctgaccgatcctgtcgcccatggcggccgggcggatgacgccttcgacgtggtgatcccctccattcccggctacggtttttcacaacgcccgcacgataccggctggcagccggcgcgcattgcacgcatgtgggatacgctgatgaagcgcctggggtatacgcactatgtcgctcagggcggcgatcacggttcggtgatttccaacgcgatggggcgtcaggcgcccgccggtctgctgggcattcacctgaccatgccggctaccgtgccggatgcgctggtcagcgcgattaatctgggccagcctgcgcccgtggcactgcagccggacgaacagcgggcattcgatcggcttagccatttctttacccgcaacgccgcctacggcgcgatgatggtgacgcggccgcagacgatcggctacgcgctgcatgattccccgaccgcgctggcggcgtggtcgtacgataaaatcgcccaatggacagacagcggcggcgagccggaacgcgtactgacgcgcgacgaaattcttgacgatctctccctgtactggctgacccagacctccgcgtccgccgcgcgtttttattgggaaaacaataacaacaacttcagcgcgtccgcccagcagaccacggcggtcaaggtgccggtcgccatttccgtcttcccgggggaaatctaccagacgccgcaacgttgggccgagcaggcgtttccgacgctcagctattaccaggccgcgccgcgcggcggacatttcgccgcctgggaacagcccgccattttcaccgctgagctacgccgcgccttccgtccgctgcgttga

SEQ ID NO: 453396 - DNA, 474 bp, Serratia marcescens
atgctacgtaaacttatcctgtccccgttactgatttttacctcggcaacctgcgcctggtcggcagaaccgggcgtacaccgcgccgccgatattctcggcccggccgccgtcgccccgctggaacggccgcagccgccggcaaaactgattgtcgatgcgccgttggccggcccgctgcgtaaaggcgcggtgtttattcagtaccgcgcggaaaacctgcggattgaaccggtatacggccccgaggcgcgcaaggtggcgccgcgcatcggccatattcacgtaaccgtcgacgacaacccgtggcactgggcggacgccagcggcgaaccggtgatcctggtcgggctgcctgcgggtaagcataaggtcaccatcgccctcgccgacccgacgcaccggccgatcgacagcaagaccgtggaattcaccgtaccgccgcatgcgccggtatcgcacgcctcccattaa

SEQ ID NO: 453397 - DNA, 1134 bp, Serratia marcescens
atgcagccgcttgagcaacggattatcgacgtcaacgtgctgagcgaggcggaaaccgaggttgaacgtgtgatgcaggtgtgtaacgcctgccgctattgcgaagggttttgcgccgtgtttccggcgatgacccagcggctggcgttcgccaaggcggatattaattatctggccaacctctgccacaactgcggcgcctgcctgcacgcctgccagtacgcgccgccccatgagtttgccatcaacgtgccgcaggcgatggcgcaggtgcggctggagacctatcggcattacgcccggccggcggccttgggtgcgctgtaccgccgcgccggcgtcaccgttgccctggcgctggcgctggggctgacgctgtttttactgctcgccatcgcgctgaagggatcgctgcgtcatccgccgctggccggtgatttttaccaaatcttcccgcacaacctgctggcctggatgtttggctcggtattcacgctggcgctggggctactgatggccggcgtcatacgcttctggcgcgagatatcccccggcgcgccacgctccgccgaccttgccgaagcctctcatcatgcccttgccctgacgtatctcgacggcggacacggcaaaggctgcaatgagtcggacgatgcctttacgctgttgcgccgtcgttttcaccatttcaccttctacggctttatgctctgttttgccgccaccgtcactgccaccggctatcactatttcgccggctggcaggcgccctatccgttcctcagcgtaccggtcatcctcggcacgctgggcggcatcggcctgctggtcggtcccgccggattactgtggctgaacctgcgccgttcgccgctgcatggcgacccgcggcaaaagccgatggatcgcggttttatcctgctgctgctgttaaccagcctgagcgggctgggcctgctggccggccgagacggcgcctggatgggcgtcctgctggccctccatctcggcgtggtgatggcgctgttcctgacgatcccctatggcaaattcgcccacggcttctaccgctgcaccgccttgctcaaatgggcgatagagaaacggcgcggcagccacgcggccgacggctga

SEQ ID NO: 453398 - DNA, 1401 bp, Serratia marcescens
atggtcgatgtactggtgattggcggcggcaatgccgccctatgcgccgccctgacggcccgtgaggccggcgcgtcggtgctgttgcttgaagcagcgccgcgcgaatggcgcgggggaaactcgcagcacacgcgtaatttacgttgcatgcacgatgcgccgcaggatgtcctggtggacagctacggcgaagaggagtactggcaggatctgcggcgggtcaccgacggtcataccgacgaagcgctggcgcgcctggtgatccgcacttctgcgcactgccgcgactggatgcgccgccacggcgttaacttccagccgccgctgtcgggcgcgctgcacgtggcgcgcaccaatgcgttctttatgggcggcggtaaagcgctggtgaacgcctattaccgcagcgcagaacgtctgggggtgcagatccgctacaacacgccggtacagtcgcttgagctacgggaaggaaactttgtcgccgccatggcgggagaggaacggatcgaagccaaagcctgcgtgctcgccgccggcgggtttgaatccaaccgcgcgtggctgcgcgcggcctgggggcaaaatgcgcgcggcgaatggccggccgacaattttttaattcgcggcacccgctttaatcagggcgtactgctcaaatttatgatggacgcgggcgcggatattatcggcgacccttcccagtcgcactgcgtggccatcgacgccagagcgccgcgctatgacggcggcatctgcacccgcgtagactgcgtgtcgctggggattgtggttaaccgcgatgccgaacgtttctatgacgaaggcgaagacttctggccgaagcgttacgccatctgggggcgtctggtagcccttcaggcaggacaaatcggctattcgattatcgacagcaaagcgatcggccattttatgccgccggtgttccccggcgtacaggctgacacgctggccgaactggcccggcggctggggctggacgccgcgcgctttacccacaccgtgacgcaatacaatcaggcctgcagaccggggcgtttcgaccacaccacgctcgacgactgcagcacggaacatctgacgccgccgaaaacgcactgggcgcgcccgctcgatacgccgccctattacggttacgccctgcgcccgggaataaccttcacctaccttgggctgaaagtgaacgatcgcgcggccgtgcactttgccggccggccgagccgcaacctgtttgtcgccggggaaatgatggcgggcaacgtgctgggcaagggctataccgccggggtgggcatgtctatcggcaccaccttcggccgcattgccggtaaagaggccgctctggtggcacgggaggcgcaacatgcagccgcttga

SEQ ID NO: 453399 - DNA, 927 bp, Serratia marcescens
atggagcttcgtcagctgcgctacttcgtacgcattgttgaaaccggcagtatgggtaacgccgcgcaggatctgaatatcggcgtctccgcgctgagccagcagatgacgcgcctggaaaatgagctcgccacccgtctgttgcaacgcacctcgcgcggggtcacgccgaccagcgccggcctggccttttattcgcaggcgcagctgtcgctgcgtcatgccgacgacgcggttctcgccgcgcgggaggcgcggctttccggccacgtcagcgtggggttttcttccagcaccgcctctgttctcggcattccgtttattaacgccatgcgtgaaaactatcccgacgtgcgtctgcatattgtggagagcctttccggcaaccttgagcgcatgatcaatacccgtcagattgatttagccgtggtctttcagccggataaaatcatgcgctggagcgccaggcccgtgctggaggagcggctgttcttaatcggcgctcatgccctgctggcacagattcccggcgatcaaatcgttcccggccggctcgccggcattccgctgattatgccgagcaaagggcacggtctgcgcggcattctgcaggagatctgcagcacgcacgcgctcaatctcgatatcgtgacggaaattgacgggctggccctgctgatgcgcgcggtgcgcgagggcgtgggcgcaacgatccagcccggcgcggcgatatcccggttggacaatgacgcattacgggtgatcggtatccagaatccgatactgagccgtcccaactttttagtcagcctttccgatgatgaacttccgccggcgggcctcgccgcccgcgtggtgctcagcaaagtcatgcgccagctggtcgatgccggcagttggccgggggcgaccctttacgccggctaa

SEQ ID NO: 453400 - DNA, 525 bp, Serratia marcescens
atgaattgggggtgtgaaataatggtttttcaaggtgtgtttatgattaatgatgcatttataaaattcaatgatatagaaggtgagctacagaactcaacttgcaaagataacattgagctactgcgctgggagtggactgttggtcagatgccatctgctaacttaggcagtagcggtggtacagggaaattagccgtcgagggcctttattttgaacaccacatcgataagttcagcccgaaactgcttaggcactgtttgctgggggaatgtattcctgaggctgttattaccataagaaagtcaggtggttcgccacttgaatattttcgcattacacttcaaaacgtcattatcatcggtgttcagcctgtcggttaccgtactatgcgcgcacccagagaggaagtggggttatctttttctaggatcaatatggattatgtaatacaaagtgaaaaagggattttcatgggtttatcttccatgggatatgatattgaagccaatattataacttga

SEQ ID NO: 453401 - DNA, 600 bp, Serratia marcescens
atgttatttatagataaaaattgcatgatagatgctgaacgtattatcgtcagaagattcagaatgatagagcgaagaagactggagaaggtgaatggaattgttgtacaccagaccggcggatccactgctgatagttcttttaatagttataaaaacccaggggcaaacggggctcattttttgatagataaagatggtttgatttatcaaactgcttccgtttttaagatcaccaatcatgttggaaatataaggtccagatgttacatggaaagtaaatgcaacccttcagaattctcagcagtaaagccattattgaataaatataggcagctttcccgtttggaacaaaagaaaccgtacccggaaaggtatcctgccaactttgattctctggggattgagattgtcggcaggcctgtttccggcgaaggtgaaaatgcaatttatgaaaaggtaaatcataaacaaaatagtgcattgaaatggttattagctgaactcgctgatacattaaacatatcaatgtctgaagtattcagacatccggaaatatcgtataaagttaaaacagaagcgagcacggcacaatggtaa

SEQ ID NO: 453402 - DNA, 432 bp, Serratia marcescens
atggtaaaatgtttaatatttataatcttactgacaggcattatgcattccgttgcggctggtcatattccactcaggaaaatcaccgaggtgaaggttgatgaagttgggaaaagcgaagatacatcggaaaatgtgaggaaagggtgccaaacgttcaacatcacggttgcggaagtaaaggattttttctcaaaatcatatcctgttccgttaatgttcaatgctcatgagcgctactctccttgttatgcacaaggaacgattgcgtttagcgacaatacgcagggtaagtggaaaatatcttccagtggtgggggaacgctagtatgggataccggtgatgtagtcacgttattttataacgattataaatgggtcgatccttttgctgacacctataccgttgaagatgaatcgctgacagaatga

SEQ ID NO: 453403 - DNA, 1173 bp, Serratia marcescens
atgattaatggcgttaaaccactggacagatcgctgcgctggggcatggtgggcggcggcggcaccagccagattggctatattcaccgcagcgccgcgctgcgcgacaacacctttacgctgctggccggcgcgttcgatattgacgcatcgcgcgggcgtgcgtttggcgaaagcctgggcgtggcggcggagcgctgctatgcggattatcaggcgatgtttgcggcggaggcggcgcgggaggacggcattgaggcggtgtccatcgccacgcccaacaacacgcactacgccatctgccgcgcggcgctggaggctggcctgcacgtggtgtgtgagaagccgctgtgtttcagcagccaggaggcggaagagctggccgcgctgagccgccggcagaataaaattatcggcgtcacttacggttacgccggccatcagctgattttgcaggcgcggcagatgatcgccgcagggcagctcggcgaaatccgtatcgtcaatatgcagttttgccacggttttcacgcccagccggtcgagcaggacaaccccagcacccgctggcgcgttgacccgcgttttgtcggccccagctacgtgttgggcgatctggcgacccacaccttattcctggcggagaccatggcgccggcgctgaagattaaacgcctgatgtgcgcccgccagagctttgtcaaaagccgcgcgccgctggaggataacgcccatgtgctgatggagtttgataatggcgccgtcggtacgctgtggtgctcggcggttaacagcgggtcaatgcacgggcagaaaatccgcatcgtcggcgaaaaggccagcctggagtggtgggatgagcagcccaaccagctgcgctttgaagtgcagggcgagccggtgcgcattctcgagcgcggcatgggctatctggatgcgcaggcgctgcaggacgatcgcattggcggcggccatacggaagggctgtttgaagcctggtcgaatctgtaccgtcgctttgccatcgccatggacgccagcgaccgccgcgatgaagcgctgttgaaagacttctggtatcccgacgtgcacgccggagtgctgggagtgcgctgggtggagcactgtgtccgctcggcggataacggcgccggctgggtggaatttagttag

SEQ ID NO: 453404 - DNA, 393 bp, Serratia marcescens
atgagaaaaacagcgctggcgtttgccctcccgctcctgctatttatcaaaatgacttccgccgccaccgactgcgcaccgctggaaagcgcgattaacgccgataaccggcagacttatcagcagttggttcagggggcgctgacggaaaaggtgcagctggcaacgatcggcatcaccaaagtgctggctgaagataaatggctggccgtgtttgccactacggagatcgccgaccccggcgtgtttttctttaacgagcataaatttgtcgatgtctggggcggcatggtggaagcacaagagcagcgcaccgttacccgctgggcgcatgcgctgcatataccggatcgattaacccaatgtttctttcaggccatcgtgattcaatag

SEQ ID NO: 453405 - DNA, 222 bp, Serratia marcescens
atgcgagcagtattgtttacggcggctgtcgtactgttatccggctgcgggctcaatgaagagcttgatgccatgacgcgggaaaatcaccaaaaagtctgtgacggctacggctttacccgcgggaccgatgcctatgccaactgcatgatgaagcaagacgaacgcgaggatgacgatgcgcagcgcgcgatggaccgggaagcaagaaagaaaaaatag

SEQ ID NO: 453406 - DNA, 843 bp, Serratia marcescens
atgtctgacgcatcaataaaagatacactgcttagcgaacgctacggcgaacaacacaagccagcggaaatcatctggaatccgcagattgaaaacctgttgagccaccgctcagtccgacgctttacggcgcagccgctgccggagcactggtttgcaactctggtcgccgccgctcagtccgcctccacctcctctaaccttcagcaatggagcgtagtggcggtgaccgacccgcagttgaaagcccaggtgcggaaactctcctccggcgccgacgggctggccaacggctacattgatgaagcgccggccatcctgctgtgggtggccgacctgtcgcgcaatcacaccatgaccaccgccgacggcctgacgcccgaggcgcacgactatctggacgcactggtaataggcacggtagacgccgcgctggcggcgcaaaacgcgacgatcgccgcggagtcgatcgggctgggcaccgtgtatatcggcgcaacccgcaacaaagccaaagagctggcggcgctgatcaacctgccggaacacagctatgtcgtctgcggtctggtggtcggctggccggacgctgcagacgcaggcagtattcgcccgcgcctggcgcaacaggtggtcgcgcaccataaccgctacgatgccgcgaatcttgacgagaacgtgcagcattacgaagagacgttcctggcgttccgcaacgcgcagggaatgaaaggaaaaacctggaagcaggccgtgcagagctccgcaaccagtatggcctatatggatggacgccagcatctgcgcagcacgctggaagagcgcggctttaaactgaagtaa

SEQ ID NO: 453407 - DNA, 582 bp, Serratia marcescens
atggctggcagaccgcgtgaatttgatgaccaggaggtcattcaggcagcgagggaggctttctggcaaaacggctttgaggcaacctccgcccagatgctggttgaatgcaccgggctggggcgcggcagcctctacgccgcctttggcagcaaagaacagctgtatcataaggcgctggagagctatcaccaggaaagtattgattttcatcagtcaatcttttcgtctgccggcaccgtcaagcaacgcctgcatacgctgctgcaaaaaggcaccgaaatcgatctcggcgacgtggagagaaacggctgtatggcgatcttctccccgctggaaagagcggcgaaggacgatcgggtccaacagttaagccgcgcctatatcaaacgcctggaaggcatgttcgctgcgctgtttcagcagggaattaccagcggcgagttccccgcccacaaggacgcggcggaaatggccatggcctttatgtgcgcctactttggttttcgcgcgttcggccggattgtccatcagccggactgccagcaacgggcgattgtcgcactgctgaacaacctgtaa

SEQ ID NO: 453408 - DNA, 834 bp, Serratia marcescens
atgaaaccagccaagctattttttatcaccggcgtcagcagcggttttggccgcgcgctggcggaacaggcgcttctggccgggcaccgggtggtcggcacagtaagaaatcaaccggccaaagcggcgttcgaagccctgtcacccggccgcagcttcggccggaccctggacgttacggactttagcgccatcccgccgctggttgccgcggttgagcacgaggtcggcgccgtcgatgtgctggtgaataacgccggctacggccatgagggcataatggaagagtcgtccatcgatgaaatggtgcagcagtttaacgtcaacgtctttggcgccgtcgcgttgatgaaagcgtttctgccctacttccgggcgcggcgcgcgggccatattgttaacattacctcgatgggcggatttatcaccatgcccggcatcagctactactgcggcagcaagtttgccctgcaggggatttcggaaacgttaacgcaggagctgaagccgtttaatattgccgtgacggccgttcagcccggctcgttccgtaccgactgggccggccgctccatggtgcgtgccgcacgcagcatcagtgattacgatgacagtttcgggccgatccgggaggcacggatgacgcgcagcggccatcaacccggcgatccgcgcaaggcggccgacgccattttgcagctgattgacagcccggccccaccgacagcgctgctgctgggcagcgatgccgtaacgctggtgagagaaaagctgcagcgaatgcaggcggagatcaacgcctgggaaacggtcagcggttcaaccgatggctga

SEQ ID NO: 453409 - DNA, 324 bp, Serratia marcescens
atggcgagtaacagcggggaaggcgtgtgtttccatgttccggacagcaaagattaccagccatccctgattgccatcaatccccgggatacaccgccgcagcggttatcggtggttgatgcccccgatttaacgataaacaacggtatgttgtgcattccccctggcttttactcttttccgtcagcaggacagtttatcgtgcgctatatactcacctcgccgacggatagcgaatcaccaagaagcgtggtggccggtattgagttatcggacgggcagattaaaaatataccgctctctgacgcagagataacgcgttga

SEQ ID NO: 453410 - DNA, 897 bp, Serratia marcescens
atgctcaaaagtgataacgtaatgccacgtgcctacaaacaggtggacgtatttaccacctcgccactgcagggtaaccctctggcggtgatcctcgaggccgaaggcctgaatgacgcgcagatgctggcgttagcgcgctggaccaacctttcagaaacgacgtttgtgttcaaaccgacccatccggatgcagactaccgagtgcgcatttttacccctgaaaaagagttaccttttgccggacacccgacgctgggcacggcccatgccttgttggagagcgggttagagacccaacggccgggggtgattatgcaggaatgcggcgttggtctggtggcggtgaatattatgccggaaggcacgctggcgtttgccgcaccggaggttacgctgcgtgcgttgacggttgaggaacggcagcagctgacggccaattttcagccggcggtgatagccacagatattatgccggtggttgccgatatgggcattcgctggctgatggtgcgtatgcccgatgcgcaatcctgcctggcgataacgccggatcagccgatgattaagcagatgcaaattgaccatcaggttgacggcgtggtggtttatggcgcttatccatccggcgatccggcggattatgaaatacgggcgtttctggttgagtgggataagttggttgaggatccggttaccggcagcgccaatgcgtgtctggcgcgtttgctgcaggccaatcactttcccgatggcggtgtgacggagcagggctatcaggtgcggcaaggcacccaactgcaccgggcaggccgggtcagcgtgcgttttattgacggcgagccgtggatcggtggccagagctgcacgttgattgagggtttgctgcgtatttag

SEQ ID NO: 453411 - DNA, 363 bp, Serratia marcescens
atgttaaatcaaaaattcaactgcggtctggaagcgtcgttggcggtactgagcggaaagtggaaaccgctgatactgtttcacctcgcccatgaagtacatcgttacggggcgttgaggcgcgcgattggaaaagtaagcgacaaggtattgattcaacagctgaaagaactccagcaagatggcgtggtcgcgcgtaccgactacggcgaaattccgcccaaggttgagtatgccttaaccagcttcggcgactcgctggcccgcgcgttagcgccgctctgtcagtggggagagcggcatacggagcagattgaaaatatcgtgcgcaaccgggagaagccacagagcgatcgtctgtaa

SEQ ID NO: 453412 - DNA, 750 bp, Serratia marcescens
atgagtagattagcgggaaaaatcgcggtgattactggcggaaatagcggtatcggtctggctgcggccaggcgttttgcccgggaaggcgctcaggtcgtcatcaccgggcgccgccagaaagagcttgatgaagccattgcgttgataggccatgaagcgcttgcgattcagggtgatgtatcaaagctggccgatctggaacgtattttttctcatatccagcaggtgaaaggaaaagttgacgtcctttttgctaatgcgggcctgggtgagcttcagccgcttggcgcgattaccgaggaatcgtatgagcatacgtttaacgttaatgtaaaagggacgctgtttaccgtgcagaaggcactgccgctgatgtcgcaaggcggctcaattatcctgaccggctcgacaaccggctcaatgggcacgccggctttcagcgtttacagcgcttcgaaggcggctattcgtaactttgcccgcagctgggcgctggacctacagggaacggggatccgggtaaatgtgctttcccctggttctaccgcgacgccggggctgtttaatgttctggagagctcggggcaaaaggagagtttactggccaatttcgctcaggcatcgccgcttggccgcattggcgacgcggatgagattgccgccgttgccttattcctggcttctgacgagagcagctttatgacgggcagcgaagtcttcgttgacggtgggctggcgcaaatttaa

SEQ ID NO: 453413 - DNA, 909 bp, Serratia marcescens
atgcaaataagcagagctgatgttgccgatctcatttatttcatggctattgcacgtcatcgcagtttcagccgtgcggcgattgagttaggtgtcagtgcgtcagcgcttagtcatgccttgaagggactggaaacccggctcggggttcgcctgcttaatcgcacgaccaagagcgtcacacctacggcagcaggtgaggaactgattcagtctgtccttcagcctttcgacatgatagaaggcgcgtttgaatcgcttaaccggtatcgtaatacccctaccggacgtatccgtatcaatgctgccgttgaagcggcaaatcttttgcttgcaccggtcttgcccgcttttatggatcgctatcccgatattgaaatagacatcgtggccagtaaccgtatgattgacgtcactgatgcgggcttcgatgcaggtatccgctatggtggcaccgtcccggaagacatggttgcccggcgtttatctgccgatattcgctgggttatcgccgcatcccccgattacctggaacgctacggaacgcctgcacacccagatgatttgttacatcatcgctgtatcagcaatcgtctcggtgacgatcggatttatcgctgggaacttgaaagagacggcgaaacgtaccaaatcaccgtgcctggctcagtgacggtcaatcaggctgaaacgggccttgtggccgtattgggcggggctggcctgatgtattttccggagcctcttgttgcaccctatgtgaaggatggacggctccgcctggtgcttacggaatggtccccgctggaggaaggttttcatatctattattcaagccgtcgacaactgccgaccgggcttcgccttctgattgaattcatacaggaaaccaggccgctgggattgtga

SEQ ID NO: 453414 - DNA, 987 bp, Serratia marcescens
atgaactatacgcatcttggccgcaccggtctgaaagtcagccagctttgtctcggaaccatgaattttggtgacgtcaccgacgagaaaaccagcgcccgcattctggatgaagcgcttgaggcgggtataaatttcattgatacagccgacgtatacggtactgaacaatcacccgatatccagcaaggttcaggcctgtccgaagagatcattggtcgctggcttcagcagggtggccggcgtgaccgtatcgttctggcgacgaaggtctatcagcccatgggacctggtccgaacgatcgccgtctttctgcttatcatattcgcaaggcctgcgaggacagtttgcgacggcttaagaccgatcacattgacgtctatcagatgcatcacatcgatcgtcatacgccatgggaagaggtctggcaggccatggaactcctcgttcaacagggaaaagttctttatatcggtagcagtaatttcgccggctgggacattgcaactgcgcagtcagttgccacggcccgccatttccttggcctggtggccgagcaaagtctttacaatctgacggcccgcaccgttgaactggagctcattcccgcatgccgtcattttggcctggggctgattccctggagcccactagccggagggttgcttggcggcgtattgaaaaagatggcaagcgggcgccgtgcaaggcctgcatttgcccgtcaagttgaacaataccgttcgcagctggaagcctacgaaggattatgtgaggacctcggcgaaaccccttccgatgtggcgcttgcgtggctcctgcagaatcctgtcgttaccgctccacttatcgggcctcgtactgttgaacagctgaaagaggcgcttcacgcaacaacaataacgctatcagacgacaccataagctgtctcgaagagatctggcctgggcccgggggggaagcaccacaggcttatgcctggtaa

SEQ ID NO: 453415 - DNA, 1056 bp, Serratia marcescens
atggcgaaaccggctggtcaggacacgtcgaacagtccttcggatgctgttccagtccagaaggaaaccttaaccacgcgtaaactcggctcgctggaggtttccagcatgggactagggtgtctgcctatggtggggtattacggcggtggtccgcgcgatcgtaaagcaatggtttcgctcatccgggcagccttcgaacaaggtatcacgttctttgatacagccgaggtgtatggcccccatctcagtgaagaatttgtcggggaagcactggctcccattcgcgatcgtgtggtgattgccactaagttcggtttcggcgtggaggaaggtaagccgacatcccttaacagccgccctgaccatatccgccgtgccgtagagggctcgctaaagcgtctgaaaacggaccacatcgatcttctttatcagcatcgccccgatccgaacgtgccgatcgaggatgtggcggaaaccgtgaaggcgctgatccaggagggtaaagtgaaacactgggggctgtcggaagcgggtgcaaggacaatccggcgcgcgcatgcggtgctccctgtgacagctgtacagagtgagtatgccatgtggtggcgtgaaccggagacgcggatatttccaacgctcgaagagctgggtattggcttcgtaccttactgcccgaccgcccgcagtttccttgccggggcagtcaatccaagccagcggtttgacagcacagatcggcggcataacctgccacgcttccagcctgatgctctcgccaaaaacatggcgctgtttgaatttgcgcagtcgtgggcccgtcgcaaaaacaccactccggttcagttcgcactggcctgggttatggcacaacgaccatggattgtccccatcccgggtactacgcagtatccgcacttaatagagaatatcggtgcaccgaaagttcagttgacggacagcgaactacgcgaaatcgatgcggcgcttgccaaaattccattgcagggcagtcgcgcagatccgtttaccgaaagtcagtttgataaaagttaa

SEQ ID NO: 453416 - DNA, 1038 bp, Serratia marcescens
atgaagtatgtgaatctgggtcgtagcggtttgcaagtctcccgtctttgtctcggttgtatgagctatggtgaacctgaacgtctgcctcaaccctggtccctggatgaaaaggcgtcacgtccgctcattcgtcaggcgcttgaagctggcattaatttttttgataccgcgaatatctactcgggcggaagttctgaagagatcacaggaaaagcgctgagagaaatggccagacgcgatgagatcgttgtggcgacaaaaaccttctttccgtggcgcaactcacccaataccggatttctttcccgcaaggccatttttcaatctattgacgatagcctgatgcgcttaggtatggattatgtggatctctttcagattcaccgctttgaccacactacgcctgttgaagagaccatggaggctctgcatgacctcgttaaagcaggaaaagtacgttatatcggcgcatcttctatggaagcctggcgctttgcaaaaatgcagcatactgctgagcgtaacggctggacccgatttattacgatgcaaccgcaatacaacctgctttaccgtgaagaagagcgcgagatgctgccactttgtgaagaccagggcgttggtgtaatcccctggagcccgatggcacgcggcaggctcacgcgcgactggagtatcatgtcccgacgaacgaaaaccgatgcctttgcgttaaaaatgtatgagaaagcagcccttctggataaacccgttattgatgttgttgccagaattgccgaaaagcacgatgtgccaagagcccatgttgccattgcctggttgttatcaaaaacggtcatcacagcaccgatcatcggcgcgacgaaaccagagcatctttctacggctatcagcgcgctggacttttcacttagcgcagcagaaatcacggaactcgaggcactctatctgccgcaccccgttgacggtatcattcccccgcttccggatacgccgccttcactcacgccgccgtcagcaatacagaaccgttaa

SEQ ID NO: 453417 - DNA, 228 bp, Serratia marcescens
atgacattaccgagtggtgaaacggtgaaagctgaagaaaagtttttcgtcgtgcgcgtgatgggtcatcaaaaaatcaacggtgataaccggaaccacgatgaacagcagattatcagcgcgcatcactggtggagtgaacaagaactcaaaacaaccagagagactgtttatccgcagaatatcgttgagctgttggcatcgatccagtcaacaggcaaaaagtga

SEQ ID NO: 453418 - DNA, 597 bp, Serratia marcescens
atgataaaccagcttaaaaagagccttgaactgggcgccagcattgaaaaacagatcggcactgacgatccccaacggcttgaatctattaaagatgacttaaaagaccaaatgggggcgccggttggcctgcatactgctggcgtaccgttaatcttcagcgcactctttgccctcctcagctttgttatgccgcagctcaccgtctggagcgcggttttcaactggatggcatggccacaacacgctgtttttgtagggataatcataaccggactggtctattgtctgctgatgttcccgtcaatgacgctgatttccaaaggcagtgtgtcagcactgaaagtttacctcttgctgatgctgttaactgctgtggtggccgtgctgtatctgctctacaccattatcacgttgttattcgctgctgaataccctatgggatatccgatcggtgcgtttatcgggctggtttttatcctcgcaagcttcatctgtctcaacagcgccatgttcgttaagacaatggcattctatttacataaccgcgtgtggcgtcggcagctcaaactgcagcaattacctaaacggaaataa

SEQ ID NO: 453419 - DNA, 297 bp, Serratia marcescens
atgatgaaccgatggattttatccgccgccctgctgctgcccgcctttggcgcgacggcgggcgcttacgacagcctggcctttgcgctgaatcagcaaacgttgattaacgatctgcgtgcgcactgccaaatcgccaaagaggtgccggacgagaagataaaatcggtctttaccaacagcaaagaaaaccacgaggcgctcagcgccaccgccagcgcgctgaagaaccaccagcaggagcagtatcagcagcagctgcagcgtattcgctgcccggactttacccggcagtaa

SEQ ID NO: 453420 - DNA, 1134 bp, Serratia marcescens
atgaataaaatggaacaatgtcggcgtacgctggccgcatcgtcgcactgggcaaaccggcgcgatatggttaaccaggcgataggcgccagtcttccctggctggcgtccgtcaatatcgccttcgccatgctggtggcattgcgtaatctgctgttccccggttttgacgccgcgctgcacatcaacgccgttatccctttactgatggatggtgtgatgctgctggtggtgacggcgtcactgattctgtggggcgtttcccgtcgcgatagcagcggccgctatgtgcgccgctgcgccttactgctgctgccgctgctgggggtatgttgggccgtcagcagctatggttttatcgcttattggcgcctgccgttcgcctggccgctggtatgtattttaatgctgaccggtatggcctcgctctacttttacctgcaggggctggcgctgtttctgacgccgctatggttgaccatgccgctggccagcgtccatctcaaccacgggataaacctccattttgccgccatatggctgatcttcaccgccatcgtgatctacggccgccggatcctgctgcgctggttcaatgaggcctgggccagccatcaggaaaaccggcagctgattgcccgtttggagacgctgacgctgcaggacccgttaaccgggctggccaacagaagggcgctggagtctcatcttgccagtctgcacgcagttcaggttcctttggcgctgatcatggtcgatgtcgatttctttaagcattacaacgatcgctatggtcatcaggcgggggacgcctgcctgaccaaggtcgccgggctgctggcgacggcggtcagaacgccggaagatttggttgcccgctacggcggcgaagagtttacgctggtattggcgcatgccgatgcacagcaggcggcgcaggttgccgaacgcgtccgcgtccggatagaggaggcggctttgccccacgccgcctcggcgatcggccgttttgtcagcgtcagcctgggcgttgccgccaccgacgggcggcagacgccgcagcagacgctcgccgaggccgacgcggcgctgtaccgcgccaagcaggccggacgtaaccgctggtcacactga

SEQ ID NO: 453421 - DNA, 417 bp, Serratia marcescens
atgcacattgtcttctcactgcttgccgggctgctgttcggtctgggcctgatcgtcagcggactggccaacccgcaaaaagtcctcgcttttctggacgtcacccgcgtttgggatccatcgctggctctggtgatgggcggggcgatcggcgtcagttttttcgccttccgcatggcgcaacggcgtcatcggccgcgctatggcgagaaaatggtgctgcccgtcgccacgcagattgataaacggctgatcggcggggcggcgctgttcggcatcggttggggcttggcggggatctgtccggggccggggctggtactgctgggcgcgggggcagtcaaagggctggttttcgtgctggcgatggtggccggcatgctgatttaccagcggctggagcaacgtttgtcctga

SEQ ID NO: 453422 - DNA, 423 bp, Serratia marcescens
atgacgattgatatcgcgtactttacgccgctgcagagctttttcggcggcctgctgatcggcgccgccgtctgggtgctgttgctgttttgcggccgcgtcgccggtatcagcggcatcctgggcaacgtgttagcgcgggcaaccagggataaaggctggcggctggcctttttgatcggcatggtcctgtcaccgctgctgtaccgactggccgcgccgctgccggagattgagattgcggcttcgtggccgcggctgatcgttgccgggctgttggtgggcatcggcacgcgctacgcctccggctgtaccagcgggcacggggtgtgcgggttggcgagactgtcgcggcgttcgctggcggccactgcgacatttatcgtgacggcgatgatcaccgtctggatgatgggagcctga

SEQ ID NO: 453423 - DNA, 336 bp, Serratia marcescens
atgacccagataaatcaacaacaaatgcgcgctgccgccgccaggacggcagagatcctcaaatccatcgccaatgaagatcgcctgctgctgctgtgccatctcagccagggcgaggcgtcggtgggggaaatggaaaccgcgctgggcattacccaacctacgctgtcgcaacagctgggcgtcctgcggcgtaaacagctggtggctacccgccgcgccggcaaacagattttctatcgtatcgcctcgccggatgtgctggtgctgctgacgacgctgtatcagctgtattgcccgacagcgaatgaagaggagaagcatcatgacgattga

SEQ ID NO: 453424 - DNA, 306 bp, Serratia marcescens
atgcagttccgcgtttacacctaccagcgtgagagccgctacagcctgtttgtggatgtccagagtgatattatcgatacgcccggccggcggatggtgatcccgctggtcagcgcccggcagctgtcagacaaggttccgtatgaactgtatccgctggtacagatcgccaatgaaggctaccgtctgatgacgacggagatggccagcgttccagcttcggtgaccggcgatgaagtcgccgacctcagcccgtgggagacggaaattaaggatgcgattaacctgatgttctgggggatctga

SEQ ID NO: 453425 - DNA, 2328 bp, Serratia marcescens
atgccccagcccccggtcacgctgcggctcgcgagcggcctgcggcttaagctgctcgccgatgccgccgcgccgcgcgcggcggcgttgatgcagattgacgccggcagttaccacgaaccgtcggactggccggggctggcgcacctgctggagcatatgctgtttcgcggcagtcacacctttgacggcgaccagcggctgatgagctgggtgccggcccacggcggccgcctcaacgccaccacccgcgaaaccgcgacccacttcttttttgagcttgacggcgaacgcttcgccgacggcctggcgcggctgatcgacatgctggccgccccgctgctggccctgccggcgctggcgcaggaggttgaggtgatcgacgccgaataccagctgctgtgccaagacgccgatacgctgtgcgaggccgcgcagcagcaggcgtttgacggcattgccgccatgcggcgttttaccgtcggcaaccgccgggcgtttggcgacgatatgccggcgctgtgcgccgccctgcgtgatttccaccgccgccattaccacacggcgaatatgacgctgtggctgcaggcgccgctgccgcttgcgcagctgcggcagctggcggaaacgctgacgcagccgctgccgtccggcgtcgtcgccgacagcacggcggcaccacggctgatcccgcgtgacgatcgtcggctgaatttgccgggactgccgcagctgcgtttcacctttgcgcttaacgcggcggatgccgccgcccgtgacgggctgcgcctgctggacgcgctgctgcaggacgaagcgcccggcagcctgatggcgcacctgcgccgcagcgcctgctgcgacgccgtccgcctgcagcataccccctgcgccgacgatcgcgcgctgctgacgtttatcttcagcgtcaaccgcggcagcgcggcggaggcggcaatcattgaaaacgccctgctgggctggctgcagcagctgccgtcgctcagcgccgcgcagcgtgaacactacgcccggcgcggcaatcaggactttatgcgactgacgccgcttgaccaacttcgggcgcgggcattcggcctgccgccgctggcggaaaatgcgccgtggccagcctgtctggccgaactgacggccggcaacctgcgccgcctgttggtcagcgccgagacggccgccgaatcgcgaatggtgcaggggttgccgctggcgctgacgccttttgtcgccgcccacagcgcgcgccggccgctggattaccgtttctacccgcgccacgacgccccgtcgacgccgttggcgctgcctgcggaacgcgcgccgctgagctggcgcgccgacggcgatcatccgccggtgctgctgctgcgccccgcgccgtctacgccgctggcgtccgaacaggccgcgttgctgacgtcggcgctgcgcacgctggcggcagaaattacccatcagggcggttcgctcggcttcacgcagagttacggcgtctggacgctgcaagtgtccggcgacgcgccgctgctgtgccgggcgctcagtcagatcaatcagcgcctgaccactcttgacgatgcacttaagcaggaagcagcgctcagctggcagcgtacgcagctgcgcgctcagggcgaaatcgccgtgcgccgtctggcggcgcaattgccggcggtgttggcgccgccggtcgacgcggtgagctggcaggcgacgctgtttgccggcgatgcggcgctgcatcagcagctcagtcagctgctctccgcctttccggcgccgatcgtcaccgcgcaggatgtcgtgccgatcgccgccgcgcagccggtgcggcttagcgacgaccgcgccgatgaccgcacgctgctgctgttctatccgctggcggacgacacgccgacggcgcggctggcgctgcggttgctggcgcagctgtatgcgccccgcttcttccagcggctgcgcgtcgagctgaatatgggctacgtggcgcactgcgcctatcaccgctgcgccgatcgcgacggcatgctgtttgccttacagtcgccgcgctgcagtcttgagcagttacacaactatacccgtgagtttttacagcagatgaggcaggaattagccgcgctggacgcaacggcgctgcagcaggcgaaacagacgctggcgcagagcctgcaatcttccgccggtgattactggcagcgcacgcgggacgaggtgttggaacagcggccggacgccgtcgcgctggcggcgctggatttgccggcgctgcttgacggacagcgccggttgtttactgcggactga

SEQ ID NO: 453426 - DNA, 447 bp, Serratia marcescens
atgaatggcctttatccggcgctggcgcttgccgccggcgcgatgctgccgctgcaggccgcggttaacgccagactgggtcgagcggttggcgggccgctgtgggcggcgtccatctccgcgttggcggtggcgctgattctggcgctgttggccctggccgccggtaaaccctggccgaagctgtcgcagatggccggcctgccgtattgggcctggctgggcggcgtatgcggtgcggttgtgctgtcggccaccaccgccgtcgctccgaagatcggcgcggccggtatgattgcgctggtgatggtcggacaggtggtggtggcgatgctgctggatggcaccggctggctggcgatgaccgttcaaccgctctccgcacagcggctgattgccgcggcgctgctggttgccggcgcgctgctgatggggtggaaggcgtag

SEQ ID NO: 453427 - DNA, 843 bp, Serratia marcescens
gtgcgcggcgttaatctgcactacgtcgccggcggcgagggcgagccggtactgctgatccccggctggccgcagagctggtatgcctggcgctacctgatggtgcagctggcggcggcaggacgtcgggtcatcgcgttagatccgcgcggcatgggtgagagcgatgcgccgcgcggcgactacgatctgcaaaccgttgcggcggaagtgcatgagttcgccgtcgccagcggcctgctgacggacggcccgattgatctggtcgggcacgacgtcggcagctggatcgcctacgcctgcgccagcgactggccgcaggatttccgcagcctgacggtgatggatgcgctgattcccggcctgtcgacgccgcgcagcgatctggatgccgccgaggccaacctgcgcagctggcactttgcctttaaccgcctggacgatctgccggagatattgattagcggcaaagaaagcgcctttctgacctggctgttccgcgccaaaacgctgcgcggctggacgattgcgccggaggatattgccgtgtacgcccgtcagctggcggcgcccggcgcgctggccgccgcttcggcctattatcaggcggccttttccccggcgggcgtggccgctaaccagcgtcgggctgagacgcgtctgcagctgccggtgttggcgctgggcgccgagcgcggcgtgggcgacggcatcgttaaagcaatggcagggctggcgcaccgcgtcagcggcggggtgattgccggcgccggacactatctgccggaagaggcgcccggccgtatagcggatgagctaacggcattctgggcgacgttatga

SEQ ID NO: 453428 - DNA, 630 bp, Serratia marcescens
atgatcgtttcctatattgacggcatgaataatatctccccaagccagcgcggccgaccgcgcgaatttgatactgaacgcgcactgcagcaggcggtgcgacagttcagcgtgtatggctaccacggcacctccatcgccgatctgaacagggcgcttaatctcacctcgggcagcatctacaaagcctggggcgataagcgcgggctgttcctcgccacgttggattactatatcgcgcagcgtattgagagcgtgcgggctgccaccgacgccgcacgcagcggacgggagaaggtgtacgcctttctggccgcctacgccaaactcagcagcggctctgaagggcgtcagggctgcctgatcgtcggcaccgccgttgagctgtccgcctacgatgacgagatcgcccggcggctggccgcccaacagcagcgctgggaaagccagctgagccgcctgttggaagaggggcagcaagacggcagcgtcgccgcgtcgtgcgagccggccgtcaccgccacgctgctgatcgcgctgacgcgcggcatgcgcgtgctgggtaagaccggcgccagcgaagaatctatgacgcgcatcattcataaagcgatgtgcctgctcgattaa

SEQ ID NO: 453429 - DNA, 1656 bp, Serratia marcescens
atgaaacaacggtggtggaaagaggcggtggtgtaccagatttatccgcgcagctttatggacagcaacggcgacggcatcggcgacctgaacggcgtgcgcgacaaactggactatctgcaggaactggggattgacgtgatctggctgtgcccgatgtatcgctcacccaacgacgataacggctacgatatcagcgactatcagcaaattatggcggagttcggcaccatggccgactttgacgcgctgctggcgcaagttcacgcgcgcggcatgcggctgattctggatctggtggttaaccacacctccgacgaacatccgtggtttcttgaatcccggtcatcaaaaaatggcccgaaacgcgactggtacatctggcgcgatggccgcgacggcaaagagccgaataactgggagagcatctttaacggctccgcctggcgctacgatgcgcagagcgggcaatattttctgcatctgttctccgcccgccagcccgatctgaactgggagaacccgcagctgcgccaggcggtgtatgacatgatgcgttggtggttggataagggcatcgacggtttccgcatcgacgccatctgccatatgaaaaaagagccgacgctggcggatctgcctaatccgcaggggttgccctatgtgccgtcgttcgccagccatttgaactatcccggcctgctggattatgtggatgagatgtgccgccaaaccttccaccattacgacattatgacggtgggcgagatgaacggcgcctcggccgagcagggtgaagactgggtgggcgagcagcggcagcggctgaacatgatctttcagttcgaacacgtcagactctgggagcagcagccggacgccggtctcgatctggccgggcttaaagttatttttacccgctggcagaccctgctggacggcaagggctggaatgcgctgtacgtggaaaaccacgatattccgcgcgtggtgtccaaatggggcgacgaccggcgctactggcgtgaaagcgccacggcgattgcggcgatgtattttctgatgcagggcacgccctatatctatcaggggcaggagatcggcatgaccaacgcgccgtttaaccacgtcggcgattttaacgacgtggcggcgaaaaaccgttatgccgaactgcgccgacagggcagaacagaagaagatgcgatggccctgctgcgccgcagcgcgcgcgataatgcgcgcacgccgatgcagtgggacagcggcgaaaacggcggctttagccatggcacgccctggctgccgctcaacccaaactaccggcagatcaacgtggcggcgcagcgtcggcaacccggctcggtcttccagttttaccgggcgctgatcgctctgcgcaggcagtatcgccagctgttggtgtacggccgctatcaactgctgctgcccgagcatccgcagatctacgcctacgcccgtcaggcagaggcgcggcagatgctgatcctctgcaacctgagcgcgcgcgacgccgcattcgccgctgacgcgctgccgctggacggggcggtgctgcagctgggcaattacctcgatgtgacagtgtcacatgcgctgcgcccttacgaggcgcgggtttacctgctggagtaa

SEQ ID NO: 453430 - DNA, 204 bp, Serratia marcescens
atgattatttcaatttttgttctgctgtatgccattctgatgatctccgtcggtatcaacgagatctacttcacctctaccggtgaatccgccttctttatcagcctgctgctgaccttcttcggcgccttggtgctgctgggcctgatctggcgttttgccggccggcgcggcgaaaaaaaacgccctaaaccgcaggattga

SEQ ID NO: 453431 - DNA, 723 bp, Serratia marcescens
atgacgcagaaagtgatcttgattaccggcgcctccagcggcattggcgcgggcatcgcccgggagctggccgctggcggcgccctgctgctgctcggtgcgcgtcgtgaggcgcgtttggccgccctggccgatgagctgcgcttcagcggcgcggaggtggcggttcaggcgctcgacgtaacccgccgcgactcggtgcagcgctttatcgaccgcgcgctacagcaatggggccgcatcgatgtgatgatcaataacgccggcgtgatgccgctgtcgccgatggcctcgctcaaggtggaggaatgggagcaaatggtcgacgtaaacatcaagggcgtactgtacgggattgcggcggtattaccgccgatgctggcgcgcgagtcggggcatatcatcaatattgcctcgatcggtgcgctggcggtgtcgccgaccgcggcggtttactgcgccaccaaattcgcggtacgggcgatttccgaagggttacgccaggagaaccgccaactgcgggtcacctgcgtgcaccccggcgtggtggaaagtgaactggccgatagcatcaccgaccccaccgccgctgaagcgatgaaaagctaccgcgccatcgccctgcagccggacgctatcggccgtgcagtgcgttacgccattgagcagccggaggatgtcgatgtgaatgagatcgtagtcagaccggcgcgcacgcagtag

SEQ ID NO: 453432 - DNA, 1674 bp, Serratia marcescens
atgcagacccgtctgttcaaaatcctgacgctcagcgccgccatcatggcggcaagcaccccgctgctggcagcggaactcaacgccggcgccgtcgccgcgccggatgaatacggcgccaaggtggcggcgcagatcctgaaggccggcggcaatgcggtcgacgccgcggtggccaccgcgtttaccctggcggtgacctatccggaggccggcaatatcggcggcggcggatttatgacgctgtatgtcgacggcaaaccctacttcctcgactaccgtgaaactgcgccgcaggctgccagcaaaggcatgtacctgaatgaaaaaggcgaagtgattgagaacctcagcctgatcggcagcaaggccgccggcgtgccgggcacggtgctcgggctgtgggaggcgcataagaaattcggcaaactgccgtgggccgagctgctgacgccggccatcggctatgcgcaacagggctttaaggtcgccggtcagcagtatcagtaccgtgaagacgccaataagctgtttgccggcaaaaccaactttggcgactacttcggcaagatgcagccgggcgtggtgtttaaacagccggagctggcgaagacgctggcccgcatcgccgataaaggcgcgacggacttctaccagggtgagaccgccgccctgctgctcaagcagatgcaacaggacggcgggctgatcagcgcgcaggatctgcagaactaccgggttaaatggcgcgagccgatgcagatcagctggcgcggcaataccctgtataccgccccgctgcccagctccggcggtatcgcgctggcgcagctgctgggcatcaaggaagatcgcgcggcggattttcgcggcgtaacgctgaactcggcgcgctatatccacctgttggcggaaattgagaaacgggtatttgccgaccgcgccgactatctgggcgatccggacttcagccaggtgccggtagagaagctgaccgccgccgactacctgcagaagcgcgcggcggaggttaatccgcaggcgatctccgccaccgagaaagtgcggccgggcctggagagccaccagaccacccacttctccatcgtggatgccgacggcaacgcggtcagcaacacctataccctgaactgggacttcggcagcggcgtggtggtcaagggcgccggcttcctgctgaatgacgagatggacgacttcagcgccaagcccggcgtcgccaatgcgttcggcgtggtcggcagcaacgccaacgccatcgagccgggtaaacgcatgctctcctcgatgagcccgaccattgtcacccgcgacggcaacgtgacgctggtgatcggcacgccgggcggctcgcggatcttcacctcaatcttccaggtgctgaataatatttatgactaccacctgccgctgcagcaggcggtggcggcgcagcgggtgcaccatcagctgctgccgaaagacaccatctacttcgacggcttcgcgccgttaaccggcgacgtggccacacagctgaagaagatgggctatacgctggaagatcagggctggaatatgggggatattcaggtgattcgggtcaataacgcgacgccggaaaccgcctcggatccgcgcggacgcggcaccggcctggtggtcgccaagtaa

SEQ ID NO: 453433 - DNA, 672 bp, Serratia marcescens
atgactttctcaatgcttaagcgttacggtgtaacaatgttattggccgccggcgtcagcgccccggccgtcgccgatgagcgggcagcgccggggaacgagcggctgcagacgatactgacggtgagcgcccaggcgccgatcgccgagctgaaccgcgcgaccgccagcctgaaggcgcagtttgaacagcatccggactacagcgtcggcaagatgttctatggctacgggcagctgtttatcgccacggattttttaaacaaaaagaactacctgcgcgccgccgaggcctccaagctgggctttttctatattgacgaggcggcggaaactgatgaagacaactggcgtctgcgctttctgcgggcgcggatggacgcttttgtaccggccgacaacggccgctgcgtggtggcggtaaaagataccggctatctgcagcagagcacagcgctgccggcggcgctgcggccgatggtgacgctgatggcggcgcgcgcgctggaaacctgccggcagcaggagcaggccgccgcggcctggacggcgctgggcgagcagggtgacgaggggcagcgcctgctggcgctgcgcaagcagccggcaccggcgtggtcgccggctgaactgaagctggtgctccagccgctggcggaggctgcgttatga

SEQ ID NO: 453434 - DNA, 738 bp, Serratia marcescens
gtgaagagaggcgcgttattgctgctgctcgccgccgcgccgctttcggccgcgccgcggcccgactatcaggcggtgtaccacattctgccgctgcgcggcgatacgccgatcggggagtaccgcgtcagccagcgctggcagccggacagcaagagctatctgcagcaggccagcattcagttccgctggcgggtgctgctgagttcgcaccagtaccgctaccgcgatgaggtgcgctacggcgtcgacggcgggttcagctaccggattgaggaagataacgacggcaggacgcgccaggtcagcggcggctggcaacccggcgcgcaggcgctgaccctgacggtgcgccgcgaccagcaaccgccggagacgctgacggtggccaaagcgacgtttgatttcccgctgttcgccctgcgttttcctaaaccctgtgcgccgcagcaggcggggacgcgcagcagccaccggatgctgatgccgattgacggcgcggtggtgcagaccgagagccattacgtcggcgtcggcgagctgacgctgcccggcgacggcgttgcgacgccggggttgtgccagatcgtcagcagcggccaacggcgggacgccaatcaccgcacctgggtcaaccgggacggctatctggcgtacgaaatttccgccgactatcgcctgcggctggtgccggaggcctcccatttaccgcccaacgttcaggaaaaaggattatga

SEQ ID NO: 453435 - DNA, 1206 bp, Serratia marcescens
gtgacgaaaccttttttacgcagcggcagtctggataggctggtcgcgctgggggaaaatggccagcccatttatgcccaggcgcagtcaatccgcgaggcgctgcgcctcaaacagcagccggcgatcgcagattgtctggcgattccgcaattaaacgcccaacaagatcgcatcgattggtatgcgccgttcagcggccaggtgcgcccgtggtccgcggccgacgataatcaacgacgtgcggcgctgacgcagctggacgcctgcctgactgacgttgaagcgctcagtcggcaggcggtggccgcgccgcaggcggccctgcagcgcttcggcgccttactgcgctacctgctgcgctttcccgatatgcagcacgtctatctggttgacggcaaaccggtgctgaccttctgggggttcagccatgccgagcaacgcagcgacgacgatccgttcgcctgcctgcgcccggacgacgccccgccgcccgccgtagcggctcccgctgccgccaccgcacccgacatgccggcggcagcgccgatggttccgccccagccgcgcgccgccggccgacgccggctgctgctgctgccggctatcgccgtggtgatggcgacgctggccgcgctgggctggcactggcggcagtctacccccgccgacacgcaggccgccgctcccgtacctgcgcctgcgccagtgcgtccggccgcgccgccggcgctcaaacccctgccgccgttgccgctggccaaggcgacgctgctgcctccccccgcgccggttaccgcgcccatcgcgccgccggatgagggcaacgcgctgatcatgccagcgacggcggtgaaagccggctccacccgctttcttaacgggcagtggcgcgccgtggcggacgtcaaaacgccgctcaccggcagactgcccagcctgctttaccggctgcacaacggcacaggcagcgtcacgctccgccaggcggataacgtgcgctgtcaggtcaatgtcgaaaccgggctgatgccgtccggcaagctggtgatcaacagccgcagcaaagcgcgctgcagcgacggctcccgctatcagatgccggaaatcgtctgtctgccgcaggaagaacgccccgccgcatgtagcggccgctacggccccgacacgctttatcccatgacgatcacgcgcgagaaaaaataa

SEQ ID NO: 453436 - DNA, 2157 bp, Serratia marcescens
atgaatgctatttctttaccggcacgccgcctgcaggacgttgcgcaacaggcgctcgactggctgcaggacgcgcgtcctgattcggcgcggctggcggcggaagcggagagtctggcgctgcgcctgcgccgctgccgtcgcgacgcacggcggctggccgccgcctttgacgaccactgcagcctggggatctacggccatgcgccgcaggtaaaaaccgcgctgctgcgtcagttgggcatagcccggctgcccgtcgggcaaccggcgctgacgctgcgctatcgccggacgccgcagccggcaacgccctgcctgacgctgctggaggagagcgatctcgccgggctgctgtttttcgccgccggcgcgctgccgccggaccgccagcggctggcggctggcctgtccgccctgagccgtcaacccgcttcatcaccgtcgccaggcattgacgaagaccggctgctgacgctgtgggaaactctgagccattaccagccgcagatcgccgacgatccgttctggccagcggcgctgacgctggcgccgggcctaagcatcgaccagcgcacgacgctgttcgccccgctgtggggggaacggccggcgttcagcgcgctttatcgccggctggcgcaccggctgcaggatcttggcggccgccgctttgcgctgacgacggacagcgacgcgctgagcgcggtgatcgacggctcagcggcggagtggcttaacaacgaagacgcatgctataccgtactgcagccgctgtcgggggaacagacgccacagcgctgtccgcaggcggagctggcgctgctggcggccgagctgacgctgagcacgccgtcgggcgacgacatctttaatcatcccgtcgatctgctggatattcccggcgtcgacgccgaatgtgagcagacgctaacatcaatcctgctgtctgccaaacgccgctggctgttgcaccgcagcggcgattgcagtcagcccgatctgctgctggtcagcagtgcggcggccgagcgacaggcggtattaccggccgctaaagcgctcgcccgctggcagcgcgtgcagcagggctgcctgccggccccggtggacaaaccggatgttatctggctgctcaccgcacgcagcgacgccgcacaggcgcatgaggccgccgtacagcgccatatcggcctgccgggcgtccactggggcacgctgctggcgcaggatgcgcaagacacccggcgcatgctggattacctgacgacggcgatcgatcgtcacgcccgccagcggcggctggacgaccagcggcaggcgctgcttgatattctgacgaaaacggtgctgggtgactggctgccgacggcggacggcgatgaacaccggcaacagcagcagatcgcccggcgtctgctgcagacgctgcaggcgcgcaccggggcgcacggcgatctgctgcaacagctgctgccgccgcaggaagcgctgctgcatctctatcagcagccggcgccgctggccggcgatcggccgctcgggatcggcatcgagctggatctgctggcgcccttggccggcggcggcgatagttccccgccggcgtcatcttttgccgacgccgcactgcgtctgtggctggcgcacctgcgccgtctggcggataaccgcgcgctgcaacggcagctggatatcgacggccgctgcctgaacctgctggccgatacactgattaacgccgcctggcggctgggcatcgaccgccagctgcgcgacgcgctggcgacggacagcggcaatgcacagcggcaaacctcgctggcgctcggcgtgctcggcgactttgtcgcctggctgggctttcagcaatgcccgccgcctcagcgccccgccagccgcatccatcagggacagccgatttttgtctccccgcatgcatcgtccggcgatccggcgacgtcgcgcctgacccggctggcaaccgcgccggtcaataacgccgctttctatgtctatgactggctggtgggattgcagacgctggcggaagacaacgccggccagcgcgcggccgccagcctgccggcgcggcagcagcagcgtctggcgcacattgtggcggcgctggatgatgacggattgatgggggagtaa

SEQ ID NO: 453437 - DNA, 1326 bp, Serratia marcescens
atgcatgagtttgaagcggtgacgcaaagggaatccaacgcacggaattacgcggtaacctttcccaccttgtttacatcaggggaagggatctggctgcaggatcatacgggcaaaaagtatattgactgcctgtcttgtgcgggggcgctgtcattaggccataaccatcctgaggttaaacaggcattgctgaattttcttgcctccggccatgtgcagcaggtgctggatctcaccacgccggccaaacatcagtttatcaaccggctgtttaatcttttgccgccgacgtttgcccagcgcgcgaaaattcatttttgtagcccttgtggtgcagacgccgttgaagcggcgatgaaactggtgcgttttgccacccagcgtcagccgatcgtcgcttttcacggcgcctatcacggcatgacgcggggtgcgttggcggcgatgggcaatctgttttccaaagtgaatgccggcgtcggcgccgagcatattcattttgcgcctttcccgtatcgctaccgctgtcccttcggcactgacggtcaagagaccgaccaactctccatcgattacctgaaaaatcttctcgacgatccggaaagcggcgtcgccaaaccggccggcgtactggttgaaatcgtacagggcgagggcggctgtattccggcgtctgcagagtggctgcgcgcgttacgcgaactgacgcagcagcaccaaattccgctgattattgatgaagtacagaccggtctgtgccgcacgggcagcatgtttgcgttccagcaggcgggtattgttcctgacgtgctgatcttgtcaaaagccgtcggcggcggctacccgctgtcgttgattgtgtatgaccaggcgttggatgtctggcccaaagggatccacgatggcaccttccgcggcaaccagatcgccatggcggccggtgaaaagaccatggaaatcctgcagcgcgacaggctggatgaccatgcgcgcaatatgggggaaaaactgtcggcgggactgcatgcgttggccgcgttgcacccggagttcggcgatattcgcggccgcgggctgatgttaggcgttgaaatcatccatccccatggcgaacttggcggccagcgtaacggcgaactggcgcgcaggattaaagaggcggctttccagcgcggcatgctgctggaaaccggcggccgccacgctgcggtattacgcttcctgccgccgctgattatcggcgcacaagacgtggagaatattttgaatcggctggcggacgcgattgccgacgctaaaaaaatcaaacggccggcgacgtga

SEQ ID NO: 453438 - DNA, 408 bp, Serratia marcescens
atgaaagtagctctgttgggtgtcgcgctgctgttgacggcatcacaaacggcgtgggcggcgcaggcgtgcggcgataaaaccagccagaccgaaatgaacgtctgcgccgccggcgagtacaagcaggcggatgcgcagcttaatgcgcgttataaacagctgcagagccggctaaaaggggatgaggccgctgccaaacggctggttgccgcgcagcgcgcctggattggctttcgcgatgcggactgccagttcagcaccggctccagcgaaggcggttcgctgcacgggtttgtgctgagcagctgcctgacggagaaaacgcaggcccgcagtgcggaatttgacaagctgctgaactgcccggaaggtgacaccagctgcccggtaccgccggcgccataa

SEQ ID NO: 453439 - DNA, 399 bp, Serratia marcescens
atggaaagccctatttcatactcactgcatttcccgatttttgaggtaactatgcgatttaatggagatttcagcgaattaaaccatttgattagtctctattttggtcaggactacgacctgtttaccgatgctgaaactgtagaaggggtgattgatggttttctggaacaaagcggttaccaagtgatcggtgatattcttgaggaggcgagagagtttcaagccacctatgccgagcgtctgagcgaggaaatggctatacaattttctagcgattttgtcccagagtgctggggaagctcggcgcaagaattcttcacgctgatacagcaaaaagcggagaaaaagttagcggaccttaagtgctcagagcggttacagcgatctccccactga

SEQ ID NO: 453440 - DNA, 825 bp, Serratia marcescens
atggcagaagaaaacggtttaagggtggtattgtcgccggttcagctggccgcggcaatgtcagacaaaagcgtcaccgaaggggaaaccttgagtaatcgcctgcttggcggtttggggttggcgggcggcgttattgagcttattggcgccggcgtgatgtgttacgcccccgatcccacgctgttaaccaaagttggctgcgtcattgtgggcacccatagcatggatagcatcaaagcggcctccaatcagatgattaccgggcaaccgacaacgacagatagctatcaatcagccgtctctctggctaaaacgctgggggctgatgacgatacggcctacagggtggggcttacggtcgatattgcggtaccgttggcgtttgcggcggcaataggtgcggtacgtgtggccgctgttcgtatggggagggtgaaactgattatgcatgaatcaatgacgggagttaaacccggtgggcatactattgctcggcatgtaggattgaccaaagagcagttagcagaacgtttgaaaaatccgcgcatacgcaaagcttcttcgtttaactctttacgttcggctgagatagcaataagttcagcattaaaagcgaataaggagtggatcaggctttgggcaataaatccgagaggacggcctaaccttgagcttacccacattatggggactgagattggctacggccttgctaaagattttccgcggatagtgaaaactgcaaggttgaaggtgattttgcaccaccaggaatttaatggaaagccctatttcatactcactgcatttcccgatttttga

SEQ ID NO: 453441 - DNA, 822 bp, Serratia marcescens
atgctgacgttgaaagacaatttgctgattttttccgacctggacggctcactgctggatcacgacagttacagctggcaggcggcgcagccctggctgcagcggctaaacgccgcgcgcctgccggtgattatcgccagcagcaaaacggcggcggaaatcaccgtgctgcagcagcgccttggcctgagcgcctttccctttatcgccgaaaacggcgcgcaggtcgtcttccctgccgcctggcaccgtcctgcgcgcgtctttggcgcagactatgccgccattgttaacgcattgcgccggctgcgcgccagcttcgccttccgcggctttgccgacgtcgacgacgcaacggtggcgcagtggtgcggatttactccggctgaagcccggctggcgcgacagcgggcgggcactgaaccgctgcgctggctggatgatgaacggcagctggcccagtttcgccgtgcgctggcgcagcaacggctggcgctgacccgcggcggccgcttttaccacgtaatgggacgcggcgtcagcaagggccgcgccgcacgctggctgacccgtcgctatcagttacgccatcagcgcgccttcgccacgctggcgctgggggacggaccgaacgacctgccgctgctgcaaagcgcggattatgccgtcctgatccgtgcgcggcatggcgcagcgctccggctgccggcgacgcgccgtggccggctgtaccgcagccggcaaactggcccggccggctggagcgagggactggaccatttcctgttatccggcaacgtacggaggatcgcccatgagtga

SEQ ID NO: 453442 - DNA, 417 bp, Serratia marcescens
atgattaaatcagcgcttatccacccgcagctgctcggcgcattggcggcatgcggccacaaaagtcagctgctgatcgccgacgccaactacgcggtcaccaccaacgcccgtaaagacgccaccgtggtatacctcaatctgtcgccgggaatgatccccgcgccgctggtgctggaaaaagtcctgacctgcatcaacgtggaacatgccgccctgatgacggcgccggccgattatccccatgcgccggcggatgaataccggcgtttgttgccggacggctgccccgtcgcctatcttgagcgggagcagttttacgccgaggtcaaatcggaacgcacggcgctgattatcgccaccggcgagcagcggcgcttcgctaacctgttgctgacggtcgcccccgtcttctga

SEQ ID NO: 453443 - DNA, 648 bp, Serratia marcescens
atgcatcaactatccgaactcattactcgcgaacaagaaaaatttgctgccaacgattttttttaccggctgaccgatcggacccgcccattagaacaacgcttatcttttcttccccgcatgtcccactttattatgagctttgccgatattaatcaattcgtgttgccgttttccgcgcccaaagaccaatgggaacgggcagtcaaccaacatgctcacgaagacgccaatcattggccctggtttatccacgatctgcagcagcttgctatcgaccacagcgcgccgctcagcgatacgctgcgttttctctggtcagagcagttagccgcatcaagacaactgacttatcaactcattgccatgatcgctaatcaaccggcaaaaatccgtctggtggtcattgaagtaatggaagctacaggcagcgtgatgtttaccgccttaagttcggccatcgccgacagcggcctgacgctgaaattttgcggcgatctgcacctcggccatgaatccggccatgcggctaatgcggcggtcagcacgattgacgacctcccctttagcgctgacgaataccgggaggtccaagctattatccatcagggttttacagcctttacgcattttgttcatcggctgtag

SEQ ID NO: 453444 - DNA, 897 bp, Serratia marcescens
atggataatttcaagcgacttgatcttaacctgctggtgacgctggacgtgctgctggcggaaaataacgtcacccgcgccgcgcagcggctgcatgtgtcgcagccggcggtgagcgttcatctggccaagctgcgcgagatcttccacgacccgctgctgctgccggggccgcgcggcatgcgaccgacgcagcgcgccctggcgctgcgcgaaccgctacggcaggcgctggcgacgctggagcaggcggtgcagccgggcagcccgttcgatccggcgcaggccagccacacctggcgggtggcggcgtttgactatggcgaatcgacgattctgttgccggcgctgcgcacgctgcgtcaggccgcgccgggcagccggctggcggtgatggaggttgcgccggcgcagatagccagaggggcggaaaacggcgatatcgatctggcgctgcacacgctggacgatgcgccgccggggctgcggcagcggcggctgttcagcgaacgctatgtgctggcgggccgtgccgggcatccggcgctggcggcgccgctgacgccggcggcgttcagcgcgctggagcatgtgatggtatcgccggacggcggcggtttttacggcgtgaccgataaaacgctggcggaagcggggctgtcgcgccgggtggtgctgtcggtgccgcattttctgtttgccatttcggcgctgctggccagcgatctggtggcgatgctgccggaacggctggcgcgtggcaatcccgccctgcaggtacaggaagcgccgttagccgtgccgggcttcgagatggtgatgctgtggcatgagcgcagccaccgcgatccggcccaccagtggctgcgggcgcacattatggcgtcgctggcgtaa

SEQ ID NO: 453445 - DNA, 777 bp, Serratia marcescens
atgaagatactactggtttacgcccacccggagccgcgttcactgaacggcgcgctgaaagactttaccatcagccacctgcgggaggccggccatcaggtgcaggtttccgatctgtacgctatgcgctggaaaagcgtcctcgacgccgacgataatctggcggcccagaccgacgcgccgtttaacccgtcgctggattctcagcgggccttcgccaacggtacgcagagccaggatatcgccgccgagcaggaaaaactgctctgggcggacgtgctgatcctgcagtttccgctgtggtggttctcgatgccggcaatcatgaaaggctgggtggatcgggtctacgcctacggctttgcctatggcgtgggggaacactctgactcgcgctggggcgaccgctacggcgaaggcacgctggcgggcaagcgcgccatgctgatcgtcaccgccggcggctgggagtcgcactacgccgcgcgcggcatcaacggaccgattgaggatattctgttcccgattcagcacggtattctgcactttcccggcttcgcggtgctgccgccgcaggtgatctaccgcagcgaccgtatggatgacgagcgctttaccgagctgcgcaaccagttggcgcagcgcctcgacggcctggcgcatacgccgccgattccgttccggcggcagaacggcggcgactatgagatcccggcgctgacgctgcgcgcggatctcgccccggggcaaggtggatttggcgtgcatcgtgaataa

SEQ ID NO: 453446 - DNA, 1212 bp, Serratia marcescens
atgacgagtccacgcctcagggaacaaccgcgccaacctcacaatagccagtggtatcatgagacccagcgcagcgtacgcggcgatctgccgctggagccgcaggccgctctgatacgcgatcgctttttactggggctgggcgagttcactgacccggcattgaatcaggcgctgatcgcccgcgcgccggtgtttggcgcctcgctggcctgttgtcacgtgctgtttcccgagcaggttgcgctatcgcgccacgtgacactgtcaccctacgatcgcctctgtaccgcgctgacggtggcgcaggtcaccggcgtgcagtcgctgtgtagccactacgccgcccgcctcgccccgctcgacagccccgacgcctcccgtgaaagtaatatccgcctagcgcaaatcacccaatacgcccgccagcttgccacccagcccacgctgatctgccgtaaggcgctgcagcagctgagcgacgtcggcctgagcgtggcggatatcgtttccttcgtgcagataatcggctttgtcagctatcaggcgcgggtggtcgccggcatcgccgcgctggcgggccgtcccgcggcggtggcgccgggcttcaccacccagcaggacgccgagccgctgcgcctcgaccaacgcccgccaatctggcaggcacgcctggcgccgctgcagcccgccgaggcggcggccgaacagctggacgtgctggaccagagccacccggacgcgcgtacggaggattactacctgctgctggcccacgatgccgccgccctgcgcgagcgcaacggcgtctttaacggtattcatggcggcaataatgatgaagagaacggccggctgatggcgctggcggcgctctgcgcctcgcgcatcaacggcagccgttactgcgccgccggcgtagcggcggatctgcagcacccgccgctggtgcacgccctgtgcgacagcatcgacgacggctatcagcgcgcgacgccccggcaacaggcggtgattcaggtcagcagcgcgttaacccgcagcccggaaaagtttaccccgcacagcgtacagccgctgtttcagcaggatgtgacgcaggcacaggcgctggacctgatattgaccagcgcgctgtatgcctgggagaaccgtctgcgctatagcctgggcgataccctggccgccggcgcgcagcaagaagacgcgtag

SEQ ID NO: 453447 - DNA, 2310 bp, Serratia marcescens
atgaaattcaaacctgcaatcaaaccctacacctcaccggccggcggctggggcgcattagcctccaccacccgttacctgcgcgacagcaagcaggtgctgaaaaatatccgcaacctgctgcgcgtcaatcaggcgcgcggtttcgactgcccgggatgcgcctggggcgatgacagccacagtaccttcaacttttgcgagaacggcgccaaggcggtcagctgggaagccacccgtcaggcggtgacgccggcgtttttcgccgcccacagcgtcagcacgctgcgccgccagagcgactattttctcgaatatcaggggcggctgacccatccgatgcgctacgacgccgccagcgaccattaccgccctgtctcatggcaagaggcctttgcgctgatcgcacagcatatcgcgcgcctggataacccgtcgcagctggagctgtatacctccggccgcgccagcaatgaagcggcctacgtttaccagctgttcggccgcatgctgggcaccagcaactttcccgactgctccaatatgtgccacgaagccagcggcatcgggttgaaacagagcatcggcgtcgggaaaggcaccgtacgcctggatgactttaatcaggccgacgccatcttcgtatttggccagaaccccggcaccaaccacccgcgcatgctgcacagcctgaagcaggcggccgaccgcggcgcgcgcatcgtcagcttcaataccctgcgcgagcgcgggctggagcgcttcgccgacccgcaaagcccgctgcagatgctgacgccggccgccacgtccatcagttccgcctattatcagccgaaactgggcggcgatatggcggcggtgcgcggcatggtgaaggcgctgctggaaacccaccgtcagcagctggcggacggcctgccgccgctgtttgatatggcgtttatcgagcagcataccgtcggcgtcaccgcctatctggcgcaggttgacgcctgccgctgggagacgctcgtcgcccagtccggcctgagcgaggcgcagctgcgcgaggcggcgtcgatttatcagggcgccaaacgggtgatttgcacttgggcgatgggcattacccagcacaaacactcggtggcgacggtgcgcgagatcgccaacctgcagctgctgttcggccagttgggcaagccgggcgccggcctgtgcccggtgcgcggccacagcaacgtgcagggcaaccgcacggtcggcatcgacgagaaggcgccggcggcgctgctcgacagcctggcgcaacgctttaacttcagccccaaccgccagcccggccataacacggtgcaggccattgaggcgatgctgcgcggcgaggtcaaggtgctgctggcgctcggcggcaatctggctgccgccgcgccggacagcgagcgcaccgcccgcgccctgcaaaactgcgcgctgacggtgcagatcagcaccaagctgaaccgcagccacctgtacgtcggtaacgatgcgctgatcctgccgacgctgggacgtaccgaacaggatattcaggccggcggcgcgcagtttattacggtggaggactcgttcagcatggtgcatgcgtcggagggcatcagcccgccgctggcggcgacccagcgctcggaaaccgccatcgtctgcggcatcgccgacgcggtgctgggcaaccagcgcctcgactggcaggcgctggcggcggattacggcctgatccgcgagcatatcgccgccacgctgcccggctttgacaactttaaccagcgctgtgagatccccggcggcttctatctgggcaacgccgccgccgaactgcgcttcgccacccccagcggcaaggcagagttcagcgccaccccgctgccggcgcagcgctcgccggcggaggacggcgcgccggatgccttcaccctgcagacgctgcgctcccacgaccagtacaacaccaccatttacgggctggatgaccgctaccgcggcgtgtacggccagcgcgaggtgctgtttatcaacccggaggatctggcgcagctggggctgagcgagggggagcacgtcgagattgagacccgctggcatgacggcattacccgccgggtcagcggtttcaaactggtcagctacgccattccgcgcggcaacctggcggcctactacccggaaaccaacccgctggtgccgctgtcgagctttggcgatgaaaccggcacgccgacctcaaaatccgttccggttgttatcagacgttgccggatgttaccgtcgggcacacgcctcctgtaa

SEQ ID NO: 453448 - DNA, 144 bp, Serratia marcescens
atgagcttgctcaaggtggcggagtgcagccaacacgccggcagcctgaagtatggcgggtataggcatttacgcagctttggaccatactttgtctatctttcaccgaatctcgcctgggatggccaggttatggaatactaa

SEQ ID NO: 453449 - DNA, 237 bp, Serratia marcescens
ttgattaccccatggttacattcgagcgcaccgctgcccgatttggtattgggcgcatcgctttatttcccccccatgtttaaagcattcttactgggcctggttttttggctgctggcgcatcgcctgctgcgcaactggctctattccggcgaaatctggcatccgatgttaatggatttatccattttcatcattgccgtcagcggctctttgtggatcttagcgagttggtaa

SEQ ID NO: 453450 - DNA, 2040 bp, Serratia marcescens
atgaacctgccgtttctagagtggaaacgtacgccctggggccgcgctaccggcggccagtggcgctacgcgctgcgtaattcgctggcgatgtgtctggcgctctgggtggcgttcgcccttaatctcgacgaaccctactgggcgctgacctcggcggcggtggtcagcttccccacggtaggcggcgttatcagcaaaagcatcggccggattatcggcagcctggtcggcgccgcggcgtcggtcgccatcgccggccactgcctgaatgacccctggctgttcacgctgtttatcgccgcctggatcgggctgtgcacctatatttccaaccactaccagaataatgtctcctatgccttcgccctgtcgggctacaccgccgccattatcgccttcagtaccgtcaacatgacggatacgctggatatcttcgacctcgcccaggcgcgcgtctgcgaggtgattaccggtatcctgtgcggcgcgctgatgatgatgatcctgcccagcacctccgacggcgcaacgctgctgacctcgctgcgccgcatgcatctgcgcctgctggagcacgccgacatgctgtggcgtccggagattacgccgcagatccgcacctcgcacgaaggggtcatcagccagatcctcaccatgaacctgctgcggattcaggcgttctggagccactaccggctgcgccggcaaaaccatctgctcaactatatgctgcacctgcagctgcgcctgaccagcgtcatctccagcctgcggcgcatgctgctcaactggccggatccgccggccaacctggcgccggtgctggcgcagctgctggaagagctgcgcgatgcgcataccgacaaataccggctggcgaaaatcctgcagcagatcgcaccgcgggacgaggcggactaccgccaccgcgccttcttcctgcggttgcgcaacttctgctggctgtatctgcaggccaaccgctggctgctgcagctggaaagcgccacgccggtcagcagcatgcagcctccggcggtcagcgcgctggcgcgccataccgacagctatgaggcggcctacaacggggtgcgcacctttttaagcatcgtgatcggctgcgcctactggattaacacccagtgggaggccggcagcgccgcgctgacgctgaccgccatcagctgcgtgctctactccgccacgccgtcgccgatcaaaagcatcaccacgctgttaaaggcgctgattctgctatccgtcggctgttttgtggtgaagttcggcctgatggtgcagatcgacgatttctggctgttctgcgcctttctgttcccggtgctggtcaccatgcagatgctcaaactgcagcacccgccctacgcggcgttgtgggggcagctgatcgtctttatgggctcttttctcactatcaccaacccgccgagctacgactatcagtcgttcctcaatgacaatatcggcaagatcgtcggggtgctgctggccgggctggcctttcagatcctgcgccccagctcggacaagcgcaaaagccggcgcattatccgcgccctgcggcgcgactttatcgaccagctgagcagtaagccgcagctgcgtcagagccggtttgaatcgctgatttaccaccgcatcagccagctgaatcagagccaggatcaggaagcgcgcacctggctgctgcgctggggcgtagtgctgctcaactgcagccatatcgtctggcaactgcgcgactggcagacgcgctccgacccgctcgcggcggtgcgcgatcgctgtattcactgcctgcgcggcattatgacggagaaaggcgtccagcaccgttcgctggatacaacgctgcaggagttacagcggatcagcgatgcgctggcgcagcatcatgagccggcggcgcgggaactggccgggctggtgtggcggctgtactgttcgctgcagcagctgcgacaggcgatcgccccgccgcaggacgacggagccaccgtcacggcgaccccgtcctga

SEQ ID NO: 453451 - DNA, 1641 bp, Serratia marcescens
atgcggttaccttcaaaattctcctgcggcagtctgggctttattctcgcctgtacgctgttttttaccctgttccaaaacgcgctgtttttgcatacggcgtggtcatatatccatttcggcagtgtcagcagtctgctgttcgccgccagcatgccgctggtgatcttctgcgcgctgaacatcattttcagcatactgaccgtgccctatctgcgtaagccgttaatgatcctgttcctgctgggcagcgccgcggccaactactttatgtacagctacgatgtggtgatcgacggcgatatgatacaaaacgcctttgaaaccaacgcgcaggaggccagcgcgctgctgacgccgcagctggggctgtggctgctgctgctgggcgtgctgcccgccgtcgcggtgtacttcgtcaacattcgccagacccgcccgtggtggtacacgctcggcctgcgcgccgccaatatcatgctgtcgctggtggtgattctgctgatcgccgcgctcttctataaggactacgcctcgctgatccgcaaccacaaaagcgtagtgaaaatgctgacgccgtcgaacttcgtcgccggcacgattaagttcaccgaacagcgctacttcacccgtaatctgccgctggtgaaaatcggcgaggacgcccataaagggccgcggatccgcgccgaacagaaaaagacgctggtgatcctggtggtcggcgagaccgcgcgggcggaaaacttctcgctgggcggctacgagcgggacaccaacccgcggctgcggcaggacaacgtgatctattttaaccacgccgcctcctgcggtaccgaaaccgcggtgtcggtgccctgcatgttttcaaatatgacgcgcagcgagtatgacgctacccgcgccgagcatcaggaaggcctgatggacgtgctggcccacgccggggtcaatgtgctgtggcgcgataacgataacggctgcaagggcgcctgcgaccgtattccccacatcgatatgaccaaactgcaactgccgcaggattgcgacggcgacgtctgtatggacaacgtgctgctgtatcgtctgaaggactatattgacggcctgaaagacgacggcgtgatcgtgctgcaccagatgggcagccacgggccggcctactaccgccgcagcacgccggcgttccgccgctttaccccgacctgcgacagcaaccagatccaggactgcagccaccagcagctggtcaatacctatgacaattcgctgctgtacaccgacgccatgctcgacagcaccatcaagctgctgcagcagtacagcggacgttttaataccgcgctggtttacctgtcggatcatggcgaatcgctgggggaaaacggcatgtacctgcacggcacgccgtacctgttcgcaccgagccagcagacccacgtgccgttcctgatgtggatgtcggcggactatcagcgcagcttcggcatcaaccgccagtgcctgcaaaaccgggcgcagcaggacgccgtatcgcaggataacctgttccacaccctgctcggcatgctgaacgtgcagacccggcagtaccagccgcagctggatattctgcagcgctgccgcagcgacggcgcttaa

SEQ ID NO: 453452 - DNA, 306 bp, Serratia marcescens
atgttgaaatttattgccgcatcggcgtttagcacgcccgataatggccagtcccgccgtgagggacagctgagcgacggccgcgccgccgcagaagtccgctttgacgccggcgccttcggtcagttgcaaaagcgtgatggcgccgtgcaaatccgggtgatcgacggcgaattcgaatttaccgtcggcagcgatattcttctgctgcaggctggtgaaagcgtgacggttgcagcgcaggtgcccagcggctgtttctgcctggccgccggcacgctgctggaaatcagcgccttaggttaa

SEQ ID NO: 453453 - DNA, 2178 bp, Serratia marcescens
atgcacaacaccacatacgctcaatgtttgggcaaaacgctgttggcgctggcgataggcgcgctgacccagggcgtacaggcggcgcagccgcaggaagagacgctggtcgtgcagggcgcgcgcgacgacggctttacccccggcggtaacgatccgctgccggcctatctggacgggcaggtggcctatggcggtcgtctggggatgctgggcgagcagcgggcgatggacgtgccgttcaacgtcatcagctacaccgcgaaaatggcgcaggaccggcaggcgaagaccgtcagcgaggtggtcagcaatgacgccggcgtgcagccggtgcagggctacggcaactttgccgaaggctatcgcatccgcggtttccagctggacggcgacgatctgaccctcggcggtctggccggcgtgctgccgcgtcaggtggtggatatggcgatgatcgaccgcgtcgagatctttaaaggggctaattcgttggttaacggcgccgcctcgtccggcgtcggcggcatgatcaatctggagccgaagcatgcggaagagacgccgctgacgcgggtgggcgtcgattatacctcggcgtcgcagcttggcggtacgctggacgccggccgccgctttggcgacgacgaccgctttggcgcgcgggtgaatctggtgcaccgcgaaggggaagccgcggttgacgacagtaaactgcgcaccaccatgttgtcgctggggttggactaccgcggcgagcggctgcgggcctcgctggatgtgggctaccagaagaaaagcttccacggcggcaccatgggcgtcaatattagcggtatcgacagcgtgccggcggtgccggacagcggccataactacagccagccttgggcctacagcgatatcgacaaccagttcggcatggcgcgcgccgaattcgatctgaacgccgcctggacggcatacgccggcgtcggtggccagcacggccatgaaaccggcgtctacggcgcgccgaagctgctggacaccagcggcaacgccaccatcggccggctggataccaaccgtattatcgacgcattcagcgggatggccggcgtgcgcggcaggttcgccagtgggccgatcacgcatcaggtcaacgtgggttactccgcgctgaccaagcgcgataaaaccgcctggcgcatgtcgaccaataacccgaccaccaatatttaccataccgatgaggtggcgatccccgagaacagctacttcggcggcaactacgacgatccgctgaccaccagccgttcgcgcacgcagggttggctgttcagcgatacgttggggctgctggacgaccgactgttgctgaccgtggcggcgcgtcatcagaaagtggtggtgcgcgattacgataacgccagcggcgcggagcaggctgattcgcgctataacgccagccgctggatgccgacctacggcgtggtgtacaagccatggcgtcagttgtcgctgtatgccaaccataccgaggccctgcagccgggcagcattgcgccgctgggcgccagcaactacggccagagcaccggcgtggcccattcgaagcagaacgaagtgggcgtgaaggtggatttcggccgtatcggcggcgcgctggcgctgtttgagattaaaaaaccgtcggcgttgcaggatgacagcggacgctacgggctggacggcgaacagcgcaaccgcggcgtagagctgaacgtgttcggcgagccgctgtacggcctgcggctgaacggcagtgccacttggctgcagccgacgctgagcaaaacccagaacggcgtcaacgacggccatgatgcgatcggcgtaccgcgtttctacgcggtggtgggggccgaatacgatatcaagccggtcgaggggctgaccgccaccgcgcggctgcggcactccggttcgcaatatgctgatgccgccaacagcaagaagcttgacagctataccacgctggatctcggggtgcgctaccggcagcggcttaatcaggatcgccatgagatggtgtggcgcgtcggggtggataacgtgaccaatgagaagtattggtcaggggttgaggacaccggcacctacctgttccagggcgatccgcgcacggtgaaagtgtcggtaagctatgagttttaa

SEQ ID NO: 453454 - DNA, 738 bp, Serratia marcescens
atgctgcctgctttagatactcactggctgaatattcaatatcgcacgctgttccggctggatcgcgccgggcgcatcgtgggggaaaacgatccggatcgctctgccggcccgcgcttctggctggcgggctgtgcggagggcaatatctgcggctgccgggccgatctgccggcgccgctggccgcacggctcgccgagttggcggggcgcgagccgcctttactgccgccggcggccccggaacggctcaatgattatctggcgctgctggcggagtgcggcggcggcgggtatgaatcggtactcacctaccaaatgccccatgagctggcgtatccccatcacgcccggttaatcaacagcgagagcgaagaggggcaggcgctgacgcagcgctgggcgacggaggggatgccgtcggggctgtacgcgctgggttttcacgacgtcgaggacctgtgggcgccctggtgcgccgcgctcagcggcgatgacgtcgcctcactggctttttgcgcgcgccttgccgatgtcggcgtcgaactggggctggtgacggcggaggcattcagagggcaagggtttgcggcggcggccaccgccggctggtcgcagctggcgtcgctgcgtgcgcgggcgctgttctacagcaccagcagcggcaatctgtcatcgcagcgcgttgcggcgcgtctggggctgtcggtgagcggcgccgccgtccggataagctag

SEQ ID NO: 453455 - DNA, 564 bp, Serratia marcescens
atggacgtgagttctttttttgcaccgactgttcctggtcggcgccggtatggcgttgctttttttgttggggtagttgccggcgttatgtcggcatttgtgaagtggggcgcagaggttccattaccacccagaacgttttctggcgggcgtgatgaattcaacccgccttacttgttccttagagattatcttggcattgatcctacccaggcggtctatcatttctctgaacatgtaataaatccagtgcatattacccatattattttttcacttgtttttgctatcgggtactgtgttgtcgccgaggtttttcctaaggttaagctctggcaaggggtcatggcgggtatcattgctaccatagcggttcactggattgcatttccactattggacttaacgccgccgttgtcgatgttaccgctagatgaatatatctcggagttgataggtcacgttttctggttctgggcaattgaaatgattcgccgcgatctgcggaatcgaatcactcatgagcctgatgcggaagtgcctctggatgccagattccgataa

SEQ ID NO: 453456 - DNA, 1170 bp, Serratia marcescens
atgactgtatcgttcaaacttcgcatgttgtgcttaaccggtacactggctgtcatcgggctgttcctttcaaaacagagcgtcatacccggcgcgtatgcacttgagacatcaaactttaaaacggtgcgaactacgtccgcagttgttcatacagtaaacgactgggtcgaattctcgggaaaactggaagccaccgatgaggtcactgtacgttcaaaagttacaggctcgattgtggatgttaatttcagggatggtcagttggtcaggaaaggcgatattttatttattatcgatccagccccgtataagactgaactggcccgggctcgtgcagcatacgcgcaggcaaaagcgaagcaggacttggcattgctggatctgtcccggggtaaaaaacttatcgggacccatgctatctcacagcgcgattatgacgttctgaacaatgccgcccgggaatcgaaagcagccaaggagattgccgaagctgaggtcgagagcgccaggctcagcgaaagctatacccggatcaccgcaccggtaactggccgtatttccagagcagaactgacagtcggtaatctggtcgcagccggtattgacagtccagttcttgcatccattgttgctcttgatcccgtgtatgtcgcttttaatgcggatgaacgaacctatcttaattatatcgacaagctttcaaataaagacaaacctgaagtgctggtaggactggccgatgaaaaagattatccacataaagccattcttcattctgtggataatcatctcagtactgaaaccggcactatcaggatgcgcgcacttcttgataatccatcatcaaggttgcttcccggtttacaggcccgggtcagactccaggcaagcaaatcttatacagcagtattgattgaccagacactgatccgcaccgaccaggacagacgctatattctggtagtcggaaacaatgacaaagttgaatatcgccccctagaactgggaaacagacagggggaactgattgttgtgaaaaaaggcctcaataagggtgacagagttatttccggtggggcgcagttggtcagtcccggtgaaacagtcgttgtcagcaaagacgaatccccttcttcaaaatcccgggaaggaaataagtcatcatga

SEQ ID NO: 453457 - DNA, 804 bp, Serratia marcescens
atgaaactaatgccggggagttatgataatggttcgacggtggataatgaggcggagattctggcctcatttcagcgccgaagccgtgatatttatcaggcgttcaaccatgacgctaatattccttacggaaacttagcgcgtcaaacgtttgactggctatattccccgcatcctgccgttggcacgctgatatttattcacggcggctactggcagttttgtaataaagaggattttgcctttatcgccgcagcgccgttggcgctggggattgacgtggtgctggtggagtatagccacgcgccgcaggcgacgctgacggatatcgatggagaaatcggcgcggcgctgagcgcgatccaacgccgactggcgcagcggccgccgcgcggcccggtctggctggccgggcactcggccggcgggcagctggtcgcccgctggcagcagcatccgctggttgatgcggtgttccccatcagcggcatctttgaactggagccgctgctggcgacctacgtcaaccaccggctgcggctgacggcggcggagatcgccgcgctcagcccggcgcggcatattcccgagcggcttacgccgatgacgctgtactacggcgcgctggagctgccggaactgatcgggcaaagcgaacattactgccaggctctgcgtcagcagggcctgacggtcgggctgcagccggtggccggcgccaatcattacaacgtgctggacgcgctgtttgccgccgacggcgcgttgattcaacaactgcaacagggggaagatggccgatga

SEQ ID NO: 453458 - DNA, 183 bp, Serratia marcescens
atgatcattacgctgttgacgttgacggcctattatccgctgacgctggcggcactggccgtgatgatggcgatcgccgtacggcgttggcgatcgccctattggcggctggcgctgctgctgttgacgctgctgtttgtgctgttcgccatggcggcctacagctggcatcacgcgcgctga

SEQ ID NO: 453459 - DNA, 198 bp, Serratia marcescens
atgtttgttaaaaatgatagcaaagatggtgtagaatcggccggcggcagcgccagggcgtgtgcatgtgaagtgcgcgcctgtgtgaaagaagctgccgatcgttcttgtcgttatgttaaagacaacccgtgggcaggggttggcgccggtgccgttattggcctggtagtcggtttcctcttgggcaaaaagtaa

SEQ ID NO: 453460 - DNA, 432 bp, Serratia marcescens
gtgagaaaaaatgtcactgtcgcgttgggcgtgatagtagccgccgggattgtactgactgcggccttgccatacgtgaagatggagtttgccggcagcgcccactacaccgaaaaggatacgcgggagtatgaatattacacccccgaactactgaaaaatatgccaagaatttcaaatatttatgaatttaattatagcaacatcagtggtccgcaggcgttggtattcggcatacagttcaacggcacaacggataccggcaaaattcgtgattacctggtttctaaaggttatcaaccacagcaacagtgccagactgaagctgaatgctggcgctcggcgcaaagcaaagatgtggtatctttttatcagtcaacggaattaaatttagtgagcgtcgaaatttatcgcagtgagtataccgagtaa

SEQ ID NO: 453461 - DNA, 639 bp, Serratia marcescens
atgagcaaaagatcggaaatcattgatggttcgcaagcccctttccaaaacagaggattagtttatacggaagtacttggatgggtggatctgggacacgcacaaggtacagatattcgttatctcctgaatcaaattgcacgaggagaggcatcgggaaaagagttttacgatgttacgtattctcagggcatgacatcaagatggggacttgtccgctcagggaaggtaacgacatggcggataagacatggccgccacggctatgaacagaaaagcatcgctctggcgatgatgatgtcgatggcactgagatttgagtcgttccaaagctcatttcctaaccacctagtgaccgacagcggattcagtggtgaagatctggtctctgacttgttaggattttatcgcgtggtatctatccataaccctttccacatgttgcgtccggttaataaagcaaaagcgctaagccgctgggatcattatggcaaaatcggcaattggaaaaacaaaacatttctgcctctcctgttccccgacccagggaaattccctaacgccaaaccatatcaaagcgttcttccttcctttatgcgcacggcatcccatatagcgattttcagtctggaaacgtga

SEQ ID NO: 453462 - DNA, 738 bp, Serratia marcescens
gtgaggaataatcagtttggtcaatgcatcggcgatgcgctgccagagtggcagcccgcaggagagccgggactgcagacgctgtgcgggcgcttttgtcgcctggagccgctggatattcagcgcgatgccgcagcgctgtttcacgcctatcaactggccgaggatggccgcgactggacgtacctttcccatgaatacccgcaaacgttggatgaatttacgcattacctgcaaagtcaggggcaggccggcggcagaaaaaccatgacggtgtttgaccagcgcagcggcagggcgatcggcaactgcgcttttttgcgtattgaccaggccaatggcagcgtggaactgggtatgatcaactggtcgccgctgatgcagcgtcaggtgagcggcagtgaggccatctttctgatgttgcgccatgttttcgacgatctcggctatcgccgctgcgagtggaaatgcgaccagcttaatgcgccgtcgcgtgcggcggcgctgcgctttggcttcagttttgaaggcaccttccgtcaggcggtggtggtcaagggacgcacccgcgataccgactggctgtcaatgctggacggcgaatggccgcagcgccgcgccgccttcagccgctggctcgccgccgacaacatggacgacgacggccggcaaactcagcggctgcaggcgttcgccgcctggcacgccggcgcccccagggcggtcacgccgctgtaa

SEQ ID NO: 453463 - DNA, 1416 bp, Serratia marcescens
atgcacccatctttgcagcaggatttaagccaattcccacaaattcttgaccaggtccgtcaactggccgccaccttcctggccgggctgcatgaacgcccggtctgtccgccgcttgcggctcaacagctcaagccaggcgacgatcgcctgtctgacgagggggtgggcgcgcaggccgcgctggactacttctggcaacgctacgccgacgggatttccgccagcgccggcccacgctatttcggctttgtcaccggcggcgtcacgcccgcctcgctggccgccgactggctggtcagcgccatcgaccaaaacagccagctcagccatgacaccgtcgccgccgccattgagctggcggcgattgaacagttgaaaagcctgctcggcctgccggcggatttcagcggcaccctggtcagcggcgcgacgatggccaacttctgcgggctggcgattggccgccagtggctgggggaacggtgcggcgtcaatgtcgcccagcaaggcatggcggcgctgggcaaggtgcaggtgttggccgccagcccccactccagcagcgaaaaagcgctcagcatgctgggcatcggccgcgacgcgctgcagcttattgccaccctgccggattcggaagccattgacccggatgcgctggagcgccatctggccgcgcacccgacgacgccgaccctggtgctggccagcgccggcacggtcaataccgtggcgttcgacaatatcccgcgactgctggcgctgcgcgagcgctacgggttctggctgcatgtcgatgcggcgttcggcggcatcgccgccagttccccggcctacgccccgctgctggaaggctggcagcaggcggactccatcaccgtcgatgcgcataagtggttaaatgtgccctatgacagcgccatccagtttacccgccacctggcgttgcagatgcaggtgtttcagaaccagtcggcctatctggaagcgccggacctgcgtccggataattatctgcatctgacgccggagaactcgcgtcgcttccgcgcgctgccgctgtggatgtcgctggtcgcctacggccgcagcggcgtgcgcgatatggtcgaacgcaacgtccaattggcaaaacggctcggcgagggtctggcggccagccggggtttccagctgttggcgccggtcaatctcaacgtggtgtgctttgccctgacggacgtggtcggcgacgccgaggcggcgcgagacggcttcctggagcgtctgaaccaacacggcgcgattcgctgtaccgccacccgctatcgcggccagccggcagtccgcgccgcgttggtgaactggatgacggaagagaaagatatcgcgctggcgctggaagcgctacggacgtgccgttttacagcggcgtga

SEQ ID NO: 453464 - DNA, 333 bp, Serratia marcescens
atgctgacgccattacaactgtttaaaaacctgtcggacgaaacccggctgatgctggtgctgctgctacggcagagcgaagagctgtgcgtgtgcgaactggcggcgattttgacgctgccgcagcccaaaatctcccgtcatctggcgatgttgcgcgtaagcggtctgctgctggatcgccgcgagggcaagtggatctactaccggctctcgccgcatatgccggcctgggcggcgggtattatcgagcaggcctaccttagccagcaggcggcgttgagtcggctggtgaaacgcgtcggcgacgacgggctggcacggtgccgttaa

SEQ ID NO: 453465 - DNA, 2283 bp, Serratia marcescens
atgaccaagaaaaaacgcgcagttcccggtatccggccctatgacggcccggccggcggctggggagcactgaaagcgacggccatcgcggtaaaaacgcagatggagacctttgaagcaccggccactctgatgcgcaccaaccagccggacggctttgattgtccaggctgcgcctggccggataaagagcaccactccaccttccagttctgtgaaaacggcgccaaggcggtgacctgggaagccaccagcaaacgcgtcacgccggagtttctggcggccaataccgtcagcgcgctgttggagaaaaccgactttgagctggagggctacggccggttgacgcacccgctggcgtacgacaaggcgagcgacaccctgcgaccggtcagttgggaggaggccttcctgcgcatcggtacggtgctgcgcggcatgcagtcgccggatcaggtggagttttacacctccggacgcgcctcgaacgaggccgcctatctgttccagctgttcgcccgcgagttcggcaccaacaacttcccggactgctccaacatgtgccacgaaccaaccagcgtcggcctgccgcagtctatcggcatcggcaaaggcacggtctcgctggatgacttcgaccacgccgaactggtgatatccatcggccacaacccgggcaccaaccacccgcgcatgatgggcaccctgcacgaactggcgcgccgcgacgtgccgattatcgtgtttaacccgctgcgcgaacgggcgctggagcgctttgccgatccgcagaacgtgattgaaatggcgacctacagctccaccaatatcgcctccacctactatcaggtgaaggccggcggcgacgccgccgcgctgaagggcatcgccaaggcgctgctggagtacgacgccgcgcagggcgcaaacagcacggcgctcgaccgcgattttatcgccgggcacacccagggctttgaggcgttcgccgccgatcttgcggctacgccgtggccggcgattgaaaacgaaagcggcctgacgcgcgaagatctggaaaaagtggcgctggcctacgccaagtccaacgccaccatcatcacctacggcatgggcatcacccagcacaacaaaggcaccgccaacgtgcgactgatcgccgatctgctgctgatgcgcggcaatatcggcaagccgggcgccgggatctgcccgctgcgcggccactccaacgtgcagggtaaccgcaccgtcggcatcacggaaaaaccgtcggaggaatttttacgcaatctggaagccgtcttcggctttacgccgccgaaagcgcacggccatgacgcggtgaaagccatgcaggcgatggtggcgggcgacgccaaggccctgatctgcctcggcggcaacttcgccgtcgccctgccggaccccgagctgtgcttcccggcgatgcaggcgctcgatctgagcgtccacctcggcaccaagctcaaccgttcgcacctgctggtggcgaaagaaacctttatcctgccctgcctggggcgcaccgagctggatattcaggccggcggccgccagtcggtgacggtggaggactccatgtcgatggtgcacgcctcttccggcaaactgcagccggcctcgccgctgctgcgttccgaaccggcgatcgtcgccgggctggcgcaggccgccatgccggacagcaaggtgccgtggtcggaactggtggccgattacagcctgatccgcgacctgattgaaaaaaccatccccggttttgaacggtacaatcagcgcatcgcgcagccgggcggcttccgcatgccgctgccgccgaccgaacgtcagtggccgacgccaagcggcaaggcgatgttctcggtgttcacaggggtgcaggaagacgccgaggtgcagggcgatgacgtactgcggctgatcaccctgcgcagccacgaccagtacaacaccaccatctacgccatggacgatcgctaccgcggcgtattcggccggcgcgatattctgtttatgcacgatatcgatctggaaaaacgcggtctggagcacggcgatcgggtgcatatcgaaaccgtcgtcgccgggcgcaaactgcgtctggaaaatatcacggtgatttcttacaacatcgcccccggctccgtcggcgcctactacccggaagccaacgtgctggtgccgttggactacatcgatccggagtgcggcaccccctcctataaatccgtaccggtgcgcgtaaccctcgccggctaa

SEQ ID NO: 453466 - DNA, 1404 bp, Serratia marcescens
atgtttggattagatgccttttatctggcgaggatacagtttgcctttactgtttccttccatattatttttccggccatcaccatcgggctggcgagttttctggcggtattggaaggcctgtggctgaaaacgcgtaatgaaacctaccgcgaactgtaccacttctggtcgaagatctttgcggtcaactttggcatgggggtggtgtcaggcctggtgatggcctaccagttcggcaccaactggagcggtttttcccagttcgccggcagcataaccgggccgctgctgacctatgaagtgctcaccgccttcttcctggaggccggcttcctcggcgtgatgctgttcggctggcaccgggtggggcgcgggctgcacttcttcgccacctgcatggtggcgctcggcacgctgatctccaccttctggatcctcgcgtccaacagctggatgcatacgccgcagggctatgcgatcgaaaacggcatcgtggtgccggtcgactggctgaagattatcttcaacccgtcgttcccttaccggctgctgcatatgtccaccgccgctttcctgtccagcgcgttctttgtcggcgcgtcggcggcctggcacctgctgcgcggcaatgacaccccggcgatccgcaaaatgttctcaatggcgctgtggatggcgctgatcgtcgcgccggttcaggcgatgatcggcgatgcgcacggtctgaataccctggagcatcagccggcgaaaatcgccgcgattgaaggccactgggaaaacccgccgggtgaggcgaccccgctggtgctgttcggcgtgccggatatggaccaggagaccaccaagtacaaactggaaattccgtacctcggcagcctgatcctgacccacagcctggataagcaggtgccggcgctgaagagcttcccgaaagaggatcgcccgaactccaccattatcttctggtcattccgcgtgatggcagggctgggcatgttgatgattctgctcggcgtggtcagcgcctggctgcgctggcgcggccggctgtatcagtcgcggccgttcctgtggttcgccctgctgatggggccgtccgggctgctggcgctgctggccggctggttcaccaccgaaattggccgccagccgtgggtggtgtacggcgtgcagcgcacccgcgatgcggtgtccgcgcacggcgatatgcatatgacgttcagcctgctggccttcctgctggtgtactgctcggtgttcggcatcggctatgtgtacctgatgcgtctgattaaaaaaggcccggagcagcatgacgatgaaccgggcgccggcacgccggcgcgtccgctgtctgcggtgcaggatccgttaaattcgccgcaagggagaaactga

SEQ ID NO: 453467 - DNA, 1011 bp, Serratia marcescens
atgggtatcgatctgtcaattatctggtttgccatcatcgtgttcgccaccttgatgtacatcgttatggacggttttgatctggggatcggcatcctgttcccgttcaataaaaacccggttgagcgcgacatgatggtgaacaccgtggcgccggtgtgggacggcaacgaaacctggctggtgctgggcggcgcggcgctgtacggcgctttcccgctggcctatgcggtgattatcgacgcgctgtctatcccgctgaccgtgatgctggtggggctgattttccgcggcgtcgcctttgagttccgcttcaaggccacgccggaacaccggccgttctgggataaggcgtttatcgtcggctcgatcgtcgccaccttcagccagggcgtcgccgtcggcgcgctgctgaacggttttgcggtcagcggccgcagctatgccggctcgacgctgagctggctggcgccgttcccgctgttctgcggcctggggctggtgatcgcctatgcgctgctgggctgcacctggctgattatgaaaaccgagggcgggctgcaccgcaagatgtcgcagctggcgatcccgctgacgctggcgctgctggccgccatcgccgcgatcagcatctggacgccgctgagccacgcggatatcgccgcgcgctggttcagcacgccgaacctgttctggttcctgccggtgccgctgctggtgctggcggcggcctgggggattgtgcgctcggcctatagccgccgcgccagtttcgggccgtttatgctgacgttggggctgattttcctcggcttcagcggccttggcatcagcatctggccgaacatcattccgccgtccatctccatctggcaggcggcgtcaccgccgcagagtcagggctttatgctggtgggcggcctgctgattatcccggtgattctggcgtatacctgttggagctactacgtgttccgcggaaaaatcaaaccggatgaaggctaccactaa

SEQ ID NO: 453468 - DNA, 147 bp, Serratia marcescens
atgaaacctgccgtagagagttctcccgccctgtggcggaggatgatgtggatggtggtgatttggggcgccagcgtactggcgctgggggtggtggcatcggtatttaaactgctgatggtcgccgccggcatgaagagtcactaa

SEQ ID NO: 453469 - DNA, 987 bp, Serratia marcescens
atgacacactttaccgacccctgggaacgcaagttctactatttgcgcctgtcgattaccgatgtatgtaactttcgctgtcgttattgcctgcccgacggttaccgcccggcgcaggggaataacaaaagctttctgacgctcgatgaaatccgccgggtaacgcgggcgtttgccgccgccggcacggaaaaagtccgcctgaccggcggcgaaccttcgctgcgtcgggacttttgcgagattatcgccgcggtcagcgacaatccggcgatccggcagatcgccatgaccaccaacggctaccgcatggcgcgcgatgtggcccgctggcgcgacgccgggctgacctcggttaacgtcagcctcgacagtctggacgccaatcagttttatgccattaccggccaggacaaattcagacaggtgatggacggcatcgacgccgcgttcagcgtcggttttgcgcaggtgaaggtcaacaccgtgctgatgaaggatgtgaaccaccacagcctgcataccttcctggaatggattaaaacccggccgattcagctgcgctttatcgagctgatggaaaccggcgaagggcgtgagctgttccgccgccaccatatttcgggcgccacgatccgtgaccgcctgctcgccatgggctggcaacggcagccgcgggagcgcagcgccggcccggcgcagatcttcgcccatcccgattatcaggggcagattggcctgatcatgccgtatgaaaacaacttctgcgccagctgcaaccggctgcgcgtctccgcgctggggaaactgcacctgtgcctgttcggcgacggcggcgtttccctgcgtgatttattacagtccgacgaccagcagcaggcgctgcaggcgcggattgccgacagcctgcggcagaaaaagcagacgcactttctgcatcagggcaataccggtattacgcagaacctgtcgtttatcggcggataa

SEQ ID NO: 453470 - DNA, 246 bp, Serratia marcescens
atgatcgatattctgttttttgcccaggtgcgcgagctggtgggctgcagccgcctgcagctgcccgccgattacgccacggtggaagggctgcgtcaggcgctgctggcccgtggcgaacgctggacgctggcgctggagagcgataatttgctggcggcggtgaatcagactctggtgccttttgaacacgcggtgcgcgccggcgatgaagtggcgttttacccgccggtaaccgggggctga

SEQ ID NO: 453471 - DNA, 438 bp, Serratia marcescens
gtggtgggcgccgcgcgtttcgatctggcgcaggaacaccagtggctgtcggcgtcggacgacgacggtgcggtcgtgaccttcgtcggcaaggtgcgcagcgccaatctgggcagcgcggttaacgcgctgacgctggagcattaccccggcatgacggaaaaagcgctggcggagatcgtggcgcaggcgcgcggccgctgggggctggggcgggtggtggtggtgcatcgcgtgggcgaactgccggccggcgaggagattgtgctggtcggcgtcagcagcggccaccgcgagagcgcatttctcgccgcggagtttattatggatctgctgaaaacccgcgcgccgttctggaagcgcgaggccaccgcgcagggtgaccgctgggtcgccacccgggagaaagatcgcctcgccgctgaacgctggcgataa

SEQ ID NO: 453472 - DNA, 894 bp, Serratia marcescens
atggaaatccatcagctcagaagctttgtttacgtcgccaccgaactcagctttcgccgcgcggcggaaaagctcaacatgacgcagccgccgctcacccgccagattcagcagctggaacacagcctcggcaccgcgctgtttaaacgcagcacgcgcaaggtggaactgacggaagccggcaaagtgctgctgaacgaagcgggtaaaatcatcgcgctgaccgagggcgtcgccagccgcgtacagctcagcgcccgcggctgcagcggcgaactggtcatcggcatcttcagctggggcgttatccaccggctgcccgactacctgaaaacgctgcgcgagcagaaacccgatgtgaatgtccggctgctgaatatgtccaaagaaaaacagctggaagcactcagaaacaaggagatcgacatcggcttttgccgctttgccgccggccagagcgggctgagtgtaggcgccatcggggacgaaaaatatctggtggcgatcaatgccaacgacccgctcagtcggcaaacgcgcatcgggctggccgatctggccgataaacccatgatcctctaccccgcctcgtcgctgtcgggcatggcgcagcgcgtgtacgacgcgtttatcgcggaaaacgtcagcctcaacattgccaattactgcgaagacatcatgaccagcctgctgctggtctccggcggctacggctcctgcatcacgacccagtgggcagagaatatcaatatgccggaggtggtctaccggccgctgacggcaaaacgactcagccgctcgccattaaattatatattcagaaatgacgatgacagcatactgctgaatgactttattcagataataaaaaataaagccgatggtgccggataa

SEQ ID NO: 453473 - DNA, 945 bp, Serratia marcescens
atgaaagtgattacgctggaagaacactggatatctgaggaattcaaacgctattaccccaaggccgggagcgtgggctgcgacgccgacatcgcggttctgaccgatatcggcgaacggcgaattgccgtgatggaccagcacggcattgatatgcaggtgctggggcacggtatgtttcccgccacgacggtgagcgttgaacaggtgatgaaaaccaacgatcgggcggcggcggcggtcgcgcgccatcctgaccgctttgccgcttttgctgccctgccgctggcgactatcggcgctgctacagatgagctggcaagaaccgtgagccagtttggctttaaaggcgcgatgatcaacggcacggtggacggcaggttccttgaccaccccgatttctggccgctgctggcgaaggcggaagagctgggcgtgccgctttatctgcacccggcctatccggcggaggcaatcagtaaaccctattacgaaggcgatttcagcgatctggtgtcgttcacgctgggttctacggccgcaggctggcactgggaaaccggcctgcacgtactgcgcatgatcgtcgccggtattttcgacagattcccccggctgcagattattatcggccatctcggcgagctgattcctttttactgggagcgcatcgaatactggctggagccgcgggtggagaatctgcgtaaacaggtcagagactatttcaacagcaatatccatatcaccaccagcggctacagcacgctgccgcctttccaactggcgctgcagaccttcgggctggatcggctgatgttttccgtcgactatccgtttaacccgctggcgccggccgtctcgtttttgcataacctgccgttgacggagccgcagaaagcgcagctcgccggccagaatgccgcacggctgctgcggctttaa

SEQ ID NO: 453474 - DNA, 1278 bp, Serratia marcescens
gtgtcttacctgtccgggcgcctgttgctggctctgctgttctggtgcgcgctctattttcttaccggctacctttctctgtatatggacgcgcccgtcacccgggttgcttttgtctggcttccggccggggtggcggtcagcgcctttctgatcttcggccgggcctactggccgccgctgtttctggcgctgtttcttacccgggtgctgctggacgttaccctgcggcatacgctggaaacctctctggcgctgtcggtgatatcgctgaccaacgccctggcggtggcgtggtgcgtcaggcattttgccgccgggcgcgatcggctgcgcagcgtcggcgtctggctgctggcgacgctgggcaccagcgtgatttccggcgtgctgggcggcggctggctggcgctgaggcatgagattgattttgtgcagaccgtgtggatatggtgggcctccaacgtggtcggcaccattttgctgaccaccatcctgatggggctgcgctggcgttccggaccgttaagcgcgcgtcaactggtgtccggcggcgtactgtggctgctgttgtgcctcagcgcctggtacgtgtttcatcagcctgtcgacgggccgcgcggcgtcgcgctgcagtttgccctggcctgtctgccggtggcgctgatgattgcgatcccggtggtgagcggcaaccggttcggcgcgttatccttcctgtgtttcagcatcatcgtgatttactactcctggcagcgctacggccccttttttatccccgggctgcgcgatggtgaatcgctgctgctggcgcagtgctacctgtccgccaccgcgctgctgctgagttttgtctacgtacaaaagcgcgaggcggaaaaacacgcggcgcaggcggcagaggagcgggtggccggccccggacaggggaaagcggcctaccatctggagccgcagagcgggcggctgacgtgggataacactatcaataccccgctgagccggcagctggcggcgatcaacaacgtcgaacagctgtttgcgctgctgtcggcggaggatcgcgccgccatgcagcagcgctggcagcgggcgcagcagcagggcgccagcgatgatctcttccgcttccacctggcgctgccgccgggcaaccggctggcggtcagcgaaagccggctgctcggcctgcgcgggccggcgggcgtggtgattgtcggctactggagtgaagagccgcacagcaaaatctctgtccattctccgcagggggcgtaa

SEQ ID NO: 453475 - DNA, 300 bp, Serratia marcescens
gtgctgacgccggccggcgacaacgtgctgttccgggccggcaaccctccggcgatcgtggccgacagcgcggcttcgctgctggcgtttgcccgcagcggcgcgggcgtggcgttgctgcccgcctggctggtgcaggaagatatcgccgccggctcgttaacccgcttactgcccgaccaccgttttcccacacagggcatctacgccctctaccccaatacccgccacgtctccgagaaggtgcggacgtttatcgattttctgcaaagccgcattgaagctggcgcagcccgctag

SEQ ID NO: 453476 - DNA, 573 bp, Serratia marcescens
atgttgaatatgcagcgtctggaaatctttgtggcagtcgtggaagccggcagctttaccggtgcggcgcagacgctggggctaaccaaggcggtggtgagttttaatatcaagcagttggaggagaaactcggggtctccctgctcacccgcagcacccggcaggtggccgttacggacgccggcgagcgtttttatctgcgctgtctgcagctgctgcgggatgcggaacagatcctggacgacgtccgcggcgaccatagcggcctgagcggtatactgcgcatcaccaccacgccggaatatggcgccaaggtggtggtgcccgcgctctcggcgtttgccgccctgcatccgcagctgcgcatccagcacgtatcttcgtcaaaaaacgacgatctgatcgccggacgttttgacgtggcgatacgcctcggccaactggcggactcaacgcaccacgcaaggctgatcgaccgctttgcgatttatccagtggcgtcaacggagtatttggcggcgcaccatcgcgaagcaatcaccggcctggcgcagttgcaggaggcgcgctag

SEQ ID NO: 453477 - DNA, 1383 bp, Serratia marcescens
atgaattatcgggtgcgtgtcgccagcgtgtatctgctgggattctttatcgatctggtcaacatgtttatcgccaacgtggcctatccggatatcggccggcagcttgatgcgccggtcagccagctggcgtgggtgagcaacggctacattctggggttaaccctggttattcccctcagcagctggctggcgaagcgcatgggagccaagcgcctgtttatgctctcgctggttattttcattatcggcacctgcggcgtggccggcgcctacaatatcgaacagctgatagcctggcgtgtggcgcaggggctggggggagggctgctgatcccggtcggccagaccatggcctattccctgtaccgcagccatgagcgggccagactctctgccgtggtgatgctggtggcgctgatggcgccggcgctgtccccggccatcggcggcgtactggtggaccacgtcagctggcgctgggtatttttagtcagcctgccgctggcgtttgccgccttgatcctcgccgcctgctggctgaagcctgacgaccgggccggctccgtcgggcggctggacttcagcggccttatcaccggctgtctggcgctgacgctgattttgttagggctgaccacgctgggtgagtccggtcgcctgggactgggcgcggcgttactggccgccgggctggcgctgatgggcgggtatgtgcgcgcatcgctacgcaaagcgcagccgttgcttaatctgcggctgattcagcagccgatgctgcaaacggcgatgctgatctatcagctgatccccggcatttttaccggcgtcagcctggttgcgatgctgtacctgcaggatctgctgggtatgcacgccacggtggtgggggcgatgatgctgccgtgggcgatcgccgcgtttgtcgccatctctctcaccggcaaaacgtttaatcggcttgggccgcgcccgctgtttatcatcggctgtctggtgcagggttgcggcatcggcttgctggcgctgattggcagcgctgatgagatgctgttggcggcttcggcctacgcgctgatgggcttcggcggcagcctgtgcagcagcaccgcgcagagctcggcgtttattcaggttaatgacgccgaactggcggatgccagcgcgctgtggaacattaaccgccagctcagcttctgctttggcgtaacgttaatcagcctgctgctcaacgtattgcttaatctctccggcatgctgcccgcacaggcttaccggctgtgctttatgttggcggcggccagcgccgctattcccgttttactctgcctgcggattgctaaccgcagcgttattcttactcttaatcaggagaaaccatga

SEQ ID NO: 453478 - DNA, 393 bp, Serratia marcescens
atgaaccgttattttcaggaagttttggatgcttgtacgctgattcaccgctggctcggcgatgccgacagcccggcggcggtgtgtgacgcgctgttggcgcgttttagcccggactattccatggtgacgccgggcggcgcactgcttgattacgccgcgctgaacacgtttttccgcagccaatgcggcgcacgggcggggctgacgcttgaaatcgacaatatgcagctgattgcggagagcgccggcggggcgaccgtgacctaccgggaacggcagcagctgccgggccaggaggcgacgctgcgtttttccaccgtggtgtttgagctgggggcggataatcaggtgatatggcggcatctgcaagaaacggcgcttcccgcttag

SEQ ID NO: 453479 - DNA, 339 bp, Serratia marcescens
atgttagtaaacaaagataatgcgttagaaatattaaaatccgatgtgacggactttctatacccttttaaaatgggtggtgagttcaatatcgtcaaatacaaaaaactcattttaactctgaatgacataaccaggatttataaatcagaggaattgctccccaagaaactattaagcgaaatttatcttaccgctgaaggaataagtaacgagtctctctacataaaaaacttcgatcttggatccatggcaaaagagataatggaaaaatattatatgttgttatcaggggagtccgtagatgatcctaaaccggaagtcggaagaataatatag

SEQ ID NO: 453480 - DNA, 471 bp, Serratia marcescens
gtgtaccacttcatttactctgcctcgcaccgcctgaccgctgtcaccttcgacagcgtcaaccgccatcagcgcgccgaataccgttacgatgcgctgggacgccgcacccggaaaaccctctacccgcaccacggcgagccgcagaccaccctgttccactggaacggcctgcagatggtgggtgaacacaatcccgaccagccgcagcgcagcacccaatatctctaccgggaagacagctacgagccgctggcccgcgtcgaccgtcacggcgacaacagcgaggtgtactggtaccacagcgagctcaacggcctgccggagcgcatgaccgacgcgcagggtaaagtcgtctggcacggccgcttctccgcctggggcgccaccgacgccgaaaacggcaccctcgccacacagcagaacctgcgctatcagggtcagtatctggacagggacaaatcagcctaa

SEQ ID NO: 453481 - DNA, 396 bp, Serratia marcescens
atgataaattcagcgaaagaattcattactctgagaaagagtgaaaaccctgatgattaccacagagctatacatgaagatctacatatagatgtgtgggatgatgtgattgacaaccaccccgacatgaaaccctggattatcgccaataaaaatgtccctcttagaatattaaaaagattagttaacgaccaggacaaagatattcgatttagtatcgcaatgaaaaggaaattagattttgagctattcgaaaaactatccagcgatgaggattattccgtaaggctatgtatcgcaagaaataaaaaggctcccactgaaattttaaaaaagttatctaacgatcatgaggaaataataagagaagtggcaaacaaaaaacttggaatttaa

SEQ ID NO: 453482 - DNA, 357 bp, Serratia marcescens
atgagcatgccactatcgacttacccttactcctacggattccctgttagctattttttgatatccattgcggtactgctggggctctactttttacgtaaaaaaaccatacgcctgcactggtttccgttatttactgcacactttggcgtgacagtcgtctgcatcgtgctgcaaaccgccatttgtcttgacggtgaagctatctttgaccgcatttacccggctatcgacttccccgattaccctgaagtctggtacggcagcatattttttatagttgcttattttctgttattgccgcccgtcactaactttgaagacgcgtccgagacaccgccgtcagaacggcaataa

SEQ ID NO: 453483 - DNA, 330 bp, Serratia marcescens
atgaaaaatgatgtcaccctttccacctttaactactcatatggttttgtgttttcatactttatcatttccataacattatttgtttttcttttatatttgaagaaatacgtcacgcaaaagcatagctatccgctttttattttatcaacgatcattgttgtcatttgtggtgcgatgcaatttattatttttggtgaaggtgattacttctttagccttttttacccagtggattttatcaagtatcaagttgtgcaatacggggggggggggttcactatcgcctactcttttttgctaccgagaaacacatactataaaaaataa

SEQ ID NO: 453484 - DNA, 381 bp, Serratia marcescens
atgaaaaataataaattatcgtttcttggctgccttagcctggcctgtttcttcacctctttatctgtctatgctgcaccgcgatcttaccacggtgatgcagtgagctatctgaagaactacgctatcagcgtttgtattgccaaaggctattcggcaacagaggttaaaaatgacgctgccgcagtggcaagaggctatagtgagtttggcgaatactcacttgaggcacatagcgcggtgcgcaatctggctcaacagtttcttaccagacattatgacagcatgtccggtgaaccgatgacgctagccaagtgcattgatctctatcatagccgggaacttgatagcatcatcgaaaaatataaagataaaaattaa

SEQ ID NO: 453485 - DNA, 381 bp, Serratia marcescens
atggatattaaagtaaatactctctccatctcaataatcaccttgttattttcaacgtcactgttcgctgaaaatattaagatagaaaatctgccacaaaataaaatctatgacaattggctaatcagtcgttgcatcggtgaatttactgactcagaaagcacccggcaggatgcattccgctctgccagtgcttatcttgaattcagtcaactaccgatcgaggcctttgacagcagcgaagtgctgatacatcagtacctgcaaaaaaagagtagcggttcagtgcccggaagctataacacattggcctgtctttcattaccaacatcagaacaagccaaaaatattttcaagaaatacgcagtcatcagtgaataa

SEQ ID NO: 453486 - DNA, 600 bp, Serratia marcescens
gtggtaaaggcgcagaaagcagcgcaggttggaacatcaaagaaaaccgcgaagcttaatctgtcctcccccggctgcggccgggggtttatatataagcaaaggaaatgcagcatgcaaagacccacatttggcccagcatggattcgattttctgaagttaatatcagtgtaagccaggtcggcgcactgatcggtggaaaagttaaaagcaatattgaaaaaggtatttttcaaaatgcctgtcccatccgaatgagttatgtacttaattatacaggaatatctatccctgcaaattcaggatatgcagccgtttctggaaaagataagaagtggtatatctatagagtcaatgatatgattcgctttttagaagagcgttttggtaaacccgacattactgaaagatcccctaccccagcaaagttttcaggtaaaaaaggaatcatggtcattcttggtaatggatggaacaatgccagagggcatgtcacattatggaatggtgatatttgttctgactcctgccattttatgggcgatcctgaaaacggtagttttgttccagaggtggcgtcactatggatattaaagtaa

SEQ ID NO: 453487 - DNA, 147 bp, Serratia marcescens
atgcattttaactcgctgtttatattgcataaaaataaaaaattgcgtaagttagcttcaccaaaatgggttaaaggccatcattttgcaaatgcctatagctattgtaaactgcagccaaacccgtggatgtgtaaaaattgttaa

SEQ ID NO: 453488 - DNA, 132 bp, Serratia marcescens
atgaatctttcttacaagttaataggattattcctaaacaacagcaactctacccctgaaccgttagcacacacaacgcaggtgtacggcaattttaaatacaatgtgatcgcgatcacaaaaatgaactga

SEQ ID NO: 453489 - DNA, 1083 bp, Serratia marcescens
atgaagcagaatcatccggtcgttctggttcgcaaacgcaaggcgcatcataacgcgcatcacggtggctcctggaagattgcctacgccgattttatgacggcgatgatggcgttctttctggtgatgtggctgctggctatcgccagtccgcaggaactgacgcaaattgccgagtatttccgtacgccgctgaaagtggccctgaccggcggcaacaagagcagcgccgaaagcagcccaattcccggcggcggtgacgatcccacccagcaggacgggttggtgaaaaagcagacggatgccgagcaacaggcggaggcgcgacggttcaacaagctgcgcgagcgattggatcaactgattgagtccgacccgcgcctgcgggaactgcggccgcatctgctgattaacctgatggatgaggggctgcgcattcagattatcgacggcaagaaccggccgatgttcaaaaccggcagcgcgcaggtggaggaccatatgcgcgatattttgcgggccattgcgccaattctgaatgatttacccaataaaatcagcctgtcgggccataccgacgacctgccttacgccaccggtgagcgctattacagcaactgggagctgtctgccgaccgcgccaatgcctcacgacgcgagctgattgccggcgggctggcggaaggcaaagtgctgcgggtggtgggcatggccgccaccatgagtctgaagcagcgcggggcggatgattcgatgaaccgtcgcatcacgattctggtgctgaataaacaaacgcagcaggggatcgaacatgaaaacgcgaaaagcgaggcaacggaaatcagtcagccgctggcgctgaagcaactggcgccgcagcctgccgcaccgtcttctccggtttcagccgaggcggcgacgcagacgccgcagccaggggaggcggcggctctgccgtcagcgacggacgtttcaacctcgtcggcgccaccgccggagggaccgacgacggccatcccgccggcgccggcggcaggcccatcgactaacccacagcgtctcacagtagaggtgatcccgtga

SEQ ID NO: 453490 - DNA, 1605 bp, Serratia marcescens
gtgtttaaccgagtccgtatttccatcagcctgtatctgctgatgttctgtttttgtctgatgcagctgatcagcaccggcttgtcgttcagcgcctttcgcgccgacagccgcagctttacggcaatcacgcaggggagccagcagcgcgacgcgctgacgatgagccgggttgcgctgctgcaggcgcgcaatagcctgaaccgcgccggtacccgcacggcgctgcggctgccggcggagcaggtgaacgccctgctggaggacgcccgccgttcactgcagagcgccgagcgggatttcagacggtttcagacgctggcgcctgccggcgagcgggcgcgcagcctgacgctgcgctaccaacagctgcacgctgcgctgctggaactgagcggttttctggcgagcggcgacctgcaggcgtttatggatcagcccacgcagcagatccagacgcagtttgaaacggaactgacccactatctgcagcggctgagcggcgagatgacgcaggcgcagcagaccaatcagcgggcctataccctgggcagctggatgctgacgggggcggtgctgatgctgttcgtcgttgccggctgcgcgatctggtggcagcaaagcgtgctgctggggccgctgaagagcatgcgccgtcactttgagcgcatcgccgccggcgatctggcgacgccggtggtggtgacgggcaacaatgaaatcagcgcgttattcgccgggctgcggcagatgcagcagtcgctgacccacaccgtcggcgcggtgcaggacgggacggaggccatgctgatcggcctgcaggagattgcggagggcaataacgacctctcctcccggaccgaacagcaggccgcctcgctggaagaaaccgccgccagcatggagcagctgacctccacggtgaagcagaatgccgacaatgcgcgtcaggccacgcagctggcgcgcgacgcctcggccattgccgccaaaggcggcgagctggcgggcgaggtggttaacaccatgcacgccatcgccagcagttcgcagaagatcggcgccattaccggcgtgatcgacggcatcgccttccagaccaacattctggcgcttaacgcggcggtggaggcggcacgcgccggtgagcagggacgcggcttcgccgtggtggccggcgaagtgcgcagtctggcgcagcgcagcgcgcaggcggcaaaagagattaaaggcctgatcgatgaatcggtcgggcgggtgcggcagggctcgacgctggtggaacattccggcgacaccatgcaggacatcgtacgttcggtgacgcgggtcaccgacatcatgggagaaatcgcctccgcgtccgatgagcaaagccgcggtattgaacaggtgacgcaggcggtaacgcagatggatcaggtgacgcaacagaacgcggcgctggtggtacaggctgcctctgccgccagcgggctggaggagcaggcgatcgccctggctgatgcggtgtcggtattccgcctggcggacgcacatgccggcgcgtcgccttcagatcgtttacacaggcacaaggagacgccagattgtcaaacatcataa

SEQ ID NO: 453491 - DNA, 237 bp, Serratia marcescens
atgactatcggttccgtttttaccaataatcgctcgcaggcggtacgtttgccggcagaggcgcgttttcctgattcggtgtcgaaggtgacggtgcgcgtggtgggtaaagagcgcgttctggccccggtggaaaatacctgggacagcttttttgaccaggagcgcctgcccggtgatgattttctgaatgaaagagccgcgcagtatcaggcagagcgggaaagttttgaatga

SEQ ID NO: 453492 - DNA, 441 bp, Serratia marcescens
atgatcacgcatatgctggataccaatattgtcatctatgtgatcaagcgtcgaccgcgtgaagtgctggcggtatttaatcagcacgcgggaaaaatggcgatatctgccgtgacctatggtgagcttgtacacggcgtggaaaagagcgccaggcaggttgagaatctgcgcgtcgtcgaggattttgtttcccggctggacgttttgccctacaccgacaaggcggctgcacactacggcaatattcgcgccgatcttgaacgtaaaggcacgccgattggggttaacgacctgcatatcgccggccatgcccgcagtgaaggcttggtattggtcagcaataatttgcgcgagtttgcccgcatcgacggtctgaggctggaaaactggttgtcatcaccaatcattccgccatctcgtccctcatcctcgaaataa

SEQ ID NO: 453493 - DNA, 405 bp, Serratia marcescens
atgatgcgcctgtggctgctgctgttactgtgcggcgcgccggcggcgcaggcggtttccggctcctgggcggccgatgcgctgggggcgacgttgagccacggcggcatcagcgcgcagtcgtccgcgctgcggccgccgaatgcgctgccggacgatcgggcgcgcatcgtcagcgtcagctggcgctatttgctgacgtcgccgccgccggccggtttgcaggtgcagctgtgcatgccggggcgctgcgtagcgctggcgggcgccagcggtaccacgcaggcgtttgccggcgcgccggcggccagcgagctgcgctttggctatgtggtgcagacgcgcggcgcgctgtttcccccgctgcgggtgctcagcaatcaggtgatcgtcaattaccaatag

SEQ ID NO: 453494 - DNA, 864 bp, Serratia marcescens
atggcaaacgtacaagctggcaataaacacccgaccccagatcccgcagaggacaatgcgttcttcccctcgccctattcactaagccagtttacttcgcctaaatctgacctgagcgatgcaaattatcttgatccctataccggcggtcgctggaagatcctggtggttggcgcagatgaacgctatctacttacggataatggcaccatgttttcgacgggaaaccacccagtggaaacgcttctgccgatgtatcatctggacaaagccggtttttctttcgatatcgctacgctttccggcaacccggttaaatttgagtactgggcgatgccatcggaagacgaagaagtaaagggattgttcgccaaatatcgtgaccagttcaaggagcctctgaagcttgcagacgttgtagaaaaagcgcttggcgatgattcagactatatcggggtgtttattcctggagggcatggcgccttgatcggtctgcctgaaagccgggagatgaaaaccgtccttgaatgggctgttgcacatgacaagtttataatctcgctctgccacgggccggcggccttcctttctgttggcaacaacccaaacttttcaggttacaagatctgtgccttccctgatgctctcgacgcccagaccccggacattggctacatgcccggtcatctgacgtggaagttcggagaaaagctgaaagcacttggcttcgacattgtgaatacggatatttcaggtgccacgcatcaggatcggaagatgctgacgggtgatagccctctggctgggaacaatcttggaaagctggcggccaaagccctgcttgacgaggttggcaaaaagtaa

SEQ ID NO: 453495 - DNA, 681 bp, Serratia marcescens
atgattattgaaggctgccatagtctggcagccgttcaagacgcagttcgcactttctcaaaaccgtacggttatgatcgctatgtactgtactccgccagctcaatgagtgatgaaattgtagagcgtatctactgggtagaaggggagtggtttggcgatggcgaggccatcgatgctacgacctacattcgccgttgcccggtgacacgacatattttggcggtggacgcgccttttttctggaccaaagtttcagataaacggggagagcggtatcgcgtcgttcgcaaacctcaagggccaggtatccatggtctgcaaatcccggtcttcggaccacacggattggcaggtgccatgagccttggcggagaaagaatcgatgcctcttctaaggcccgtctatcactacatgtagtggcaacatccgcttttttctcggcccggaggttgatggacttgcccatggcagaggaaagtaggcagctttcaaaacgcgaatgtgaggtcctggcatggacggctgtcggcaggcgacaggctgacattgcagccactctcgggctatccatacgcacggtagaaaaccacctccgtcgagcccgtcaccgtcttggtgtggcaaccaccgccgaagccgtcagaatggcgattcgtaacggtgacatcgaggggtga

SEQ ID NO: 453496 - DNA, 432 bp, Serratia marcescens
atggaaagcctgacactgcagctggacaagctgttggcaacgctcggcgagctggagagcacgctggcggaagaacacgccctgctgtgcgccagccgcctgccggggccggcgctgcagcgcgtcaccgataacaaaaaccagctgctggcgacggtcagccatcaggaacagcagcggcaacggctggaaagcggcggcctgaaagcgccctatgccggccacgacgcgctggcggcgcgctggcgacaggtgcagcagctgagccagcggctgcgtgagcaaaaccagcacaacggtctgctgctgggccgccatatcgagcataacgcgcaggcgctggcggtactgaacaaacagaataaaaccctgtacggcccggacggccagtcgcgcggcggcagcctgctggggcgtaaaatcggcgtgtaa

SEQ ID NO: 453497 - DNA, 651 bp, Serratia marcescens
ttgcgattacgagttatgctgctggcgctgctgccggcgttaccggccagcgccgacgatttcggcggccaggtcgaacgctttatcaaggcgcagtttgccggcagcccggtgacggtcagcgtcgaggtgcgtacgccggcaacgcagtggccgtcctgcgctgcgccgcagctggcgctgacgcaaagcgcccgcctctggggtgccgtgaccctctccgcccgctgcggcgacgagcgccgttttattcagacgcaggtggcggcgaccggccgctatctggtggccgcgcgcgccatccgcagcggccaggcgttgacggcggcggacattaaaaccgtgcgcggtcggctggatacgctgccgccgcgcgcgctcggcgacgaacgccgcgccctcggcgccgtcagcctgcgcaatatcggccgcggccagccgctgaccgccccgatgctgcgccgcccctggcgggtgaaggccggccagccggtgcaggtgtgggttcagggcgaaggatttaacatcagcggcaacggcaaggcgatgaataacgccgccgccgatgagagcgtgcgggtgcgcatggcctccgggcggatcgtcagcggcacggtcgatgagaacggcgacatccgcattacgttatga

SEQ ID NO: 453498 - DNA, 396 bp, Serratia marcescens
atgagcgacgcgcagcagacgcacgtcagccagcctgccgaaccggtcctgccgaccggttcggtgcttactcaggtcagcagcgcgctcggcggcgtgctgctgctgatcctgctggccggctggctgttccgccgcctgggctttgcgccgcagaaacgcggcggcgcgctgctgaatctgcgcgccagctgccaggtcggccagcgcgaacgcgtggtggtggtggaagtggacaacacctggctggtgctgggggttaccgcgcagcagatcacgccgctgcacaccctgagcgcgccgcctgcggcccctgatgccgacggcgccgcgccgccggccaactttcgtcaactgatacacaacgtcctgcaacgcccggaaaaatcggcatga

SEQ ID NO: 453499 - DNA, 1185 bp, Serratia marcescens
atgaatctcacccttttgcccatgatgacgccggccggcgacgccgcaaccgacggcctgacgccggctgccgatagcgatgcgctgtcatcggcgttcgcacagctgctgggcgaacgctttcgccccgccgggcaacgcgcggacgcaccgcagcggcagacgccggccgccgatgcgcagccagcgccgaacggcgaggcgctcagccggctgctgagctcgccggaacggctggcaacgctggcgaacctgaccgaacgcgtgccgaccgacgcggcaaccacgccggacgacgagccggaatcgccgcccattgcggccctgaaagcacaggacgcgccggatgccgccactctgcaggcgctgctggcgatgctgccgccaaccgcagcgccgctgccggacgagcaacgcgccgctgcgccatcggcggatcaccgccctgccgctaaagcgccggcgaacgccttgatgaccgcgctgcatgacgatgccgcgccgcctgccgatcgcatcgcaacgccggccgcgccgcgccagacgtctgcgccgcaaaatagcgacgccgccctgccgccggcgaccaaacccgacgccttctccgttgaacgcctcgcgctgaatggcgatggcgcaccggccccgacgccgcagcacgccatagcatcgccggcctccggcgtgcagttcacgacgccacagcctgccgccgcgccaaccgccccggctgcgccgttgctgaacgcgccgctcggcagcccggagtggcaacaggcgttaagccagcaggtactgatgttccagcgcggcggccagcagagcgccgaactgcgtctgcatcctcaggaactgggctcgctgcagattaccctgaagctggacgatcagcaggcgcagctgcatatcgcctcggcgcacggccaggtgcgcgccgcggtggaagccgccatgccgcagctgcgccatgcgctggcggaaagcggcatcaatctggggcagagcagcgttggcggcgacccgtcgccgcagcagtcgcagcagcaggcctcacaggagcacggccggccgtcatcctaccgtgagcagcacggcggcgcggagctgcccaccgaagcatccgccgcgccgccggccctgcaggcgctggcgcgggcggttgacggcgtcgatatcttcgcctga

SEQ ID NO: 453500 - DNA, 708 bp, Serratia marcescens
atgtctgacagcagcccactcgcctggcagccgtggaggcttaacgatttagcgacgcccgcggcgacggaaaccgcaccggaaaccgatttgccgccggccatgccggagagcgcgccgctggataaggcggaaagcgaacggcaacagttggaagccctgcggctgcaggcgcagcagcagggtcatcagctgggccatgacgaaggccggcagcaaggataccaggaaggcttccagcaaggcctggaggaaggccgtcagcaggggatcgaacagagcgaactgcagcagcagccgctgaccgagcagtggcggcagatggtcggtgaattccagcagacactggacgcgctggacagcgtgatcgccgcgcgcctgatgcagctggcgctcaccgccgccaagcaggtgctcggccagccgccggtctgcgacggcaccgccctgctggcgcagatccaacagctgattcagcaggagccgatgttcagcggcaaaccgcagctgcgcgtgcaccccgacgactacccgcgcgtggaacagcagctcggcgtgacgctgagcctgcacggctggcggctgctggccgacggcgaactgcatcccggcggctgtaaagtcagcgccgaggaaggcgatctcgacgccagcctggctacccgctggcacgaaatctgccgcctggcggctccgggggacgtatga

SEQ ID NO: 453501 - DNA, 450 bp, Serratia marcescens
atgcagaatgatccctattttttacgagtggccagaggcgaggttatcctgtcgcaggtctcaaagatgttgggatggaagttcgtccactatgatgatgatgcgatgaaggttcaggtagaatatgacgcagaagacttgttgaccaatccactgggctgtatccagggcggcattctgtcggccatgttggatgatgcgatggggccggcggtgtatatgacgctgccgacgccgctgctggcggtaacgattgaatcaaaaaccagctttatcagtccggcacagccgggaaagatcaaaggctttggtaaaatagtgcgcaagacaggctctatcgtatttaccgaaggctttttacataataccgatggtgaattgatcgcaacaggcagcgcgacattcaaactgggcaaatatggcaggttgccgctaccctggcaagggtag

SEQ ID NO: 453502 - DNA, 1047 bp, Serratia marcescens
atgagcggcagcggaacgcagtttgattttgtggcgctgatgcaggaaaaatccagcgcgcatggctttgtgctggatgacgatcagtgtcgcgtcgtggctcggctgggcagcctgatcgctgcgcaggcgccccgcccgccgcatcatgccggcggcgtttatctgtggggtaaggtcgggcggggcaagacgtttatcctcgacgcgttttatgatgcggcgccaatccgcagcaaacgccgcgtacacttccattattttttccgtgaactacaccaacgcatggccgcacaggataaccgcgggcggtcaataaccgaggtgttgagcgcgcaactgggcgactgccggttattgtgttttgatgagttccatctgcacgatattggcgatgcgatgctgatcaaacccctgctggagtttatttttcagcggcagattgtgttggtgacaacctccaactatccgccggatgaactgctggccaaccccctctaccaccagcgctttgtgccttcgatagcgttaatcaaacagcatatggagaccttcgcgctgaccggcgggcaggattaccgcctgctgggggcgaatgacagcacgccgttttgcgatggcgtctatcttagccccggcagtgcagagcagcgccgggcgtgcgggctgccgcagcctgacggtgagcacgtcctcgaggttggctaccgcaggctggcggtgctttctcccgcccgcgacgttctgcacttttcctttgcggcgctgtgcgtggcgccgacggcggtgatggattatctggcgctgtgcgaacgctgccgctgctggattatcgaagacgttccggcgctggcgacccagtctgcggcggcgcagcagcgttttatcaacgtgattgacgtgctctacgatcagagttgccggctgtatatcatcagcgactacccgctggacgcgatgactgacggcgtggcgcaggaagatatccagcgcacccgcagccggctgagccagctgaaacacgtcgtgccggccggccggccataa

SEQ ID NO: 453503 - DNA, 744 bp, Serratia marcescens
gtgttgttctgcggacgtcgtccgcataagagagaaattgtgaatataaccccatgtccgctggtgctgatccccggctttatgctggatgagacgctgtggcagcggtttcaaacctgtctgccggccggctggccggtactgcacggcgcgttgagcggcggcaaaaccatccgcgatatcgcccgccatcttgccgagacgctgccgcccaggttcgtgctggttggcttctcgctgggcggctatatcgccagacagctggcggcggattacccgcagcgggcggcggcgctggtgctggtggccagctcgctgcgtgaggacaccgagcagcagatggcatcgaagcagcaggcggtgcaaagcctgtccgccgccaccttcagcggcctgagccgcacggcgattgccggttcactgcaccccgaccgcgctgcggatacggcgctgattgcggcgatcagacagatgggcaaccggctgggctacgccgcactggcgagccagtcggcgctgcgcagggccgacgtccccgcggcggcgatacgttgcccgacactggtggttgcgggcgcgcaggacgcgctgcgctcgctggatgaggcgcaggaactgaccgcggcgattgccggcgccacgctgcaggtgcttgacggcagcggacatatgctgccgctggagcagccgcaggcgctggccgatacgctggtccgctggctgaacgagcagggaattgattag

SEQ ID NO: 453504 - DNA, 870 bp, Serratia marcescens
gtggatctcgacaaaagaataacgatcaggaatctcaatgtattgatcccttccaggaaaagcacccgtctacgttggaaggagtatcaaatactctctctgctggtggccaattctcctgaactggtgacccgggcggaaattatagaaagcatctggaaaggcacctattgctctgattcgacgataaatcagacgattaaatcgattcgtcagaagataggcgacagcgatcacaccattatcagaactatccctcgcttaggctacaaggttgaaaaccgcgcaatatttaatttcctgagcgatgatagtcatgatgaagaacctattttaggttctggctacatttcttcaggggatattcaacaggaatcatctgaaagtttggcggaggggcgtgcttctgcagaggtggaaataagtgacgagcatgagccggggatggcgcaggaaaaaatagcatcccggcgccacttttggcatcgacagccgtttaacgcgccgcagaaacggccgggacgtttttccctgctgattgcccgcgctgtcaagtggctatccgcgctgacgttatgtgcggttatcgccaatgttttcttttatctggggggaaatcgcatgcacaccccggagcgggtgatgctgactttaaaactgggcaatcccgatgcgcccgcgtcgcactcgctcttatgcctgtatcagggagacaagtcgctgcaggtgacgattgagtgcatcgatcccaaaaagggagagtttcagcagcaataccgcgacgacgaaataaaggaccgcggcgaaattcagcttactctgccggaacatttgataaacgcatttattccacaggaaagagaaaattag

SEQ ID NO: 453505 - DNA, 1050 bp, Serratia marcescens
atgctttatcaactgggagtgatattttttttggcgctgttgctgatggcatgcgtcaggcgaatcgccgtgaaactggcgctggtggataaacccagcgctcgcaaacagcatcaggggcatatcccgctaagcggcggcatcgcgatttatctgtcggtggtgctgttttcactctggcaaccggacggcatcccgcatatggcgacatatctgtgctgcgtgacggccttgctgctgctgggcgtgctggacgaccgttttgagctgccggtcgcgccgcgcatgacggtgcagggtgggttggcgctggtgatgatgctggcggccggcatgcagctttcctcgctggggcgcctgtggggcgacgaaacggtgcagcttggctatggcgctctgctggtgacgccgctggcggtatggggcgcgatcaacgcttacaacatggttgacggcatagacggccaactgggcattcagtgctgcgtaactctctccgggttggccgtgctgttcgctctgggcggccgcccgggcgcggtgttttggtgcctgagcctgattgccaccctggcggcctatctgctgtttaatctcggcgtcatggggcgccgcaaccaagtctttatgggcgacgccggcagcatggtgatggggtttaccgtgctgtggctgctgctggccgcaacgcagggcggcggtgcggtgatgcgtccggttggcgcactgtggctgatcgcgatgccgctgatggatatggcgagcgtaatgctgcgtcgtatcgcccggcgtcagagtccgtttcgcgccggccgcgatcatctgcaccacattttgatgcgccgcggccgcagcgcccgccagacattggcagtcagcggtctgctggcggtggcgttggctgctttcggcctgtccggcgagctgttggggctgccggaaaatctgatgctggccgcgtttttgctgtgcttcggcggttattttctgctggggcgcgagccacggcgcacaaggatggcgcccggttcgccggccgccgatcgttaa

SEQ ID NO: 453506 - DNA, 1131 bp, Serratia marcescens
atgaatcgtgttttttcccgtctgacgctggcgttatccgccgtactgcttggcagctgcagtttgttccccggttctcatttgccgacggccgggaagcataaggttacgctggctgacgatgccgctgcgccgacgccgcaggtggaggtataccgcatgacgccgatgctgttggcgaaaatgcggcgggtggcgccgtcagcgcggcccaatccgcagttggagctgttccgacagcactatcaataccgcattggcgttggcgacgtattgaacgtcacggtgtgggatcacccggagctgaccacgccggccgggcagtatcgcagcgccagcgataccggcaactgggtgcataccgacggcagcattttttatccatatatcggcaggctgcaggtagcggggaaaacccttgaggaggtgcgcagcctgatcgctgcccggttggcggaagtggttgagaatccgcaggtgggcgtcactattgccgcatttcgttcgcaaaaagcctatgtcaccggtgaggtgaacgtctccggccagcaaccgatcaccaatgtgccgctcacggtgctggatgcgatcaacgccgcaggcggactgaccgaagcggctgactggcgcaatgtgatcgtgacgcgacagggaaaagagcaggcgatctctttacaggcactgatgcagtacggcgatctgagccagaatctgccgctgacggcaggggatattctttacgtgccgcgcaacgacgaccagaaagtatttgtgatgggcgaggttggcaggcaggccaccctgaagctggaccgcagcggcatgacattgatcgaggcgctgggcaacgccggcggcatgagtcaaacgttggcggacgccaccggcgtcttcgttattcgccccggccgcgacaaggacggagcgccgttggcggcgctgtaccagtttgacctgtcggacgctaccgcgttggcgatgggtacggagttttacctacggccgtacgacgtggtgtatgtcaccgcggcggcggtaacgcgctggaaccggttgattagccaattggtgccgactatttccgggttgaacgatctgagcgaggctacgttgcggttgcgcaactggtaa

SEQ ID NO: 453507 - DNA, 2187 bp, Serratia marcescens
atgataaaaaatagtgtgcagcctgtcgcagcggcggccagagaagagacgctggagtgggagcgactgcttggctcgctatgggacaaccgctggcgtctggcgctggcaaccctcctggcggcgctgctgggggggctttatgcgctgctggcgacgccggtttatgaggcgacggcgatggcgcaggtggagcaaccgaccagcggcgcgtcgctgctgcgtcagtcgctggataacgccggcgagcagttttccgccacgcaggatgaagtggcgctggtcaattcccgttatgtgctggggaaaaccgtggacagtcaggggttgacggtgcgcgtcagcgcagacacgttcccgctggtgggtaaaggtattgcgcgcctgttgggtaagcctttgccacagttggcgatagccgaactggcggtgccggcggatatgcagggagaacccctgaccttaagcgtgcgggaagaccagcgctttaccctgagccaggacggacgaacgctgctgcgcgggcgggcgggggaaacgttgcaggacggcgcatggcgcctgcgcgtgacgacgctgtcagccgaaccgggcgcgacgttcagcgttgtgaagttggcgcgtcagcaggcgattgacgatctgcgccgtacgctgagtatcgctctggcgggtaaagagagcggcatcatgaccttcaaattggaaagtgaagacccgcagcgcgccaaacgggtgctgcagagcatcaccgaaaattatctgcagcagaatatcgatcgtaaaactgaagaggcccagcgcatgctggcttttctggcgcgccagctgccgcagatccgcgcttcgctgaatcaggcggagaaccggctgaatcagttccgccggcagaatgattcggtggatctgtcgctggaggccaaatcagtactggatacgcaggtgcagctggaggcgcagcttaacgaactgaccttcagagagtcggagatatccaaactgtatacccgcgcgcatccggcgtatcgcgccctgttggaaaaacgcgccacgctgcaacaggagaaagcgcgtctgggcaagcaggtgcagaatctgccgaaaacccagcaggaggtgctgcggctgacgcgcgatgtgcaggttgatcagcaggtgtatatgcagctgctgaacaagcagcaggagctgaacatcagcaaagcgggcacggtggggaacattcgcattatcgatgcggcggaaacggcgattaaaccgatcaaaccgcagaaaatgctgatcgtcatcctggcgctgctcagcggcgcgacgattaccgccgcgataattttgctgcgcagcgccttccatcgggggatcggcgataccgccgcgctggaaaaatgcggtatcaatgtgtacgccacggtgccgctgtcgctatggcaaagcaaacgcaaccgcagccagcagctgttgttgacgcgcgccggcggcgaacggctgccgatactggcgcaggagcagccggaggatctggccgtcgaagcgtttcgcagtttgcgcaccagcctgcacttcgccatgacggaggcgagcaacaatatcctgatgatctccggcgccagcccggccagcgggaaaagtttcgccagtatcaatctggcggcggtgctggcgcaggccggccagcgggtattactgatcgatggcgatatgcgcaaggggtttctgcaccgctggttgagtaacgacgcgcagcgggggttatccgacgtactggtcggccagctggagccgagcctgtcggtgcgtaccacggcgatagccaatctggattttgtgccgcgcggacaggtaccgccgaatccctccgagctgttgatgcacccgcgttttacggatttcttgtgctgggcgggacagcgttacgacatggtgctgatcgatacgccgccgatcctggcggttaccgatgcggcggttatcggacatcacgctggcacatcgctgatggtggtgcgttttgcggccaacagtatcaaacaggttgaaaccagcctgcgtcgctttgaacaaaacggcgtcattgtcaaaggggtgatccttaacggcgtggtgcaaaaggccgtgaccgatgtcggctattacaacttcgcctacccgagtcatcgggaagagggcgaggcggcgtcaggaacctag

SEQ ID NO: 453508 - DNA, 849 bp, Serratia marcescens
atgcttaatcgtttatttagagggatcgtccggcgtctgcccgacgcgctgcaccatcaggtgaaatatgcgctgcgttttaagcgattaccgcatttgtccagtccgcgcggttatggcgagaagttgatgcggcgtaaaatttatccgcgcgctatttacaccaggctgtctgataaataccgggtgcgcgaatttattgccgggctttggggagaagagtacctgattgagctgtatgcgcacggcgaggcgctgagttacgacgtttttagccgtctgccgcgtcagtttgtactcaaggccaatcacggcagcggttataaccggctggtatttgataaggagcaggtcagctatgccgagttatatgaccagtcccagcgctggatgcgcgccaacttttatcagcaaagtcgcgagcgccactaccgcgatattaccccctgcatcatggttgagcggctgctgctggaaaacggcgaggtgccgaacgatcttaaatttcactgcttcaaccgtgatggcgtgatccgcatatttatccaggtggattaccaccgcttcggtgaacaccggcgggatatcttcgatgagcgctggaaccgcactgaaatccgcattggcctgcccaatgcagaacagcccgccgccgcaccctcgcagctggcggagatgctgcgtctggcgcggttgaccgtgcagcagttttcctatctgcgggttgatttttatcaggtgggcgagcgggtttatttcggcgagctgacgtttacgcccggcgccggcatgacacgtctgcagcctgagcgcatcgatcaggagtggggcgactattttaccgagtag

SEQ ID NO: 453509 - DNA, 1056 bp, Serratia marcescens
atgacgccgcgcaatgttgccattgtgattgaaaacatcgccgggaaaggcggcaccgaacgcgtcgccagcggattggccaatgcgctggccgacgacagcggcgcacaggtaacgctgttttccctcggcggtgaaccggccttttttccgctgacgccggcggtgacgctgcgcctgctggacgaccgcgcgccgttttggccgtggcgcctggcctggacgctgcgcagggaacgttacgacgccatcattatcgtctcgatggggcggctgtcggtggtggtgacgccctatctgcgtttgctgtgccccgatggccggctactgctcagtgaacacgtcagttttcagcagtatccatggccgatgcgctggctgaagctgctggtatatgccctggccgaccgggtgattttgctgacgcagcaggatcgcgcgcggataagccgctggatccggccggaaaaatgcctggtgatagaaaacgtttcgccgtttgcatcgcagccgctcgacggcagccagcggcgcaatgtcgcgctggcgattggccggcttaccgaacagaagggatttgatcggctgatcgacgcctggcggcagatcgcccggttggcgccgtcgtggcaactgctgattgtcggcgacggtccggcgcggccggcgctgcaacggcagattgcgcaggccgggctggagcatcaggttactttgctgccggcgacgcaggacgtggcgagctattaccgccaggccagcgtgtacctgatgacgtcgcgttatgaagggctgccgatggtgctgatcgaggcgttgagcttcggcctgccgctggtggcttacgactgtccgaccggaccggcggagctgataacgtccggcgttaacggttacctggtgccggacggcgatcgcccgcagttctgcgagcgggtgatggcgctgattatggatcacgcgctgcggcagcgctttgcgcaggcttcctggcagcaggcgcagcgctttacgccggcgcgcatttaccctgagtggcaacggattatcacgtga

SEQ ID NO: 453510 - DNA, 1818 bp, Serratia marcescens
atgccgtcgatcgccgccgccgcgctgctgcacgctatgccgccgcaggattgcgcgccgaatctgttgcacaaccccggttttgaacaggggctgcagggctggcgcggcgcaggcgccggaccggatagcgtggcgcacggcggcgcggccagtctgcgttatcacaatccggatgacgcccgctaccgcaccttcagtcagaccatcgcggcgcagcccggccagacgatcgcgttcggcgcctggctgaaagggcgcgggctgcaggggccgccgcaggatcgcggcgccagcgtgtatatccagagttttgatgcgcaggggcgctttctggagggccgttacccggcggggatcgtcggcgacagcgactggcgaccaatctcggctcggtaccgcgtcccgcagcgggcggcgcgggtgacgctggggttatacctgcggcgcggcaccaccggcacggcgtggtttgacgacgtttacgcctgtgcgctgccgcctcaggcgactctctatccggcaaacggccgcacgctgattgaaacgccgcagccgcagtgggtgacggtcagcagcgtgctgctcgaccggcagcgcaaggtgatcgaccagacgaagcggcggcgctatatcgccgatcgtcagtggctgacctatacgccgccgctgctgccgccgggggaataccgtctgcggcagcaggtgaccgaggcggcgaccggacggcggcgcagcagtgaaattgcgctggatatcggccagccgacgccggcggtgacgattgacgggcagggttttacccgccgccacggcgagcggctgtttccgctggggatatactctacccgcgacggcgatgacgatttggcgcgcatcgccgccgccggtttcaacagcgtgctcaattatcgctatggtcttggcaaggacgccgacggttttttccgccgcagccggcgtcacgggctgcaggtgatttacgccatcaaagatctgtatgccggcagccgttttgcgccggcgacgcgcggcagctatgcggcactggccgctactcagattaaccggctgaaaaatcagcctaatttattggcctggtatatcaacgatgagctggggctggagtttttgccgcagattgccgccaggcaccagcaggtgcagcggcttgaccgtcaccatccgacgtttcaggtgctgaataaaaccgccgcgctggacgactattacaacagtacggatattttggcgaccgatccctatccggtcggttcggagccgcatctgcgccgcaccctgcatgatacgttgcagaccgtgcgcgcagcgcgcggggtgaagggtgcctggatggtgattcagattatggatcacgccgcttacgacagccgccgtcaggcgcgggcgccgacggaagatgaagtccgcgcccaggcctggctggcgctgatcggcggcgcgcgcgggctgctgttttactcctacaacgatctgttttatcagcagcagcgcggacgttttgaacgcgccgcgtttgcagcacagtggcgcggcattgcgcgcgtcgcgcggcagatacgcagtttcagcccctatctgcttaccggtgacggtgtaacgttacagctcgacggccccgcggcggcgcggatctttgtgcgcggcgacagcgcgctgctgctggccgccaatcccgaggcgcgcacggtgacgctgagcctgacgctgccggatggctggcatcatcagacagagcgcacgctggcgatgtcgttgccgccgtttggcgccatccacctgccgttgcagcgttaa

SEQ ID NO: 453511 - DNA, 1011 bp, Serratia marcescens
atgacgatcactgcacgtcccacttcgcctattctgccactgaagattattgctacaggcactgcgcttccgccgttatgcctcacctcttcggcgttggacaaacagctaaataaacccgctggttatgtagaaaaacggtcgggtattattcaccgttttcatgccagtaatagcgccagccaggcagaacttgccgttgctgcgttaaatgatgcattaacccgtcatgggattgcacctgatagcatcgacctgctgatttcagcttcagccatagccattcaggccctgcctttcagcgccagccatattgttaaacggtctgcgttgcgtcagggcatcgcaagttttgatattaacgccagctgcgtcagctttatttccgcgttacaggtggcggccgctttacttaatgccggcgcttatcggcgcatcgctattgtttccgccgatctcgcctcgcggggtattgattggcaggatgaagagtcttcgctgatttttggcgacggcgccgcctgcgttgtggttgaacgcggagacgggcgtagcggtattttgtcatatttgctggaaacctatcccgcaggcagcgaactgtgtgaaattcgcgcgggtggaacgcgctgcaatccgcgagcaggtatggctgataatgattttctgttccagatgaaggggaaacagttgtttcgtcaggcatcgtctctgattgacggcttccttcagcgcttgctggacggcgccggactgacattggcgcagatcgctacggtggtgccccatcaggccagccatctctcgttggagcatatgcgaaagcgattgcatgtgtcgccggacgcgttgattgatatctatcgttaccggggtaatcaggttgcagcttcgctgcccagcgccttgcacgaagccgcggtaaccggcaggttgaatgccgaacaaccggtcatgctgattggcaccgccgctggattgacgttaggcgggctggtgctgctgccatga

SEQ ID NO: 453512 - DNA, 1032 bp, Serratia marcescens
atgaaggtgttggtcacgggagcgaccagtgggttggggcgcaatgccgccgagtggttgctgagcgcgggacatcaggtgcatgctacagggcgggatgccgccgcaggccgcctgctgacggcgcaaggcgccaggtttaccgcgttagatctcattagcgccacgctggaacagtgcgaacagctgatgaacggttgtgacatcgtgtggcactgtgctgcaaagtcttcgccctggggcagccgcgaggccttttatcaggccaatgtcgtcgtgacggaaaagctcgccatcgcagccgggcgttgtggtgtgagtcgtttcctccatatctcgacgcctgccgtctattttgacttccagcatcatcacaatattgtggaaagcgcgcgcgcccggcggtttgctaaccattacgccagaagcaagtttgctgctgaacagagcattgcgaagatattgcgccaatttccgcaaacgacgtttttaattttgcggcctcgcggcctgttcggcccttacgaccgggtgattgttccgcggatcctggcgcagttgcaacgggacggcggcgtgctgcgcctgcctggcggcggtacggcctgcctggaccttacgtttgtgttgaatgtggtgcatgcgatggatttggccagccgcaagatgcatttgccatcaggccgcgtctacaacattactaatcagcaaccgcagcgattagccgacatgctgtacgacctgctcgcccggcaactgggggtgcaatatcgtatacaggctttgccgtacccacttttgctgaccgtggcgggtggaatggaactgttggcatgcgttaccgcttcggagccgttactgacgcgttacagcgtggcggcggcctattttgatatgacgctggataatacccgcgctgtcgaggagctgggctaccggccgcgttacagtctggagcagggaattgccctgacggcggcatggctaaaacagcaggggggaggcaacgatggccagtatcaccacgtttga

SEQ ID NO: 453513 - DNA, 807 bp, Serratia marcescens
atggccagtatcaccacgtttgaaattggttattgcacccatcttggctgcatggcgctgcgcggctctgccgtacgccactgcaaatttccttcaagggcctacctgttaacggtgggggagcggcgctggctctgggacacgggctatgccagccatttccactcttataccgaccgcggcgtttttcgtctttatcgccgggttacgcccgtgtatttctctcctcaccaggcgctggtcgaacagttgcgctgtcagggcatatgcgttggggatattgaggcggtgattatttcgcattttcatgccgatcatatagccggcctgcgcgactttagcggtatcaacatgatttgttctggtgaaggttggcgccagacgcgtgacttgcgcggtatagccgccttaaaaagggcatttgtacccggactgatccctgagggttttgagtctgcgttacagtttgtcgaagcattccctcggcgggccttgcccggcgagttggcgccattccaacagggctacgtgctgccgggcagcggcggccaaatcatcatcgtaccattaccgggtcacgctgcagggcatatcggcgcctttgtgcaaacggatgctggttggacgctattggcgagtgatgccgcctggtcgccgttgaactatcagcagcggcgtggtccatcacgcttggtgaacctgattatggatgatccgcgcagttattatcacacccttgacgcacttaatcagctgtaccttggcggtggcgcagagatccgtctgtgtcatgagggcgatttatga

SEQ ID NO: 453514 - DNA, 1287 bp, Serratia marcescens
atgatcccgttggtaacggtatggcattacctgcaaacgcgtcggctgcgttttactcggcgagcagcgctggaggcacaccaggcgcagcaactgcgtcggtttgcccggcgcgtattgtcgaaaagcccctattttcgtccctactgcgcgttacctgtcgagcaatggccgcaaatggataaagcgctcatgatggccaactttgatcgtatgaataccgctggcttgcagttggatgagttgctggcctgtgcgcgacgtagcgaaaccgaacgggacttcacaccgaaagtgggcaaatacagcgtgggtttatcaaccggaacctccggacgacgaggcgtttttgttgtcagtccttacgagcaacagctctgggctggcggtatgctggcgaaaatgctgccgcagggtattctggccggcgagcgggtggcgttgtttctgcgggccgataacaatctgtatcacagcgttaataaccgttggttgagcctgtcgttttacgatctttttttaccctttgatcggcattttcagcagttggaacgagagcagccgacgatcgtggtggctcccgctcaggtgctatgcgctttggcctctgcaattgagcagggagagcttaggctggacgttaaaaaagtgatctcggtggccgaagtgttggaaccgcaagatcgccaacgtttacagcaggtgtttgtggacgtgggggaagtgtatcaggcgacggagggttttttggctgcgacctgtagtcacggcaccttgcatttaaacgaagagttcatccatgttgacccccaatggattgacgaacggcgctttactccgctgatcactgattttacccgccgcacccaacctatcgtacgctatcgcctggacgatattctggtgcggcatgaacgaccctgtccttgtgggctggcgaccatggcgctggcgcgtattgaagggcgtaatgacgatcagctattgctgccgggtaaagccggcggcgtgcggcgggtttttgccgatttgtgtggccgggtgattgctaatgcgctgcctgtcgtggcggattatcgtctgtaccagcagggcgatcggcaactacagctgatggctgattgcagcatggaaatcctgtgctcctgccagcgtcaattgctcgtattgtttgagcagcagggaatcgctactgagcgcctgatatggcagttacaggcccggcccataatgccgcagtttgacgttaagcgtcggcgtattatgcgtctgccggaggccgtgtga

SEQ ID NO: 453515 - DNA, 618 bp, Serratia marcescens
gtgaaactgctgatataccgcttatggcaaatgttgctgggctggggatttgttggtctggtctataactgcagcgatcgctggcagggcgcaggctatcagctgacgccaggctggattgaccgcgtcatcccgtttagcccgcatgcaatctggccatatctgtcgttctttctgattatccccctatgttacctgttttgcccgctgggcagggttgtgtggcttagggtggctatgcagtttagcgcgttagccgcgggggggatttacttactgtggccgacgacgatggactacccgtccgttcagggggaatcgttgagttctgtgctgttggcggcgctgatgagcgttgactctacgcaaaattgcctaccttcgctgcatgtaaccttaacgtttttagccgtttgggcggccgccgatagccggaagcggctgcgtagtgcgctgttaatcgcatggggggcggttatcgccttgtctattttacagctgcgtcgccacttgtttgtcgatttactctgcggggttgcgctggcgctattggcaggttatgccagccaacttatgcaaaggataagccgtagtttgcgtaatggagaaagagtatga

SEQ ID NO: 453516 - DNA, 1116 bp, Serratia marcescens
atgaccgatctcgtcataccgatagcggtaatgttattggtggtgctaggggaagccctgtggttgcagtggcgtcaggcgtgcagcgttgattggcaggacgtcatcttcaaccttaactcagggcatattatgttatggctgttccggggtttggagatcgcctgttacggctatgtcgccgcgcattatagtcagggctggctagacggttggccggttgctttggtctgggtaggcgcactgctggcatgggacttcggcttttattggctccaccggctgcatcaccgttttcgcctgttgtgggcggtgcacgtcgtgcatcatcagggggagcattttaatttgtcgctgggggtgcgcaattcgtggtattcatcgttgacgtcaattcctttttttatgctgttggcgttggccggcgtgccgcttacggtatttatcaccgtctccatcctgcattacagcattcaactgtttaaccacaatgcgctgacgcccagactcggttttctggagaagatcctggtgacgcctgcacaccatcgggtgcatcacgttaatgagttggcctattccaaccggaattttggcggcagttttatcttctgggataagatgttcggcaccttcagcccatcactgccgaacaggccattcgcttatggcgtccgcggggcgaaatcgtcggtgaatccattttgggcaagcaacttgccgctgctgcgctatttcaggatccccgtccggtcttcggtaatggcggcgcgttttcactgctcttcgtggtgtctggcaagcgggaccctgctgctgtttgccctggtcctgggttacgtttaccgttttggctacggttacgatggtttgaatagtgaacaggtggtgatgtttatgctgttggcggtcggagtcatcgcgttgggaggcattgctgaagggcgtaactggggagtgagtgtctggctggtggtcacgttggcctttcctttattgctgttgctggcgtttggctggcatcaaccctattggtggttgataaccggcgcgatggcgatccacggtggtgccgttgctttcggctggggatggcgtaaggtcgttgccgtatga

SEQ ID NO: 453517 - DNA, 1098 bp, Serratia marcescens
atgactgccaagagattgccgccgctttcttacccttgtgatggggagcaggcatttcaccgtgagctgaaaaggcgagcgcatgcttatctcagcgcgcatagcggccaccgctttgctactgctgcctgttggggaaaggcgctggcgctgctggtgctgtgcgtaggcttttatcttctttgcctgatgcagcatcatgacctgccttttatgctgtgttatttcgcgttcgttatgatgggaatgttgttgaatgtaaatgtaaaccacgacgcttcacataatgctttcgcccgcagtccgcggctgaatcgctggttcgggcgactggtgacgttaccgttgggggttgaccctgactattggcgaacgcggcatgtcgcctaccatcatgcctatgccaatgtagagcactacgatctggatacggaagagaatggttttttccggcaaacacctttccaacgttggcggagatatatgcgttatcagcacctttactggccgctgattgcagcgctgtcactgccgtatattgccttggtatttgattggtccgatcgtttgggtaaaacgccgttggcggccgagaacgtattgagcggccgccagggatggggagtgtttatagccagcaaactgtgccatatcttgttggtattggcggttcccctgacggttggttggcaacatggcatcagctggcaaacggtgctggctatctatctggcgagccagatgctggcctcattgctggtggtatttttactattgggcactcattgggcgcaggccgaattctatgcgttaccggaagggggagaaatgccccaggggtggtaccggcataattttgccacggcttgcgactgggaaacgtcgccgaagtggttacaccattttatcggcgggctgaattaccatctcacccatcacctttttcccggttggcatcaccgccactacccggcgttggctgcaatattgtctgaggttgccgcgcgccacggcatggcctatcgttgcatcggctatcgtgagctattgcggcagcagcggcgttttttgcgcgccttggggcaacaaccccgatga

SEQ ID NO: 453518 - DNA, 1095 bp, Serratia marcescens
atgaagcaaactgaaaccacgccgttgcggccattagcgttccggcgggaaagccgtgaaattcatcaggccctgatgcggctcagtcagaactatttagttgagcgcggcgatcatcgttttgccgaccgttggatgttcgctaagttattgactctgattttgttgtgcgcgtttttctatggcctcagcctgcaacaacacagcacctggcgctattttggctgttatgtcggctttattttttctgcgatgttactgacggtaaatgtggtgcatgatgcgtcgcacaatgcatttttcaaacgggcatgcttaaaccatgggttaaacttttttgtcagcatcccgctgggattggatgccgattgctggcgggtaaggcatgtcgtttttcatcatgcgtacaacaatattgcggactatgatccagatattgaccctaatggcgtgctgcggcaaaccccattccagcgtcgcagagcgtttatgcgcgtgcagcactattactggccattggtggcggcgttgacattcccttattatatctggttgtttgactggctggatcgggccggtaaaacgcgcataacgtcaaaaatgcgctatgcagggggaaaaggatggatggtgttcttgctgagcaagatgctgcatgtgattttggcgttggtaatgccctggtggttgatatcgccaagcatcggcggtggagcgatcgtgctgacctacctgttaagccagatgttatcgtcgctgatatttgtcatgctgattgttggtactcattgggctaaagccaatgtctatcaggctcctccacggggaaagatggcgcacggttggtatcagcacgtattcgccacgacgtttgattggcaaacttctccgccctggctgggatattggctgggaggggctaatttgcatttaacgcaccatctgttcccgaactggagtcatcggcactatcccgcgctggcgaaaatgatcgccgaggtggcggaacaatacgggctgtcataccagtgcctggatttaaaaacgctgttgatgatgcaacagcgttttttgcgttcgatgggcaaaccctga

SEQ ID NO: 453519 - DNA, 165 bp, Serratia marcescens
atggagcatgaactccatcacgaaaccaaactgattgccattatcgggctgttggtttccgctttgctggtggtatccattctatttggcatcacctatttttccgaccttaaacacgccgatgaaaaattggatgttaaagactgttacatcaaaaacccatag

SEQ ID NO: 453520 - DNA, 279 bp, Serratia marcescens
atgtttgatgcagggttttctccgtcgctgctctctttggggattgcgttggtcgcgctgttgctggggctatgggtatggtttttggtcaaccgcgccagcgtgcgggccaacgagcaggtgcgcttattacaggaaatcgtcgaacagcaacagcagcaaacggcgctgctgaagcggatagcgcgtcagtcacgcggcgaagcgttgtccgccgggaccgacgacgacgatctcgggccggcgatggagttcaaagattttatccccgagcgctaa

SEQ ID NO: 453521 - DNA, 426 bp, Serratia marcescens
atgctgacaggactgaatcacctgacgctggcggttcgcgatatcgaacgcagttttcacttttatgcgcacacgctggggctgacgccgatggcgcgctggcgacagggcgcctacctgtccgccggcgacctttggctatgcctgtcgttggacgatacagcggcgccctcggccgattacacgcactatgccttcagcgtgccgcaggcggagtttgccgccagcgtcgcccgtttgcgccaggccggcgttaacgaatggaaaagcaaccgcagcgaaggcgaatcactctattttctcgatcctgacggccaccggctggagctgcatgccggcgacctggccagccgtctggctgcctgccgccggcatccctatcaggagatgactttttttgagggtggtgagaaggctgatggttaa

SEQ ID NO: 453522 - DNA, 471 bp, Serratia marcescens
atgtcgctgacggatatcgccatcgcgctgtttatcgttttactgttgctgtacgccgtatatgacgaattcattcaggacaggcgtcaaggcccgacgctgctcaaggtaaaactcaaacgccgcagccgcatcgacagcctgatttttgtcgcgctgctggctattttgctgtaccgcaatctggtcagtcagggttcaccactgaccagctggttattaatcgctttggcgctggttgccatatatcttgcttatattcgctggccgacgctgttatttaaaacgcagggcttcttttatgccaatgcctttattgcctattcccgcatcaaggcaatgaatttaaccgaagacggcattctggtgattgcgttggaacagcggcgcttattgattcaggtcgcccagttagacgacctgcaaaagatttatgaattttttgttgaaaatcaaaaaattaaattataa

SEQ ID NO: 453523 - DNA, 246 bp, Serratia marcescens
atgcttggaatgccgtcgctgaaccaccaggaacagcaggaagccgcagagcgtatccatcagctgatggagcagggcatgagcagcggcgaagccatcgcccgcgttgcgcaggaaattcgtgaaaagcatcagggcgagcgggttgccgtgctgtttgacgaggaggaggacggcgcgccggaagcgcaggatgcctcccgggatgccgagccgcagcgcgaagacgaagaagacgattactga

SEQ ID NO: 453524 - DNA, 264 bp, Serratia marcescens
atgcgtcatgcgacattgattactaatgcgtccttatggcttgcctgcatggtcgtggcgttttttattgtgctgtttccattgggtggactgctggattacctgtcccaagcaagcaacgactttctgaataagaccggactgggattcgctgatggagaagcagacccgtcctttctttgggtcctgttggcattgatgctcatcaccgccgccatcctgatgtctgtcatcaggtggagcatccgtaagttcaaacgctaa

SEQ ID NO: 453525 - DNA, 531 bp, Serratia marcescens
atgcagatatgcagaatggattataacgatgcgtccgtcgacaagaggcgtttaaagcttcacgtctacggcgttggtgtcttcccggtattcagcggtattgagcctgttaccaacatagcccaatgcgctttcaagaagaacgcagccctacccgttggcacctactggattgtcgaccgcccgtccgggagtatccgcaatcagatacagacgttcattaaggacttcaagaacgggaccaatcacgacgaatggttcggcctctacagtgccagtacaatgagcgactccgtgttcgtgaatggcgttgaacgtggagcattcaggcttcaccccttgcgacccaatggtgagggagagagctggggttgtataaccttttacaatataccggacttccagctcgtcaggcgctcactcttgcaacagaagaaagtaagggtccccggtggcctaggtcttatggcatacggtaaagttgaagttatgggaaggactgactatgcgtcatgcgacattgattactaa

SEQ ID NO: 453526 - DNA, 228 bp, Serratia marcescens
atggatacggtgaatgatgtccatcagctacttaaaaaacacttctgggaaatgacgaatgatacttcgctgatcacaggaaaaaggagagtgctgcctgaagatacccacgattttctggcagagtatgccgatctactgcatgttgatatgggcaatatttggcactacgtcccaccgataagcaccttggtttgtgtacttgcatactcatctatacgttattag

SEQ ID NO: 453527 - DNA, 1092 bp, Serratia marcescens
atgaacgacattcaattgcaatcagtgagcgtcaaggatcatcccccgaaggcgtacgacgcaaccacctccgtcgccgcaagctggtacgtggcgatacgctccagcgagctcaaggacaagccgaaggcgctgacgctgttcggccgtccgtgcgtggcatggcgcggcgcgacaggacaggccgtggtgatggatcgccactgctcgcacctcggcgcgaacctggccgacggacaggtcaaggacggctgcatccagtgcccgtttcatcactggcaatacgacgaacagggccagtgcgtgcacatccccggccacagccagacagtgcgtaaactggagccggtgccgcgctcggtgcgtcagccgacgtggatcaccaccgagcgctacggctacgtgtgggtctggtacggttccccgcagccgctgcacccgctgcccgaaatcaccgccgccgacgtcgacaacgatgactttatgcacctgcactttgcgtttgagacctccacggcggtgctgcgcatcgtcgagaatttctacgacgcacagcacgcagctcccgtgcacgaactcccgatctcggcctttgaactcaggctgttcgacgattggcagcgctggccggagctagagccgctggcccaggcgggcgcgtggttcggcgccgggatcgacttcaccgtggaccgctactttggccccttcggcatgctggcgcgcgcgctcggcctgaatatgtcgcagatgaacctgcactttgatggctaccccggcggctgcgttatgaccgtctccctggacggcgacttcaaatacaagctgctccagtgcgtgacgccggtgagcgacggcaagaacatcatgcacatgcttatttcgatcaaaaaggtgggcggcgccctgcgccgtgcgaccgactacatgctgttcgggctgcagaccagacaggcggcgcagtacgacgtcaaaatctggaacgggatgaaaccggacggcggcggcgcgtacagcaagtacgacaagctggtgctcaagtaccgggcgttctaccgcggctgggccgaccgcgcggtcagcgagcggtga

SEQ ID NO: 453528 - DNA, 1086 bp, Serratia marcescens
gtggaacgcgccctggatcgggctggtgcctttgccgccacccacgcagccgtggcggcctgcgacccgctgcaggcgcgcccgcaggtactgcagctgccgggcctgaaccgtaaccaggacgtacccggcatcgtcggcctgctgcgcgagttcctgccggtgggcggcgtgcccgccagctggggcttcaccgaggccgccgccgcgatgcgggacatcgggttcttcctggggtcgctcaagcgacacggacaagagccggcggacgcggtgcccgggctggagccgctgctgctcgacctggcgcgcatcaccgagatgccgccgcgcgagacgctgctgcatgtgacggtctggaacccttcagcggccgacgcgcagcgcagctattccgggctcgacgacgaaacgcacctgctcgagagcgtacgcatgtcgatggcggcgctcgaagcggccatcgccgtgaccgtcgagctgactgaggtgcccctgcgctcgcccgcgtttgcgcaggggtgcgacgagctggccgcctatctgcaaaaaatggttgaatcgatcgtctacgcgtaccgctttatctcgccgcaggtcttctacgatgagctacgccccttctacgaaccgattcaaatcggaggccagagctaccttggccccggcgccgtagaaatgcccctgttcgtactggagcatgtgttgtggggctcgcaatcggatcatccggtttatctggaattcaaagagacctacctgccctacgtgcttcctggataccgcgcggtctacgcccgcttcgccgggaagccggcgctggtagaccgcgcgatcgccgaggcgcaagcggccggcgcacaggacgaatccgtccgggccgggctgacggccctcaaccggctcttcgtgatcctgctgcgcttccgggcgccgcatcaccaattggcggaacgggtatacgaagccggacgcagcggtccctcggtcggcagtggcggatacgcgcccagcatgctcggcgacctgctcacgctcacgctggccgcacgttcccgccttcgcgccgctctcaacccgtcctga

SEQ ID NO: 453529 - DNA, 1821 bp, Serratia marcescens
atgaactttagactagacattaatggattaagatttcttgccgttacgatggtggtcttattccattttaaattcgaatttgcatatggtggtttcgctggggttgatatatttttcgttatttccggttttttaatgaacgaaatatgtcaaaagcagatagggaaaaaatcatgggtgattgacttttatagaaaaaggttcaagaggatataccctgcgctattgatgatggtcatcttcacctttttactcgcactgtattccgaaacgcctaacggcgccaaggaagagtttaaacaaacgctcagcgccttgaccttcacctctaatatttactacctgttgcacagcggcggatatttttccgcaacgtctgacttcaactggttattacatacctggtcgctgtccgttgaatggcagttttacttaatattcccgttaattctggtcattggcaatttatttaaacattacaaaagtcacttttatctgttaattattctttgctcggtactgctctgcattctatttggtaagtcccacctgagcgcaaacttctacttactgcctacccgcatgtgggagctgatgatcggcgcctatgtgtctgcctcacggcttaaaaatccctatgccaagcagaccgaaatcgtcgccgttcttatattggtcgccttcttcctgtttgtaaaagagagcgccccctggccaggcggaatgacactgatcccggtattggcgaccggcgccatcatccatgccaatctcagcaatagcgaaacgttgttcaaaaacagcgttatacagagcatcggttccgcatcgtattccatttaccttttccactggccggtggtctcatttatggccaataactccattgagttcacgacgctcaatgcaactatcggcatcattctgtctttcgcgttgggttatatctcttataaatactttgagcgcctgttcagcaagagctacgcctacctggccactgccgccgccgcattcgccgcgatctcctttggcgcgacggcaacggaagtcaataagcactgggtatcccccggcactatcgcgctggagaaattcaaaacttatgctgccagccctgaagggatccggcagttcggtaaccataatcgcacctgcttcctgtcaaccaagaccaatgatatttcattctttgataaagaagtctgtttaaaaaccactgacgataagaagaatatcctggtgcttggcgacagccatgcagccgaactctaccagtcggtcaatgaagtattccctgattacaatgtgatggaagcagcggcatccggctgcatgccggtaaacggcaagaccggagaaaaacgctgcaccgatttattcaactatatctataatgacttcctggtaaacaataaggtggactatattctgctatccgccaactggatggtaaatcaggatcgggaactggggaaaaaacttactgaagtgattaataaaattggtaaggataaagtgtttattatcgggcaaaccaagaccttcagcatcgatttttacaagatcgcgcaaaaaacgccggaaagtaaaatagaaaacctggtcaccaaagagtcaagggcaagtaaccaatggatgtcaaaacagctggcgcaaagcggcatcaactacattgacgtatttgatcttaactgcagtcagggccgttgtgattatatcgacaaaaacaacgtgccgatgatgtttgataaaaaccacctgaccaaaacatgggccgactcatatgtaaaacatatcagagccagtgttggcctataa

SEQ ID NO: 453530 - DNA, 375 bp, Serratia marcescens
atgtttgaccacgtaaaatttggcgttagcgactatgaggccagcaaaaatttctttcttaaggcactagcgccgctgggcgtgagcgtggcggatgaaggcgcgccggactatgggatagagatcgccgcccccgacaatacctcactgtgcctgtaccagaccacggcgcagccggcgcagctgcatctggcgttcatcgccgacagccgccggcaggtggatgatttttaccaggcggcgctggcggccggcggtaaagataacggcgggccgggcctgcgacccaattatcacgccagttactacgccgcctttgtgattgcgccggacggccacaatatcgaaatggtttgtcatcgtgttgaggaataa

SEQ ID NO: 453531 - DNA, 513 bp, Serratia marcescens
atgttcaacaatgaagaagatttcctgaatgcgttaccggaaaagctgcgtgaacctattgctaaatttatgaccgccgttaaagatacgtttgattctctcaactctgagtcctctgattttttcaaaggcgttattggcaccgtaaagggattgttcaccgaggtgggggactttattcacgatcgcgtcagccatatttctgatctattcagcaaaccgcttaaattcttcaaggatactctggagggcgtgaaggatctggccggtaaagtgggggatatcttccacgatatcaaggataaatacgatcagctgacggataaacccggccatattttcgacgggattaaaaattggttcgatggcctgctggacggcaagcatgaaaaaaccagcgatgcggagtttaatctgtaccaggagggtcacgataatgcggcggttgcccacagcgctattgaagctaacggtgttgccgcggctaatgcggatatgcactcggtgatataa

SEQ ID NO: 453532 - DNA, 1029 bp, Serratia marcescens
atggtcgatgaaccccagccgctcagcctgcccgagcgggtaaaatatatccgcaaaaacattatcgcggcaggcagcgacgttaagcagcgtttccccgtgttgaaatatcagaacgccattggccttggcatcttgctcttcgcgctgttttccatggtcgtcgtctcggcgctctacctcaatcagcagattccctggtggctatgtctgatcctgaatgcgctgtgtctctctttagcccatgagatagaacacgatttaatccatagcctctactttaaaaaaaaccgctttatgtaccacctgatgatggccttggtgtggatcgtcaggccgagcagcgccaacccgtgggcgcgcaaaacgctgcaccttaaacatcatcagtattccggttcagagctggatattgaagagcgcgcgctcagtaacggcacccgctggggagtgctgcggctgctgatgacggcggatctgatggtggcgatggccgtcgtcgcctggcaggacaaggataaaggcgaccgtctggggatggtgatgaccgggatcaaggcgttcttccccgttgccatgctgacctgggggctgtggtatctgtttctgctggtacacggcgtggacgtggccgccgcgctgctcggcatgccgattgcctggtccgccggtgcgcaggcgctgatcggcgatcttgatatgttggtggtggtgctgatcggccccaatattctctggagtttttgcctgcacttcgtcagttcaaatatgcattatcatggcgacgtagagcacaacaatctcctgcagcaaacgcaggtgatgaacccttggtggctatggccgttgcagctgttttgctttaatttcggcagtacgcacagtattcaccacttcgtggttaatgaacccttctatatccggcagctgaccgccgcaaaagcgcaccgcgtgatgagagagatgggcgtcaggtttaacgactatggctccttcagccgggccaaccgctggaagagtaccggctaa

SEQ ID NO: 453533 - DNA, 417 bp, Serratia marcescens
atgaaacggagcgtaccgctattgatggcggtgttgatgggcgcggcctctgcggcgtcgggcgccgcctttgatttacaataccacccgccggcagcggccgagcagaaaccggccgatacgccgccgtcccatcaatctgcgccgcgccaccagatatggaatgcggaaaaactggcgcaggacaatcagcgggcggagagccgggaacaggccgaggcgttggcggactatcagcgccagcggcaacgcacgcagatgctgggggagcagcggggcggacggcatccgcacagcacgcgcccggcggccagagactatcaggtcaactgtatgccgccggcgtatcgcggcagtctgaagtgggatgacgaagggcgcgagcccagcctgtgcgggagcattaactgggattaa

SEQ ID NO: 453534 - DNA, 543 bp, Serratia marcescens
atgcaagttacacgtcggttattgccactgatgctgcttataccgctgtcggcgccgttattggcgatggcgcagcagatgccgccggacaagggccgttccgcgtctttggcgccgatccccagccaactgctcggccagtggcgcgtgacgaaaacattgccgacgcaggccgacgcctgctgggatcggcagcagatcgacagcgtgctgaatacgcaaatcagctaccagcgagacggctttagctggaataaccagcagcggcgcagtttgggcgtggtaagcagtacggttgaggagcaggagtttgtcgaggacaactcggaggccgactccgatacgccggccgttgatttcgccatgcttggcattatcgcgccggcggtagagcggatcgccatcatgcataccgcgaaagactcggccgccaatacgccggatgccgacgagttccccggggcgacggtgctgatcaaaaatccggatacgctgattttctccctgtgcaacgtgtactttgaggcccagcgtcagcgctaa

SEQ ID NO: 453535 - DNA, 1155 bp, Serratia marcescens
atgccacacaccgagattttctccaccgcgacgccggactgctggacagaggccgaaatccgtcagcagcccgccagctggctgcgggcgctggagaggctggatgacctgcgccggccgcttgaacagtttcttgcgccgctgctgcttgacggcgatttacgcattgtgctgaccggcgccggcacctcggcgtttatcggcgagattatcgccccctggctggcgcgccatacgggcaaaaatttcagcgcgctgcccaccaccgacttggtcaccaacccgcaggactacctgaacgccgcccatccgctgctgctggtctcctttggccgttccggcaacagcccggaaagcctggcggcgattgagctggccaatcagctggtgccggaatgctatcacctggtgattacctgcaatgagggcggcagcctgtaccagaacgcgcgtgacgacggcaacgctttggcgctgctgatgccggcggaaacgcacgatcgcggctttgccatgaccagcagcatcaccaccatgatgctcagctgtctgacggcgtttgcgccggcggtattcaatgcccgccggttcggcgacgtggccgaacgttgtcagcgcattctggcgtcgctgggggatttccgcaccggcgtgttcggcaaccagccgtggcaacgcgtcgcctacctcggcagcggcggcctgcagggggcggcgcgcgaggccgcgctgaaagtgctggagctgaccgccggccggctggcggcgttttatgattcgccggccggtttccgccacggtccgaaatcgctggtggatgacaagacgctggtggtggtgtttatttccggccatccctatacgcgccgttacgatttggatctgctggccgagctgcgccgcgaaaaacaggcgcagcgcgtggtggcgattgcggcgcagccggatgcggtgatcgaacaggggccgcatattctgctgccgccggcgcgtgagtttaacgacgtggagctggcgttctgcttcctgatgtacgcgcaggtgtttgcgctgagcgaatcgctgaaggcgggcatcacgccggatacgccttccgccagcggtgcggtcaaccgggtggtgcagggcgtggttattcatgcatggcaagcgtag

SEQ ID NO: 453536 - DNA, 1890 bp, Serratia marcescens
atgaagaaagtcttccgcgtggcgctgttgacgctgctggtggccaacggtgcggccgccgcgcagtacgcgctcgataatgaaaatattgccgtgacctttaaccaggataagtcggcgctgacgatcaaggataaggccgacggggggcagctggcgccgcaggagctgttctttctgacgctgcctgatgaaactgtgattcacgctgcggatttcacgctgcagagcgtcagccaacagggggaggcgataacgctcacctatacgcgccctgactttaacgtcagcgtgacgcttaacacgctgcacggcaagtatgcgcgcatcgattataagattagcgcgcaaaagcaggcgcgccgggtggcgaagattaccttcttcccgacgaagaagcaggcgcaggccccttatgttgacggtgcgatcaatagctcaccgattattgccgactcgttctttattattccggaaaagccgatcgtcaatacctacgcctacgaggccaccaccaacctgaatgtggagctggcggcgccgattgagccggaagcgccggtcagctaccggatctatttcggcacctttccgcagcccgaccagctgcgccgcagcgtgaaccagtttatcaacgcggtgcgcgcgcggccgtatcagccttatctgcactacaacagctggatggatatcggcttcttcaccacctataccgagcaggacgtgctgaaacgcatggacgagtgggataaggcctttatcagcggccgcggggtgaagctggatgcgttcttgctggatgacggctgggatgaccgcagcggacgctggctgttcggcccggcgttccgccacggttttggcgcggtgcgggacaaggcggccagcgtgcacagttcggtcggcctgtggctgtcgccgtggggcggctataacaaaccgcgcgatattcgcgtttcccacgctaaagagtacggttttgaaaccgttgacggcaagctggcgctgtccggcccgaactactttaaaaacttcaatcagcagatcgtcaagctgatcaagaacgagcatatcacctcgttcaagctggacggcatgggcaacgccaacgcgcaccttgccggcagcccgtttgcctcggattttgacgcctcgatcgcgctgctggacaacatgcgcgccgccaacccgcagcagtttatcaacctgactaccggcaccaacgccagcccgtcctggctgttctatgccgactctatctggcggcagggcgatgatatcaatctgtacggtaaaggctcgccggtgcagcgctggatgacctaccgcgatgcggaaacctaccgctctatcgtcaggaaagggccgctgtttccgctgaactcgctgatgtatcacggcattatcagcgcggaaaatgcctactacggcctggagaaagtacagagcgacgctgactttgacgatcaggcgtggagcttcttcgccaccggtacgcagctgcaggagctgtatatcaccccatcgatgctgaacgatcacaagtgggataccctggcgcaggcggcgaagtggtcgcgggataatgcggcggtgctggtcgatacccactggatcggcggcgatccgacgctgctggaggtgtacggctgggcgtcgtggcagccggagaaggggattttcgggctgcgcaatccgctggataaaccgcagacctattacctggatctgagtaaagcgttcgaaatcccgcagggcgtcggcgaccgctttagcctgaagccggtttacggcagcaacgccaccttcccgcaggcgtatcagcaggcgttggtggttaccctgcagccgctggaaacgctggtgtttgaggcgacgccggtgaaatag

SEQ ID NO: 453537 - DNA, 882 bp, Serratia marcescens
atgtccatgaaccgccatttccccgtacgctatcagtatgccgatgccgacggcgtacgcgttttctaccgtgaagccggtgagccgcaaaacccgaccctgctgctggtgcacggttttgccagttcatctcaccagttccgtgagctgatcccactgctggcggataagttccacctggtggcgccggacctgcccggcttcggcttcagcgaaatccccgcggaacgccaataccgctacagttttgacgcactgggccagaccctcacgcagtttgtcgaggctctggggctggaaagctacgcgctgtacgtcttcgactacggcgcgccggccggtttgcggctggcgctcaatcaccccgagcgggtgaccgggtttatctcgcaaaacggcaacgcctatctggaagggcttggcgacgcctgggcgccaatccgcgcctactggcaggacgcctccgccgagaaccgccgggcggttaacgacgcggtgctgaatctggcgggcattcgctggcagtatctgcatggggtgtcagacccggaacgcgtcgcacccgaaacctggcacctggatgccctgctgctggagcgccccggcaacaaggatatccagttggatctgtttctcgactacgccaacaacctgaaacgctaccccgactttcaggcgtttttccgccaaacccagctgccgacgttgattatctggggcaagaacgatccctttttcattccgccgggtgcggaagccttcaggcgcgataatccgcacgccgtcgtcgagctgctcgataccggccactttgcgctggaaacccacgtggcgcatatcgcccaacgtatccgccaggtgattggcggcgagccggcctga

SEQ ID NO: 453538 - DNA, 582 bp, Serratia marcescens
atgtccgctcattcccatagcgttgaaggtccgctgtttgtcgccgaccatggcgcgcttgatttcttgaatacgctggcgcagttgaacgggcagccttatgatttttggcagtccgatgatgatgtccgccactggctggaacaggccggtttggccgctgcgccggacgcgccggcatcgaccgacggcgagctgctgcatgaggcgcgccggctgcgggaggcgataagaatcctggttaaacagaaaaaggccggagaaacgccggaccctgcggtgctgaaccgctatctgagcgccgccgtcagccatcagcaactggtggcggatcgacaaggcgggctgagtattaaacgcatctatgacggtaaaacgccgacgcggctgctggcgccggtggcggagctggcggcgtcgctgctggccgacgcgcattttgatttggtgcgtgaatgtgagcaccccgactgcacgctgtggttttatgatcgcaccaaatcgcatcgccgccgctggtgcagcatggcgctgtgcggcaaccgcgcgaaggtcgccagatttcgtcagcagaggcagtaa

SEQ ID NO: 453539 - DNA, 648 bp, Serratia marcescens
atgaaatatcaattaagcgcgcaagaagcgcggataatcggctgcctgttggaaaaacaggtgacgacgccggagcagtatccgctgtcgctgaacgccatcacgctggcctgtaatcagaaaaccaaccgtgaaccggtgatgacgctgagcgaaagcgaggttcaggatgtgctggacgaactggtgaaaaaacactttctgcgtacgcaaagcggctttggcaaccgggtggtgaaatatgaacagcgtttctgcaattccgagttcggccagctgaaactgagcgacgcggagctggcgctggttgccaccttattgctgcgcggcgcccagacgtcgggcgaactgcgcacgcgcgccgcacggctgcatgattttaacgacgtcgccgaggtggagcagcagctgcagcagttggccgagcgggaagacgggccgtttgtccggcgtctggcgcgtgaacccggcaagcgcgaaagccgctttgtgcatctgttcggcgccgaacaggccgcgccggagggcgttgatgagccgcaagagcaggaggcgtcattaagccggcgcgtcaacgcattggaacagcaggtggcggcgttgacgcagcaactgcaacagctgatggcggagcgacagcatgactaa

SEQ ID NO: 453540 - DNA, 1017 bp, Serratia marcescens
atgaatcatgcatttgttaccggtgcaacgggattgcttggcaataatctggtgcgtgcgctgctcgcgaaaaacattaaggtaaccgcattggtgcgcagtgcggaaaaagcaaaaaaacagtttactgatttacccgttacctatgtggaaggggacctgtgccggccggaaagttatcagagcgcattacaagggtgtgatggccttttccataccgccgcttattttcgcgatagttttaaaggcggcaagcattggcaggaattgtatgacaccaatgtgaaaggcacggcggatttactgcaggcggcctgggatgccggtattcgtcgtatggtgcatacctcatcaatcgccgtactgtgcggtgaacagaatcagctgattgatgaaagcatgtcgcgtaatagtaaagataaagatgattattatcgcagcaaaattttaagtgaagaagtagtccgcgactttctgaaagaacacccggatatgtttgcctgctttgttctccctggctggatgttcggtcccggagatattgggccgacttcgtcagggcaatttattatggattatatcggtaacaaaatcccgggcgtattgccggccagcttcagcgttgtggatgcacgcgacgtggccgagcatgaaatcctggctatggagcgcggtcgccgtggcgagcgttatctggcggccgggcggcatatgaccatggggggattgatgggcgaactggcacaggtcagccgcgtcccggcgccgaccaaggccgttccgctgttgatgctgcgcgtgttggcgcaggggtatgagatttaccaccgtttgacgaaaaaaccggtgttattaagcaaatcgagcgtggacctgatgtcacgtgaatatctgcgtacgaactttagtcatgataaaagtcgacgagagttaggctgtaaattccggccgctgaatgaaacgttgagtgacgtattgcaatggtaccagcaacataatttcctacctgctaaataa

SEQ ID NO: 453541 - DNA, 1518 bp, Serratia marcescens
atgaacactacaactgatagtgaaggttttctccatcgttttttggaaattaccagggagtttccggaaacgcctgcaattaacgacattgataataacgttacgctcagttaccaggagcttaaacatattgctgaaaagcgaaagcggacttttagtctgttaggggttaaacccggtgataacgttgcgttaattctgccaaatggcgttgagtttattgccagttacctcgcactggtcagcctggaggcactccccattattatcaacagtaaactgacgtcatgggaaataagtcagctgttcgataagtgtcatcctgatttcattattaccttctcggaattttatcaaaaacacgctgcgctgctgacgccgccatcaccaacgtggcagatattattaagcgataaggcgccgtcttgcgcaccccgcgaagatgtacaccatttgacgcagcagcccgacggtgatgcggcggcgctgacggcgccgcacggcaacccggtcgtggcgctgcagtttacctggcgtggctatgcgcggcctttccccgtggctcaccgctacctggaaatgacgcgctctaccgacggactgcacgagcatttccatccgcagggcgttggcagcgtacatttggtcacgctgccgctgtacgccatttttggtttgtcggtgatgctgattttccccctcagcgtcggggcaacgctgttggtgaccaacagcctgcttaaccgcgatctggctgaggtgctggcgcagcatcaggtgacattcgcctgcctggtgcccgacgttatccgttatttcaacggccgcctggccaagcgaaaatcggccccggcgggtctgcacccgcagctaatgatttattccggcggcggacatttaccggccggggaggcggaaaggctcagccaactgttgggctgcgggccggtgctgcaggggtatggcttgaccgaaagcttaccgatcgtggtgcaaaacacccgtggcgaacagcatcgcggagccatggggcaggcgattcgcgctgcggaaattcgtgtgctcggccccggcgggcaagaggtgccggcgggacgcatcggcgaactggtggtgcgcggcccgatgattgccgaaggatattaccaggatgaggaagccaccgcgctgttcttcaaggatggctggctgcacaccggcgatctggtgtggcgtgatgcgcaggggcacctgttctttgtctgccagcggctgcgcatttctaaaatccgggcgcagatgatcgatctggccgagatagagcgggtggccgtacgtcatccgcaggtgaaacgggcgcgggcctgggttacgcgcgataaacatgaggccaacgtgttgtgcctcagcgtcgaggtgtccgatgcgcagctggtccagcaggagctgttgacgtttatgggcaactatctttcggggttcaagctgccgcggaaaatcgacatgctgcctgcccagggggtggagcatgccgcatga

SEQ ID NO: 453542 - DNA, 615 bp, Serratia marcescens
atgccgcatgaggaaacatcccgtcgcgtgctggccgtgttcgatttcgacggcactctgacccatcgccatacgttctggcgctatatccgttttattcacggttcagccgctttctggggcgggatggcgctgatgctgccgcgcatcgtcgcggtgttgctgaagatcacgccgttgatgcaggcgcgccgcgcctttattcaccacttttttgccgggctgagcgtcccccgggaaagcgcgctggcgcgccgctatgtgcatgaaaaactgccgggctatctgcggccgcaggcgttaagacggctgcgctggcaccagcagcaggggcatgtcaccgccctggtcagcaattcgccggaaaactacctgctgcagtgggggcgctcgctcaatatcgacattatctgcggcacccggctcggcagcgacgggcagacattgagcggtgaggtggacggcgaggattgcgtcggcagtgaaaaggtgcgccggctgcgtgaaaagatgaccgatctggataactaccagatttacgcctacggcgactcttccggggatgttgaattattggccatcgccgatgcgcctttctacaggaattggtactaa

SEQ ID NO: 453543 - DNA, 1737 bp, Serratia marcescens
atggaaaaacagcctttaccacatgctgaacacccgcaggtgttgatcgtcggcgccgggccggttggcctgacgttggcgattttactcaagcagtacggcgtcccgttgcggattatcgaaaagaacgcggggccgtctacgtcgaccaaagccatggcgatccactcccgcacgctggaagtgtttcgggaactgggcattgcagatcgggccgttgctcagggttttgccatcaaggcgttttcgattcaggcgaaccagcgccgcattatcaactacaacttttcgctgttggaagccgcatggcccatgctgctgagtctgccgcagccggatgcggaaaagctgatgctgcaacggctggaagcgctcggagtcaacgtggaatggaacaccaccctgaacgatatccggcaggaggccgacggcgccagcgcgctgcttcagcagggggatggtgaagagcagtgggtgtcctgccgctggctgtgcgcctgcgacggcgcgcgtagcacggtgcggaaaaagcttaacctcagcttcgacggttcagcctatgactcctactttatgttggccgatgccgatattgaatgggatcagcgtcgcgatgaaggcgccttcttcctgggcgctgcggaagggtatgtcgccattgcgccgattgacggcaagggacgctaccggctgttctttgaaatgcctcatgcgctgccgccggagagcgagcgcccgcagctggatttggcaacgttccagtcattgtgtgacgggcgcggccagcagatgacgctgtctaacctgtcatccaccacgctggcggcctttcagcaccgtcaggtaacccagttgcgtcacggcgccattttcctgcttggcgatgccgcccatatcggcagtccgatagggggacaatggatgaacctcgggctgtcagaggcttacaacctcggctggaaactggcctgggtggcgcgcggctatgccgggccgcaactgctggacagctaccacgaagagcgttatccggtcgcgcaggaagccgaaaaaaccgcgcatcgactaacaaaactgatcaccacccgcaaacgtcccctggtctggctgcgcaataacctgctgccgctgatctccggccgcagcaaggtgcaacgcaaactaccgtcgctgatctcgggccatcattaccactactgcggcagccggtgggtgctgaatgagttgaagaaaggggagcgcaacagctggcgtaaaaaggcggcgcaacgggcgctgccggttgccgcgccgcgcgccggacagctggcgccggacgtgatgctctgggctgcgcccggaacgcaggctcagccgctgagtgaactgttccgtcagcgctatctgctgctgatattcaccgccgcagagggggattcggcgctggtcgccggttggcaggcgatggcgcaggcgctggtcgccggctatcagggtattgcggcgcgctgcgtcgctgacgcgctgagcgcggatgagcacgatggcgaaccgcggctgattgccgatccggactggcggctgcatcgccgctatcacgcggatgcgggctgcctggtgctgattcgcccggatgggtatatcgccttcttaggcaaggatgccgacgccctcagcgacttcctgcagaccaccgcagcgctgcgtcagcagcatgatgccgccgtgaccgacctattggacgatgtggcggcgtga

SEQ ID NO: 453544 - DNA, 1035 bp, Serratia marcescens
atgaaaatggatatgaacccggcagttcaggagtttattgctgccaacagcagaattactcaaagctattttgcctttaccgaaaaagtgctggctctggtgagcaacagcccgaatcagcagcaggttttactgcagctgctggcgcagacggagagcgtgacccagacgtttttagccgcgcatcaacagctgctggcgggagaggcaccgcagctagcggccgtcacgccgccgctgaacttcggcgcagcggaaaccccggccgttttgccggttcctgcgcagccggccgtcgctcaggcaccggcagaggagagccatgaagtctggctgcgccgacagctggcggagatgaccggttttcctgcggctgacatcgatcttacccaggaatttgaacagctggggctggattcgctcggtcggcaggacgtgcaggaagcgctgttgcagcgctatccccgtgcgggcaaggcggctctgtttgacgcggcgaccccggcggcattactcgccggcctggctgaaccggctgcggagcaacgggaaaccccagcgccggcgttttgcgccgagcaggttatgcggcgcatcgtggcggatctgaccggctttgcaccctctgatatcgatctcgctttaaccttcgatgagctggggctggactctctcggccgtctggatgtgctggaggcgctgcagtcggagcgtcccgaactgaaggcccatgcgccgcagtttaccaatctgcagacgcccggcgcgatgatcgcattgctggaggaaaagctgtcggcagaacctccgctggaggccgcgctgttacagctgctgaaaaagctcggcacggccaacgacggcgatatcaatctcgaaacgccgtttgaccgctatctgacggacgggtttacgcaatcctcggtgtgggaaaatttatcgccgcagcatgatatttgccacttcgccggcgaggcgctgatgtcccgacgcaacgccggcgaggcgttggcgctgttaaacagactggggtaa

SEQ ID NO: 453545 - DNA, 3324 bp, Serratia marcescens
atgagccatgactttacggcatccggcgccgcgtctcccgcctattgttttagcgcgatggcgggtgaatttccgggcgcggcctcggttgaggatttatggacgcttctgacgcagggggaaagcgcgccgttacgttcgctgctgccgcactggcaggttgatgccgacgcggtgttggccgaacggcccggcacgcgtaaccgggtctatctggatcaggcttttaccctgggtgagccggccggcgccgcgtcgcgtcaggcggggattggcctgcgcgtgttgcagcggttgctgcaagagccggggctgatgccggagcggttggcgcggggccgtaccgggctgattctggccacctcctggagcgatgagagctattttctgacggaaaacggcctggcgcccggcgagcaggtgcgcctgatggccgatcggctgcagctcggcgggccggctttcacggttgataccgcctgcagctcattcccttatgcgctggaaatggcgcagggcgtgatcaacagcgggcaggccgacagcgtggtggtgatggcgatcaataccgtcctgccgctggcgctctatttaggcttttcacagctgacggcgttttccggcgatgcgcgcctgagcgcctttggcgcggaggccaacggcattgttccggcggagtgcgcctgcgcgtttctgttggagccgctgggccaggcgcaggcggccgggcgcgatcccctcgggctgctgacggcggtcgggctgtcgtctgacggtgcggaaggctcggtcttttcacccggtcagcaggcgcagcttacggcctaccggcgcgcatggcaggggttggatcccgccagcgtggattatctggagacgcacggcaccgcgacgccgctgggggacgccaccgagctggcgtcgctcgggcagttcttcaccgcggataacccacgccagacgccgctgacgatcggctcgatcaaggccgccgtggggcatacgctggctgccgccggcgggccttcgctggcgaaagcattgttgatgctgcgccatcagcagatccctccgcagcccggctatacgccggatccgcgcgtaacctccggcttgttgcgtctggcaacggccgacgccagcggcccggcaaacttacggcggctggcggtttccagctttggcttcggcggcgccaacgcccatatgattatcgaccgcgtcggcgcggaacacgccgtgcggcgccaggcggcgcggcaggttggttatattacgctgaacctgtccgttctggatgctgatgcggcattgggcggtgcattcagtctggcggagttccagcagaaactgcagcagccggcagtctgccggcctttccccgccggacgtctggcggccaatgctgcgcagccgctggccgaggggcactatctggcgacggactgcgtgattgatacccatggctatgccatggggccgaaggcgttggaccacgttgatccttttaaactgttggtgacggcattaaccggccgcatcgttgcccgtcacccgacgctggcaaacagtgccgatactgcgatgatgatgtgctgcaacctggggggcgagagttttgccaatgcctatgcgcgcagcgaattcttccgctcgcagcagggggaggcgcccgatgtgacggtcgcggatgtggcgaccatgctgccttccatgctgtcaggctatgcggcaaaaatttttgatttgcgcggttgtcatcaaaccctggccggcgaggcggggctgctgtggcagacgctgctgaccctgccgcattggtttgagcgcggcctgcaacaggtgctgttgggggccgggcgctatatcagcagccacagcgagctgcgtcactgtcagcaggctcagccgcggcagggggaagcggccgccatcatgctgctgaaaccgtggcggcagggggatgatgccctggtggtgctacgcggcgccgtgctggcgacgcatgctgatgacttgtcggcggcgtgccggatggcggggatggagccgcagcaaatttctcagaccacggtatgcgagctggatgccgccggccagacgcaaacgcagcctctgcaccagcattgcggctggctggcggaagccagcggtatcgaatatctgttacagcagatcgtaacgctggataaatacggcgtgattgaagtgcgtcgccagggcaaaccgtggctatggctgttcagtgaacgcatgcgggcctggtcagcgccgcaggagcaagggcggcagcggctgccttataccctgcgtttcgcccacccgacggcggcagccgttgaaccattgccagccgccgcgccggtgccggcgccgacggccgagtcgctcagcgggctggcgttgctcaataaacaggtgaccgatacgctgctggcagggctgcacgcgcggcgtaccatcatgcagacgttgctcaacacgcgcagacgcggcgtttcccgccaccatgttatcagcgatgcgcttcagagcgcggacggctggcaggcgacgctgcgggtgaatgaacaacacccttatttctttgatcatccgctggatcacgtgccgggcattttactgatcgccggcggcctgcagctggtggagctggccggcatcgtcaatgcggggcagtttattaatgacatgcacgtgcgctttctgcgctatgtcgataaaaccgctcccgtcagcctgttggtgaacaggcagcaaggcggggagtggaccatcgtcatcaggcaacgggcgcacatcgcctgccgtattgcgtttacgctgaagacggccgcctgcccgccgccgatgggggctatccgggcggtagcgccttgtcggcgggccgacctgctgcataagcaccggccggaaaacgtgctggtgggcgagctgttcaaagagcaggagcactattcagtgctgacgaccgcgctgcccgacgggcatttctttacctatggcgatgagaaaaacctgtcgatggtctatttcctggagattgcccgccagtgctacatgcaaatcgcccacgatgtgatgcgggttccgctgggggtgccgatgaacctggtgacgctgcatttttccctgaataacgcgataccgcgccagcgcacgctgtgcgtggcggcggagcatgcgcaattgccggcgggcggttatggccgcactaaccttatcaacctgtcgctgcggatgggaacgcagcgattaggggaagcccggatcgtcgcgcaggcgttggaaaagcatgacatggccgatccggcatcgacctga

SEQ ID NO: 453546 - DNA, 468 bp, Serratia marcescens
atgaataccttaacgtttagcgtcgacgtcgcggctccggccgacgttatttgggcgatttgggccgatctggaagcatcgccgcagtgggacacggatgtggtgagctgccggctggaaggggcgtttgccccgggcacccgcgggctgtgcaaattaaagaacgggctgcgcatgtcgattgtgttggaggagatagaggtggggcgccgctggcgtaacgccgcccggctgctgggcgccacgctgcgttttgatcatcaggtagaggcgctcacgcctgccacctgccgcgtgacccaccggggcgatgtcagccaggttaatccctggctgtggcgcaaagtgatgcaggcgctgttacgcccggcgttgaacaacgcattgcgtaatctggctcgcctggccgagcaacgcgcacaagaggcgccatcgatattgccggcatccgccgtgcaagggcagtaa

SEQ ID NO: 453547 - DNA, 684 bp, Serratia marcescens
atgaaaatacggagcctgttgtggctgagtatgctgggcgtctggaatgcggcgcaggcggctgaaaccggcccctatattgggctggaaggcggggttaactgggcatcttcgcaataccttcgccagcagcaactcgattttgtccaaatgaactttaaaaagccgctggacagcggctatgtctatggcggccttgtgggatggcgttttctgtcgggcgtgcgtacggaactggagcttaactaccgcaaaaataccctgagcagtttcagtcagcgctattatgaggggaacagcagcgccgccgggcgcggcagcgaagcctttaccggcgcgtttgccaacgtttggtatgatattccctggcgtctgcacattaccgacaacgccgtcctgcggccttacgttggcggcgggatggggtacggacgcctgaccattaaagggctggccgcggagggcgtgcacttcgggcaaacgcataatgatgacgtggccgcctggcagctcgggggcggccttatcgcccagattggcgatgattacagcgtttcactggattatcgctatctgcgaaccgcatcggcgaattacggtctgattgaggggctgccgccgcaggatgttattacccactaccgggccgagtcgctgatgctggggctgcactacaacttctga

SEQ ID NO: 453548 - DNA, 603 bp, Serratia marcescens
atgaaaaaacgcctcaaccgtgaagaaagccaacaggcgacccgggaaaaactgctgacgaccgccaccgagctgattgtggcccgcggggtgcatgccaacagcattaataccattgcggaagaagcgggcttttccaaaggggcgtttttttctaatttcgccagcaaaaatgcgctgctgctggaagtcatgcagcgctttaagcagcgcgagatcgcacaattacagcaggtgctgacggccgatctggatgatgatgcgctcgatcaggcgctggcgcagtatatcgccgagctgaaaaacaaccgcgactgcgccgtgatggacgtagagctacagctgctggccctgcgcgaccgggagtttgccgaggcgtatctggcgctgcaccatgaaaatgcacatatttttggtgagctgatcgcttttattttccgtcatgcgggcaaagcgccgcctcaaccggccgaacagatggcgaccctgtttatcgccatgattgaaggcctgatcctgcagcagcatgccgatccgggcagccaggtggcgctggtgctggaggcgctgattcagacggcgccgccgctggcctcgccctag

SEQ ID NO: 453549 - DNA, 366 bp, Serratia marcescens
atgaaaaaaattttattttcagtgatccagggcctggttgccgctaaaaatggtgaaaccgttgcggacaactatgtgaagctgcaggagggatggagtgtcaacaacccgcaaaatcaagccgatggctctgttaagatggatttgtcatattccgtattattttttgacttggcagagcagaagtattattccacaacgcaaagaggtacggtgcagtcaatgggtgaggctggcggtgacagcagattggttgttcgccagccttttaagggcttccgaccggacgatatcgatcatgtcgtcgattcatggccggttattgttccctatccaacgatcatgacggaaagacctattggctga

SEQ ID NO: 453550 - DNA, 891 bp, Serratia marcescens
gtgctgcatcaacataccccgcattccgacgccgaacgcaccgttaagctggaactggacggccaacggctcgaccagcttgatgacgccctgctggcagggtcggggctgcgcactataagcctctataacaaccagctgaccacggttccggcggcgatcgtcaatcatcggcagctgcaggtgctgaatatctccgtgaaccgcttaacggccattccgcaagatatcgttcagctgcagcacttggaaatgctcgatctggggcataaccagcttggcgtagctcctgaggagattggccggttaagctcgctgaaatacctgtacctcagcgacaaccagctcagcgccttgccggcctcattcgccggattaacggcgctgcgctacctgaacgctaccgacaataatctgaccgccctgccggatgctctctggcaactgacgtcactgcaggagctcaggctgtaccataatcagttagcgcacctgcccgacgccatccggcagctgtcgcagctgcgggaagcgcatctgatgcataatcagttgacgtcattgccggacggctttggcatgctaagcgccctcaacgtgctggacctcgccaacaacgccatcacccagctgccggatacattctgccagctcactcagctgtgtgagcttaatctgcgctttaatcggctcacccaactgcctgacgccatcggacaattggagaagctgcaaacgttggatctgcgcgccaaccggcttacggcactgccggacagcctggctgagatgaaaaatttacgccggctggatttacgttggaataactttacccgttaccccgcggttatcgatcggctgatcgcacgcggatgcatggtacatgcgtaa

SEQ ID NO: 453551 - DNA, 369 bp, Serratia marcescens
atgatttattggctttttttagggttggctatcgccaccgagattatcggcaccttgtcgatgaaatacgccagcgtcagcgggggcgtaatgggtcacatggtgatgtatgtgatgatcaccgcttcgtatattttgctgtccgtcgccatcaagcgcgtcgcgctgggcgtggcctacgccttatgggaaggtatcggcattctgtttattaccctgttcagcgtgctgtggttcgatgagccggtttccatgctgaagctgctggggctggcaacgttgatcgcgggcattatgctggtgaagtccggcacccgtaagacgccgtcggccggtgacgcgcgaggtgaacatcatgcaacagcttga

SEQ ID NO: 453552 - DNA, 138 bp, Serratia marcescens
atgtctgatgaaaaacgtcttaatctgctggaaaaagtagctattgtgatgttcgcagcattgattgcctattttgtgctgacgtttggtctgtcgctctcagggctggatcattcttggccctatccaatgagatag

SEQ ID NO: 453553 - DNA, 837 bp, Serratia marcescens
atgagactacctttggtccttaattcattctatcgattaatggcacagaacatgccggaatcgattaagcccaccctgcgcggttggtataactccgtcaataaagtgttgacttatggctataaaaacagagatatatttaccgctctggattttgaaattaactcgcaatgcaatctcaaatgcagttactgtcctacctcgtttaacggcgggcgcggtgttaattatatgccggaggaagttttcaaaaaagcaattgatgatttggcgacaataaactataccggccgtatttcccctcacttcttcggtgaacccttgctggatcagcggttacctgaactgatggcctatgcccggaaaaaactgcctaacgccgaaattattatccacaccaacggattattgttggataaagaactgtacgacagatgtatgcaggccggcgtcagcggttttctggttaccaaacacaccaagaatttgcctaagaagctgaccagcatggtagacagcgactatatcaaacatggggagatcaaaatccgttcgctcgacgggctgacgctatttaaccgcggcggtacggttaaacccaaaaaagagcggaaaatgaagcactgccattacgtgtcggatgagatttctattacctataccggcgaagtggtttgcaccaacgattaccatatcacccacagcttcggtaatgtgaaggagcaaagtctgttggagatctggcacagtgaggattttcgccggctgcgcaaagaagtgcgccagggaaaattcacgctgccaatgtgtagaaaatgcgcgctgaatgaaacctag

SEQ ID NO: 453554 - DNA, 1185 bp, Serratia marcescens
atgaagataagcaagtcaatttatatcaagatgtcaatctatctgatggcattgagaagcccgttgatcattgtcagcatggcgctatatatgctcacccgcaaggagatgctacagcgttcaattttaaagctgctgccatttatcctctttttactggctgcagatatttactccatcattatgggtaatgagttcggtaacattattggtcagaccagggatattttcctggctatcgtggttgccgttttccttattgccagcagtgaaatcagcgaagacaacagaacgctgatctaccgtacattaaaatactgttttgtatatgtcgctatcgccaagatattcatcattgtactatccgtcgttgtaggcatcagcgttagtgatattattgcctggctgcgggatacgtggaacatccaaatgatggctcttggtgttgaagataccgtcctcgcgcgtttacagatcccactggattcagcagtaccgttcttcttatattttgtcaccagagaactcatccacaatgaaaacaataagtcaagaacgctgatcacgtttacattgttattaatatcaatgatcctgacgctatcccgtgcattttgggccgagacgctctttatgatcttcgccgctatcttcatcgaagccaaggcttcaaagatattcaaaatcggtttgatttctgcatttgtgttggcgtttctgattattttcacccccgttggcgatatgctgtttaaagttatcgaaacgcggttcggcgacaataccaataactcggtgtctgactcctaccgtgagtggcaaaacagatcgctctataattcatttatggaaatgccgatttttggtcacggattaggttactacatcccgaacgctctgcgttcacaaacgacgaaatacctctatgaaagccagtctctggctatgctgatggtgttgggcattgtaggatgcgccattttactgttattgattacattcacttgcctgaaaaccattgccaaagagagcaacggcgtgttcgcctttattatgccaggcatattcttggcaatgtggttattttccggttcggttaacccattgctctttggcgcatctggcggttccatactgttcatgacggcaaaattccatacgctatataaaagaggggattcttaa

SEQ ID NO: 453555 - DNA, 153 bp, Serratia marcescens
atgctcggcatctatcagcaggaaaactggcgacggtgtccggtggataacagcagagaaagaggagaaatcggcgattatctggccgaaggcggcggcgcgtcagaaatatgcggttcggtgatatccaccatgcggcaaattttgctgtag

SEQ ID NO: 453556 - DNA, 288 bp, Serratia marcescens
atgaatcagcgaatatcactggcaatagccgccgttggcctgctgttttcggccatggtcggcgcacaccgcggcgacgtagacgtgctggtgccggtgacgccggagatctggggcgcggcaaagagtacgtcggcgccggcgccatgctcgcgctgctgcgtgtatcaggacaagaactactcggaaggggcgctgctgaaggttgagggcgagctactgcagtgtcagagtgataaaacgcgggtcggcacccagccgctcatctgggtgcgcgttaataggtga

SEQ ID NO: 453557 - DNA, 537 bp, Serratia marcescens
atgggttggaatcgtgttatttcgctatgtttgtcgcgtaattggtcagaggggatggtggtgggggaaggattattcgtcgctgcgctcctcacccttcgggccgcgctgaagcgcgttgtttcgctacgctcaaccgaaccttgtcgaggcttctcatccttccccagtacggagaattatgtggcttttgagacgttggaacgtgttgggaattttgaagagatggtggtgggggaaggattattcgtcgctgcgctcctcacccttcgggccgcgctgaagcgcgttgtttcgctacgctcaaccgaaccttgtcgaggcttctcatccttccccagtacggagaattatgtggcttttgagacgttggaacgtgttgggaattttgaagagatggtggtgggggaaggattattcgtcgctgcgctcctcacccttcgggccgcgctgaagcgcgttgtttcgctacgctcaactcgaaccttgtcgaagcttctcatccttccccggtgcggagaattatatggcttttga

SEQ ID NO: 453558 - DNA, 1341 bp, Serratia marcescens
atgtctgagaatatgcacaacgcggatgcgatacccgatctcgagcaacagaccgttaagcgcgtgatctggcggatcctgccgtttctgatcgtctgctatctcatcgccattatcgaccgcggtaatattggcatggcctccctgcagatgaacgaagagcttgggctgtcgaaggccgtattcggcctggcgagcagcctgttcttcgtcggctattttatttttgaagtgcccagcaacctggcgatgcaaaagatcggcgcgaaaatatggatctcgcgcattatggtgagctggggcatcatttccgtgtgcaccgctttcgtctccagcgcggaaatgctctatgtgctgcgcttcctgctgggggcggccgaggcgggctttttccccggcgtgatcctgtatctcacctactggatcccgggtaaatatcgcgcccgcgtgattgcaacctttatggtggcgattccggcggccaactttatcggctcgccgatttccggcgccattctgtcgctggatggctggctggggctgcgcggatggcactggctatttattctggaaggcttcccggcgatcttcctcggcatcgccgcctttttcttcctcagcaaccgcccggaaaacgccgactggctgaccaaagcgcagcgggagtggctgcaggccaagctggcggaagaaaacgcccagcgtaaagtcatcggccatatctcgctctggcagctgctgcgccataaacacatctggctgatggcgctgatctatgccggcgcttccgccgccggctccacgctcagcgtctggtcgccgcagctgctgaagtcttacggcctggataacttcagcaccgggctggtcaacgccattccttacggcctggcttccgtgctgatgatcgtctggggcagaagctccgatcgcagcggcgaacgccgttggcataccgcgctgacgctgttcctgatcgccggcggcttactgtccgccttcctgctgaactccctgacgggcagcgtgatcgtactgtcgatggtgctgatcggcgcctactccatgaaaggcccgttctgggcgctggcgtccggctggctctcttccggcaccgccgcggccggtctggcggcgatcggcgccatggccaacctgatcggcggcgggttaatggtgaacgtttacggcatcatcaacgatcagaccggcagccataccctggccatgctgcctctggcgctgctctgcggcgtagggggcgtggccgtactgatgatggggcgtaaacaggcgctgcaggtcaagctggataacccggtcagccccgttaataaataa

SEQ ID NO: 453559 - DNA, 936 bp, Serratia marcescens
atgcccttttcacgccgcaattttctacaggccggctgcgcgctcggcgcctatcatgcgttctctgcctttgcgcagacgccgttcagcaccggcgacgaacagcccacgctccccatcccgccgggcagcgtggactgccatatgcacctctacgatgaccgttacccggccgtcgccggcgcccgcctgcggccgcccaatgcgtcgctcgcagattatcagcgcctgcaaacccggctgggcatgcagcgaatggtgatcgttacgccgtccacttacggcaccgacaaccggctgctgcttgccggcctgcggcaaagcgccggcaacgcccgcggcgtggcggtgatcgataccacgatcgacgacgcgatgcttgaacagatggatcgggccggcgtgcgcggcattcgttttaacttaagaaccggaggtacgccgctcgccgcgctggaaacgctggcggcgcgcattgcgccgctcggctggcatattcagctggtggcgaccggcgaggcgtttatcgcgttggagcagcgtcttgccgcgctgcccgtgcctctggtgatcgaccatatggggcatattccacagccggcgggggttaattcagcggcgttccacacgcttctgcgcctgatcgcgcgcggcaatagctggataaagctgtcggggccttacatcacatcccgggtcggcccgccctcttatcatgatgtcggcctggtggccgccgcgctggtgcaggccaatccgcagcgcgtattgtggggcagcgactggccgcatccgacggtgaagcaacacaagcccgacgacgccgccatcctcaacctattagcccgctgggcgccgtcctctgccgagcaggagcgcattctgcggatcaaccccgggcagctctacggctttgacgacggcgagcagagctga

SEQ ID NO: 453560 - DNA, 1353 bp, Serratia marcescens
atgactttgcactcgctaccttcggctccggcggcaacgccggacgccgtccctgagccgcatgaggctatgagtaaccgtgattttgcgcagagtgaaaccgtcgccaggaaagcgttctggcgcattttgccctttatctttctttgctacgtggtcagctatctggatcgcaccaacgtcagctttgccgcgctggggatgaatgcggatctggggatcaccgcggaacagttcgggtttggcgccggcatgttctttatcggttattttttatttgaagttcccagcaatctgattatgcaaaaggtcggcgcgcgcatatggatagcccgcatcatgatctcctggggggtgatctccatgctgaccgccttcgtgaccggccccgtcagttttacgctggcgcgtttttgtctgggagtcgccgaggccgggtttacccccggcatttacctgttttttacctattggtttccgggtaactggcgcgccaggattaccgcctcttttctggtggggatccccgtcgccaatattatcggcgctccggtctccggcgcgctgatgcagctcaccggccatgagcatatccgcaactggcaatggctgctgctgattgaggggctgcccgcggtgattctgggcatcatgtgcctgttttacctgcaggataagccagaaaaggcggcgtggctgaacgccagggaaaagagcctgctcaaccggcgtctcgacgcggaacgccggcagatctccgcggcccatggttccagcctgcgcgatgccgtgcgcaatccgctgctttacctgctggcgatgatcaacttctgcggcattgtcggctctattggcgtcgggctatggatgccgcagatcatcaaacagctgggcgtcagccacggcgcgacgggataccttaccgcaataccttatgtgtgcggcgctttttgcatgctgttttgggcgcgcagggcgaataggtcgcaccgcatacgctggattgccgctgcgctgctgatcgccgccgcggcgttggttgccagcgccgtgctggacgatccgctgtataagattatggcgctttgcgttacggtcagcggcattctgtcatttcaggcctctttctgggcgctgccgtcgggttttctcaccggcaatgccgccgccggcgggctggcgatgatcgtctccatcggcaacctcggcgggtttgtcgggccttcgttaatgggttatatacgtcagtcgaccgatgggtttatgtggccgctgttagtggtcgcgctgtttttatttatcggcgccgtgggcgtctcgctggtcaaggatccctatcggcagcaagaataa

SEQ ID NO: 453561 - DNA, 933 bp, Serratia marcescens
atgacgtggctgacttcgccggagacgcggcagatggtgctattttcccgtttgcctgaccatttccgccgccctgacgcgcacaatgcctgggccgccgccaatcgcggcgggcagctgacggactccttccttgaggggccggtctggcaccctgacggctacctgttggtgagcgatatcccttacggccggattttccgggttgatatgtcgggcgactgggagctgctggtgcagtacgacggggagcccaacggcatgaagctgaccgatcccgacacgctgattattaccgattatcggcacgggctgatgaagctgtcgctgcaggaaaggcgtatcgccccctggctgtcgcggcgcaacagcgaaagtttccgcggtgtgaacgacctgacgccggactctcagggcaacctctattttaccgatcagggtcaaaccggcctgcacgatcccaccggccgggtgtaccggctgggccaggacggtcgtctggatctgctgctggataactgccccagtccaaacgggctggtgctctcgccggacgaaaaggtgctgtacgtggcgatgacgcgcggcaactgcgtctggcgggtgccgctgcagcctgatggttcggtgagtaaagtcgggcagtttttcacctctttcggccccagcgggccggacggactgacggtcaatcagcacggcgagctgctgatcgccaacccggggctgggccgcgtctggctgcttaatgagcttgctgaaccgatagaaattttgctcagcccggccgggcgttcaaccaccaatttgtgttttggcggagaaggcttcaggcagctgtttgtcaccgagtccgtcagcggcgccattttgacctgtccgatgcgcaccccgggccgccaactgccgtcgctgtcgaccgcttttctctga

SEQ ID NO: 453562 - DNA, 939 bp, Serratia marcescens
atgagcaataacgcggtgattttagtgaccggcgccgatctggccgccgaggcgatggcgctgctggacgattatcaggtggtatttgccggtgggaagccgtcggaagaggatctggtggcgctgtgtcagcgtcataatccggttggcatcattgtgcgctatggccgcatcaacgcgcgcattatggatgccgcgccggggctgaaagtgatttccaagcacggcagcgggatcgacattatcgatcaagcggccgccgccgcgcggcagattgaggtgaagtccgcgccgggcgccaatgccgccgcggtggccgagcacacctgggcgatgattctcgcctgcgccaaatcggtgctgccgctggatagtcgcctgcgtcaggggcactgggataaagcccggcacaaatcgctggagctggaaggccgtacgctgggcctggtggggctgggcgccatcggccgtcgcgttgccgatgtcggccaggcgtttggcatgcgcgtactggcttacgatccctatgccggcgcttttcctgccggctgtcagcccgttgatgatgtgcagcagctgtatgcgcgttctgacgtggtttctctgcactgtccgctgaccgagcagaatgccagaatgattaacgacgaggccctgtcctgttttaaaaagggggcgattctggtgaacaccgcccgcggcggcctgattgatgatgatgcgctgctgcgggcgctggataacggcaccctccgctgggccgggctggacagttttaccgtggagccgctgagcgcgccgcacccctggcagcacatcgacaacgtgattatttccccgcatatcggcggcgtcagcgatcattcctatatcaaaatgggggtgaccgccgcggaaaatgtgctgaaagtggtggagaaacaggacgtcgtatcatga

SEQ ID NO: 453563 - DNA, 696 bp, Serratia marcescens
atgtctgcttctgaacaaccgatgattaaccgtcattttgaccgtgtctgcgccgattatgtcagacaggcggcagaatttcaggcggcaattcttgccgatgtcgcaggacgccgggggacgctgcatggccgggtcaaaccgctggcggcaagcatgaaagtcgccggcccggcgattacggtggaagtgcggcccggcgataatctggcgatccatgccgcgttggcggtcgcccagcccggcgatgtgatcgtagtagacggcaagggcgatctcagctgcgcgctgctgggggagatcatgtcaacccaggcagaggccgccggcattgccggcatcatcattgatggcgcggtacgcgacgccgatgccctgatcgccaaaggctacccggtgttttcatccgggctgaacccttgcggaccgaccaagtccattccgggacgcgtcaattacccggtttccgtggcgggcgccgccgttgcgcccggcgatttggtggtcggcgatgccgacggcgtggtggttattccgcgcgccgaggttacgttgatcctggcgctggcggcgaaaaagctggcgatggaaacccgccgtatcgcggcgattcacggcggggatttacgcccggcctggcttgacggcgcgctgcgttctgctggcatgctgacggacggggaggcgctgcaatga

SEQ ID NO: 453564 - DNA, 714 bp, Serratia marcescens
atgggaaatgaaggcgttcatgcggtggagaaagcgctggccttactggattgcttcaaaccaggggaagagaacctgtcactcaccgagttatcgcaactttccggctaccataaaaccacggtgtaccggctgatgaactctttggagcgcatgggctatatcgtgcgacgggaaagcggcatctatacgcttggccccagactgctgtatctgggcaaactttatgagcagtcgttccatctggccagcattgtccagccggagctgcaggcgctggcgtccgccaccaatgaaagcgccagctggtatgtactggacgaaggcaagcgcctttgcctgttccgcgccgaagcctctgacggattgcgccattcccgcctgcccggctccatctttccccttgatgactccgccatcagccaggtgctgcgctactggggaatgaatgagccgctgtttgacgccccgccgacggtgccgctctatacctctggcgccagggatccgcacatttccgcctttgcggttccggtgttcgccgagggagaaaagctggctgcggcattagccctgaccgggccatcctccaggctgacgctggataaaaaagagagcggtcttggcgaactgatgcgcgatacggcagccagattgtccgccaggctcggcgcccgcaagccgttctgcgacccgatctacggccgcggttag

SEQ ID NO: 453565 - DNA, 1821 bp, Serratia marcescens
atgggaatgaatgtacaacagctcgatgaccagtttgaaacttatggtcgtgaaaataatttggtcgagatacctaccggtgtagggttctgtatgtatattcgccgcgattgtttgaatgtggtggggtattttgacgttgaaactttcggtcgcggttatggtgaagaaaacgactggtgccaacgcgcagccaaagcagggtggcctaattttcatcaacttaatgtttttgtctaccataaaggcggcgtcagttttgctggtgaacagaatccgcgtaaaacccgggcgcttgaactgttaagtgcactacatcccaattatacaaaggatgtgatggactttattgctcgggatccggcaaagaaagcacgtcagcagcttttattgcgtattttagcgaaaaaaaatgtgagtaaagtgcttctggtaactcataaaatgagtgggggagtgacacaacatatcagggagttgtctgacttttatcgacagcaggcgcattttcttgtattgaagcccgaggtggatggtcaatctgttgctctattgttagatgcggacggtaatgagtgccatgagaaatttgtgattgatatttctcgtggttatgagactttgctcagtctgctgcgttttattggcgtaggacatattcattatcaccatttgattggcgtacccaagcaattacttaagttaagtgacgatctggggtgtcggtatgacattactatccatgattattatttcgtgaatgcaaatccatcattaacgaagaaaaatggtatgtttgccggggaagaaccggatatccgcgatcggttatgcaatgagcactatccgaaaccagaaggtatgtcggcgatccaatggcgtagcatctaccaggcttggttggaaggtgctgaacgggttattttcccttctgcaaatactcaagtgcgctttattacagcgtttcctggtgtagagaagaacagtattattgcttggcaccctgactatgaaaataatgcgccataccctgatgcaaaaagcgattatcaggtagggaaaaagctaaaagtactgattttaggggccattggccgtgaaaaaggtgctttgctgcttgatgaggttgctaatgagctaaagcatgaaaatattgaattccatttgcttggctatgctttccgaccgctgaatggcggagtgatatgtcatggtgcttataccagtagtgatattgatggaaaattagatgaaattcagccggatatcgtttggttcccggccaggtgtcctgaaacctatagttatacgttgagtatagcgttagagcagggattgccggttttagtaccaaaccttggagcttttgctgagcgtgtgaatgggcgacgtttcagccgagtggttgcttgggatagttcggttcaacaaatgtgcacactctggcgtagcttgctgaatgacccggcggctttcttctccgctgagaatgttccgtcaacgcttgatatgtcaatgacgaagcgtacggttgatttctatcgtcatgaatatttacaagataattggttgcgtgagagcgagttgggcacggttgattacaaagacctgagtgagtcgttttgctcgtctgagagtatagagattgttcctgtggcagaggtggctcctcggggacgtaaagaaaagctactggccattctctggaagttgactaggcatccggcgttggcgtgggccgtcaagctcattccttatcgtgtacaacgctatgtaaagcgctgcttgtcacggcgggcaattcatgaagtggtcagataa

SEQ ID NO: 453566 - DNA, 1029 bp, Serratia marcescens
  misc_feature (4)..(13): n is a, c, g, or t
  misc_feature (917)..(926): n is a, c, g, or t
atgnnnnnnnnnntattaacttggtgtaattgcccttcgttgaataaggctgcatcggaaagaaatattagggtagtcaatctagagttaggtccactacggccactcgattatctggcaacagcatattttgattttagtggcgtgaatggaaatactgaagctgaacaacgctatttattagcaaaagatgctgagctaacattaagtgaagtatttaatgcagagcaattacgcagtttttttgctaatgcaccagttagaaaattaacagatgcagaatatgatgttgggatcgtcctgcaggttgagaacgattctaatatactggcattcagtaatacatttgataatcaatcattgttagactatgcagactatcataatttaggacgaaaactgattcgtagccaccctggcagtcgtttctctctgaataaatgcatggatagtattgatcattccctgagcagcattgagtttatctctcgatgtaaacatatattaacaattaattctagcgttgggttagaagcaatgttgttgaatgttcctgttacaattctcggggattgctcttatgcattctgcaatgtagaggatgaagcagagaggaatgaacgtttagcattctatctattttcttatttggttccgtttaaccttatttttgatgttaattatatccgttttcgtctatctggaccttcagaaacggaaataataaagagtcatgttgattattatattaactctggtgatattatgcgtaattttggtatgggtgatgaggcatcttccattattgaaaatggtatttctgaacgaagctctgagaaagaatctagtgtgatgagggaaaaggttcagcaattgagtgccgatctcgccggtaaaaataattatatatctgaacnnnnnnnnnnaaataaacatgctggaaaaggtattggaagggaattcggagcacattgtcgatgttattgtgcctgtctatgcgggattgcaagaaacgcaggaatgcattga

SEQ ID NO: 453567 - DNA, 402 bp, Serratia marcescens
  misc_feature (387)..(396): n is a, c, g, or t
atgattagcgtttttttaccctctttcccatttcgcggagtaaaagctccttacttatggttcttttatcgcgttttaacatcaataaaagagcctgtacattttatcatgggagaggcatacctttcgtcgtctgacagttggaaaaatgacgagcgttgggagataactgatgaggcccaaaagcgtttgggctatcaacttcctgatttggcacagatgaaagaacataaagtaagtctcattgatgagtctttcttgtatgactgcatgaagcaatatcatggcaaccctgatctccttttcaaggcttttataactgaagagatccccgcactcgttcaggaaattgatagcgtattggaaaaggcggaaggtcttgaatgnnnnnnnnnntattaa

SEQ ID NO: 453568 - DNA, 1368 bp, Serratia marcescens
atgtatttttccagaagacgcgtaaggggtttgctgatgtcctctaaagaaattgctatcgaggtaaatggcctcagtaaatgctatcaaatttattctcgacctcgtgaccggttgaagcagttttttgtgccaaaaatacagcgagtggctcggcgtgaaagtcgtgtctattttcgtgagttttgggcattgcgagatgtgtctttctctatttatcgcggagagactattggtatcattggtcgcaatggtgcagggaagtcgacgctgttacaaatgatttgtggcacattaacgccaactacaggggatatacgggttaacggacgtatagccgccttgcttgaattaggggctggttttaaccctgagtttaccggacgcgataatgtttacttaaatggcagtgtgcttggtctgagtaaagcagaaatcgataataagtttcagagtattctcgactttgctgatattggcgagtttatcaatcagccagtcaaaacatattctagtgggatgtacgttaggcttgcatttgctgtgcaggcatgcattgacccagaaatattgattgttgatgaagcattggccgttggggacattggttttcaatacaaatgctttaaacggatggaggcccttaagaaacagggcaccactattattatggttacacactccacaggaagcattctggaatatgccgatcgctgtttggtcatgagtgatggtatgttgatcggtgacacaacggatgttttagctgcggtacttgcatacgaaaaaggtatgctactgttggagaaaaaggataaggataaggtttcacaacctgtttcttcagaagtgggtgtgttgagcattaaagaactacaggcgttacagcaaaccacatcaaatacagaagtaaatgagaagcgtttcggtactggccgtgcgataattgaagagttctcggtagttaaaagcgatggaacaccattggcggaaaaccctctggttaaatcgggagaggagctctacttcacctttaaagtgactgtggccgaagagattgcagatgccgttttgggtatttctatttcacggccccaggggggagatatttggggtgataataatattggtgctggtcgtccgctaaatttacttccagggtctcatcatattaagtataaagtaaagctaccgattaacgctggtgattacttgattcattgcgggttggcttgtttcaataatggggaacgggaagagttagaccagcgtaggcctatagcaaaaataaaatattggtcatcacgtgaacttggtggcgttatccatgcacctattcaagtcatcatcgatgaggtggaaaaatga

SEQ ID NO: 453569 - DNA, 834 bp, Serratia marcescens
atgagtaatcctcataggaaccaccagatgtcgccgctatccctgattaaagatatctggggttacaaacaactgattttgcagatgacgaaaagagaagttattggtcgttataaaggatcggcgatgggactggcttggtcatttcttaatcctttatttatgttgactgtttatacatttgttttctctgtagtatttaaagcgcgctggtctactggtggcgatgaaagtcgcactcagtttgcagttattttatttgttggtatgatagtgcatggtttttttgctgaggtgctcaatcgtgctccgcaaatcatattgggtaatgcaaattatgtgaaaaaagttgtatttcctctagaaactctgcccgtaattggcctatttgcagcattgtttcatactgtgattagtctaattgttttatcttgtgcgttctttatttttaatggctatttacatttgacggtggtccttataccgctggtgtttttgccattggttatattttctctaggcctaagctggatattggcatcgctaggtgtgtatatccgtgatgtgagtcagaccacattgattatcaccacggtgatgatgtttttgtctccagtatttttccctatcaccgcgcttcccgaaaagtatcatatttggattatgcttaaccctttgacattcattattgaacaggctcgcaatgttcttatttggggacggttgccgaactgggaaggactggctctgtacacattcgctgccatgcttgtcgcttggataggttatgtatttttccagaagacgcgtaaggggtttgctgatgtcctctaa

SEQ ID NO: 453570 - DNA, 852 bp, Serratia marcescens
atggctgtagaacaaaaaaaattcaagatagttgcatctattgttttatatcgccatagctacgctcaagtggaaaatacgctgctatcgttgcttaatgaacagagtgtcgaccgtatcatattgattaataacggtggctctgaatggggactatcactggataatgagcgtattgattatatttccagcggtggaaacatcggttttgggcatggtcataacttggcgatgtctcagtatcttgctgattgcgattattttttaatttgtaaccctgatatcagcttttcacctaaatctttggataaactctattgctttgctcatgaagggctacatcagttcgttgctccgcgtattcactatacatgtggtcgttttcaatacagttgccgcttgttgccgacgccagccaaccttttgctacggcgttttgttcctagtttaggtcaaaaaatggacgtcaattacgaactgcaacgcgcggattataatcagacctttgcagtaccttccgtttcaggatgttttatgctgataaagtctgagcttttagaggctcttaaagggtttgatgagcgctattttatgtatctagaagatgtcgatctttgccggagagctttgcaacttactgatatattttatttttctggctcaacggttacccatgtgtttggtaagggttcatacaaaaatctgactatgctgagatatcatgtacgttccgccatttcatattttaataagtggggatggttgtttgataaagataggcgcaattataatcaacgatacttgaagagtattcctatgatcgactgcgagcataagatctcacgctcatga

SEQ ID NO: 453571 - DNA, 1497 bp, Serratia marcescens
atgaaattgcaccccagtgtaggtaagaacgtactgagtttgtcctgtttatttattgcattgagctctgcttcggcctatgcggcgccggatacggcgatgtattacacagaaatgaagaaaacgcgtgaagatttgagcgatagttcgtcgaagtatgtgtacgaaaagttgatgaagcgtaagctttcacaggcatctgcagatgatggtgttgattttggtttgcacgggatggaaataccagcggtaaaaactaccggcgaccgggctaaaatcgacaaggcgtatgagttgttgtcacgcgtgggggtcaacagcctgcgcagcgccgaaacggcctggcatcgggtggcggataaaaatggcgatccgaccaatttcacggaagttgattttcaacttaagatggcgaagaagtacggcatgagccatcttttcttgtttggttatccacccgctaaatatacagttgcccacaataaattatcggcggttgatcccagattttatgacaaatacaaaaactaccttgatgttactctgaaacatttagctggctataatgttaaatatgcagagttaggtaatgaggtcgatgcccctaatacgtggtggatgcgttctacaccgggtatgtatgtcacagagatgaagatgcttaaggaagcaattcagaaatccgggcaaaatattaaaacggtggcctttgctgcaacttattctcgttctttgactcaaggcggattaagcggcggccggcgctttgttgataaaagctttaaattgggtatcgacaaatatgccgatgcatattctatacaccactttgtgtttggcgcagatgatttgccagggtatatgcgttccgagatggctaaatataacgcccaggataagccgctattggataccgagcagttggacaccaattcatcggggcgatatcaatccaatccttatgatctaattaaactttttgcacgtggtttttatgtgtatgatttaaaacgtgtggattactatctggcgaaggatcgttatcttaacggtaagctgtattattttggtttgtttgacgacaactggcagccaaaaattcgcctgttggcctatgcgatggcggttgacgccatgaaagggaaacatctgttgtatatggctaacccggcaaaggatgttgaagcttacgttctgcaatcaaatcgtaacaataccgataaaaaatacaccatcctgatgtggaagaatccgccgaagcatgcgaaggtacaaccggtcaccgttacgggcattaaaggcgacgtgacgattgaacactggaaccttgacattgagaagaaaggggacatttcgaaaggcatcagtctggatgataagccgatagccatttacaccaatgaaaaacctgattggaaaacggtgaaggggcaatatttctcttcaaacctgccacagatggcggcgagttatgctccgatgcctaatgacaaataa

SEQ ID NO: 453572 - DNA, 990 bp, Serratia marcescens
atgacaatagcgaacgatctggttaaaatatccgtcgttataccggtatataacgtcaagcaatacgttcaggaagcggtggattcaattctggcgcaaactgttgcaccgtatgaagtgattattatcgatgatggatctaccgatggttccggagcgctgctggatgaacattatggacatcttgataccgtcaagatcgtccatacgaccaatcatgggttgggtgaggcacgtaatgaaggcagccgtcatgttaccggggacttcacctattacttcgattcggacgatgttgcggtgccaacgctgttggaaacctttttaaatacctatcgcagccatcctgacctggatatcttctgcttctcggctaactcgttttttgatacgacgccgacggcgccgcagccgctgccgttttataaccggaaaatggatcgggtcttcccggatgcaatttcggcattcaataccatgtccggctatggttctttctatcctaacgcctggatgtatgtgtttcgttccagcctgatcacggataataatatttggtttaaaccgattatccatgaagatgaagaatttacgccgcgtttattctttaaggccggaaaagttgccgtttctcgcgctattttgtttaagcgcagagtgcgtgccggttcaattatgcaaaccaaccgtggcgagcgtaatgtcgtagggtatattgcggggattaaagcgttggagcaattgcgggacaacgccggtgataccaagaatcgcaaacatctcaacgatcggatttccatcaacctgatctcaattcttaacatcgttaaaaatgataaggtgacgctgagcgctgatgttgcaaagcagtttaatgagttgaaaaggcggaacaagtcattggccgtgacgttagcggatacctgcccgcgtctctacaggctgacatcgttcgtcaagcgccgaataaatagaattatctatgcttaa

SEQ ID NO: 453573 - DNA, 912 bp, Serratia marcescens
atggacggtgcggtaggtagcgaaattatttatctagactatccattgcatttaaacgttggtgatttattaatccttaaaggcgcagagcagtttttcaaggagaatgactataaagtcatcacccgtcactctgaccacaccagtatgaatttcgtcgagaaaaccgactcaattccggagcatgtagttattgtactgcacggcggcggcaacttcggcgacctttatccggctcaccagcgcttgcgtgaagccgtggtgaaaaagtacaaaaacaaccaggtggtgatcttaccgcaaaccgtccactttaaagataaggctaacctgcttaaatccggtgagatttttaaacagcatcctaatctgaccatcttctgccgtgataccaacagcgaagcgattctgaaagagcatttttgcgacaacgtattcctctgcccggatatggcgcaatcgctgtggaacgttttcccacagcagaaaaatggcgatatcaagcagaaggcgatgtggatgattcgccgcgatatcgaaaagacggatctgtcggcgctgggtgcagaagccgatcctaataattttgtcgactggcatgatatctgtaccgatgccgatcggcgttttatgaagtttatgcacctgtttgaaaaactgaatcgcaagatcccgggtaacttattcccaaccaacagcatgtggtatcaatatactgacaaactggtggatcgcgttaaccaacggttcatgtctcatgactcggtgattacttctcgtatgcacggccatatattgtgttgcctgctgaagatgaacactcagctgattgataactcctacggtaaaaactcagggtattacgaatcctggactaaaggtgttcctggttgcgagttggttaaattatga

SEQ ID NO: 453574 - DNA, 1398 bp, Serratia marcescens
atgacattactgtcgcgcatgattgatcgcagcgagtttggtttattaaccattgccatggtcgtcattgctttggccgatacaatttcagatttcgggatctcgaattcaatagttcagaagaaagatattaccaatactcaactcaccacgctttattggctgaatgtggctatcggttttaccgtgagcgctgcgacctttgtcttaagcggcgtgattgccaatgcgctgcatgcgccagggctggagccgttggtgaaacttatttctgtggcgtttttgttgatccctcatgggcagcagttccgcgccttgatgcaaaaagagctcaattttgccagcatcggcaagatagagtcgttttcttatctgctgggatttgtggcgacgctggcgcttgctaccatctacccgttcgctattgtggcgatttacggttatttgattaatgcctcagtgagaaccctgctattcgcctatgcagggaggaagatctaccgtcccagcctgcgttttgcgttctcagagattaaatccaacgttaaattcggcgcctacttgaccgcagacagtctggtaaactttgttaataccaacgtatcaacggctatcctggcgcgcagtctgggaacgattgtaaccgggggttataatctggcctataacgtcgcggttatgccgccgaccaagctgaacccgatcatcacgcgggtgctgttcccggcctttgccaaaattcaggatgatagtgcaaaactcaaggattctttctacaaattactttccctggtggggattatcaactttccagcgttgctgggtctgatggtggtttcgcataattttgtactgtttgtcttcggcgaacgctgggttttcattacgccgatattgcaaattctttgcatcgttggtctgttacgttctatcggtaacccgattggttcattgctgatggcgaaagcccgagttgatattagttttaaatttaacgtgtttaaaacgattttgtttattcccagcatgatgatcggggtgaagctcggcggtgcgatcggtgttgccctggcattcctgacggtacaagttattaatacttacctgagttactttatcttaataaagcccgtacttggagaaagttatcgccaatatattaatagcctgtggttgccatttaaactcaccataccaacggtggtcgtgagttggggagttggctacctgatgccagaaggtgtatcaacggcagtggccttgttctcacaaatattgcttggtctttttgcttttgcgataactatttacttcagtaaagccccattaattaatgaggtgaaattgcaactgatcaaaagcgaaaaattacgtaaaatgtttagagtggaatgctaa

SEQ ID NO: 453575 - DNA, 834 bp, Serratia marcescens
atgtcgcaaaaatgtttggtggtggtcgttacctataatagccaaaagcatattcagtgggtgttggacggattagagtcatcacaaaatgacattgttgtcagaattgttgattcaggctcaacgaacagcgattacctggatgttatcaagagtaagcatcggctggatgtgataaaaacgaacaacgtaggctttgtggcaggtaataatcaggctatgtttgacgcacagtcttatgattgggtactgctgctgaatcctgatgcccgtattgaaggtgataacctggatcggcttttgttttttgcagcatcgaaagaacagaataaggttggtgtattctccgtacctctggttcgttttaatattgacgaaaagaaaccactgcctatttttgattctgtcggaattacctgcagccaggcagggcgctggtacgacatgaatgctaaccaaccggtatccgcactagagcaacagtcttcagctgttgatgcggtttgcggcgcgtttatgctgctgcgtgtgcccgcactgttgcagtgtcgtgacaaacagggcaaggttgggtttgaaagttcctactacatgtataaagaagatattgagctgtcgctgcgtttaaggcggcagggatggggcgttgtcgtttacaacgaagttcaggcatatcactgccgtggatggaacggcgagcgtaaggatgtgccttactgggcgcgctggcactcggccatcaacgacgttgacgttgcccggcgttataaatggcgggctttgccgtatgcattggctaagcttgcctgggtgaagtttgttgaaaaaaaataa

SEQ ID NO: 453576 - DNA, 897 bp, Serratia marcescens
atgactgctgaatcaggtgttattgaccaggatgtattgcctaaggtcagtatttatatctcaacctgtaatcgcgttgaccggttgaaacgagcggttcaatccgtcttgaatcaggactatcctaatatcgaagtgctggtctgtgatgacgcctcggttgatggcaccgcagactatatggcggaattgtgcgccaaagacgaacgcgttcattatttacgtaatgaaaagaatatgggggcctgcgccaccaggaatcttggtatctttaccgcatccggtaagttcattgccggcctggatgacgacgatgaatttaccccggatcgcatttcgttcctggtcaaaaactgggatgaccaatattcattcctttgctgtaattttaaagaagtctactcggacggctcgcacaacatttactacaaacaggatgagcctctggttgcggattatcgcgcattgatgttcgataatatcgcttcaaaccaagttttcacgttaacgaaaaacctgcaggatattggtggctttgatacgcgggtgcgccgcttacaagactgggacacctggctgcggcttgcgcatgcccatggccctttcaaacgctttcccgagtacaaatatttaatgcaccatgatcatgcaaagaatgaacagcgtgtatcgaaaagttatccgctgagcagcgctttggctgatttactggagcgaaatagcaacatttatgtgggtgctgatgcgaagtatatgcagtttatcgtagcatctacagataaaagcgcatcgttttctgaaagtatctattgggctgttaaaaagacggcgcctaaatatatcgtaaaatatattcttaataggctaaatttgaatcttgggttgattaaatcataa

SEQ ID NO: 453577 - DNA, 867 bp, Serratia marcescens
atgaaagtattgctgacgggctcgaaaggccagctgggcagctgtttccaggatcgccttcctgaaggatggcaggtttgggcaacggacgccgatgtacttgatatcaccgatttagagaaggtcaaagcggcggtcgcggagtttcagcctgatgctatcgtgaatgcggcggcctatacggcggttgataaggctgaacaggatcgtgagctggcggcgttgattaacgttgtcgggccgaaaaacctggcgctggcggcgaaagaagccggcgctcggttggtgcatgtctccaccgactatgtgtttgacggtaaggccagcgtcgcctacagcgaaaccgatgcgaccaacccgctgggcgtttacgggcaaaccaagctggatggtgaaatcgccgttgcagaggttttacctgcatcagtgatcgttcgcaccgcctgggtatttagcgaatacggcaataatttcgttaagaccatgctgcgtttggcgaaagaccgcgatagcctgggcattgtggccgatcagcgcggttgcccgacctatgccggcgatattgcgcaggcaattatcgatctgctgaagcaaaatgccgaaggcggcgtttatcacttctgcggcgatcgagaagtgagctggagtgatttcgccaagtcgatctttacgcatgcgcatcagctgcagctgctcagcaaggtgccgcaggtggctgagattaccacggctgactacccgacgccggcggaaagaccgcaatattcaaccctgtcctgccgtaaaataaatgccgccggcattgcctcatccgcttgggaagaggggttgcgtaaggtattgattgatatcaaaaacaatcagtag

SEQ ID NO: 453578 - DNA, 921 bp, Serratia marcescens
atgcgatatataattgccgttccgacatataatggaggggctgtttggcgagagtcagccaaaaatatcatagcgtttggtgcggaaagtcagtttgtttatgtgatagattcaggtagtaaagatgacacgttaaacgtggcgaagtcgcatggttttaaaacgctgtctattgagtcgaaagattttaaccatggtggtacgcgaaatctagccgtggaaaataatatcgataatgccgatgtgatcatttttctgacgcaggatgctataccgcaacctggctttttggaaaagatcatggcggcgtttgacgatcctgccgttgcctgtgcctatggccgccagctgcctcatgttgatgctaatccgctggcgcgacatgccagaaccttcaactacggtgcgacaggatatgtcagcgatatgggcagcaaggatacgatggggataaaaacggtatttacctcaaactctttctctgcatatcgcgtatcaacctttaaagaaattggcggtttcccatccagcaccattctggccgaagatatgtattttgccgccaaagccgtgatggcgggctataaagtggcttactgtgctgatgcggtggctcgccattcccataactatagcccggccgaagaatttaaacgctactttgatattggtgttttccatcaggatgaagcctggatacgtcaggcgtttggcggagcagggggggaaggaaagaaatttattctttcggaactgagttacttattaaaaaatgcgccgctctggattcctacggcatgtattaataacttctccaagatcgtcgggtacaagcttggccaaaactacaaaaagttgtcgcctgcgtggagaaaaaaattaagtatgcataaaagatattgggatagtgtttcaaactaa

SEQ ID NO: 453579 - DNA, 471 bp, Serratia marcescens
atgttgataagatctataggcgtgagaggaaggttagttctgttattgacgacctgcttttcaattgcttatgtttcttggttgttttttagaccggtagagatcgttgccgttcatcagtatgatgattttagctttgtgttggtgaaaaacttccctcctaccgacaagggtaagttcgattggtggatgtctaatcaagatatgttggaaaaacactatggtgttccccagtctacatcctctggtttttttgtcattaccttctgggattttagtgatggttataaagaggcgggtaagtacgataggctctgtttcaatgatatgccgacaaataaaaaatgcatcgataagaataagttatttaccgttgaaaataataaaaaaaacgaattattgtttactgttgacgatggcaggtacctgatgaaggcaaatggtgaaaccatcaaaataaatagggaataa

SEQ ID NO: 453580 - DNA, 465 bp, Serratia marcescens
atggctgttataaataaaaatagaaatacgtttttactattggtaatcggcgttctaaccgtttatatcgcctggcggtttttacgcccggtgcaaatcgtggcagtacatgaggataaacacttcagctctgtattggttaaaagctttccgcttaccaccagaggaaaaatagagtggtggttgcagaataaggagatgttaaaagagcgctatggtatccccaaaccggcatcctatggtaatttcagcatcactttctggctgtttggtgacggctataaagaagaaggtaagtacgacagacgctgttttaatgatatgaagacaaacattaactgtattgagaaggatatcgttttctctgtaagcaagagtaagaatcttggcgttgtttttattgtggagcacgggatataccgaattgataaaaacggtaagataacaaaggtaaatatagactaa

SEQ ID NO: 453581 - DNA, 609 bp, Serratia marcescens
atgaaacgctgtgtatcattgctgcttgcggggatggggtattgcgcgctggcgcaggctgcgacgccgaatgccgacggtggacgggtcgattttctggggaaaatcaccgacacctcctgcaccgtttcggtcaacggccagggcagcgacgccaacgtctacctggcgccggtatcgctgcaggaagtgcataaccgcggcgccggcgcctacctgaagccgaagccgtttaccattcagctgggcaactgccagataagggtgcgcatgatggatgaggatgaggggccggacaggatcagcgtcagctgggtgggcggtaatctgctgcaggggggcaatgaggacgccggctacctggccaacagcttgagcgacggcgccagtaatattgcgctggccctgtcgataaacggcaacgacacgctggacaagacgaataaaattatcccggccgatccggatcagaacagtgtgcagccggaaatcggcgccaaggatatcggcacctttacctactacatcggctatgtgacgcagacgccgaagaaagccacctccgggccggtgaggagctacgctacctatgagattgtgtataactga

SEQ ID NO: 453582 - DNA, 732 bp, Serratia marcescens
atgatgatgaaatctctgacgttctgtctttgcgcgctgctcggcctggccggtgatgcctgtgccggggtgattgtcgagtcgtcgcgggtggtgtttgccggcggcgaccgcgagcgtgcgctgctgctggtcaacggcaatgactatccggtggtggtgcagacctgggtggatgacggcgcgccggacggcacgccggaaacggcgggcgaggtgccggtgatgccgctgccgggtattttccggctggagccgggcgagaagaaaaacctgcgcctgctggcgacgcaggcggcgcagccggcggatcgcgaatcgctgtactggctgaacgtgtatgagatcccgccgaccgatgcgcgtctgccgccgtccgtatcggcgctcaaggtggcggtgcggctgcagctgaagctgttctaccggccggacgggctgcagaaaaaggcggcgcggctggcggccaaccagcgtttcagcctggcgcggcagccgggcaggctgatgctgacggtaagcaacccgacgccgctgtacgccacctacggccaggcgcagctgaacggcggcggccggcagacggcgctggcgatcggcatgctggcgccgttcgccagcaaaacgctggatgtggatgagcgcagcatcggccggccggagagcgtcagctatatgttgatcgacgacgatggccaaggcgttaccggcagcgccgcgctgaagccataa

SEQ ID NO: 453583 - DNA, 771 bp, Serratia marcescens
atgaaatacagaattaatggacagattcttttcgatacggacagcggcagcctgggattagaggattttccggaagaatccctggctatttcaaacccgtcaaagcggctattgcttttacttattgcccaccacggcgagcaggtcagtcgggaactgatattccgcaaggtgtgggatgattatggcatggtgtccagcaataataacctcaaccagtgcgtgagcaaattacggcgggtgttaaaaacgctgggtattgatgacgaggtcattattaccgtccccaaagtcggctttatgctggcgcataatatcacgctggagaaggaagaggcggccatcacgccgccccagagcgtagccggggaacgggatggggggcgcgccttgttccgatgggccgccggacggcgttggcatcccggcgtggcgctgggtgcgctgctgttgctggttatctgcatcggcacctggctgatctatcgcaacagtgcggtcagacaggaacgtttaattggcgaggtgaataactgcaaggtgtttttatcggcgccgcgcgtcgcgatgaatggcaatgcggagcaggttaacgatatgctggcgtatattaacgcccatccgcagcagtgccgcaatgacgagtatttactgctgctcagcagtagtcgggtgggcacctacattaaaggcgtttcccggctgtttattttgaaatgccgggtggcacgtgaataccgcattgaggtttgccacagtcaaaaagagtag

SEQ ID NO: 453584 - DNA, 540 bp, Serratia marcescens
atgaattcacccttagtgaccaccgccccccgcctcaccaccgaacgcctgattctggacgcttacaccctggatgatttcgacgccatcgcgacgatgagcgccgatccgcaggtgatgcgctatattggcggcggcgccgggcgcgaccgcgaagagagttggggacgcctgctgcgctacctcggccactggcagctgctgggttatggttactgggcggtgcgcgagaaacacagcggccaatttatcggcagcctcggcttcgccaactatcagcgcgagatctcaccgccgctggaggctccggaaatgggctggctattgtgcagcgcggcccagggcaaaggctacgccacggaggccctgcgggcggcgctggcctgggggaaggacgcactgccgggcggcagaacgcagtgcattatctcaccacataaccagccttcaatcagggtggcgcacaagattggttttcgtgaaacccaccgcgccgagtaccatcagcggacggtgctggtgatggagcagacgctctga

SEQ ID NO: 453585 - DNA, 876 bp, Serratia marcescens
atgaaccatacttcactggaaatcttcagggtggtggcggaagagctgagcattaaccgcgccgcccgacgggtggggcgggtgcagtccaacgttacgacgcgtattcagcatcttgaagaggagctggacgttcagctgtttatccgcgagaaccgcacgctgcggctgtcgccgcagggcaagaaattcctggcgtatgccaacaaaattctcagcctggcggaggaagcgcgccagtccctgcatccccatcatccgggcggcgcgctggcgtttggcgcgatggagtgcgccgccgccagccggcttgcgcagccgctggcggccttcagccgggcgtgcccggcggtgcagctgagttttaccacgctgccgacgcgccagctgacggaaaaggtgcaaagccgggagctggactgcgcgctggtggcgctgccggttaacgaggaaggcgaggcgctgtgccccgaggggctgtcctgccagccgatgtttgtcgaacggctgatgctgctgcagtcggcggcggcggcggaaggctccgcgcccagcagaaaactggccgccttcgttgacggctgcacttaccgggagatcgccctgcgcctgctggccggtggaaagggggggcggccgcccgaggtgcaggcggtcggctcttatcattcgatgctggcctgcgtcgcgtcgggcaactactgctgcctgctgccgcaaagcgtgctgcagctgctgcaactgccgccggggctgtccgctacgcccgccggcagcgccgtcacccagtttatctggcggacggagagccattcgcccgccgttgacagtatgcgccgcacgctgctggcaacctctgactgggccgggagttag

SEQ ID NO: 453586 - DNA, 1314 bp, Serratia marcescens
atgccgttacgttttacacagttaaccacccgcaaggctgccgagctggccgccattgaacgcgccgttgccaccatcgcgtttactcccgacggcacgatactgcgcgccaacgatctgtttctacagctgatgggttatacgcatcaggaggtggtcggccagccgcaccgtattttttgtgaggcggcgtatgccgcaagcgcggactaccggcggcactggcagcggcttgccgaggggcaggcgattagcgacacggtgcagcggcgacggaaaaacggcgagccgctgtggctgcagggcacctatacgccggtgttcgaccgccgcggccgggtgtgcgagattatcaagattgccagcgacgtcagcgcgcgcatcgtgcgtgaccaggagcatgtcagcctgctgaccgcgctgagccgctcgatggcgatgatcaccttcagcccgcagggcgttattttagacgccaacgacaatatgctggcgctgatgggctatagcctggcggaggcacgcgggcagtcgcaccgtatgctgtgcccggccgaatatgtcgccagcgccgactatcagcagcattggcagcggctggcgcgcggcgagtatattaccggccggtttgagcgggtgaaccggcagggcgcgcgggtctggctggaagccagctataacccgattctggataacgaagggcgggtggtgaaggtggtgaagatcgcgcaggacattacccgtgtgatgcagcagcaacagcaggaggaggcgctgatgcgcgacgtgcatcagctgtcgctggataccgaccgcagcgcggcgcagggggcggacatcgtgcagcgggcggtggacggcatgcagcaggtggaaacggcggcgcagcacacctcgcagctgatcggcgagctgggggactattcacagcagatcgatacgctggtggcggcgatgcggaaaattgccgcccagaccaacctgctggcgatcaacgcggcgattgaggcggcgcacgccgcggagcacgggcgcggctttgcggtggtggccggcgaggtgcgtgcgctggcggaacagtcgcgcaaggcggcggtggagattgaaggcatgaccaaggcgatccagcacggcgtggcggcggcgattgacggcatggcgacctgcgtggcgcaggcgggcggcggtgtgacgctgacccgcgacgccggcgcggtgatccatcaggtcaatctgggcatgcaggacgtggtgaagctgatgcaggcgttccgcacggtcaagcaggaagaaacgctgacggacgcccgctga

SEQ ID NO: 453587 - DNA, 795 bp, Serratia marcescens
atgctacacgtaaagattttcgaaaaaaatgaagtttatggcaaacatgtggtcaacttactcagcgaactgcacgaaaaaatattccttcctcccaataatatcacgtcagatgacatcatctcggcgtatattcaccccgatgcggccatcagcaaaattgccatttattatgatgataacatccccgttggctttatgtgcatgcagagatacgaaacagaaataaacaacaaaaagtcaaacattttccgcagtcaggttgggttattgaaagactatagaaataaaaacatcgttaaattaacctatttaaaatttgtgatttcagaaatgttactcaccccaagaaaatcactcttctttgagctatgcgtccatccctccagctattgttcaatgctcaagaaaggttgcaacagaaataaagtatggccgaccaaggaaaatgcacagcaaaatattccgatgaaggatctatgcgagacattgctcaataagtttgatctggagataaaaagagaaaatggcgtattcattcataacgatggactagggccaacccgcgttgaaaaaaaaccgcaaggtgggataagtagcgacgctcaattttttatagagacaaaccccggctatgtaaacggcgatggactggccatcattgtaagcctttccgtgaaagatatactggttaacatcttccaccagatgctgagtaaaataaatcgtagcttgatgacgaggccgctgcatggccgagaggaatccccgcaagagaaaccgaatgaaatataa

SEQ ID NO: 453588 - DNA, 906 bp, Serratia marcescens
atgcgtccggctcttgattttaataccctgaaagtgttcgttgccgtggttgaaagagaaagttttgttggggcagcgaagctcctggaaatgccgacatcaaatgttagccgcagtatttctcagttagaagaaaagctgaatattcagctgattgagcgcagcactcgtcatatgaagctcacccaggctgggcatctgctctatacccgggcgaagccattactggaggcgctggagcaaacggagacagagttaacgcagcggcaaatgcagctcaagggcccattacgcatctgtatccccaatgaggtaggcccggccttgctgggttctgcaattgccgatttcgcctgtctgtacccggagctggagatcagctgcgtcaccaatctgtcaggtttcgaatccctgcgggacgatctggatttagctgtcatcgctacccgtggtcagatggatgacagtgactacatcgcccgtcatctgctgactatcccttgcaccattgttgccgctcccgccgttattcagcgttatggcacgccttcccatatccggcaatttgaagaactaccctgtattacaacggtaagtgcgttgaaaggcgctccctggcagtttatcaataaaaaggggggattcgagaccatcaaggttaacgggcattatcgggtaaacagcggggagatggcggggcgcgctgcggtagccggcgtcggctttgcaattctggcgaaacaggcctgccaaccctacattagcgatggacggttaatcgagattgagtttgaacaggcggtagcccccttgcagctgttcgcaatttattcagatcggcgttacttgcccgccaaaaccagggcgatgattgattttatacagcagaaattgagcaatatgtag

SEQ ID NO: 453589 - DNA, 1203 bp, Serratia marcescens
atgtcactggtcacacagacgtttaatcataaaaccctcatgcggatggccattgttatggcgtttatccagttcactaatgcgctggagtacatggcgttaacgccggtttttgcttttatggccaacggctttgcggttcccgtatcattttctggctatgtctccggtatgtacacgctgggtgcggtcatttctggcgtgatggctttttattggatcgagcggtttaataaaaaacaatttttactcattaatatggcgctgctgggaacgctcacagggttgtccacgatcacaacccactttgacactctgctggcactgcggttttgcgccggattggttggcggtacgacgatgggagtgggtatcagtattctgataaatgctgccccgacaaacttacgcggaaaaatactggcaacggtgattgcctcattttcgctggtgagcattgtcggcatgccaacgatattatttttatgcacgcactacggttggcacacggcgctgtggttaatcagttcactttgcctattgtctttaccgctgataatacttgtcctccccaaggatagcgccccatcaagcgtaaaggccaaactctctcttgatactcaaaccttacttttcgcctcttgcgcggcgctggtacagtttagcccgatgctggtcatccccattctgacgccgttaatgacgcagtatatgggcgcacaacaaagcctgttgcccttattattcttaagcggagggatagccggttatctgtccacaaaaataaccggcgcactgacctcgcgtttatccgcgctgacgttggcaacaatttcaacgctgctctttgtcgccagcctgctgattccggcgatgggctatgataatacttttctctttatcatcttatttcttgccgcctcatacagccggctggtttgcgcctcgtcggttgctatccactaccctgacaatcaacaacgagccagtttttcctcactacagacagccattatgtccctgataaccactctcgccttctttctgtcttccttattactccctgaccaggggataacaacgcaaaatctgcacgggctgttggtggtaagtgcagtagccgcatctggatttcccgtcctggtcatcatactgcaaaagaaactggctaaacgtacccccgatcgtctcatcattgattag

SEQ ID NO: 453590 - DNA, 1059 bp, Serratia marcescens
atgaacaagatgcagcaacagaaggtcgcgctggtcgccggcgccggcggcgtggtcggtagtcaactggtcagcacgcttttgcagagcgggtgggaagtcattggcctgagccgtcatgcttcctcccatccagccggcattccgctggttaacgtcgatttgctggatgcacagcacagcgcgcaggcattgcagccgcttggtaacgtcagccatatcttttacagcgcctgggtgaacgccgcgaactggacagagatggtggagccgaacgtcgccatgctgcgcaacctggtgacgaatatggaaaatatcgcgccgctgcagaccgtcagcctgatgcagggctacaaggtatatggcgcgcatctcgggccattcaaaaccccggcgcgtgaaagcgacccgggcgtgcccggcgcagagttcaacgccgcccagctcgcctggctcagccagtttcagcgcgggaaagcgtggcattggaatgccatcaggccgggcgtggtggggagcgcgctgcccggcaacacgatgaatctggtgctgagcatcgcgctgtatgcgtcgctgtgtaaggcgcagggcttaccgctgcgctttcccgcttcagaacacacctggcgcagcatcgttgatcataccgacgccgtgctgctggcggaagccacgcagtgggcggctacttcgccgacggcggagaatcaggcgtttaacgtcaataacggcgacgtctggcgctggagcgagctgtggccgcgcatcgcgcagtggtttgagctggagtgcgcgccgccggtcaggctgtcatttagccagctgtttcaggactaccgtgcggcgtggcgtgaacttgccgcaggacagcaactggcgcaggcggatattttacggctgagcgacgggagttttgccgattttgtctttggctgggattacgacatgtttggcgatggcagcaagctgcgccgggcaggcttcacccgcatgcaggcaaccgacgagatgttcttcagcctgttcgcgcagctgcgggcggcgcgtattatcccctga

SEQ ID NO: 453591 - DNA, 888 bp, Serratia marcescens
atgaataataagctcaacgccattgctaccttcttacgtgtcgcagacgcgggctctttttccgccgcggcccgccagctcggcatgaaacagtcggcggtcagccagcagattgccgcccttgaggcggagctcggcgtggtattgctgcgccgcaccacccgcgtgatggcgctcaccgagcagggcgagcgttaccgacgcgatatgacgctggtgctggacgccatgcgcgaagcggaaagccgcctgaacccggccgatcatcaatggcaaggcagcgtgcatctgcagttgccgagcggtctggggacgctttttttaccgcatctgctggcgctgcagaacatgcatgcggggttgcacctgacgctgtcgctggatgaccgcatcgccgatctggtcagtgaaggcgtggacgtcgcgctgcggctgggcaccgagccgccggaaccccacgcggcgcgcatgctggcgcgcattgaaacggcgctgtttgccgcccccggttttgccgcggtgcatactctgagcgagctggcggcgcatccgcacgtgcggttcagcggcatcgcgccggatgccccgctgcgcctggtcagcgctggtgaaactgtcgatgtgaaagtgaataccgtgttccgggccaacaccagcgaagcgctgctgcaggcgataaaatccggcgtcggcatcggcggcatgcagctgccgctggcggccagggcgctgcagtctggcgagctggtcagcgtattgccggactaccggttgcctgaccgcttcctctatgccgtctatcccgacgcgcgctttatcccgcagcgggtcagaagcctcatccgcgcgatcgagcaattgctgcctgagataacggggaatggctga

SEQ ID NO: 453592 - DNA, 1257 bp, Serratia marcescens
atggaaacaacccatagccatgacgcacaggcgctgagcgcaaaaaagaccgtcgaggcctatctggcggcctttgccgcaggcaaggtggaggatatggtcagcctgcttgatgacaatgtcgtgtggcatattgacggcgtgccggaggtatccaccgtcgggttgttgcaggggccggagcaggtcaggcgctggctgcacgcttttccgcagcacttcaggccgctggatttcgccatcagtgacatgattgcccatcatgacagcgtgctggtgctgggtcgctttcgtcatatcgtactgagtacgggaaatgcggtgggcagcgatatgatcattcattttaaggtatcggcgtcgaaaattacccgttatcaaatgtttgaagattctgcgctgcttggcagggcgtttgacgctgacgatgaatggcagcttcagcaggtgagaattaacggcacgctgtatcgttaccgcgatatcggcgaagggccgacgctgctgtttgcccacgggctgttcgccaaccatgaaattttctctgcacaggttgcggccctgagtcagtcgtaccgctgtattgttttggatatgccggggcatggccagagcgagtaccatcccgccggctggacgcttgacgacctgagcagcgatttggcgttaatgattcaggagctgtcgctgggcaaagtgaccgtggttggtcagagtcagggcggcatggtcgccatcagactcgccgcacgctatccgctgcgggtgtccggtttggtgctgatcggcaccagcgccagagcggaatacccggaacgtctgccaagctggcgcaggcagcgcggcattctgctcagcggttcagacgctgagtgtgaagatttatttaaacgccttcagggttatatcaacagcgaacggtggttgcagaatcatcaggcagaggccgcccgggagcgccgcatcatgctgtcgcacgatcgcgcagggttagcgcttgcattggatgccgcggtgtttgaacgcggggatatcaccgcgctactgccagatatcacggcgccgacattgattatctgtggtgaacaggacacggccacccccgttgcactgagtcaggagatggcgggcctgatccctgccgcccgtctgctgatcctggccggcacgggtcatcatccgccgaccgaagcggcgcaggcggtaacggcggcgattgcagaattcctggcagtgaaacgccctgattctgactga

SEQ ID NO: 453593 - DNA, 876 bp, Serratia marcescens
atggactggaacgacttacgcttctttttagccgtcgcgcgcaccaacagcctcaccaaaacggccgctaagctgaacgtcagccagtcgacggtgtcacgcaggattagcgcgctcgaaagcagcttacagacctgtctgttcctccatcatcagaccggctactttcttaccgatgccgggcaggaggtgctccgatatgccgaagaggtggaaggcaaggtcataacgctggagaaaaaaatctccggccgggatctgacgccagccggaaccgtacgcctggcgacggcggtgacgctggcaaaccacctgattattccggcgctgccgcgctttcaggcccgctatcccggcatcacgctggaactgatcaccggggtcaataccgtatcggtggtgcgcaatgatgccgatatcgcactgcggctggttcgtcccgagcagaacagcttaaaagtacgcagggccggcgtggtgacctctgcggtgtacggcgccgaggcctatctgcgcgcgcatcctgcgcccgccgataacccaacggcaggccgcagctttatcacctgggacaggtcattcagccaccttcccgccgccaaatggctcaatgaacgcttccccgaccggacgtcggcattagccttaaccagcctggtcacccagatcggcgccgtaaaagcgggcctgggactggcggtattgccctgctttattgccgcgcagaaccacgacctggtggaggtcatccccacgcggcaggtgtttgccgaggaactgtggctggtcagtcataccgatctggtcgcctcgtcgcggatcagggtcgtcgccgactttttaatggagattatcgccgaggcgcatctggcataa

SEQ ID NO: 453594 - DNA, 993 bp, Serratia marcescens
atgtctaagcaggaaattttcagcgaacgctttttgatcccttctgatactgccggtatcgcgctgaacgttatcagaaaatgtccggataaaaaccggagctatgatgagtcaaacaccttattaatggtgcacggcgcgacatattcgtccggcagtctttatgatacgccggtggcgggaaagtcctttatggatcatctggctgacgccggattcgatgtgtacgccgtcgatgtgcggggctatggcggctcaacccgtccgcaggcgatggcagagccggcactgccgggtttgccgctggggcgtaccgagacggcgctgcgtgatttcacctatgccgcggactttctgttgtgcaccagacaactgaaacggcttaatatttttggcatgtcctggggaggcaccattgctgcaacctatacggcgaaaaataatgaaaaagtgcgccgtcttggcctgctcgcgccgcagtggctcagcaataaaccggtgcccattgatagcggggaagcgttgggcgcctggcgcatcgttaatatgcatgcggcgcagcggcactggcttagcgcagcgcctgccgacaaacgtgacggcctgatccctgaaggcgcttttgacgcgtgggttgcgcataccctggccgcggaaccggacgccgaattacgtgcggatacctcgtttaaatcaggcaatggcccaattcaggatatccgggaatactggacggtcaataagccttactaccggccggaggatatacgggttcccgtcattctgatgcacggcgaatgggatattgatgtccccattgatttgatgcaggcgtggttcctgcgcgcaacgggttcaccagaaaaacgctggttggaaattggtgaagcgacacacatgctggtattggaaaaaaatcgtttagcggcaatctatgccctgacggactttatgtcggcatcacgttcatctatagcagacgcggataggtga

SEQ ID NO: 453595 - DNA, 885 bp, Serratia marcescens
atgtctgctattacgacccacaaaatcggccgcgcgcggataagcaaaatcccggagctggcgttggaaaacgtagcgggatcgtttctctatccgcaatggcaggatgatatcgcgcaagatgcggccaaggcattgccggcatactgtttttccggcgagttttcttctctggcccaaagcacccatagctggttgctgcaggtcgacggtcttaccctgctgattgatacggcgtccggcaacgggaaatcgcggccgcgcaacccgctgttccaccagttggacgtgccgtatctcgcccggctgcgtgaagcgggcgtcgagccggagcaggtggattatgtcttcaatacccatctgcacgtcgatcacgttggctggaatacggtgctgagcgggggacgctgggtgcctacctttccgaacgcccgctatatcttttcgcagaaagagtttgtttattacgccgatcctgacaacgtacgtcagccgagcgagttcgtccatgaagacagcgtagccccgattgttgccgccggtatggggacgctgataaacggcgatgacgatttcccactggcgggttttcagctccattcaacaccgggacatagttacgatcacctgtcgctgagttttacctcggaaggagaaacggcctttttctggggcgacgttatgcatcatccgctacaaatagcgctcccgcagtggaattcggttttttgtgaatttcccgaacagtccctgcattcgcgccgcaaggcgctggagttcgccgtcgcgacgcgggcaaccgtcttcacgacccatttccccggcgcttcagctggcaggatcgaaacgaatgccgaaggccaattacagtggttatcgttataa

SEQ ID NO: 453596 - DNA, 885 bp, Serratia marcescens
atgatgcgctctttcgtccgggtggtggattccggttcttttgtcagtgccgcccggctgctcaatataccgaaatcgaccgtcacccggcatatccaggcgctggaacatgagctgggcgcaaagctgctgaaccggacttcacgtacgctaaacctgaccgaacaggggcagatttactatcaggggacgttacggctgctggaaaacctcgacattctggatagcaacgttcagatgtccgccatgcaaccgcggggaaaagtccgcgtagaggtaccgaatgccctggcctattgtctggtgataccggcgttgcccgattttctggcgcgttatcccgatatccagcttgagcttagcgtcggcaaccggacggtcaatctgatcgaacagaatattgactgcgttatacggattggagagttgtataacgacgccctgattgcccgctctttaggggaattggcgcgggtgacctgcgccagccgcagctaccttgaacgcagcggacagccggcgcatcccgccgatctggcgcaggggcatacgctgatacagattgtttccccccgcaccggccagagggtggtgaatgaactgtatcgcgacaggcaggtggaaagaataaacgcgcagtggcagtttgccgttaatgattcaatggccgcacgtacggccgcgcttaacggtttaggcgtggtgacgacataccgctttctggttgaggaatacctgtcaaacggccaaatggtcgaactgtttgctgactggaacatccagcgcataccggtgcatatcgcctggccggaaaatcgccagctgccctctaaagtccgcatttttattgactgggccagaagcctgttcaaccagggggaatga

SEQ ID NO: 453597 - DNA, 300 bp, Serratia marcescens
atgctaaaggtcattgccgaagattttatcaaacccgagtgcgtcgacaccgttctccctttataccgcgaactcatcgcggcaacgaagcaagagccccggtgtattgcttatgatttgtaccgggatgaaaaggatcctgggcattttatttttattgaagagtggcctgaccgggcagcactcgatgcacattgcgccagcgagcattttacccggcttgttcctttgattgatcaatacgcgcgtaaagcggcgcagtatatactcatggatagtcaggtgacgcctgagagataa

SEQ ID NO: 453598 - DNA, 1194 bp, Serratia marcescens
atgtccacagtaagtcttaaaacatcatccaataaaacagatgcgcactggggggccgtgtttgccatgacgctttgcgtttttgtgctaatcgcttccgaatttatgccggtcagcctgcttacgcttattgccagcgacctgcacgtcactgaagggctggcaggccagggaattgccatatccggcgcgctcgcggtactgaccagcctgtttatctcccgtactgccggcgatctgaatcgcaaatatcttctgctcgggctgacggtcttaatggccatctcgggaatagttatcgccatagcgcctaactatccggtttatatgctggggagggttatgattggtgtcgtcatcggtggattctggtcaatgtcggctgcaacggccattcggctcgtaccaaaacaccaggttccccgcgcgctggcgattttcaatggcgggaacgcgttggcgaccgtggtggctgcgccgcttggtagctatctgggggcgaccgtcggttggcgcggggcttttttatgtctcgttccccttgcgatagccgcgtttatctggcaatgcatcagcctgccttcgatggaaaacgataaaaaacagaagccgcaggggtctgtgcttcgtctgttcagagtatccatcgtgcctgtgggactgctggcctgcggactcttctttatggggcagtttgccttatttacctacgtgcgcccctttctggagaccgtaaccaatgtggcttcttccggcctctccctgattttgctcgcaataggcgtagcaggatttgtcggcacaatgggcatatcgacattcctgaacgccaggttttatcagaccttaataatgatccccctgcttatggcagcgattgccggcacgttactgttggtcggacacagcatctgggcggttgccgttttgctaagcttgtgggggctgctggcgacggctgcgccaacgggatggtggacctggatagcacgggtgctacccgaagatgcagaggcgggtggtggtcttatggtggcggtgatccagctatcgattgcgtttggttcaacggctggaggtctggtatttgacagtctggggtggcgcagtgcttttggcttgagcggtttgttacttctgagtgcggtagcggtgacatttctcacatcccgtcaaaatagtaaggcgcactag

SEQ ID NO: 453599 - DNA, 858 bp, Serratia marcescens
atgaattcaataattatccccgtcaaccaagacgaatttctggctgccacggtttgggagagaaacaatgccaaagcggtggttatccttcacccagcaacggcggttgtacaggcattttataaggacttcgcagagtatcttttcaacagaggattcagcgttctcacttatgattaccgcggcacgggtctttcgaagtccaggagggccaaccactacaaggtctcaatgtcagactggatcgagcaagacgtcggatgcataacagcatgggctaaagcgcgtttcccaggcgtaaacctgctggctgtagggcacagtgtgggaggacatgccgttctgctttcgtctgccacccaagccctgcaggccgcagtcattgtggcctcccatgccggtgtgacgagcacgataacacgaacggtagaaaaggtgcgtgtctggtgcttattacgtgttctggccccggttctttgccgtatcttcggctacatgccagccaggcgcctgggactgggcgaagatttaccggctccggtgatgcgtcagtgggggcgctggagcgcaatgccgggttatttctacgacgatccggactggaatgcacgccagcgagcaggtgagataacgttacccgtcctggtaatgggttttgatgacgatccctgggctaaccctgaagcagtttcacggttgttggagccagtgcaaaacgcaaaaatagaacgccgcgagatacggcacgcagattttggtctttcgtccattggccatatgggcttttttcgtgcgcgatgtgcggacaaattatggcctatggtcggtcaatggctggagagtcagtgcctggattga

SEQ ID NO: 453600 - DNA, 474 bp, Serratia marcescens
atgactgacagcaatattcctggtacgcctgagcacactaacttcccgaaacttggtgattttttgtgctttgcaacctatacggctaacctcgcattcggcaaggcttatcaaccctatctggctgaactgggcttgacttacacgcaatggctcacactgctggctctgggagaagaggatggccagactgtgaatcagttaggtgagaaactatttttagcttccagcacactgacgccattgttaaaaaaccttgaaaaaaaggatgttgtacttaggttgcgttcaaagacagacgagcggaaagttcgcatttttcttactggtggtgggagagaactgctcaaagccagccatcgctgtctggatgtttttcattgtcttggactgtctctggaagaagttcaggtgctgcaaaaagcaattatcaggttacgggataatttattgaatacatcagcttcagactga

SEQ ID NO: 453601 - DNA, 789 bp, Serratia marcescens
atggctattgttaaagattatctggagaataatttcaggcataatattaaaaagggaaacctgcaattaggtataggtctcgagatcccctcagctgatgtggctgaagttctggcaaccagtaaatttgactggctgttcattgacggtgaacatggtgctcactctgtggaaagtatcgttgctgcagcgcgggcgattgctccatttaatatgacaccggtagttcgtgttggtggccccagtacgggattaattaaacagttaatggaccaggggataaacaatattatattccctaaagtggaaacaaaagaagaagcagaacaaattatgtactggtcttcttttgcccctcgtggtaatcgtggtatgggtgctcaggcagttcgcgcaggattatatggtcgtatacctgactatttggaaagaattgcccatgaatcagtgatgattactcaaatcgaaagtcgtaaaggtcttgagaatcttgaggaaatttgttctgtaccgggtattggtgccattttcctgggcccaattgatttggccgttgatatggggcatgggttaaatattttccatccggaagtcgttgaggcgatggaatatatgattaagaaagctaaatggctcggtattcctgtaggaacaatagcagtcactccggagcaagcaaaaaattataaagacttaggcgtttcattcctggctgtaggtggggataccatgctgcttgccagtgcagcggatgagacccatcagaattattctgagagccttaagtaa

SEQ ID NO: 453602 - DNA, 711 bp, Serratia marcescens
atgactatgaatattgaccaacccgaaacatcatccgatgagacgctgtcattcaaagagactgttcgcgcgcgccgctctatccgcggttttctcgacaaaaccgtgccgctaagtattatacgtgaggtgctggaggacgcccagaacacgccgtccaactgcaacacgcagccctggtatacccacatcgttcgcggccaaaagcttaagcagctttccagtattctccatgccaaaaatgatactggtgagttctccccggatttctctttcgaccagaaccacttttacggcgaatatcgtcaacgtaacgatgcgatgggtaaggcctattacgaagccatgaatattatgcgcgaggacaaagaaggccggcatcgtgtggcggcaatgaacttctcgtttttcaacgctccgcaggcagcattcctgttcatgccctcatttggcgacaacgtccgcgttgcgggtgatatcggtatgtatggccagaccttcctgctgtcgctcgcggcacgcggtctcggtggtattcctcagacctcgctcggtttttttgccgatcccatccgcgaattcctgggcatttctgacgagttcaaacttctgtttggtatctctttcggctacccggatgagtcagcccccggaaatcgcgtctacatggatcgcgtgccagtcgacaccagcgtgactttccacgattga

SEQ ID NO: 453603 - DNA, 756 bp, Serratia marcescens
gtgaagggtttatcaaaatatataaaatctttggatttagctaagtactatgtctatgccttttatgacacagaagatgcggccaagaagccattttacattgggaaagggaaatcgggccgctgccttgaccacattaaacatcccgatgattctccgaagtcagagcgaatcaccgagcttatggcaaaaaaaagtctgggtattgatattcttcgtcacggcatggatgagccaacggccaagcttgttgaggcaacgtgtatcgatctcttgggtgttggtgagctgaccaataaagtgcgaggaagcagctccctgatggggcgtatcactttggatgagctccaacacttgctgttgcaggaagagacggaaatagctcccgaacatgcaggactcgcttttcttcttaacagtacctataagtcaggcatgagcccgctggaattatatgaggcgacgcgcggcacctgggcaaaaattcctaaagacgagagccttaagtttgcttatgcaacctatggcggtctcattaaggaagtctacgaaatacagtgctgggtgaaagccggctctcagcaatactttacacgtgatttgaccattagccctgagactaaccgtactgaatttgttggacgaattgcagctaaagaaatcagagatttgtatattggaaagcttatcaaaaaaccacgcagccacgggaatccctttgtgaaagttggcgttgtccaagcgtcagtcgattag

SEQ ID NO: 453604 - DNA, 897 bp, Serratia marcescens
atgcgtaaaaaaatacccagcagcgcttccctgcaggcttttgatgccgctgcgcggcacggcaattttgcccgggcggcagaggagctggcgctgaccgaaggggccattagccgccagattgcgcgtcttgaagctttgctgaactgccgactgtttgatcggacggggagccgcgtaaggcttaaccctgtcggagcgcgctatgcgcatcacgtgcgtgaaacgctcgaacggcttgaaagggatacacagtccgtcatggggatgcctgccggcagcaggagtctggatattgccgctctgccgacgttttccagccggtggctgataccccgtttggccggctttaacgccttgtacccggatataacgttaaatattgcggccagaacggatccttttattctgagcggaagcggctttgacgccgtggttcattttgcacatcccgcatggacgggcatgcgcatgcagtttctgtttcaggaaaaactgttgcctgtatgccatcccgacctgctaacggataagaacctcagcgagccgttaaacgaactgccgcgaattcaccgccggcagaatccggatgcctggcagcgctatgcccgggagagcgggataagcctggataatcccgctcagggcgtgcgctatgatctgcatgagatggccatcgctgccgcaacggcggggcaaggcgtcgcattggtgccgcgtatgtacgtcgaaaatgagttgagcagtggcgcgctcgttgcgccctggccagaatcagacggtctgagcaaaaaattctgtttggtcaaaccggtggaaaccggcgccaatgaagcggcattagaggactttgagcgttggttactggccgaaatcaagactctggcaggcggatag

SEQ ID NO: 453605 - DNA, 555 bp, Serratia marcescens
atgttctatatcgtggaatgttcgtataacgatcctgccagcgaggcagagtggaatcacttttatagtcaggaaaagctgcccgcgctgatctcggtaagcgggttcaggacttctcagcgctttcgcgccgttcaggctggctgccctgcttacctcgccattcatacggtagagggagcggatgttctcaacagccaggattatcggctgaagggaggtggtaatttcgcccgctggcagccatatatcagcgactggcatcgtaacctgtatcagtgtgcagacccggctccggcagtatctccagcggagatcctgctatttagcactcagccgataagcgcgattgaggtcgagcggagttaccaaaggctggacatgcaggtcgtggggctggataactttccgcaacgtcgtatggcatacgttctgccgcgtgaaaaagccgggttattagcgaatatccccggcgtacatctctacgaagcgctgacagtacagttacagggttcggctaaggatcagcaacgagatggcgtatgccggcagtga

SEQ ID NO: 453606 - DNA, 843 bp, Serratia marcescens
atgaaccatccggcctccccgtttcgccaaattggggattttcaggttaccgctctgagtgacggcgctatctctgccagtctggatttactgtcaggcattgaaacggctgaggcggcgagcattcagcaccacgccgggatcgctgaacccggcaatatcccgatcggcggttatcttatccgcggtcggggacgcaccattctggttgacgccggcgccggagggctgaacaacgtcggtgggcagctcaagctaaacctcgccgccgccggagtcagccccgacgacgtggataccgttttattaacgcactgccatcccgaccatatcggcggtctgctggacgctgagcagcgcccggtctttccgcatgccgggcttcacctgcatcctctcgaagcgcaatactggcaggatgatgaaaaacgcaaaattgccggtgagcgcggccagcgtaattttgcgctggcccgccaaacgctggacgcctacgcacagaacctgcgtttttttagcggggaccagatagcggcaggcatcctgcccgtttggctgccgggccacacgcccgggcatacggggttccggattgattcgggtgataaaagcttcttaatatggggggatattgcccactacccgcatattcagtcggcgcgaccggacgtttccattttgtttgacgtagaccctgcgttagccaaagagacccgaagaacggtgctgcaacaggccgccagggaaaaactgatgattggcggcatgcacctgggccacgcgggatttgcgaccattctcatgaatgatgaagggtatcgtatttcctacgctgaagaataa

SEQ ID NO: 453607 - DNA, 459 bp, Serratia marcescens
atgttcactatcaaaactgacgatctctctcatcccgcagtgcaagcgttagtggcctatcatatttccggcatgctggaacagtccccaccagaaagcagccacgctttggatattgaaaaactgcatgacacggcagtgatattttggtctgcatgggaaggggaaaaactcgcaggaattggcgcactgaaaatattggatggcgaacatggtgagctgaaatcaatgcgtaccgcgccggattttttgcgccgtggtgtcgcgaatcagcttttacagcatgtcttgcaagttgcacatgccaaaggcctgcgacgtctaagtttggaaacggggacgcagccaggatttaccgccggccatcaactttatattaagcacggttttgttgactgtgaaccgtttgctgattatcaaccggatccaaatagccgctttatgacgttggttttatga

SEQ ID NO: 453608 - DNA, 873 bp, Serratia marcescens
atgacatctttactcgctctgttgagccgctatgtgctgacgctaattgccgtggcggtggccgcctttctggctgttattttctggcaacactacgcgcagacgccctggacccgcgatggccgggtgcgtgcggatgtggtgcaggtcgcgccggacgtttccgggccggtaagcagcgtggcggtccgcgataatcagtgggttaaccgtggagatgtgctgtatgccatcgatccggactggctgaagctggcggtggtcagcgcgcaggcggatgttgaggcgaagcgtcatgagatgctgatgcgtcaggatgtggccctgcggcgcgccaggatcaaagcgatgatttccggcgaagatttacagcaaacggccagtgcagccaaggtggcggcggccaactatcagggcgcgctggccgcgctggaactggcgcggcttaatttgtctcatgctgtcgtccggtcgccggtttcgggctatatcacgcatcttcggctccgccccggcgattatgccactgcaggagaaaccagggtcgcgattattgatgcgcacagtttctgggtggtgggctattttgaagagaccaaactgcgccatattcacgtgggagataccgcgcatattgcgctgatggggtttgcgccggcgatcgcgggccatgtggagagtatcgggcgaggcattggcgacagcaatgacgatacgggcggacttggcctgccggatgttgaaccgacgttcagctgggtacggctggcgcagcgcattccggtgcgtattcatatcgatgcgctgcccgaaggcgttgagttagtggcagggctatccgcgagcgtttctattgtgcctaagggggaatag

SEQ ID NO: 453609 - DNA, 216 bp, Serratia marcescens
atgatcaatgatgtcaccgtaggcggggtgtttatccccgggctgttggtggtggcatgcgccgccctggtctgcacgctgttgcttctgcctattttctcgtccagcaggctgtatcgccgtttgccattgcgcccgctgattgatttctcaacctatatcatcacttttttcctgctgctgcagggactgaccgcgctggggttatttgcatga

SEQ ID NO: 453610 - DNA, 2034 bp, Serratia marcescens
atgagcaaaatcaacgtccttcaccatcctgttttacacgcgctaggcgtgcgcctgcggcgggctgccacgcccgcgctgcttaacgacgccagcgccttactttattccgcgcgcagttttatcgccgcgatgcttgcgtactatattgccctgtcgatcggcctggaacggccttcgtgggccatcattaccgtttatatcgtttcgcaaacctcggtcggcgcctcgctgagcaggggagtgtatcgcctggcgggaaccgttgtcggcgcggccgcgaccgtgttgattgtgcctgcgttggtggatatgcccattgtttgcagcgtggtgctgacgggctggatcaccttctgcctctatctttccctgctggaacgcacgccgcgcgcctacgcctttgtgctggctggctacacggcgagcctgattggttttcctgcggtgtccgatcccggcgccatctttaatatcgccattgtgcgggtacaggaaatcatgattggcatcctctgcgccgtgcttattcatcgctatgtgctgcctgcgcggatctccgggctgtttaacagccggctatcgcagaccttgcgcacggcgcggcagcggattgccgataccctggcaggcaagaacgatgatgctgccgggccgctgcacctggcgttggcgctccagttccttcagggcatcagccatcacattccctatgattttgcgctttctgtaccggtccgccaggccagaaaagcgatccacgaccggctggcgcggttagtcatcgtgaactgtgaattacgcgaccgtttacagatgataacgacgatgtcggcggacgtgctgacgctgctgcacgacgtccggatctcgcttgccggtgaaggggaatggaaaagcgcggcagaagcgctcaaaaaacgcagtgagcacctggcgcagcgctactcggcacaggcgctgacctttgatgatgcgttgcgggccagttttgtgcgttatctgacagaggcgattgatcttatgcagcagtgcgagcgcctttcggacgtcatttatcacgcgaaggccgcgccggcgcagcaggacagcaacgcggtgaaagggtatgttttccaccgcgatcctgccgccgccgcccgcaccgcgctgggcgctttcgtcatcatcctgagcggctgtctggtctggatttattctgcctggcctgacggcggcacggcggtctcgatcctcggggtctgctgcacgctgtttggcagcttcgacacgccggcgccgcacattgtgaaatatatgattggctccctctggggagtattgctgagcctgctttacagcttcgttttacttcctcaggtgaatgatttcagcatactggcggcggtctttgcgccggtatatctgtttgccggttcgctccaggccaggccggccagcgcatttatggcgatggggatcaccctgacattgcccattctgtgtgagctgggggcgcgttacagcggagattttgccgtggcgattaacaccgccatcgcgttatttgctgcgaccggctttgccgcgatcggcatgagcctgctgcaaaccgtgcaggcagatgcggcgataaaccgcctgctgaagctgtgccagcgcgatattcgccgcagcgtgaagggggagctgaacgtcgatgaaacccattggaccaatctgatgatcgaccggacggccttgctgctgccgcgcctgcagcgcagcgggcaatcatcgcaactggcgctcgaccagcttctgcatgcgctgcgcgtggggctgtgcgtaatgcatctgcgccgctgcgatgcgcaggcgggcaaagcgctgagcgaggtgctggctttgctgatccaccccacagacagcgaagctttacgcctgcggatcgccatgctggtggagcgcagtttgccgccggcggatgagtcctcgcgccagtatgtcgaccggctggtcgatctgcactgcgcattacctgtacagacccgggagtccgccgatgatcaatga

SEQ ID NO: 453611 - DNA, 486 bp, Serratia marcescens
atggaacacagctattcgtcacatatctcctggacgggaaatctgggtacgggcacctcaggataccgatcgtatgcgcgcacgtgggatatctccgtcgccggcaaggacaccatacactgctcgaacgatccgctactggggggcgaccccggaaaaatgaatccggaagacctgctgatctcctcgctgtccgcctgccatatgctgtggtatctgcatctggcatcggatgccggcatcaccgtcgtcgcttaccaagactcaccggtcgccaccggcgaggtattgaaaagtggcgccgggcgctttttggccgccacgctcaaacccagaattacggtattagccggtaccgacatcgatgcagccacggcaattcaccatgaaatccataaagtttgttttatcgcccgctcggtcaatttcccggtgagttatgagccggagtttgtgatcagcgatgtcgcgtcaggcccacggtaa

SEQ ID NO: 453612 - DNA, 762 bp, Serratia marcescens
atgagtatctgcgctgaaaatattacctggaaggtgggtaaaaaggtcatcgttgatgacgtgtcactgcatattgcccccggtgaaaccgtcgggctgctcggccccaatggctgtggcaaatcttcgctgctgcgcgttctggccggcttgcgtcggccggacagcggtcgcgtgacgctggagggacaacccctggcccggattgccaaaaagcagctggcccgccgggtcgccttcgttgaacaacacggcatgaccgatgccaatatgcgcgtgcgcgaggtggtgaaactcgggcggattccgcatcactcgcctttttctaactggagccgcggcgatgacgagattgtcgccgccgcgttgcaacgggtggatatgctggaaaaaagcgatcaaggctggctgagcctgtccggcggggagcgtcagcgggtgcatatcgcccgcgcgctggcgcagacgccgagcgaaatcctgctcgatgagccgaccaaccacttggacattcaccaccaaatacaattgatgcacctgatcagtgaattaccggtgaccagtattgtggctatccacgatctcaaccatgccgcgatgttctgtgattcgctgattgtgatgcagaacggaaaaatcattgccactggcaccccccaggagattttatccgaggagctgctgtgggaggttttccgggtgaaaaccaaaattgagatctcacgctatcatggcaaaaagcacattcattttatcgtttag

SEQ ID NO: 453613 - DNA, 933 bp, Serratia marcescens
atgatgaatattatgcatccggcgctgcggcgccttgatttaaacctgctgccggtttttgacgccatttatcgccaccgctccgttcgtctggcggcggatgagctggcgatgagcacctcggcgctgagccatgcgctgtcgcggctgcgcgcggccctcaatgacccgctgtttttccgcgagggccaccgcatgtgccccagcgtgtatgccgcccagctcgcgccctcgattgcctcggcgctgcagttcctcaaccagcagctggccccgcagccggagtttacggccgccaccagcagcgagcgtttgcagattgcgattacggactttaccgcgttttgcatttttcccgccctgatgcacaagctgcagcacgcggcgcccggcctgcgcctggagttgcgctatttaccccacagcccggcgctgacggagctgttggcgggcgaagtggatctggcgcttggctttagcaccgcggatgatagccgtcatccggagctggacgagatcggctggtttgacgatgagtatgtcgtcatcagcaacgcaggccggacgcggctgacgctggaggattatctcgcggcccgccatctggttgtcacgccgtggaatgagaagcagggagtgctggatttacggcttgagcagctgggccatacgcggcagatcgcgctcaaaacgccgtcgatgctcagcgcaccgtttattgtagcggaaagcgacctgctgatggcgatcccccgttttgccgccgaaaagctgactgcggcagcggatatcaagatttttgccttaccgttcgcgatacccaggtttgaggtgaagatttactcacataagcgcagcgctcagcggggcgcgacccgctggctgaaagcggagctgcaacagctggcgcaggcgtttcattcagggcggtga

SEQ ID NO: 453614 - DNA, 1194 bp, Serratia marcescens
atgacttttctggctggaaaaaccgggcgattgtttataattaacctgctaaccgcagtgtcctacgcttttattttacctgtaatgagcctgtatctgataaacggcttacatgcaaaacctctgtttatttctttctacggcttagggtttgcgctgtcagggctttttttcagccaactgatgggcaggatggtagataacggttattcagacaaaaaactgttcattatttcgctactggctctgtttctcgccggcgtgtcttttgccgtttgccagagtccccttcaggccgtagtcacgggtattttcctcatggggccgggtaacgcatctatcccgctacttttatcgatgatcagaaagtattccgtaaccatggggctgaattcaacgcggctgaatacacaaatgcgttcaggcgtttcgattgtctggattgtggggccggcattggcgtttatttttgctgaccaatatggctttatcttcaactttctggcctcagccgtgctgagcgggttaacgatgttgttgagcctgatactgttatccgatacgaaaagccggtacgccgcacacccagcggcggagcaacggcgtattccggtgacggtctggttattggggagtgtgatgctactggctaacctgtcgaataatctttatctgaccgtcatgcccctgtatctggtgggcgatcttggcatgccagcctggtttcccggttttttactgggttcgacggcgatactggaaatccccgttatgcttggcgcggcacacctggcagagcgtttaggaaaaacaccccttatgcttgctggtttcgtcgccgcatgtgcttactatgggctgcttcagatagcagcaagtatggcgcttttaattacgctgcaactgcttaatggggtgttctttgggatttttgtcggcttgggcatctctctgatccaggaagcgctgccggaacgcagtggatttgcctccgcattttattcaaatgcgatgagacttggcatgatggcgggtaatggcatcgccggtgttgcggcgcaggcggtcgggtttaaaatgacgctgcttgttcctctggtatccgtgatgggtgcggcagggttaatgttttttacatcgaaacgacagcaaagaaaaagccagccgcacatgtcagaaaaatttttatcataa

SEQ ID NO: 453615 - DNA, 1455 bp, Serratia marcescens
atgagctcaaactctggtttaaccctaccgcccgcagcggcttcccatacttcaccgccctgggctggcctgtccgtgctgctgctggcggggttcgtcaccatttttgatttatttgtcgtgaatgtcgccattccaagtatgcaggccggactgagcgcgagtttcgcgcagattggcctgatcgtcgctgggtatgagctggcctttggcgtgttgttgataaccggcgggcgactgggggatctgtttggccgccgccggctttttagcatcggtatggccggttttaccctggcttcggcggcttgtggcctggcccccggcgccgaggccctgatcggcgcacgaattttgcaggggatggcggcagccttgttgttcccgcaggtgtatgcctccatccgcgttaactttgacggtaatgacaggcgcagagcctttggcttactggggatgacgctgggcctggcggcgattgccggccaggtattgggcggatggctggtgcatgcggatcttttcggtctgggctggcgtaatatctttcttatcaatgtgccgattggcgcgttcgccattctcgcggcgcgatgcattcccgaatcccgctccccgcagaaaccgctgctggactggacgggggtggcattggtcagtagcgggctgacgctgttgctggttcctctgatagaagggcctgcgcaggggtggccggcgtggagttggtggtcagcgggggctgcgctgatgttgttcgtgctgttttatcggcagcaggaacgacgtcggacggcgggtcactggccgttggtcgatatgcggctgatggcgcagcgtcgcttcgcgctgggcacgctgctggtgctgctggtctactcgacatccagctcatttttcttgtgttttgccttattggtgcaaaccgggctggggctggatcctttcctggcgggcagtatctttgctccctgtagcgttggctttgtgctggcatcgctggccgcgccgcggctggttgcccgctggggaacccatgctcttgttttcggcgcgctgatctacgcgctttttattgcggtactgattgtacaggtcgggatagcgggcgctgcgctgcagccaatccgcctgattcccgtgctgatcatggtcggcgcaggccaggggctgattatgacgccgctgttgaacctggtgctgggttttgttgatgaagcgaaatccggtatggcgtctggcattgtctcgaccgttcagcaggttggcgctgctctgggggtggcggtggttggcatcctttttacttccgttctttcggatgccggctccctctcgcaagcggggcagtatgcgtctgcttttgtcgccgggatgctgtataacctggcggcagccgtcttcatctgcctgttgctgctggtgatgcaaaaaacgccgcgggcagcgccctga

SEQ ID NO: 453616 - DNA, 792 bp, Serratia marcescens
atgcgaacgctgaaacgaacacgcaccgcgctgtcagacttcctgcgggcgcaccgggaacgcctgtcccctgccgaggtggggcttccctgcggcacccggcggcggacgccggggctacggcgtgaagaagtcgcggcgcttgccggtgtcggtttaacctggtacacctggctggaacagggccgggatatcggcgtgtcatccgcctttttggacaatctggcccgggtgctgaagcttgacgccgccgagcgtcgtcacctgtttatgctcacgcacgagcgccctccggccgatccgggcaaaacctggtgcgaactgccgccactggtgcgacgcctgatgcacgacctgccgcaccctgctttcgtgctcaatctgcgctgggacgtactgggctttaatgcactggccgatgagcttttccgtttcgctaaccatgcacccgcgcggcataacctgctctggctgctgttcaccgacccggctcttcaggaacggatcgttaactgggatgaacaggccccgctgatgctttcgagctttcgtcgtgacttcacccgtgccggtcaaagcaccgatattcttgagctggtagacgaactgaatcatatatcgccagagtttaaggcatggtggcgacaacaccatgtgcatgccccctgcaacggcgtacgtcatttgcggatagaaaatcagtccgtaccgttcgaatttacgtcactgaccgttgatgaagataaacatctgaggctggtcgtatatgcccggcaacaagatgcctgctaa

SEQ ID NO: 453617 - DNA, 429 bp, Serratia marcescens
atgaaaggcgcatgtttgtgcggaacaatcgcatttgaagtatcggcagaaccctcaaagttttaccgttgccactgttcactttgcagaaagcaaagcggagtgggccacaatctggcgaccatcgtaaatgcccgcgattttctctggcttaaaggagaaaacaatatcgcctcatggtccagaccaacgggctatcgcacggatttctgctccacatgcggctctaccgtacccaatgtgctgcgtggtctgccctatgtctggatcccggttggtttactggataaacgttgtgatatgcagtgcgttggggattactgcacggatgatgccatgccctgggacaccacccgttccgacatagaccatgccgggcctgtcgattcactgccgtcacttttaaagctgttggacataccggcttag

SEQ ID NO: 453618 - DNA, 891 bp, Serratia marcescens
atgtctgaccatcctacgcttgccctgctcgggccgggcgccatcggcaccaccatcgccgcggtactgcacgatgccggccgcacgccggtcctgtgcgggcgtaccgcccacccgcagctgattttgcgtcacgacgacggggaaaccgtggtgcccgggccggtgctgaacaatccggcggcgatccaacgcccgttcgatctgctgtttgtggcggtgaaaaccacccagattgccgacagcgcccgctggctggccgcgctatgcgacgaaaacagcgtggtctgcgcgctgcagaacggcgtcgagcaggaggcgctgctggcgccctacgtcaacggcgccagggtgctgccttcggtggtgtggttcccggcgcagcgcgagccggatgcctccgtatggctgcgcgacacgccgcgcctgacgctgccggatgtgccgcaggcaaaacgggtggcggatgcgctcagcggcacgcgctgcgcggttgagctgtcggccgactttgcctccgtcgcctggcgcaagctgctgcagaacgcggtggcgggcctgatggtgctggcgaatcgccgcgccgggatgtttacgcgtgaggatatcacggaactggcgctggcctatctgcgcgagtgcctgagcgtagcgcgcgccaacggcgcgcagctgagcgataacgttccgcaggagattgtcgaacgctttcaccgcgccccggcggatttgggcacctcgatactcgccgaccggcaggccaaccgcccgctggagtgggatatccgcaacggcgtgattcagcgctacggccgccggcagggaatagccacgcccatcagcgatgcgctggtgccgctgctggcggcgggcagcgaagggccggggtga

SEQ ID NO: 453619 - DNA, 828 bp, Serratia marcescens
atgcctggacacattatttttctcacgctgttcgccgcgctgctgcatgccggatggaacactttgttacgcggcggcgccgaccggctgtggtcgatgaccatcatgtgcctgacgatcgccgtgacctgcatcgtcattgcgctgtttctgccgccgcccgcggtcgccagctggcgctacgcgctgctgtcggcgctgctgcacgtcggctataacctgtgtctggtgcgcagctatcagcacggggaactcgggcaaacctacccgattgcgcgcggctcttcgccgctgatggtggcctgcggggcggcgctcttcgccggggagagcatcgatgcgggcacccttggcggcattgcgctggtgtgcgcggggattttgctgctggcggtgaggcggggcaagccggcgatgccgggcctgcgctatgcgctggcaaccggggtttttatcgccgcgtacagcgtggtggatggcatgggcgtgcgggtatccggcaacgcgctcgcctataccgtgtggatgagcgcattatggggcgtgctgatgccgctactgtatatcgcgctgcgcgacggcaggagtttactgcgccggcggcccggcatgctccatgcggcggccggcggcctggtttcactgctcgcttatggcatcatcatctatgccatgacgtcggcgccgatgggggcggtttcagcgctgcgtgaaaccagtgtgctgtttgccgccgtgctgggcgctctgtttctcggcgaagcgttaacgctgcaaaaagtattggcgtgctcccttattgccgttggcacgctgttgatcggttaa

SEQ ID NO: 453620 - DNA, 282 bp, Serratia marcescens
atgaaggaagtgagatgggacgggtgtgagctgggtgatatgtccgcgcccgacataatggactggccccacgacagtagacaaactctgtcctcacgacgaggcctgttcaaaggcctccggactgacgccgccgaggtgactgtggcgccgggaccggttatagaagacttcaatgtaatcgaagatatcggcctgggccagattccgggttttgtatattctctttctgaacgcttatatagtgagcaaggagtgaatgagaaagacttactcgggtag

SEQ ID NO: 453621 - DNA, 561 bp, Serratia marcescens
atggtgaatgcaatggaaagaaatgtattggaaggacagctaagagaatgctacggaaggatagtttatacgcataaaacacatgagaaatgtgcggatattctacaaggcaaactaagaaaaatgaagaacatgcagctagtccttttggcaatcactaccggcagttttataactacggtgataggtgatgctaaagctggtgctgtaattgggtcaatactttcagcaatacttctatttctaaactcatatttgaaggattatgatctaggcactatagcacagaagcatagacaagcagccggagatatgtggctaatcagagaaagatatttatccttgctcgtagatttgaagatgcacaccaaaagcactgaagagatcctcaaggaaagggatgctctaatgttcgaactttctgcaatttatgccggagcaccctcaacaaattacaaagcatacttgatggcacaaaaggcactcaaggagctcgaagatatgactttttcggatgaagagatcgacaaatttcttcctgctgaattgaaacgtaaatag

SEQ ID NO: 453622 - DNA, 1269 bp, Serratia marcescens
atgagcacggctgccgactttaaggctttactagataatataaaaattgataatgctggtcaaattggtaaaagatatgggcgtataactaagtcgttgaaccaatatttttataacatggattcaaaaacagccaattcactacaggttggttcctatgggcgatttacagggattcgaggtatctctgaccttgatatgctttattttcttcctgcaaccgagtgggcaaggtttcgagatcgacaatcatatttattgcaggtagtgaaaacagagattaaaaaggcttataaaagcacagatattcgaggcgatgggcaagttgttgttgttaaatttaataatcaagaagttgaggtagtaccagttttctgtaatgaagatggtacctttacttacccagatacacataatggcggttcctggaaagtatgtaaccctagagatgagatgtcttcttttaggactctaaatgatgatagaaagggacatctgaggcgcttatctaaaatgatacgagcatggaggactcgtcatgaagttgagattagtgggttcctaattgatacgctttgttataaatttttctatgatttagtcgaatatgatgacaagagctttaaaagctacgatcaactatctcttgattttttcacgttcttagtaaatgaaggtgatagggatttttattatgctccaggtagtcgttctaaagtgaacgttaaaaaatcatttaatgaagtagcgaaattaacaaaggggtattgtgaggaagctttatctgcaactactgacaaatcaaaaaatatagcttggaagaaagtttttggtagaccattccctaattatggaaataattcacttggcactttaaataccgctgaacagtatattgaagaccaatatgaaatgaatttgtttggtcatgtttctatcgagtgtgaaattaaaaataataatttatttgaagctctcctttcgaatattcttggcgagggggatgagattaatagaaacagaaaattaagattttatgttgatgagataaatatacctaaaccatatcaaattaaatggaaaataaaaaatgtaggtgatgaggctgagcatctagggatgcttaggggggaaattttgaacgatgaggggcattctgaacgtatcgaaacggccgatttctcagggccccattttgtagagtgttatgttatatacgggaatcaggttgtagcaagagatagaattgacgtaccgatacataaatag

SEQ ID NO: 453623 - DNA, 285 bp, Serratia marcescens
atggacaacaagccgcacaacgccgatatcgctcagcgggtgtttgattggtacgatgcgaaatggaatttgcgcacgcctttcagccagaagaaaccgctgacgccagacaccagcctgtctacgggcaactatccttggatctgggaagatggcctggagatcatggaagagtacttcgagttgttcaacgttgacagttcaggctttaactttatgcgctactggccgcaggagatcggcgtaacctccgccgtgcttggctggctctgtccccgaagttag

SEQ ID NO: 453624 - DNA, 312 bp, Serratia marcescens
atgatttggctgaccatactgctgatggggctggtggtgttttttaaccgctactgttttctggcgccgggcctgcggctgcggctgtcgccgcgtctgcataagctgctgggattttcggtgccggcggtgctcagcgctatcagcgggccgatcgtgatgtacggcgatgccggctggcgcggcgtggcggataacccgtacctgtggggcgcgctgtttgcggtgatcctggcgtttttcctgcgcaatacgctgattgtggtggtgctcagtctgctgatgtttatcactctgcgcgggctgctgtga

SEQ ID NO: 453625 - DNA, 705 bp, Serratia marcescens
atgacccattcatctttacctattccgacgccgcgcctgcggcccgcgctgcagggggcgctggcgatcttgccgctgtgcctggcggtgctgccctgggggatcctcgccggttcgatggcgctgcagagcggcctgacggcgtcgcaggggctgggcatgtcggcgattgtatttgccggcgcttcgcagctggtggcgatggggatgattaaaggcggcgccgggctgctggcgattctgctgtccacgttctttgtcaccgcgcagcatttcctgtacgcgctgcggctgcgggcgggcattgcgccgctgccgctgcgctggcggctgctgctgggctttttactcaccgacgagctgttcgccctgaccggcgaccacagtgccgcgcgctttgaccgctggtatgcgctgggcgccgggctgacgttttatgtctgctggctgctcaccacctggctggggatcgccgccgccggcagcatcggcaatctggacgcgtacgggctggatttttccattgccgcgacgtttatcgccattgtggtgccgctggtgcgcagcctgccggtgctggcctgtgcgctgaccgcgctgttgctgtcggtggtgctgcaccactatcagatccccggcgcgctgattatcgccagcgtcgcggcgatgctggtggggctgctgtgcagcagggaggcgtcatga

SEQ ID NO: 453626 - DNA, 843 bp, Serratia marcescens
atgaccaggcaaacggcccgcgggcgacaagaacagacgcactttatgcacgtcgacgagctcggcgggctggaagtgctgcaggccagctatctgcgtcagaccttttcccgccacagccatgaaggctactgcatcggcgtgattgacgacggcgcccagcgtttctaccgcaccggcggcgagcacgtggcgccgcacggcagcattattctggtgaacgccgacgagatccacaccggcagctcggcggcggacaacggctgggcctatcaggcgatgtatcccaacccggagctgctggcgcggctgtcgcgcgatttaaagagctgcgccggcggcgcgccctatttccctcaggcggtggtgcacgacgtcgggctggcggggcagctgcggctggcgttcggcatgctgcaaagcaacgaaaaccgcctgctgaaagagaccatgctgttctccgcgctgacctggctgatgatgcgctacagcaaaacccgcgtgacgccggcgacgcagagccgggcgcaaagtcaggtggcgctggtgaaggcgctgctggatgagtacccggaagtggacgtctcgctgctggagctggcggagcgggtctccctcagcccctattacctgctgcggcagttccagcgggtgaccggcctgccgccgcacgcctatcagattcaggcgcggctgcgtaaggcgcgcggcctgctcaagcagggccacggcgtgctggaaagcgcattggcctgcggctttcacgatcagagccacttccaccgccatttccgcaagtcgataggcgtcacccccggcgactacgtcaactcgctgcgctaa

SEQ ID NO: 453627 - DNA, 495 bp, Serratia marcescens
atgaagctgcatgccggattctggctgatcaccctgtgcttcggcgcctactgggggctggcggtgtacggccgcgaccgggcggcgctggccctggcgattggcgccgtagcggcgctggcgctgaccccggcgacgcggcgcaaatgggcagtgctggcggcgctggcgggcatcgcgatggacgccgtctggtgctacggcggcgtgctgcagtttaccgaccatgccggcgtgccggtctggatgatggcgctgtggctcgccttcggctgctggtggtgctggctgctgcagctgatccgcctctccgcctggcccatcgccctgttcggcgcggtcgccgggccgctcagctacctgctcagctggaagttacaggcgttcagcccgcaaatcgccccggacctgatgctgctgtccctctcggtcggctgggccgtttacctgcccgccgtcagctggccgctgctgcgccgtcgcgccgcggcctga

SEQ ID NO: 453628 - DNA, 1038 bp, Serratia marcescens
atgtccaaatccgccggtcacagccactatctgcacgtccgtcagcgccgctggatccggcggctgcgccgacagtggtggtggcggctggagctgcccacctggggcgtgatcgcgctggtgtacggcggctggttcctgacggcggcgggctggcgcgtgctggggccgtggctggcgacgccgctgctgatcctgttcaccaccggctatctgtcgctgcagcatgagctgattcacggccaccccacgcgctggccgcggctgaaccagctgttcggcctgctgccgctggcggtgtggtatccctacggcctgtaccgcgacagccacctgcgccatcaccgtaacccgcacctcaccgatccgcagcgcgacccggaaagctactatttcacccgggcgcagtggcggcgttttccccggctgctgccgcggctgacggcgctgcgcaactgcctgccggggcggatgctgttgtcgccgctgtgggatatcgccctgctggcggccggtgcgctgcggcgcatagcggcgggcgaccggcgggcgctggcgatgtggctgctgcacggcgcgctgctggcgtggctgctgctgtggctgcagcggcaggggattgcgccgtggttttatctgctgctggtcagctatccggcgctggcgatcggcaagatccgttccttttacgagcatcgcgccgagcatgaggcggcggcgcgctcggtgctgaacgaggccgcctggccctggcggctgctttttctcaatctgaactatcatttagtacatcacgatttacccgggctgccgtggtacggcctgcgcaaggtctatctggccgaacgcgacgcctaccggcaacgcagccaggggtttgtggtgccggggtacggcagctggtttaaacggcatgccgtcacgccggtcgacgtcggcgtacatccgtttctggcgggcgacggcggtaaggggaaccagaacgccgccgacgctacggcggcaatctttatcacgcgctggaagcgcgttttatag

SEQ ID NO: 453629 - DNA, 966 bp, Serratia marcescens
gtgcgactgaatctggaagcgctgttaattcttgatgcgctggaacgctacggcacctttgccgcagcggcggcgcggctgtttaaaacgccgtcggcgctgagctatacggtgcaaaagctggagagcgacctcggcgtgacgctgctggaccgctccggccatcgcgcgcgctttaccgataccggcaaactgatgctggagaaagggcgggtgctgctgcgcgccgcgcaggatctggagcagcaggcgcgctatgtggagagcggctgggagagcgaactgaccctcggcgttgacgccgcgtttccgtttgagcgcctgctgccgctgattgacgacttctaccgccagcatccccatacccgtttgcgtttcagccacgaggtgctggccggctgctgggagtctctgctgcacggctgcgccgatatcgttatcggcgccatcagcgagccgccctcgcgcaccggctttgcctaccgcaaactgggcaagctgcactatgtcttcgccgtggcgccgcagcatccgctggcggcggtcgcggagccgttgaccagggaacgggttcgccagcagcgtgcggtagcggtgcgcgatacctcgcgggtcaatgcgccgcagagcctgcacctgctggatgaacaggacacgctgacggtgttcagtttcgacgccaaactgaaagcgcagctggcggggctgggctgcggctacctgccgctgtcgctggcgcagccctatctggacagcggcgagctggtggcgaaaaacgttgagggcgtgagcctgagcagcgacacctacgtcggctggcgggaaaacgccagcggactggcggcgcagtggtggcgcgagcagctgcaggcgcggcttggtgcggagagcgcgccggcggaacaggccggcgcagcgtcagcggcggattacgccgggcggaaatcctcggcgtcgacgtcatag

SEQ ID NO: 453630 - DNA, 546 bp, Serratia marcescens
atgccgcacccacagcacgccacgctggtgattacccatcgcccgacgccggacaacgtgccggcctatgaagcctggctgaaacgcattatgccgcacgccgccgaatttaccggccaccttggcgttaacgtgattcgccccgccggcgcggagcagagctacaccattctggtgcgctttgataacgccgataacctctaccgctggctgcattcgccgcagcgcgaagagtatatccgccaggtgacgccgctgctggcggcggaagatcatattgaaatccgccccggcgccgaattctggtttacgccgcccgacccgcgcgtgcgcccgccggcgaaatggaagcagtttctgatcacgctggcggtgatttttccgtccacccatctggtgccgtggctgtggggagccttgctgccccggctgcagggcacattcggcggccacctgcttaacgacgccagcgtcgtggcgctggtggtgtttctctggatgccgattgtgacgcgcctgtttaaccactggctgacccgccattaa

SEQ ID NO: 453631 - DNA, 399 bp, Serratia marcescens
atgaaagagctggatatcgggctggtggcgaaactgtccggcgtggcgccttcgacgctgcgtttttatgagaaaaaagggctgattacgccgattggccgtaatggtctgcgcaggcaataccgtcaggatgtgctgcatacgctgcagctaatcgcgctggggcaggcggcggggttcaccctggaggagatgcgcggtatgtttgatgcgcaggggaaagtgacgattgagcgggaaaaaatgcttgagcgggcgcgggctatcgacaaagccatcctccggcttcagctgctgagccgcggtctgaaacatgttgccaactgtacgcagccggatcatagccagtgtcatgaattccagaaaaccgttgcgcgcggactgtccctgacaaaatag

SEQ ID NO: 453632 - DNA, 486 bp, Serratia marcescens
atggaagcagaactgattttccgcattgtgataaccggcattggcgccacgctgtgtatggatatctggtcgctggtgcaaaaacacctgctgcgtattccgtcacttgactatgcgctggttggccgctggctcctttggctgccaagggggaaaatccggcacgctaccattacggcgacgccggcgatatgcggggaacgcgcagccggatgggccatgcattatgccacggggattgttttcgcctttatcccgctggggcttggcggcgcggactggttccgccagccggacgtcgcgatcggtttactcgccggcctgctcagcctgtttgcgccgtttttcatcatgcagcccgcactcggcttcggcatagcggccgccaaaacgccgcgtcccggacgggcgcgcctgctcagcacgctcgtgcacctgatatatggctacgggctttacattaccgctgccatgcaagcgggataa

SEQ ID NO: 453633 - DNA, 462 bp, Serratia marcescens
atggcgaagcataacattatcattacccggctctggcaaacggataactcaacggtgagcaagtatgagatcaccggcagctctattaaaggatatttcttggaaaggcccgggccggatactcagacgcccaaccaacggaaaagaattcccgagggaaactattcactcaaatggcacaacagccatatccctacggtcaggccttataacccggtgccgctgctgtttaatgcgatcgtgccggaatcccgcaaaatattaatccacaacggcaactatccgcgcgacaccgacggatgcctgctgatcggcacctcccgcggggtggactttgtcggcagcagcgtcagaaaacttatcgagctgaaaaatttcatcaccagcaagggcataaataacttcagcgtgacgatcaagtcttgctattctgctgcctgccataaccaggagggattatga

SEQ ID NO: 453634 - DNA, 657 bp, Serratia marcescens
atgattaaagcactgatgctcaccctgctgctgtcgctcagcgtgcagccggcgctggccaacccgcagaccttcaacggcgtgctgcaggcctactggctgccgatctggcataacgacgtcaatcagccgcagctgacctaccgcttcttcccggatgccgcatcggccgccaaggggaaggtgatcaacctgcgccatcccgcgcttgacctcaaacggctgcagcaggaccacccggagttcgtcgcccagcgccaggggcatgtggagtattacggtacgctgaaggttgacgagtccaccgcgtataacgagtgcggcctggacttttatgaggcgcagcaggccgttttcacgccgcaagcgccgcagcctttcgatattgaacggctggaaaagcaaagcggctgccagtcttacccttggctgctcagctatcagctgaaagaagacgccgccgccgtcgtgctcagagcggcgcccgatagcaacgccgaagccgtcgcccagctttccggcgaccagccgctggtgcaaatccggcaggtcaacgccgactggctgcaggtcgcggtctatgacgccgccaaccagccgccgatgggcaacacccgcggctatattgaactgcgccatctgcaaccgctcaactag

SEQ ID NO: 453635 - DNA, 438 bp, Serratia marcescens
atgataacaatcagggagcgtattgcggcggataatccgcagctggtggcgatctggcagcgttcggtgcgcgccacccatcactttatcggggaacaacagctgacggagctgcagccgctggtcgagcagtatctgccggcgctcgaggtctgggtggcggagatcgccgggcaggccgccggctttatcgcgctggatgacaataaggtggagatgctgtttatcgacgccggacagcgcggcaaaggcctcggcagcgcgctgctggaccacgtacaggcgcgccgcgacgggctggtgctggatgtcaatgagcaaaacccgcaggcggtcggtttctaccagcgctacggctttgtggtgaccgggcgttcgccgcgggacggccagggcaacccctacccgctgctgcatatggcgctttccccgcgctaa

SEQ ID NO: 453636 - DNA, 324 bp, Serratia marcescens
atggtaagcgatgcggaagtgctggcgttcttccaacgggagctgtcggttcttgcgagtttatccttaaaaccgatcccgttagagctggacacgccgctgcaggaatatgcagaagatgatgagttaaaactggccatcgggaaatacgatgaaactttcggggtggatgtgtctgtgctggagtggggcaaatactatccgtggcgaacggcatggtttttccgtaaatggtttaccgacaagcccgtgacgcagagtaaaaaacccctgacggtacgcatgtttgcagagtcggccaaagccgggcgctggctgttctga

SEQ ID NO: 453637 - DNA, 885 bp, Serratia marcescens
atggaaaaacgtactcaagcactcgatcttgacgcactgcgtagttttgtcgtcggcatcgagtccggcagctttgcgctggcggcgaagcgtctgtgccgttccacctccgccgtcagcgcccagttgaaaaagctggagatgcagtgcggcgttgccctggtggtgaaaaatggccgtcgtttggcgctgacccagcacggcgaaatagtactgggttacgcccggcggatgctggcgctcaatgatgaggcgcagcgcgcgctgcagggcgaattgctgcagggggaaatccgcatcggcatgcaggaagactttggcgaatcgctgatgccgggaatgctcgggcagctgaaacgccatcatccggggctgcgcatcagcgcgcggatagatcgcaatcacgcgttgttgagcgggctggcggaaaaaacgctggatatggcgctgatgtggcagccggataggcccctgcaggacggtcggctacttggccgctgccagctggagtgggtttaccaccgtgagctggatattgacgcgctattggcgcagggcgaaccgctgccgctggtgatgtttgccagcccttgtctgatgcgcgcccgcgctactgcctgtctggaccgggcagggatcccgtggcgcgtgatgtttgtcagccacagcctgagcggaatctgggcagcggtgcaggcggggcttggcatcaccgtacgtacgcgcatcggcatgccggataatctgcgtattgccggtggtcagttgccgtcgccggggaatttggggatagtgctgggccagacgccggcggacggagaggcggggacggtacggacactcgtggcgcgcctgatggaggaggcgctggcggatatccgctga

SEQ ID NO: 453638 - DNA, 309 bp, Serratia marcescens
atgacaatatcccccgatcgtgaaacccttgccagacttgcccccaaactggctgaactgagcaaagaggtgttgtttgatgatatatggcggcgcaaggaacttacgccgcgcgaacgcagtctggtcacgctggctgcgctaacggcgctgggacgcgtgcagcagctgccgtggcacatcagcttcggccggcaaaacggcctgacccggcgggaaatcgccgaggtgttcacccatctggcgttttacgccggctggcccgccgcggtctccgcgttcggctgcctggatgaggaggaaatctga

SEQ ID NO: 453639 - DNA, 390 bp, Serratia marcescens
atgccttttacccgtatcacgctgcgccagggctacagcgatgcgcagctggcgcggctttccgacattctgcaccgctgcctgaccgaagagttcgccgtgccgccggacgatcgcttccaggttattgagacgctgcccgccaatcagcgcgtgttctcccgccattacctgagcggcacacgcagcgacgattttatgctgtttcagattatcgccggcaagccccgtacacgtacgcagaaacagaacttctaccgggcgctgagcgaacggctgcagcaggagctgtccatcaatccggacgatgtgatggtgatcgtgcaaaacaatcagccggatgactggagcttcagcaacggcgagatctatgccccgcagaggcgctaa

SEQ ID NO: 453640 - DNA, 948 bp, Serratia marcescens
atgaaaatcggcattgtggcgtttgacggtattattcctttccatctttcggtgccctttgcggtgtttgaaaaggtgcgcgcccccgacggcgcggcgcgctgtgaactcaccctctgcacggccacgcccggcgaactcaccaccaatgccggcttctccatcgtggtgaatcacgggctggaggcgctgagccgaatggagatggtgatcgttccgagctgggacgacccggcccggccgccggagcccgccttattggacgccctgcgggcggcgcacgccgccggcgccaaaatcgtcggcctgtgtatgggcgcgtttgtggtggccgccgcggggctgctgcatcgccgtcaggcgacgacgcactggcgctggatggcggattttcagcagcgctatcccgacgtcaggacggataaggacgtgctgtatatcgacgaggatgacgtggtgacctcggcgggcaccgccgccagcatcgactgctgcctgcatctggtaaggaaaatctggggggcggataccgcggcgcacgtggcgcgtcagctggtggtgccgccgcaccggcagggcgggcagtcgcagtatgtggcgctgccggtacagaacacgcgtcagggggataatttttcgcaggcgctggagtgggtgacggcgaacctgcagcagacgctgtcactggatcgggtcgccgagaaagcctgcatgagccgccgcagttttacccgccgcttccagcagacgacgggcaacagctttgcgcagtggctgctgaaccagcgcctgatcgccgcccagcgctttttggaaaaaagcgatcgctccattgaatatatcgccgaaacggtgggtttcccttccaccacctcgctgcgccgccacttcctcaagcatcttaacacctcgccgtcacgctaccggcgcgagtttcgcgggcgctga

SEQ ID NO: 453641 - DNA, 705 bp, Serratia marcescens
atgaaaacgcttttccctgccgcgctgctggtcgccatgatgggcagcagcgcgatggcgcaggacacgcagccggtcaatacgaaaactatccgcgcgcagtcgggcgcacagcccaccacggcgctctccgccggtaaaaccgcgctgatcgtgatcgatattcagaatgagtattatgcgggcaaaggattccgcggcaagatggtgattcccgacggccgcgcggtgctggaaaacagcaaaaagctggttgattttgcccataagcaccgcatgccggtctattttgtccgccacgtcggggcgaaaggcgggccgctgtttgccgcagggtcggtgtatgccgagtttcatcaggagctgcagcctaccgcgcaggacgcggtgatcgagaaagcgacgcccagtgcgtttgtcgctaccgacctggatgctcagctgaaaaaacaaggcgtcacgacgctgctggttgccggcctgatgacccatatgtgcgtctcctcgaccgcacgcgacgcggtgccgctcggctatagcgtgttgatcgccggggacgctacggcaacccgcgatctggacgacggcgccggcggcgtggtggatcaccgggtgctgcagcgcgccgcgctggcgggcgtggcggatgtgtttgctgaaatacacagcacccaggatattctgtcgctgccggtgagccgctag

SEQ ID NO: 453642 - DNA, 2280 bp, Serratia marcescens
atgactgaacaacacaaaaatgcccagacgctgaacgcagacgggatgacgcagccagcgggtgaaacactgcatgagatcacctggctaaaacccgaagattttggcggcggcccggacgtagcggataacggcccggcattccgggcaatggctcagctggccgaatccaataacgccgccgcgtgtatcaggctcggcgccagaacctatcgggtgaagacgccagtggcctttaactgcgccgtgattatcgaaggggttggcgcaacgcacgccgggctggcggccaatacggtcaatgaatcggacagagtacagcgctgttccagcattattaaggacgcacgtgactatgacacggacgaatatctcttcacgtttaacgatcgcaagcctaccgtacttggcataacgttgagaaatcttgagttcgtcggtgcacatgtcagcgactcgccaaaaagatataaaacctgcggcgtgttcgtcgatatctccggttgggtaagctcatccatcaatgtcatcctgcgcgactttggcctgacggggctgaaaataaatcataatgacggtatctggaataatatttctctgttgcgctgcggtggaaaactgaatggcgacgtttattatgcgctggatttaaaacgcgagaacgacatcggctcatttaccaatcagcataagtttaacaatccacatatcgagcactgtcgttatgccatccgctgctccggctatatgaatcttttcttcggcggtcatcttgaaattaatgactggtcctttacccccgacggcgattcgtaccctgtcgtcctgtttgagcaactcacctatcccgtcaccttcgataaaatgacgtttatctcaacggataccctgcgctaccttgacggctatccgctgaccaccgacccggagcaactggccgccaacctggcatcggttccctatttcttcggcggcgtgccgggtaaaatgatcgatccgacatcggacgttgtgaaagcctttgtgcgcttttccggctgcgattttacccacgccagcaaaccggtgctatggttagatatcccggacgtacgcacctatctcgacggcgtacatatcacacgcgcggcgacctgggcgccggcaataaagttgggtcaggacagcagaatcaccaactcatttattcagatggcggctattaagggcaatacgtcaaactatgccgacctggtgaataatgtgtattccgtgccggttgccggctatggccatatttcagccgacggggtgcagttctacggcggccacccggcctatgccgccttcagcgccggcaacagcggcggcggttccgcacggagccgcatcactaacgtcatccgcggcgcttacggcgcgacgatcggtaacgcgctgggagattatatcggcggctatctgtcatcgtacgacggggtgcgaattcaaagccatgacggcgccagtcacgccgccatttcgcacgaccggatgacgtcaaccaccggcgcgttcacgatcggctccgcgcgctacaccgcatcgcgcgtaggcgtgatcgctaacctggacggcgccggcaacttcctcgcccccacggctaacgatcggaactggctgggttcaagagccgcggcaaacagctggaacggcgtgttcaccaaaacattctttatgggcgcagccagccccgatggctactggcctgccgggctatatccgaccgccccggcaacctacagcatcggctcatccgccctgccggtgaagaatatctacctgcagaatccccctgtcgtgatatgcgatgcgacgcacaaaacagaagtccgcagcgtcgaggatttgctgttagacgccgtcggcagcgtggctttctgcgcctataagatgaaaaacgccgtcgccaaaaaagggagcaaaaacgcgcgctatcatatcggcgttctggcgcaggacgttcgcgacgccatcaccgcggttggcctggactggcggcagtacgccctcattgcgtatgaagaagcggagattgagatcgcacgcgatgaccacggcaacctcatcccgctaagcccggaacaaacgctgattgcgacggataaaaacggccatgtgcatatcgaatcagagcaggatcgcgtagttgaaaaagagggaaagcggttattcgtacggggaacctacatgctgcggatggaagagttcctggcattacggatggcctacatcgagcgtaagctattaaataacgattaa

SEQ ID NO: 453643 - DNA, 879 bp, Serratia marcescens
atgtttacaggtttgagcgcttttccgctgaccccggtgaccgccgcggggatcgacgaacaagggttggcgaatattctggcccggctgaccgaggccggggttgattcgctgggcgtattaggctctaccggcagctttgcctacctgacgcgcgcgcagaaaaaacgcgtcgctgaactggcggcgcagcatgccggcggcattccgctgatgatcggcgtcggcgcttacggtacggagcagattctgcagctggccgacgacgcgcagacggcgggcgccgatgcgctgctgctgccggtcttgtgctatcagccgctgacggacgatgaagtcttcgcgcagtatgaaaccgtgacgcgccatagctccgtgccgctgtgcgtgtataacaacccgcgcaccaccggctttgagttttccgatgagctgctggcgcgcgtcgccgccctgccgggcgtgcagtcggtgaaaatgcccggcgtacggctggagccggcgcgcatgcagcgcctgcgggagatattgccggcagaggtcgctatcggcgtcagcggcgatgagtttgccggacgcgggctgaacggcggctgtgaggtgtggtattcggtgtgcggcggcctgttcccgcactgcgccagacagattgtcgacgccgcacgggcaggggacggcggtcgcgtcagcgagctgattgcgcgcctggagccgctgtggcagctgttccgccggcacggcagcatccgcgtgatggccgccgccgccggcatcctcgggctgagcgatatcgactgcctgccgcgtccgctgcagccgctgtcgtccgaagcctgcggcgatatcgccgcggtaatgacgcagctggaactgcgctaa

SEQ ID NO: 453644 - DNA, 825 bp, Serratia marcescens
atgagcaaggtcgctccatggttgttaatgaccgtattaaccggctgtgccggcacgccggacggcggcggtactccgccgcatccgtcacaccctgcggaaacccaagtgaatattgacgataccacttcagcccggctgcagcgcctgctggcgctgcgccaatcaacgccggcgccggacgacggcgccgttatcgacctgttgtcccggcagttcctcgacgtgccctacgtcgccaatatgctggttggcgacgccgccacgccggaacggctgacgatcgattttcgcggtctggactgcttcacctatctggattacgtcgaggcgctgcgccatgccgatgatcaggcgcagtttgtccagcgcctgatcgccacccgctaccgcaacggcgaagtcagcttcctgacccgcaaacacttcttcagcgactgggcctctcagccggccgtcagcgccgacgatatcaccaccgacatcagcccgcacgccgtcacgctaagcaaagagctgaaccgcaatgccgacggcggccagtatctgccggggctgccgaacgtcacgcgccgcatcagctatattcccagcgaatacgttgacgcccagctgctcggccggctgcgcaccggcgattatatcggcatctacaccaatctggcggggctggacgtgacccacgtcggcatctatatcatgacgccgagcgggccggtgttacgcaacgcctcctcccgcaaggagaaccgccgggtcgtggattcgccgtttatcgactacatcagcagcgcgccgggcattgtggtgttgcgtccgcgctga

SEQ ID NO: 453645 - DNA, 888 bp, Serratia marcescens
atgcccatgtttaactgggaagatttgcattactttttaacgtttgcagcggaacgatcgctgtccggcgccgcccgccggctgcaggtcgatcatgcgacggtagcgcggcgcatcgccagcctggaagcggcgttggcgctgaagctggtggatcgccgtccgcgcagctatacgctgaccgaagacggcaagcgcattgccgctcagggcgacggcatgacgctggcggcatttgccgtcgatcgcgcggcgctcggcggccggcagggcgttgccggcacggtaaacctcagcgtgccgccggcgatggcacaagggctgattgcaccgcgtctgggggcgctgcggcggcagtacccggcgctgcgctttaacctgctggccgctaccgcccatgcctcgctgctgcgcggcgaagcggatatcgccgtccggctgagccgcgccagcgaaagtgaggtggtggcgcgcaaaatcggcacggtggagtttggtctgtatgcggcggcggactatctggcggacacgcctgaggacgagcgcggttttatcggttatcaccaggagatggcgtcgtcaatgcagcagcagtggctgctggagcaggccggcgcgcggccgctggtgatgtgcagcaatgatttgctggtgcaggccgcggcggcgcgcggcggcgccggggtggcgctgctgccgcattttctggcgcagcagaacggcggcctgcaacggctggcgccgcagcaggcgctgacgcgcgaaatctggctgacggtgcacgatgatatgcgccacacgccggcgattgccgcggttatggcatttctgcttgagtgctacgcgaacgtggcgggcgtcacccggctggtggatatcgccgggtga

SEQ ID NO: 453646 - DNA, 939 bp, Serratia marcescens
atgaacaaatcgctgacgctggcctatctgggcatcatcatcgccaccttcttctggggcaccaacttcaatgccggcgcatatatcgtcgcccatcagccgccgatcaccgcctcgcttgagcgctttgccatcgccacgctggtgatgctgaccgtcttcggcctgcgcggccagctgcggctgagcacgctgagaaataactggccggcgtatcttggactggggctgctgggctttacgctgtttaatctgtgcaccttcttcggcctgcagtccaccacgccggtcaacggcgcgctgatcctcgccaccacaccgctgtggacgctggtgttcggcctgatctggcagcatgaaaaactgagctggccgcgcgccgccgggctgctgtgcggcctgaccggcgtggttctggtgatcacccagggcgatatacagattctgctgcggctcaacgtcagccgcggcgacggcattattttgctcggcagcctcgcctgggcgctgaatatggtcggcaccagacgctgggtgcataacgccacgccggttgaaaccaccagctactccatgctgttcggcacgctggcgctgctccccctcgccttttacttcgaaacgccgtggcgcaacctcaccgatagcgcgctgagcgtacacgtcgcggtgctgtatctggcgctgtgcggctcgctgctggcctacctgctgtggtttaacggtctggcgcaggtcggcgcggtgcgcaccgcgattttctttaatctggcaccggtgtttaccctgctggtatccacgctgaccggccacgcgccgaacggctggcagctgggcggcgcggtttgggtcattctcggcgtgctgctgacgtccggcgtgctgaacccgctgtggcagcgacgggttaacgcggcgtcacatctcggcgaagggtaa

SEQ ID NO: 453647 - DNA, 510 bp, Serratia marcescens
gtgacggcatggccgttgcgcttggcatggggggtcggctgcgcggttttcgccctgctggcgttgctggggctacagtcgttattgctggcggtcccctggctatacggcacgctgaaagtgtttggcggcgcctttctggtctatctggcgatcaagatgttgcgcggcgcgcggcagccgctgtcgctacagggcggtgacggcatacgcctgggggcgcgtaaagcgtttaccaccgggctgctgacgcagcttggcaacccaaataccgcgatagtctttggcagcatatttgccgcattactgagccatcgcatcgcgccggtgatgtatttgctgctaccgctgattgctttggtggtcgatcttgtatggtatgcgtttgtggcttttgtgctgtcgtcgccgcgtccgcgtcagatctacctgcgttttaaagcctggtttgaccgtgtcggcggcggcgtgctggcgctgctcgggctgaagctgatgctgaataagtga

SEQ ID NO: 453648 - DNA, 1860 bp, Serratia marcescens
atgatttctctgccggactacgcagatttgcaggcctatagcggtgatgaaacgacggtcatgattgaaaaccgctaccatcatggcctgtttacccgcgacgataacgatctcaccagcccggataacggcgccaccgtattacacgacggcaaaaagcgtcgctggaagcgcaatatcaacaacggcgattaccatatcgactggtggtatgagccaggtgatgcggacgactatgcgttaaccatcacccgcgccaatgagttcctgcaggtaaatgaaaaggaatggggatcggtgccaattcccaccaccccggccggcattaccctgatcgggccaggcggcgtgcgcgtctgtaaaaccaccgccaatttaaaactgtggaaaaactctatcgactttaagggcaccatcctcgacttccgcaacccgagtgataaaacgacccagtgcgtacgcgtacgttactgcctgggggcgccggcgatttataatctgcgcatcgtcggcacccgcgacccggaaaagaatctgagcggcctgtgcgtctataccgacgccaaaaaccaggatggcatccccgccacacagctgctggtgcagaacgtctggatcagcaacctgcacaagggcattatgttcggcaaccactcctatatccaaagctggcacagcgttatggtcaccagctgcaactggccgatctggtcacagagcgccagcaacgccggcgaaaaaatcgtgttctacaagtgcctattcggcatcagtaaaaactactatcagggcgtgcataccctgttcttccgcgattgttcctttgattacagcggctttaataacgaaaccgatcagctggccgagcccaataaagaccatggcctgttcgatctgcagggcggcacgctgaactttaaagactgccactttgaatggggtaatgagcattcgcgcaactgccgcccggtatttaccagcagcaacggtgccaaagtgaagatcaaggacagcgtctggtacagcgtgaaaaccagcctgaaagacaccaaaaaggatggagatgaccaggtcgttgtcggtcagccctatcaatatgtcgactatttcttctttgacaaatcgaagaataaaaccggcgagtgctatatcgacggcttcgatctgatcaatgccgatatcaagaaagcctggtcgaatggccatattgagatgaagaacatcggcgcgccggggcatattaatatgtggcgcatgatgtacctcggcgatgaagtgaaccacctgccggaaccgacctggaaagaggccggcgcgctgcgtctcaacaatgtgtacgccgccagcggcacgcgcatctcacagaccgaaagctcggatctggcattgacgctgcaaaacggcgtgattaccgccaccaccaaaacggcaggcgacaaggcgaaacagattgcgctttacttgccgatcgccaaagacgatctggtgctgtggcgctgcacgctggacaacctgcagggggccggcgaacaactggacgtcgcgatcaatacctactggggccgctacgagctgcagggcgatgccggcgccgtcaccattcaggagaaaacctgtcagtggggccgccccggcaagctcatggccggcgcaccgcttaccctgaccgcggatcgcattaccgcggtgaaagccgatgaatcactgccgctgccggagggctacgccaactatgcgcgtatcctgatcaccctgaaaggcttcgccggcagcgccgccagcccggcctcggtggatatcagtcaattgctgtgccagcggatcaatattgtttcccgcaaccccaacaagtcttggtaa

SEQ ID NO: 453649 - DNA, 336 bp, Serratia marcescens
atggtagccgaggcgcttgaagaacgtgttattgcccttgtcagaaagcactatggtgcagttattattggtcggcagcctgtaataacgccggattctgatattgatactgacataggaatggaatggtctgatgcggaagagctgatggaggagttttttgaggagttctccgtagataaagctgggttcaatatcgaaacctattaccctgatccgccgataagcaccttgttcaaaaatttgttcaggcgtgaaaaagacctgccagaagctcccgcatttaccgttaacatgctgattgaatccgccaaggtggggcgctggttgtactga

SEQ ID NO: 453650 - DNA, 600 bp, Serratia marcescens
atgctttccctgctgctggttgacgatcacccgttggttcatgtcgcactggaagcggcgctgataaaatccggccatccctattccctgaccgcgctggcggacgacgcgcaggcgctcgcctggctcggccagcaccgctgcgaggtgctgattctggatatcggcctgccgcaggttgacggcctgcagctgttgaagaaaatccgccgccactacccgcagcagcgtatcgtcatctacagcgcgcaagaggagacgccgtacgcccgcctggctgagcaggccggcgccaacgggtttgtccataagggcgcctcgctggagcagctggtgcggtgcattgaacgggtgatgcagggagagcgcgtcttcccggccgccggcgggcaggaggatcacggcgccggcccgcagctgaccaccaaagagctgcaggtgctgggcctgttgagtaaagggctgtccaacctgcagattgccgacatgctgaatatcagcaataaaaccgtcagcacccacaagaaaaacatcctgcgcaaaaccggcgcggccaatctgctggagctggcggcggtatttaaagagctgacgccgtga

SEQ ID NO: 453651 - DNA, 759 bp, Serratia marcescens
gtggtggccgaaggcgctaaagtgctgggcgtggtggcgctgaaggacatcgttaaaggcggcatcaaggaacgctttgccgagctgcgccgcatggggattaaaacggtgatgatcaccggcgacaaccggctgaccgccgccgccatcgccgccgaggccggggtggacgatttcctggccgaagcgacgccggaagccaaactggcgctgatccgccagtatcaagcggaaggccggctggtggcgatgaccggcgacggcaccaacgatgcgccggcgctggcgcaggccgacgttgcggtggcgatgaactccggcacccaggcggcgaaagaggccggcaatatggtcgatctggactccaacccgaccaagctgatcgaggtggtgcatatcggcaagcagatgctgatgacgcgcggttcactgaccaccttcagcatcgccaacgacgtagcgaagtacttcgccattattccggccgcctttgccgcgacctacccgcagctgaatgcgctgaatatcatgcatctgcattcgccgtcgtcggccattatgtcggcagtgattttcaatgcgctggtgatcgtattcctgatcccgctggcgctcaaaggcgtcagttacaaagccatgagcgcggcggcgctgctgcgccgcaacctgtggctgtacgggctgggcggcctgctggtgccgttcgtcggtatcaagctgatcgacctgctgctgacgctgctgcacatcgccggttaa

SEQ ID NO: 453652 - DNA, 642 bp, Serratia marcescens
atgatgttccatcgatttcgttcagatcgcttcggcgatcgtcacggcgaagcgcgcgaacgccgctgccatcaccaccgcgccgggcgccacgcgatgggcggccacggtcacggcgaagggcacggccgcgggcgcggcagtaaactgcaccgcctgtttgaacacggcgatctgcgtatggtgctgctggcgctggtagagcgtaaaccgagccacggctatgagttaatcaaggcgattgaagaggcctcctccggcctgtacgtgcccagccccggcgtgatttatccgacgctgacgctgctggaagagcaggattttctggaggcggagacctcgggcaaggggcgcaagagctaccagattaccgaggccggtaaagcggagctggcgcagcatcagaccgcggtggacgtgatcttcgcccgcctggccgatgccggccgccgccgcgagggcaacctggccgaaggcattgccgataccatgcagcggctgaaacgcgtattgcgcggcaatatgatgcgcgccgatctgactcagcagcaggttgaacgtattaaccaggcgctgcttgacgcagtcggccgtatcgaggccgaagtggccgcagatgacaacgcagaggagaaggcctga

SEQ ID NO: 453653 - DNA, 993 bp, Serratia marcescens
atgagtgagataaatgcaaccatggttaacaatgccatgccggatatcagcggtaaaaaaatcctgatgggtttctggcataactggcaggcgggcgccagcgacggctatcagcaggggcaattcgccaatatgaacctgaccgatattcccgaggcctataacgttatcgccgtcgcctttatgaagggccagggcattccgacgttcaaaccgtataacctgacggacgaagcgttccgcagccaggtcgaaacgctcaacggccagggacgtgcggtgctgatctccctcggcggcgccgacgcgcatattgagctgaagaccggcgacgaagagaaactgaaagatgagattatccgcctggtggaaacctacggttttgacgggctggatatcgatctggaacaggccgcgattggcgccgccaataataaaaccgtgctgcccgccgcgttgaaaagcgttaaggcgcattacgccgcgcaggggaaaaacttcatcatcagcatggcgccggaattcccctatttacgcaccggcggcagctacctggactatattaacgcgctcgacggcgtgtatgactttattgcgccgcaatactataaccagggcggcgacggcctgtgggttgacgaggccaacggcggcgccggcgcctggatcacgcaaaacaacgacgcgatgaaagaggactttctgttttacctgaccgaaagcctggtaacgggcacccgcggctttgcgcgtatccccgcagacaagttcgccatcggcctgcccagcaacgtcgacgccgccgcaaccggctatgtggtcgacccgcaggcggtctacaacgccttccggcgtctggatgataaagcgctgtcaatcaaagggctgatgacctggtccatcaactgggacaacggtaaaagcaaaagcggcgtgccctacgcctgggaattcagcacgcgctatcgcgccttgattcacggcaacggttaa

SEQ ID NO: 453654 - DNA, 543 bp, Serratia marcescens
atggagcaaacaacagagatacgggaaggtattacccgtccgctgacgcttggcgaagtaatattagcccgttcaatatttggtaactcaattatttataataccgtaagggttcactgcgacagctacctgccctttggcctgcaggccagccataccgcaatggcgccaaatggtgaattatggtttagaaaagaactttataaaccagatttttcaatggcagacttaggtgaccaactcacctttattcacgagatggctcatgtctggcaatatcaaacgggcatgtgggtaagaatgcgtggtttatttagttgggctgcagattacaaatataggctgaatgaaaaaaaaacgttaaaagattactcaatggaacaacaagcatctattattgccgattattggttactaaagaggtatgggcaccgaacgtggctagagttcacacataggggcgttaactttcaaggcataagtgataggtttatcattatgaaatatgaactcgtgctcaatcagtttctgaaaaaaaggtaa

SEQ ID NO: 453655 - DNA, 411 bp, Serratia marcescens
atgaaaaggattttggtcatcgctataccactactgttacttaccggctgtatgcacctcaacgatccaaggccaaagcactataaagcgccggtcactaccgtggcaaacaaggtgtgcgttattgttcagcccgaagcggatgaacagatcgtaacgatacgtattaatgaaatcggcaacgataacaatacgttagaaaaatacggactggcggtgatcgcgtcagcagaacgatgcgttactgatttcggttacgcatttacagcgggaaaagcctataactttatggttatcctggaatcacccgagaaaaagaaacggggcgttcaaccctctgcccggatatacggcgcgagtttttcgctatggcgcctcaacggcaagctgcaagccacgcctctttattaa

SEQ ID NO: 453656 - DNA, 717 bp, Serratia marcescens
atgctggctgacaatggtattcatagcgatccgacagaaacctggcgtattgattaccctgaaaccggtgaaaccgatatcacgttttcgacgctgttgccggggtggatcaatggctacctgaatgcggccgactttcctgattttacccagcttatccctccgccacctgcggacgatcctcaggccatattattggatctgcataattaccagcgcgtgaagtatggcagctgccggcgccaccttgagcgttcgcagacggataaggatttgtcgtgggaaaatcttggcagacagtacgccgaggccttggagatagcaatttcccgtgaaaataccccgtgcctgcatttgctattgaaccggttgctgaccgatgccgccgttgccgtgtatccgctcaagaagcgctttgcccgccgtcggccgcgggccgacggcaaagagcgagactcctatccttccggccatgcggtgaccagtatgctatgggcattgaccctctcgtctatcctgccggagaaggcgaccggcatttaccaacgttcgctggagttcggcgccggcagagtgatttgccaggcgcattggtacagcgatattcaggtgggctatctggtggcttcttttctgttcggcgtgctccagaccaaggcggattatctccggcaaaggggcaaggcaagggatgagattgttgatgcgcggatttaa

SEQ ID NO: 453657 - DNA, 1071 bp, Serratia marcescens
atgcgtaaggaatggctttggatcggcgcggcggcggtattgctttccgcctgtgccaccactgatgagcagcaggcgccgcccgccgtgccgtataatggcccggtggtcgagatcagcggtgtggaaccccattatgaaccttataacccgggtacgctgcaggattataaagtgaacggcgacagctaccgcatcgtcaaaaatccgcagaacttctcacagaccgggctggcaagctggtacggtgaagaatccagcggcaaccgcaccgccatcggtgaaaccttcgatccttatgccctgagcgcggcgcacccgacgctgccgatcccaagctacgtacgcgtcaccaacctggccaacggccgtcaattggtggtgcgcgtcaacgatcgcggcccttatgtgaaagggcgcattatcgacctgtcgaaagccgccgccgaccgcctcaatctgtcaaacaatacgcgggtgaaagttgattttatcaacgtcgcgccggacggcacgctgagcgggccgggcaccgtcggcaccaccgtcgccaagcagagctacgccctgcccgcacgccccaacctgagcagcggcgccatgggcaccccggtgcagcaggatgcgccggcgctcaataacaatgacgtccacgctatcgataacagcactctgaccagcggtgaaacccgcgctgcggcaaacggtaacggcggcctgctcgccacgacgcctggcggcacgcaaagcgccaacgccgccgcgccatcatcagcaccgctagccgctgcggccaccgtcaccgcggccggtgcagcagcaaccgccgccgcgacagcgccgagcgcaggctatgtcgttcaggtcggtgcgctgagcaatgccgagcgcgcgcaggcctggcagcagcagctcagccagcagttcggcgtgccgggcagcgtctccaccaacggtaccgtgcaccgcgtacagcttggcccgttcagcgatcgccagcaggcgctggtgctgcagcagcgcctggccgcggaagccaaacaacaatcatttgtcaccgccgcacactaa

SEQ ID NO: 453658 - DNA, 606 bp, Serratia marcescens
atggatctttaccagaataccgtcgggagcaacctgtatgtgtggtcgcacaaacgggcagcccccagcgctaatgagtgcattattaccgcacatggtgcgtcgcgcacttccaagagcggtatgtcatccgagctgaaggatgtggagctggtttattatacccgtcacggtgaaacgctgtcggatccttcattgttgcagatgatcattggcgccgtaccgcagtatgaaagtatgaaggcgaacgaatcccatgattatgagctgggtaagtacaccaacagccaggtgaacggaggcaaacggcataacgaggcaaacgaaagctatcacagcgtcaggaatctgtacaacaccgcggatgcgaaaccgcaggagctgcgcgataacgcggcgaggttcagaagtgccggcatggtcactcatgcggacaatcttgagcgtgatgcggcgcagtataagaacattacgcagtatgatgtgatcaccctgcgtaatcgtatccaccgcagttttaattctctgacactgtctgaagtgatcagggaactgcggcgttatggctacaaatatcagagaatccactgtgcgttctgccgttga

SEQ ID NO: 453659 - DNA, 210 bp, Serratia marcescens
atggaaggtatcagtattaccaaactgttggtgattgcggtattgatcgtcttattgttcggtaccagcaaactgcgcacgctgggcgccgatctgggcgcggcgctgaagggctttaaaaaagcggtgggcgacgataccccgccggcgcagaagactgcagaagataacgccgcgaacccgcagagcgtcgaaaagaaagacgcctga

SEQ ID NO: 453660 - DNA, 222 bp, Serratia marcescens
atgtctctttattacagtgggttgcccggtaagtatgaggggaaagtcagcgcggatatcgccgccagcggcgtggcgggcaaagagtggatgaatctgccggtaaggcctgatctggtcgaggccgaacaaccagagcatctgcgcgcttatttcaaacagcgcctggaacactaccgtcgcatctcgcaagcgctgccgccgcacgttgttaatgattga

SEQ ID NO: 453661 - DNA, 177 bp, Serratia marcescens
atgcgatttttcatcggttttcttatcatcatgagcccaatcctgtggcttactgatacgctcggcaagtttgccattatcgcctggttggcaaacggcgtgattcttacctgtatcgctaaatatatcgtcaacagcaaacccaaagagtacgacgaggatcaggatgtattctga

SEQ ID NO: 453662 - DNA, 291 bp, Serratia marcescens
atgagaaaatacacatttttaagcatcgtcgccgcaatgcccgcttttggcggcaccacttttgataccttccctattggaatcggcgatccgaccgaaacggtcttgctggtgccacgggaagagcaggtgaaacctgccgcaaccggcgacaactacagctgtttttacaaaggagagaaattttctcttggcgctacgctggacggtaaaacctgccaactgatggagataaaatccagtaaactgctgtcaaaagtcagcgtaccgcagtgggtgaaagacaaataa

SEQ ID NO: 453663 - DNA, 1929 bp, Serratia marcescens
atgactgatatcagccaaactgttttgggtaatgtgcctgaggaaatgcttacgctcgctgccacgttcaagtccgcagcaggtggggaaatttacatcggtaaggttgatgctgaccccaccgttcaacaaaaccaaattcaagtttatattgaggatgaaggtaaggcgtatgtgcctgtaactcagccgttattgattaatactgaaggttatccggtataccatggcaagtccgcaaagtttgtcatgctggaaaaccacagtatggcaattcttgatgcagatggcgttcagcaattttattattctgatgctttaaaagatgcgccgtcatcttggcggcctgcggtagaaatccctttcgctggtgctggcagtatgcaacgtgtcgcggcggttactgccgacagcgtccaggattctacccatgcactgacaccggaaatgtttggtgccaagggggatggtattgctgatgataccaaggcgctgcaagatgctattaatagtgcaatttcgacaaataggcgtcgtgttgtggggatggggcagtacaaaataaagcaaaccctgcagataaaaagtgtaacaccgccgactaacgatattagtggcctggtcgtaaaattatcatcactggttgctgattcgtcatggccgcaaaataccaatctgtttgatgcgaagccgatgattactatcggtgatgcgactaatgacgtgaatgttgaactgtcgataaaccatcttgatggcgcggggaaagcggatggtttgcaatccttaagaaatggtttttcaatgacgcgtattcatattggtcatgcaactaattgcattcgcgtgattggcacaggcaaacaacagtggtctaacgcttcggtttatgtcactgggaacagctggcgtggcaattgggttggcgttcatctggagcggggtaccgtggggacgtcgccgattaatgaaggctgggatattaacgttggttttatctggtcaaaccgttatggcgggttgttactgcgcggcggttctcagtacgcaagggtctctggtgattttgacttcaatgggaactatgtttcgttattgaaagtcgatagcattaccggcgtaactcggggtatgaagttaaccaatggaacgacggaatgttatgtgctagcgttttaccactatcgtggtgaaaactatatcgcgttggcagaaaataaagtggtggcgcagggaaacagctcttacgctgtcggtgataaactaacgtctacaggcacctcgttggcaataaatgttgttaccgtgataacaacaaaaacgaatgccacgaaaaataactttttcgatatctggcatgattttcagggcgagacgtttgctgcagtaaatatcagggccgggtattgtggcggtgttcatggggcgttgcagcatacttcacgtattttctacaacaataattttgaggggcggccggataactggcgcgggtttggcgtagcaaactccggcaataccttgacgatgtatgataaggcaaagagcgatgtgccgtttgctattattgatgctcagtccttcaaccttgatcgtcgtctgttccttaaaacacgtttatatgaaggtacgccggtagccaaaagagtgcccagctctcatacgacctttacgccaatgtatactttcagcgatcaaaaaacggataagtattttgatgaaggatgtatgtatgaaattacgctgaaggggaactttggtggtacctatgggcgctggttagtttttattaaggataaaaacctgcaggtaatagaagagaattataataagacggtgtttgagtaccaattctcggatcttactttccaactgcgtcagtctgctcaaccctacattaatgttgctttgaacatcagacgcgtgtaa

SEQ ID NO: 453664 - DNA, 237 bp, Serratia marcescens
atgaagagtatttttttatttgatgcgatgcttacgccaaaaatcatcactgtagtttattggttaacgctgttgggcgtgatcgttagcggtattggtatgatgacgtacagcggagtgtttagtggtttgctggctatcctgattggcggcgtatttgtccgtgtggcatttgagatgattattattgcttttaaaaataacgaatatctgagaaaaatagctgaaaaaccttaa

SEQ ID NO: 453665 - DNA, 177 bp, Serratia marcescens
atgagacgcgcgattttatggctggctcagtcatttttttatttaattcccgcagttattatcctgttgggagtttatgtatttgtcagatatattcccggctatgctgcggttcttagcctgtcttggatcatattagtttctttcgtatatattaaatacaataaatggtactga

SEQ ID NO: 453666 - DNA, 159 bp, Serratia marcescens
atgaataccttcataaaagcattcgttcgactcggcgctgctgtgtctgcgctttcacttatctcagggttcacccgctggcccgaggccatgttcatctataacttcgtgatgttggccatctgggtgcatgcagagtgggactggcatcgaaaatga

SEQ ID NO: 453667 - DNA, 798 bp, Serratia marcescens
atgacaacgattattcgcaatctggatatggaaattaagaacccaacattaccaccgctgtttgagccgtttgccacggtgtcgggcctgatggctggatggcgttttggggatggcttctccgatctgtctggtaacggacacacgttaaaggctgtcggtacgccagtatttaacacgttctttgtgactggcgataaagacaacggctttattaccgatgtaccggacggactgcagcgcaccatgattgccgtttatcgccaggctgcggacgtgaacacgttcggttaccccgtagggaacattgtgcagtcggcctcggcaaacggggaaggcattgccattacggatgtatcagtggacgcacttcgccggcgttcattgagtattggcggtaaagcctacaatgaaaaactgtatggtacggcggcggggccttctgaggcgacttcaagccgtaacaactttgtatttactgctgtcactgttgatggcgcaggtaaccagggcggcttatatgtaccttctgccagcgctgacattatcccggcaacactcgctgaaggcgcgaatctggccgaacgttcggtgacggaaaaggatacggaaagcttctatcgcattatcacctggcgcaatccaaacttgccgccggtgccgccttcaagtcccaatacagggctggctgttgctgaagtgttgatttatgaccgggtgttatcttttgatgatctgaaggttcaatacggccgttctcagcgttacttcaagaacacgtttggtgtggtcgtttag

SEQ ID NO: 453668 - DNA, 1809 bp, Serratia marcescens
atggccggcacagttgcagggcagtattttcgtgttcctggcggtgttgatgacaatgttgccttctactactacttgaacgacgacgggaaagcggtgcaggtatcgcagcttgttggtgccgcagctgttgagagagccatattggccgcgaataagtcactcgcacaaagtggtgaaattgataagcgtacgcaagggtatggcgttgaaaaaaaggtttatgacactgaaggggtattaatcggtggtggcttttttgacgccaaaggggcctctcctctgaattatacagagaatggcgacgtaaatattactggtgcgcagtttaaaaatatccccaatcaccctgagtacgattgggcgcaaacagataaaaacaacatcccctatatcggcggctcaaaaatgggcggcgccattattggtcgtgttgaaattgtagagataccggggccgcccggcgtcgtgtttgtcgataagaattacatcccttacgccgctgatccaagctatgacactgatttggatatccctgttatcggtggcgcagcaacaccacctgtgacaccgccgtcaccattccgaccttacgactacatgggggtgcgcagtgaggggcagtctctctccctgggagcggcaaaccctaatgacgatcctcaaccggtcagcacagaacagcgctatgggaacaaggggttcagcactaacaacaacagcggcatgaccgacacagacacgctggttccgctggtagaaaagcgttaccaacctgctgagggaacctggccggcggcggaaacccctgttaccggcgcgacgcataagctggtggaaatgatccaggcagaaacagggctatcctttgaccatcaggccagcgcctatatcggttctgcgcccggcactggcggtcagcctatcaagaacctgattaaaggcactgcagcctatagccgcatgatcgcccacgttaccaacagtctacgcctggccgctgacgaaggaagaacgtttgctgaactggcagttgtgtggatgcagggcgaatcagattatcgcgatcagacgtcgcgcgctgactatctcgctctttacctgcagtacatcgcagattcgctggcggacaaaaaggcgatcaccggccagctgtttgaccccatttttatcagctaccaactcagcacgcaccgggcgtaccgtcgccgggacccgcttgtcgctctggcactgcgtgacgccgcgatgttgggtaaaacggaaatcgcgtatcccggttacatcggtgattactacgcatcagaccacatccacggcatgcccgagacgtactacatgttctcccagtatacgggccgcatgatttacaaaaagcggcaggacatgcttgagggcgtgacgcgtatgcatcgtcttgatgtgatcgatgaaatccgccagggcatcttcaccatgctctatttcaacgtgccggctccgccgctggttttcgatacagactgggtggcgccagcggaaaacatggggttctacattcgtgacagcgtttcgctcgacgtcatagacattatcacggccgtcgatattgctggctccgaccgtgtccgcatcacgacatcgcggccactgcgcgatagcgaaatagtcacttacggatggggcaaggcaggtgatccgctgacgaacggcagaacgacggggccgcgcggcaacctgcgtgatagcgaaggggatttacccggcgaaagctacacagacggcgcaggtgttttgcgcaaactgcacaactggtgcgtaattttttaa

SEQ ID NO: 453669 - DNA, 3378 bp, Serratia marcescens
atgcttgcaattgaaggccgcaaaggtgggagcagcacgcccagcgcgccaaacgaatcaccggattctctgcagtcaacgtcatatgcaaaaatgcttctggcgctgggtgaaggggagtttagcggcaatctggatggtaagcgcatcttcttggatggcaccccgttgatctcggcagacggcacagagaacttccccggcgtgaagtgggagtttcggccgggtaatccgcagcaggattatattcctggtattcccagcgtagagaatgagatcgctgttagcactgaattaacgagtgatcgtgactgggtgcgggctgttacgaatacccagctttccgctgtgcgtctgcgtttttcttggcaacaactgcagcaacagcaagataacggcgatgtggtcggttaccgcattgagtacgcccttgatatttcgaccgatggcggcgcatatcaagaggttttgcgcacggcggtggacggtaaaacgacaacaaaatatgagcgtagccatcgtatcgatctgccggcagcctctactggttggcaggttcgggtgcgccgcattacaccgaacagtaccagcaaccgtatcgccgataaaatggttgttgaggcgatcactgaagttattgacgcgaagttacgctacccagaaacagcactgctttttattcagtttgatgcaaagcaatttcaaaatattcctcaggtatcgagcgagccagatggtcgcattattcgtataccgtcaaactacaaccccgagacacgcgaatatagtggtgtgtgggatggtacgtttaaaacagcatggacggataatcctgcctggatactgtacgacctgatgctaaatgaccgcttctctatcggcactcgcgttaaagcagaaaatctggcgatcactaagtgggatctgtatgccataggccagtattgtgatcagctggttcctgatggacgtggcggagacgggaaggaaccccgctataaatgcgatgtgtatatccaatcgcaagaggatgcatggaacgttttacgtgatatcgcctcgatattccgtggcatgtctttctgggccaacaatcagatgtatgcgctcgccgatatgccgcgagacatcgattatatctacactcgtgccaacgtcaaagatggcaaattcacgtatgccagcgccagtgaaaaaacgcattacagcacatgcatggtcagctggagcgatccggcaaatggttatcaggatgcggttgagcccgtatctattaatgcactgatacgccggtggggaatcaatcaggcgagcctgacggctattggttgcacgcgtaagtcagagtctattcggcgtggaaaatggttgctgcttagcaacgaaaaggatcgggttgtatcgtttaccgttggccttgacggaaaaatccctctgcctggatggatcatcggcattgctgatgaggcgttggccggcaggccgctcggtggacgtgtcagctccgttaatggccgcaatatcacgctcgaccgcgtatcgtcagcggtggcaggggaacgtcttgttctaaacctgccaagcggtaaggcggaggggcggactatcgccgccgtgaacggtaaaaccgttacggtaacaaccgcatattctgaaatacccgttgctgaggctgtatgggctattgacgcatcagatttagccctgcagcagttccgcgtgacaggcattaaagaaaatgacgatggtgtgtcgtttgacatcactgcggtagagcatgacccgaataagttcgcgaaaatcgacacaggcgctcgtgtagaggacccgcctatttctgtcatcccgcctggcgtgcaggcgccgccggataatgtgcagatcagcagttactcggccattattcaggggctgtctgttgctacgcttcgggtgacgtgggataaagccccgaatgcgattgcctatgaagccgaatggcgccgggataatggcaactggatcactgcgccacgcacatcaacgcttggctttgaggtgcagggtatttatgccggccgctatcaggcccgtgtccgcgccattaacccgtctgaaatttccagcgtgtgggctaatgcggcagaaatgacgttgaccggcaagcagggagagccgccggccttggcaagcttcacgacggtaggacaggtgttcggcattgtcttgaattgggaatttccagccggagccgaagatacacagcggactgaaatctggtatagccagaactcagatggcagcaacaaaatgcatctcggcgattatgcttacccgcagcgcagccacacgatgacggggctggccgccggtgttaatttctggttccaggcgcgtttggtggacaagctggggaatactggcccgtggacaaactgggtgcaaggtacatccagcgaagacgccagcgaggtgttggattatctgaaaggaaaaatcaccgaaactgaattgggtcaggaccttttaggtccagttgaagatgctggaaagctgaaggatatgtggtcggtcaaagttggccagactgttgacggcaagctttataccgcaggtatcggcgttggtgtcgagaatacccctgaagggatgcagagtcaggttctgattcttgctgaccgttttgccgtgctcaataccgttgatggaactggttctgcggtatctgtaccgttcgcgattgataatggtcaagtctttatgaattccgcattcataaaagagggcactattgatagcgcgaaaatagcgcaacatattcagtcaacaaattggatagatggtgttcagggatgggctataaacaaagatggtggtgctcagtttaataatgtttttgttcgtggagcggttcaagctgatgccgggtatttcaataacggaactattggtaattgtcggattcttcaaaactgcactatagaagggaaactatccgcagccaacattgaaggcaatctcgttcagggtaattcattctcctttgaattacacaacacgaatgctcagcgagttgtgcgttatgaaggaaacccattgttacccatgcgggtatatgggtatgtcatggcgagaatgaggtggcaagataagaccaagatatactttaatggaaatgaagcgacagagatacgtggtattgaattagcaaaacagaacggtaatacgtcatccactgtatatactaatatgtattctttctcaaaagatttaaataaaggtgaagggctagatataaatgtccatgctggtgccctggatcaggggcggggtgaaatgactgattatattgtaatggtctgggcaaccccacaagtcagtgggtttagtcttaactaa

SEQ ID NO: 453670 - DNA, 711 bp, Serratia marcescens
atgcgccagaaaataatcagtgccgtcatggctcacgcaaaagaggcgcaccctgaagaatgctgcgggttagttgtgcagaaaggtcgccagcagcgttatgtacgctgcaagaatgtggctgaaaacccaacggaacaatttatgatcgcgccggaggcatttgctgaagctgaaagcgatagctgggtggttgttgccatcgcacacagccatcccggcgatggcgcgactacgcaaccgagtcagttggatatcgcacagtgtgacatgtcacaagtgccgtggattattgccagttggccggagggggacatccgggagattatgccggcagcggaagtgcggccactgcttgagcggccattcgtacacggcatctgggactgttacgccattgtgcgcgactggtatctgcttgagcgaggcattacgctgccgaactttaaacggactgacggctggtggaaccgaggcgaaaacctctatatgaagcactacgccgaggcgggatttgtaccagcgactggagaaattcagatcggcgacgtaatcattatgcaggttcgtgctgatgaacctaaccacggtggcgtgtatattggcgacggcacgatgatgcatcacctctacggacaactgagcaaccgagtgccctatggaggttactggcaggagaggacagtcacggttttacgttacaacggctga

SEQ ID NO: 453671 - DNA, 354 bp, Serratia marcescens
gtgaaaattgaggagtttaaatattgccctcgcgttaaccccgttggggatattactcagcgggttcgtgaggtgcagttcggcgatgggtataaacagcagtccggtgacgggcttaatagtgagcaccagagctggccgctgacatttgttggtgattggcaatatatcgttggtatccgcacctttctgaaacggcatgagggctttcgcgctttcacatggagaaaccctctgtttgagcttggactgtatacctgtacgggccatcagatcacagcaatgggaaagaactcccgtggtgaaccgatgtaccagcttaccgcgacgtttgaaaccgcaaacaggccatag

SEQ ID NO: 453672 - DNA, 3291 bp, Serratia marcescens
atgggggccgactactacaagacaatggagcgcggtaaccggcaagcggagtatgcaacccgccagagccaacgcgcgctgtcagaccttaatggtcaactggcaacggtacgccaaactgcgctcggcatggccggcgcatttgctggtgcttttgcgaccggtcaccttattagcctggccgatcagtggaatcaggttaatgcgcggttgaaacaggcgtcgcaatcgtctgaggatttttctcgcagtcagcagctgctaatggcaatcagtcaacgaaccggtactgcatttgaagataacgccggcctgtttgcgcgatcggctgcgtcaatgcgtgaattcggttatgcctccgatgatgtgctgaaagtcaccgaagctatttcaacagggttgaaactttccggcgcgggtacgcaagaggccagctctgtcattacgcagtttagccaggcgctggcgcagggcgtacttcgtggggaggaattcaactcagttaacgagaacggcgaccgggtgatccgcgcgctggctgcaggcatgggcgtcgctcgaaaagacctgaaggcgatggccgatcagggcttgctgacaatcgataaagttgtgccggcgttgatcagccagctggggactttgcagggtgaatttgcggcaatgccggcgacggtgagcggttctatcaccaaagttgagaattctttccagcaatgggttggcggtgttaacgaaaccagcggcgttactgccgcattgtcgagcacgctggatagcctggctgacaatatcgataacgtggcaacagcgttaggcgcattggtcgcaatcggtgccgcgcgctattttggcggaatggtcagcagcatgggaacggccacggccggactcatggcgacgtaccgtgctgaagtttctgtcgctgcagcacaggttgaaggcgccaagacagcaaccgctgcagcgcgtgcaacgttataccgcgcccagcaagcaaaagcagctgcagttggtcttgaacaacagatcgccgcagagcgtcagcttgccattgcacaaactcaggtcgcgcagagcgtagaggctcggagcctcgctcaaacccgcctgaactcagtcacgtccttgggcgcccgtttggggagtagtctgttaagcgctgtcggtggcatacctgggatcgtgcttggcgttggcgcagcctggatgtatgtcaacgagaaaaacgagcaggcgcgtaaagttgccctggcatacggcgataccgtcgagaaggtgaaaaaccagatttccgggatgtcccttgcaggacttcagtcaacagctgttgatgccagcaagtcgatctctgttcagcgcgctgaaatcgcaaaaacagaagaggaaatccgcaagctaaaggacagcatgtccgcgctgcagcagatggaagcggctgcgagagaaagcccgtggctaagtcgcatcaacaacctgatgtcgctcgaagatattcagcagaagttggctgatacgcagggagagctgagccagaaaaactatgcgctggaacgtcaaaccgaaacgctgagatcaaccgaagcgttgcgtgcatctgcgttgaatgagtcaatcaacaaaacagcatcattggctggcgccgtcgggtcattgacggaaatgtattccgaactgaaccgcgtcacaggtctggcgacaaacaccgcagcacccaagttccccggcatgcagctcccgcagcttgataccaagcagcaggaagccatgaccagagccatgcgcgatcagcaactggccgggttaaagggactcgacaaggtgcggatgtctgccaccttcgaagccgatgatctgaaactccccccggggcgttatgagcaatacatcgccgcaaaagttggagccgagcaaaaaacccaggcattggcaaaggcgacaaaagagcagcaaaaggccgagcaggacgccgccagtgcggcaaaacgctcagcaacggttacgggagagtatcagcagaaaattacaaacctgaacaaacaaattcaggttgaaaatgttcggctgaaagaaggggatgcagctgcatcgctgttcgccgcgtcgctggaaactggcagcaaatggaccgatgcacagcgcgctgagttggtacggctaaacaaaacgttggccgaggcaaaacagcgctgggaggaccacaacgccgcgatagcgtcagatccataccgacaggcggcagacgctcagaaaaaggcaagcgagcagctacagcgccagattgccgggggagaaatccagagcgccgaggaacttgcccgccgcaaagaggaaattaacagcaattatctcaatgcactggcggaggcaaatcagcgttatgccgtatcaagcgctcaggatatggccggcacggttgacccgctgcagaatcttgagaaccagttggcaaaacgccaggcgttgattgaaacctacgccaccgccggcgtcatttcagaacagcggaaaaaccagttgattctggcctctgaaaacgaaaccaacgagcagagataccaggccgcaatagaactgtatgccgcgcaaggcgacatgcagaaaatggcggttgatatcttccagacatctcaagagcgcgtcacaaacatgctcaccgggatgttgaccggcacgcagtcgtttaaggacgggatgatcagcctgttctcgtcactgacgcaggccattgtgaaaaaccttgttgatatggccgcacaggcacttgtgaccagcaccatcatgcgaacgataaccggcgtggttggcggttttgctggtggatttgccggtgccgccggcgcagctggatcagcaggcactggcgctatggggatgagtacgagctggacggcgtacgccaatgcgaagggcggcgtttattcgtctgcagacctcagccagtacagcggtcagatcgtcagccaacccacaatgtttgcatttgccaaaggtgccggattaatgggtgaggcagggccggaagcgatcatgccgttaacccgggcggccgatggttcgctgggtgtacgcgccatttctcaaggcgcgggtggtggtggcggaggcgtgccgcaggtctacataaacattgagaacggcagcgggcaggtatcacagacatcatcgcctggttgggagcaattcggtgctgagattgggcgacttgtcgatcaacgctacagggtgctgattgataaggatctgggccagaacggcaagctgacgcagcggatccgtggaggaagatag

SEQ ID NO: 453673 - DNA, 288 bp, Serratia marcescens
atgaagttggccctgcgcctgggcaagacgcttggtgagatgaagcaaagcatcagcatcagcgaattgcggctgtgggctgcatatgaccgcattaatccgatcggtgatatgcgcggcgatgtgcaggcggcgcaaataaccgccgctatctacaacacccagcgcgggccaaaagatcagcctatctcgctcaacgatgtgctcattgagtggggaggggaggaagaagaccaggacggtgatttttctggacttgaggcatggctggataaacaggctggctaa

SEQ ID NO: 453674 - DNA, 420 bp, Serratia marcescens
gtggctaaacataaagcgaatttaaaggcgctagtctctgcccccctggcggggttccgtacaaagacggttattgttgatgagtgggatggagcaacggttgtgctgcgtgagccttcgccggatggttggagccgctggcgtgaaattctggcgcctaacgaaagtgaaactgaagaagacgcgccgaaactgtcaatcagcgagcagactcgccgcaatatccgtgctgatgcagtgatgtttattgatgtattgctggatgaagatcgcaatccggtattcggttttgatgagatcgaagacgtgatcgcgttttacggcccggtacacgcgcgcctgctcaaacaggcgatggaccttgcgacgtcggcagaggatgctgaaaaaaagtcagagagccagacacccaattcctga

SEQ ID NO: 453675 - DNA, 711 bp, Serratia marcescens
atgaccagtaagtacgaaaaaacgcagggtacaaaagtttttatctctgcagatgaaccatcttcggtagacgatccaaatatcacgtggctggcaggccagtgcgccaccaaggagttgagctttactgcgggtcaaaaggccgacattgatgtgaccacgctgtgctccgaagagcaggaaatgacaaatggcctgccatcacctggcgaaatgaccatcagccgcaactgggtgggtgatgaagaggcgcaggagtcactgctcacggcgtatgaaacggacaaaaagcgcgccatcaagatcgtgttcccatcgggtaacggtttcgtttacctggccgaggtacggcaaaatagctggtccgcctcaacatctggtgtcgtttctgcgtcgtataccttgcgtatcaagggtaagccattacgcattaaagcgtccgatgccgttccggtcactggcatcactttgaccccaaccagcggcagtgtggcggttggagcaaaaactacgttcaaagtgaacatcactcctgccggcgcaactgataaaaccagcacggtgacatcatctgatacggcaaaagccacggcgacaatttctggcgataccgtcaccgtgaccggcgttgctgcaggcacggcgaacatcacggttaaaaccaacgacggcggcaaaactgcaacgttcgctgctactgtaacagcataa

SEQ ID NO: 453676 - DNA, 348 bp, Serratia marcescens
atgactgaagccgatattaagcccttgctcaagccgttagtaaacggccaggcgtacccatatgttgtcaaattgacagcggaaggtaagcctgcagttagtccgccgtggatcgtttattcgctcccgagcgatacggcatctgatgttttttgcgggcaagcagagacagagagcctgatccaggtggatatctatgccgacacaatagacgaagcctcagcgctgagaattagagcgaaagcagccatcgaaattttttcgccggcagaggtgaggatgttcaaagagtatgaacctgacacaggtctttatcgcgcatccttcgaattcaaagtctggcagtaa

SEQ ID NO: 453677 - DNA, 327 bp, Serratia marcescens
atggagccgggacggtttaggcatcggatcatggtccagaacttcgagacggtagagcttccttcaggtcaggaaaagcaaatatgggttgatgtcgccgacaaaaagatacccgccgaagtgaaggcgattagcgggcgagaactgattgcatccggcgccgaacgcgctgaggcaactgtgcgcatctggctgcgttatcgtgatgatgtttcgtcggcgtctcgcgttttattttgcggactgtcgtatgacattgttgctgcgctccctgacgccaggctgacccggttggaactgctgtgtaaagcgggggtaaaaatatga

SEQ ID NO: 453678 - DNA, 345 bp, Serratia marcescens
atggcgattaaggtcaccgatgttgtgcctattgaggagctgcgccagcacatagagtttgacagcgatgatcgggacgcagtgataacgcgttatgcgcaggcggcgttggattattgtctgcgctggtgtgacgaaccgcgctggaaaaccgccggcgatgttccgtcgcctgtagtttccgcaatgctgttggttttcggcgacctgttcgagcatcggacaggacaaagcgaaattcagctctatgagaataaagcggccataaacctgatgtggacatgccgcaattggcgtggccgagtcgatgaagaggaggtcagcgatggagccgggacggtttag

SEQ ID NO: 453679 - DNA, 1167 bp, Serratia marcescens
atgtccgaattatcacaaatccagaaagctatcgaagactcgcagaaaaatatgacgcagctcttcgaggcgcagaaaaaagaaatcgaagaaaccggccgtgtttcaaaacagctgcaggatgacctgtcgaaggtacaggaagagctgaaagcatcaggcgcccgcctgttcgatctggagcagaaaggcggtgccggggcagaagaccctgaagggaaaaaagacttttctgagcgagtttctgaaggtctgatcaagtcatggaacggcagcaaggggacctatgaagcacagaccttcaataagtcgctgggaagtgacaccgcatctgccggcgcgctgatccagccgatgcaggtccctggtattgtcgcaccaggattacgccgcctggtcattcgtgacctgctgtcgcaagggcgtatttccagtaactcactggaatatgtgcgcgagaagctgttcaccaacagtgcggcgccagtgaaagagaaggcacaaaagcccgaatctgacctgaccttctcgaaagaaaccgccaacgtgaaaactatcgcgcactggatccaggcatcacggcaggtgatggatgatgcgccaatgctgcaatcttatgttaacaaccgcctgctgtatggcctggcgctgaaagaagaagagcagttgctgaacggtgacggcaccggcgataacctgtcaggcattaacaacgtggccacagcatatgacaccacgctgaacgtgaccggcgacaccaaagctgacatgatcgcccacgcgatttaccaggtcaccgagtctgagttcagcgcatcgggcatcattctgaacccgcgtgactggcataacatcgcgctgttgaaagataacgaaggccgctacatcttcggtgggccgcaggcatttaccagcaacatcatgtggggtctgccggttgtgccgacccgtgcgcaggcgcagggtacattcaccgtcggcggtttcgacctggcctctcaggtttgggatcgtatggatgcgactgttgaagtcagccgtgaagaccgcgacaacttcgtgaaaaacatgctgaccatcttgtgcgaagagcgtctggctctggctcactatcgtccgcaggccctgattaagggaacgtttgaagcgccggctgcagccaaataa

SEQ ID NO: 453680 - DNA, 1515 bp, Serratia marcescens
atgacgcgaggtgagcgcgtaatagcgttcatcgaacgctattgcattgtccctgaaggggccttgcttggtcagccgatgaggctggacccatttcaaaaagattttatcctggcagtttatgacaatccgcacaggacagataaagcgatcctgagcattgcgcgtaaaaacggcaaaacgggcttgatcgccggcatcttactggctcacctggtcgggccggaggcagtgcaaaatagccagatagtaagcggtgcaatgagccgcgagcaggcggctatcgtttttaacttggcagtgaaaatgattaacctgaaaacagaacttcaggagatcgttcacatcatcccaagcgggaaacgcctcatcggtaaaccatgcaacgtcgaatacaaggcgttggctgccgagggcaaaaccacacatggtctttcacctattctcgccattcttgatgaggtcgggcaggttcgcggctcccaggatgattttgttgatgccattgtcacggcgcagggcgcgcacgatgcgccgttgctgattgctatcagtacgcaagctgcgaacgatgcagacctgctaagcgtctggattgatgatgctaaaaactcgcaagatccgcatattgtttgccacgtctacgaagcagataaagacgcagatgttagcgaccgggaagcctgggaggctgcaaaccccgctttaggtactttccgctcattgagggatatggagcgcttagcccagcaggcggggcgcatgccaagctttgagaataccttccgcaatttaaacctgaatcagcgcgtatcgacggtatcgccgtttatgtcacgcaacgtgtgggaatcgtgcggcgaggcaccaaagccgatcaccggaatttgctatgccggccttgacctgtcggagagcaaagacttaaccgcgttcgttatcgtcgggcaaagtgatgatggctggtggaatgtttatccgtatttctggactccggaaaaaacattactcgacagatccaaaaaagaccgcgttccgtatgacgtatgggctcgtgaaggggtgctaaatacctcccccggttcattcgttgattacggtgtggttatccgcgatatcgcagagattatcagtgaattcgacattggctccatcgcgtttgaccgttggagaattgagattttaaagaaagaggctgacgcgattggccttagtttgcccctggcgcaatttggccaaggctttaaagacatggcgccggcgctggatacactcgaagccgccatgttaaacggcaaggtgcgtcacggtatgcacccagtgctaaccatgtgtgcggtgaatgccgttgtggtgaaagatgcggcctcaaatcgcaagttggacaagtcaaaggcaactggccgcattgatggcatggtggcactggcaatggcaatgggggcggctgcgggggatgttgtcgagcagcagggcaacattgatgattttctttccagaccgttgagtatgtga

SEQ ID NO: 453681 - DNA, 486 bp, Serratia marcescens
atggtgacaaaacgaacccgttccgacagttcgacggcggagattcaggccatgaaaaatgctgctgaggacaccatccaacctccggcgcatgcgggtctggagaaaaaagccgatccgttctggcatgacaatatccgctcgaaagcgctggacagttggacgcctgctgacctgctggcgtgcgcagaattatcaaataatcagctctatatcaccgtattacgcaaggatttgcgcaaagaggagcgtacccgaggtgaagggcgtgatgaagggttaatcaaagacctgcgcaagcagatcgtcgagttgcagcgtactattctggctcagcgtcgtgatctgcagatccactcccacgccacgaacggcgaaagccgcgaccagcgaaacagaaacaagaacgatcaggaagcccgtaaggttgcaagcaagcacgccagccaggatgacaatctgatcgcatttccaaaacacgggtaa

SEQ ID NO: 453682 - DNA, 339 bp, Serratia marcescens
gtgaaagagccgcgcatatacggtagcaaatgggataaggcgcgccgaggattcctccagagtaacccgctgtgcgtcatgtgcgcgcagcagggtagaacggtagccgctgttgtcgttgaccacatcgagccgcacaagctgaaagaggcgctgatgtcgggtaacaggatagcgatagcaaaagcgcaaaaactattctgggacaaaaagaactggcagggactgtgcacgccacaccacagcgctactaagcagcggatggagaaaggcggcgtagttgttgggtgcgatgctaacggcatgccgctcgatcctaactcacactgggtgaaatga

SEQ ID NO: 453683 - DNA, 225 bp, Serratia marcescens
atgtacacactgaaaatcatcaccgagaacaagaacgaggtcattcaccccgttgagtccattgagtggaagccggctgagaaagccatttatgctgcagcttgtacgggtgagctgctgcgattaacgctgttgcccggtgataccgcgtaccttgtcaacgacatcaacagaacggtggcgacgtacacgaacactcccgcactgaatggagcggccgcgtga

SEQ ID NO: 453684 - DNA, 579 bp, Serratia marcescens
gtgagcattccattcaactggcgaacggccgtcatcattttggctctggttacactggcttgtgccttctggttagccagccactaccacgataaagccgaaaaactggaaggcacggtgcagcagctgcagcgcgaaaacactcaacaatctgcggttatcgcgcagcaggcaatccagttccagcgcgcaaacgagataagcgccgccgctcaccggtacggtatcaacaccgacgccgcaacgcaggagaaagagattgaataccggacgactctcaaaaatcagccgacgtgtgatctggctgttcccgctgctattgctggccggctgctcgactacacgcaccgtctacgtgccggcgcagtgtcaggcgataccagcgatgctgacgcaaccggtgctggctccactgcctccggcaccctgacgtattgccaggctgtgctgtggattgacccactgttagcggcaatagataaggcgaacaatcagctgcgttcgatacgccagcttgattcggagagaaatgatgggaagaaaggctccaactccgccaccatacaatccgggggataa

SEQ ID NO: 453685 - DNA, 540 bp, Serratia marcescens
atggcttcggtaaaaactaaactcagcgccgccatgttggcgttgattgctgccggcgccagtgctccggtgctgttcgaccagttcgccgatgagcgagaaggaaatcacctcaaagcatacgcagacggtggtggtatctggtctatttgccgtggcgccacgtacctggacggcaagccagtcaagaagggtatgacgctaactgcagctcagtgcgaacactacaacgctatcgagcgcgacaaggcgctggcgtgggtagacaaaaatatcaaggtgccgctgaccgcgccgcaaaaggccggcattgcatcattctgcccgtacaacatcggcccgtctcgctgcttcaccacaacgttttaccgaaagcttaacgcgggtgaccaacacggagcatgccgggagatacggcgatggatttacgacaggggccgagactgccggctgacgaaagggaaggccaacggctgctatgggcaggtagaacgcagagaccaggagtcggcgctggcgtgctgggggatagataagtga

SEQ ID NO: 453686 - DNA, 255 bp, Serratia marcescens
atgccggagaaaattgcagacaatgccacgcatggcggatggctcctgagcctggtgttgggaggcataaattatttctctcccagcgaatggatggtgattggcattttcgttggcattctctgttcagttattgggtgcatcagcgcaatctggtttagatgccagcggctgaaattgctcaaaacctatctggtggatcgttcagataaaagcgccagtatccaagatgctgacctgataggcggtgagtga

SEQ ID NO: 453687 - DNA, 987 bp, Serratia marcescens
atgagagcattgctaaagccaattatccagcccgaattagggctggtatttctcaagcctggtaaggagcttctgccgttgttttctacccgggttttagtatcacgtgcgccaagtgagtttgcaaagttgccgtctggcgcgctgccggcaccagggcaagagctggcgaatgatccacggtttacgccgttctatcagcatgagcgcgtgctcaatgctgctggtggcatcagttcgctggagcattgggtttctctaaagcgtggttgccagattgaaggggatcacaccaggcacttgacgacgctacgctacgacaacagcgcaatcaggctatgtgaggggtgcgacaaccgactgcgcgggcagtctatccctaagctgcaggtggtggccgactcgaacctgacggcgtacatcttggaaatggtgcgctcgtacttcatgttcgacgaaagccaccagctgacgttgccagagctgtgctggtgggctgtgatgcatggcgtcgctgacctactgccagacgatgtttgctctgcttctcttcgtctgccacctgcgaagatccacactggcggccggaaagagtcggagataacgcacgtgccagcggcgcggcatgtggtggcagagaaagtgaagaaagcggcaaaaactctggttatcgacccggagccgccgaaggcgttgttcaagttgccgaagcgcgagcggtgggaaagtgcgccatacctgaagtgggttaaatcgcagccgtgcgccgcttgtggcggtactgctgatgatccgcatcacatcatagggcacggtcagggcggcatggcgacaaaggcgcatgacctgttcactatcccgctgtgccgaaaacaccacgatgcactacatcgtgacatgtcacgatttgaagaggagtacggaagtcagatagagctgtggttcaaattcatggactggtcattgtcggtcggttcaatcaaataa

SEQ ID NO: 453688 - DNA, 921 bp, Serratia marcescens
atgctggataaatattcagatgttggttatgttgaaagggcagttaatcgcctccccaatcactatgcgggtgacggggtggggaggctgtcaaaaacacgtgtgagaggaataaaaatgaatcaattaatttcgattgatggcgtagccgtgcgtcaagatgttaatggccgttactgtctgaatgatttacaccgcgcagctggtggcgaggcaaagtatcagccagggcttttcctgcgattggactcaacgcaggcgttatctgatgaaatattaaactctacagatctgcagagtttgcctaccgagacaatccccggtcgcaacggcggaacctatgtctgcaaagagctggtttatgcctacgcgatgtggattagccccgcatttaacctgaaagtgatccgtacctttgacgctgcagtgactgaacggactgcgccacagacagcagaccgcattcaggcagggatattgttgctggaatcagccgcccgtctgcttaacctttcaaattcgtcaaaacttggtgcttaccagaagcttcaggactttgctggcatccctaacctgatgccggcgtatgccatcgacgccccatctgatgctgctgacggctcaagccggccaacaatgtcactgagtgccatcctgaaggagcatgctatcccggtcagccctcaagaggcctaccgtcgtttggaagagatcggcattgttgagcaccgctcccgtaatagcacatcacgcaaagcgaaaggtggcgttaagaagttctgggcagtaactagcaagggattagcatacgggaaaaatattaccaaccctggcaatcctcgcgaaacccagccccatttttatgactcccggtcacctgagctcatcaagttgatgatgaccgccaaagctcgctgctga

SEQ ID NO: 453689 - DNA, 378 bp, Serratia marcescens
atgatcctgacattgccattcccaccatccgtaaatggctactggagagcgcctaacaagggatctctcaaaggccgacacttggttagcgacagggggagaaaattcaacagcgaggcgctggcgagcattctggagcagttaaaccctaagccgagggcgctaacctgtgatttagccgtttcagtggtgttttatccgccgacacgggctaagcgagacctggataactacttcaaggcgttgtttgatgtgatgacccgggcgcgcgtttggcttgatgacagccagatcaaaaagctgtctgcggagtggggaccggtgacgaagggcgggaaagttaccttgcatatcagcgaggttgcaaatgctggataa

SEQ ID NO: 453690 - DNA, 570 bp, Serratia marcescens
atgaagtattcactgatttatgccgatccgccatggagctacaaagacaaatgcgcatcagggaagcgtggcgccgggttcaagtacccgacaatgagcgttgccgatatctgccgtttgccagtgtgggatctggctgctgaaaactgtctgctggcgatgtggtgggtgccaacgcagccggaggaagcgctgcaggtgatgcgtgcatggggattccgactgatgaccatgaagggtttcacgtggcacaagacgaacctgcgcaaaggcaacaacgcgctggggatgggctggatgacacgcgctaatagcgaggactgcatgttcgcagtgcgcgggaagctgctgcagcgccatgacgcctcgatcagtcagcatgtgacagcaacacgcatggagcatagcgccaagcctgatgtattccgggaaaagctggtgcagctggtgggcgacgtaccacgcattgagctgttcgcccggcagcaggctgatggttgggatagctggggtaacgagtgcgatcagtccgttgtgctggtgccgggaaaagcggaggtacccgcatga

SEQ ID NO: 453691 - DNA, 348 bp, Serratia marcescens
atgaaaaaattaaccatcgacgttgacgtgtttgagagcgaacgcatcaacagcggtatccgcaagttagttcgggccggcctactgaaagacaacccagagaatcagatgggtcgagttattcaggctgcagctggtgccaaatggatgacgctgcgcgagctggagaggaccgtattcatgatgttctttgtggcggatacccaggcagccatcagcgcacggcttcgcgaagttaacccaaaggtccatggtttggtgaaagagcgccgggctgtcaaagatccagatacgggcaagctggtttatttctaccggctggtggctgcagaggagctggtggcatga

SEQ ID NO: 453692 - DNA, 690 bp, Serratia marcescens
gtgaataagattatgcaagccgtacagaaccgcgacgccggaacgctggcgcgcatgatgccaaacgagccagcccagcgcgtagtgaacgacaacgctgaaaagctggtggatctgctgttcaaaaacctgatgcagatattccctgcagcgaagaacactgcactgagttcgccagaagacgttgcagccgccaagcgacagtggatcctggccttcgccgaaaacgggatcaccaccgccgaccagctgcgtgccggcatgcgcatggctcgtcagcaggagagcgacttctggccgtcgtgcggcaagttcatcggctggtgtaaagccggtgctgctgagtctgctggcctgccgtcgctggatgaggcggtggccgagttcgacaagtatgccgctacgcgctcgcagtacccgtctgccgaggagttcccgtggtcgcacccagctatgtactggatcgtgattgacgtccgccgggcgatgcatcgctacaaccacaccgaggccgaaacccgcaaagcgatccagaaccagctgaacggctgggctaagcgtctggcacgcggtgagcaaattccaagtccagcggtacagatcgccgcaccgaaaaccccggcagggccgacgccggcgcagctgctgcaggcagagtacgaacgacgcaagagagagggctggctatga

SEQ ID NO: 453693 - DNA, 975 bp, Serratia marcescens
atgagcaaaatattcgaggtggttcagtccatgtctgggcagaagaactgcgttgtaatacctcgcccatacctggatttcttttttggtgatccgcaggcgcatctgttgggggcaatattaaaccagcttgttttctggtcaggcaaagcctcgccagatgaaaatggatggttttataaggcccatgatgagctggctgcagagattagcggcgttactggtgatcaggtacgtaaggcagtctctaagttaaccaaaaattacctgccgggcatactggaagagaatattcgcaaggtaaatggcactccgacgaagcattatcgtgtagatggagaggtattaatcaccaaacttttcccgtcagagctggattcggcaatattgccgaatggaaacggcaatattgccgatcccaatcggcagaaaagccgaatggaaacggcagaaaagccgaatggaaacggcaatactgccgaatcttatctttatccagatcaatacatacagatcaataaaaacccttcttgtcaggatgctgcgcaacccgacgtctcagctgatgaagaatttatctcccgtcatccagaagccgtcgttttcagtgcgaagaaaaaactctggggcagcgctgatgacctgaagtgcgccgagtggatctggtcacgaatcatcgccatgtacgaacaagctgccgaaagcgatggggagatcagccgacctaaagagcctaactggactgcatgggcgaacgaagtacgcctgatgtgtagccaagacggccgaactcacaagcaaatctgccaactgtttggtcgagccaaccgcgacaagttctggtgccgaaacgttctcagcccttcaaagctgcgtgagcgttgggatgacctggtcatcaagctggcaccagccgcccacgttgaaaccaacaccgcatggaacactgccgaaggctggggggaaacgctgtga

SEQ ID NO: 453694 - DNA, 183 bp, Serratia marcescens
atggaaagcgaagtaatcgtgccgtttgaaatggactgtcgtgacaaccatgggcgcttggtgcacgtaatcggcgtagatcaggttaacaatcgggttattttccgccgtcctggttatccgtatgactgcgtagtgccgcgccgggattttgggaagaagttcaggaaggagaaggaatga

SEQ ID NO: 453695 - DNA, 525 bp, Serratia marcescens
gtggataacaaagacttcccaacccagagcgatatcacggatgccatgcaccggctgatcacgtcgtttgctggtggatatgaagctatggcgcaggagctggcacacgacggcactcacaacgcgctgcgcaaccgcgttcgccaagttggcggacagatggtgccgatgggcatggctattcagatggagcagatcagcgggcgcacagatgtcactgaagcgatgtgtaagcgcgctggcggtgtgttcgtgaagctgccggaagttggccaggtggataacgaagaactgctgatcaagttcaacgaactgatggcggcgctgggtgtgtttgccaaggcgcataacgactttacggctgatggcgttttggacagtgacgaaagtaagaagctgaaagccaagggttaccggattcagacgctggtggcggaaatctacgccgtgacagtgatgatgttcggaaagggtgacgcccaggatatgcggtcccgggcgtcggtgcatcaatttaacgtgtga

SEQ ID NO: 453696 - DNA, 369 bp, Serratia marcescens
atgatcgacatggtcgaataccgtggtggatggctcaaaatttatagcgatgaccctaacgcttatgggttgcgagtcagaggcgacagtatgtggccgcgcatccaatccggtgagttcgtactgattgaacctggtagtactgtccatccaggtgatgaagtgtttgtgcgtaccagtgatgggcacaacatgatcaaagtgctcaactatacccgagacggggagtaccagtttaacagcatcaaccaagaccatcgccctatcaccatggctcgcgctgaggttcagaaggttcaatatgtagccgggatcctgaaggcgtctcgtcatgtagataacgatacagtaacagactccacgctttaa

SEQ ID NO: 453697 - DNA, 255 bp, Serratia marcescens
atgcgcggtatagtggtacaccatgaaaaacgcattggttatattgttattcgtgaccccatgggagaattcaccgttgccgaacttctcggcggatatgatgttgaaaaagggcatatcatatctggagacctccataacgacggttcagaaactctctattccgaaacggtagacgagaacttagacgtcatcattcaagggcatggaatgtcagaacaggcctctattcggatgattcaaaaaattcgttaa

SEQ ID NO: 453698 - DNA, 531 bp, Serratia marcescens
atgtcgtggattaccacatttaccggccaacactttaactttgcggcgccggacgttgaaagcatctgcattgaagatatcgctcaggcgctttcgcatgaatgccgctttgccggccatctgcctaacttctacagcgtcgcgcagcattccgttctgtgcagcaaaattgtcgagccagagttcgcgctagaagctctgctgcatgatgcctcagaggcatattgcaaagacatacccgccccactgaaacgcatgctgcccgattaccaggcggttgaatgccatatcgacatggtgatccgtgagcgttttggcctgccgttggtaatggatatcgccgttaagtatgccgacctggtgatgctggctaccgagcgtcgcgaactggatatcgacgacggcaaagaatggccgatgctcgacggcattgagccggccgaaatgctgatcacgccagtgatgccagtgcaggcgcgcgccatgttcattgagcgctacaacgagctgacagaatggggagtgctgtga

SEQ ID NO: 453699 - DNA, 621 bp, Serratia marcescens
atgatcaacacaatcacgatcgatactgagacgctggacactactccatccgcagtgctcctttccatcggcgcgtttgctttcgatattgacgatgttcagcaaacacagcagagcattatcaaagtgtcacaagatacagagctgtcagatttttcaaccaatgcattttactgcctggctgatacgttcgatcagttgatgaaaggccgcaccgtcagcgccagcacacaaacgtggtggcgtcagcaaggcgaagacgcgcaggacgcgttgatcggcgaacgtgaaccgctgcgtcaatgcctctggctgctctctaactggattaaacaacacccaggtgcgcgcgtcttcttccgtggtaccgactttgacggctcgatccttgagcacgcctacaaaatgtatgagatcgaatgtccgtggcactggggcggcaagcgcgacgtgcggacctatatcgatgccatgaccaagggcaccaagggctacctgccgaaaacccaccagccatgcttcgcgatggtcaagcataactctctgcatgacgccatgaacgatgccgagcaaatggctattgcctatcagatgaacggtcagcaggtaggtgcccaatga

SEQ ID NO: 453700 - DNA, 429 bp, Serratia marcescens
atgaacactatcgaaatgcacggatttttaaccggcaaatgtctgccgggtgatatgcgagttaacgaaacaacagctgaatatctggttcgtaagtttcgtgagaaagatgaccagctggctgcggtagttgctgagaatgcagctctgaaggctgccaatggcattgctctgcaaattctgaacgatgaagaaaccatggtcacatcgctttgggcgtcaagcatccagaaagttgaagccaagaccccggccactgacgtagcagttgcagctatcgaggcgcggggcgtggagaagctggctgaatgggctggcgctcaggagtcgatggccgcagacgacggagacaaaaaagaagcggcaatttatcgacagttagaagcgagagcgcgtcactacgccgcagagctgcgggaggggaaatga

SEQ ID NO: 453701 - DNA, 684 bp, Serratia marcescens
atgaaagagcgcccgataatttttaacgctgaaatggttcgcgcgattttggacggccgcaagacgcagacgcggcgggttatgaggcatcagccaagacagcacgatcacaaaaattatgtgactgcgccgtggcgcgatgagccgccagcttattacaacaccgacgccgcggactgggcttgcaagtattgcggcgagggaattggctacgatggtcgatcggtttatcgctgcccgctgggccagcctggcgatcggctgtgggttcgcgaaacgttcagcgctgttctcgattatgaagagccggcgggttgttcggcccttctttatgcggcggacgaccaaggccagcatggtaaatggacgccttcgattcacatgccgcgctgggcgtctcgcatcacgctggaaatcacagcggtacgcgtagagcggctgaacgatatcagtgacgaggatgcgattagcgagggaattgacgctgataggctggctgaatctcaagacaattatgactgcattgctgaccataatatgaccggcaggccatcctcaaaagggtatttcagctacttatggcaatccatctacggcgaggaaagctggaacgctaatccgtgggtgtgggttgtcgagtttaagcgcgtcagcgagcacagccaggaggtggggcgtgggtaa

SEQ ID NO: 453702 - DNA, 267 bp, Serratia marcescens
atggctaagcgtaagagcaacagggcggcgcggaaggctttaggcctgccgtacaaattgagcaaatcaaaccctttcccgtgggtatttatacatcagcttggagatgttgagcgccgctgggttcctgatgacttgcagaacgaaacggcggttgtcgtcaaatatgagccacagccgttctgcggcatgtttgttgatggctacgggcattacaaggtgagtcagttttacccggcgtatgtagcacaggagaaagcacagtga

SEQ ID NO: 453703 - DNA, 213 bp, Serratia marcescens
gtgaacatcacaatcaaaaacattttagacatctgcgaactgatgggcatcaactatgagcagccggatgcggcaacgatggacgctgaagtttggatcggtgagggaactatcaccggcgaaaacggcgagccggattaccacggcctgattgcacatgatgccgaatatccggaagaaggcgctatcgcgttagaggagaaagcacagtga

SEQ ID NO: 453704 - DNA, 873 bp, Serratia marcescens
atgaataagcaactggaagagctggcgcgcgcatgccccgccaaatcgtttaaagcgtttatcggcaaatcaagcacgcaagccatcttatgcgccgacactggcgcggagattgtcggctggggtgggttcgactcatcagcattggaacagcagagccagcgtaaagcgctagccagatatatcgctgccgcagatccgaaaactgttctcgcactgctggctgagttggagagcgcacagcagcgctctgaacgtctcgacgcaatgctaactgagtcagtccaggcgctggaagcatctgagcagacgctggaacgtgagcgcgaaaaatcccggcgggttatgtctgagaatcagcagcaggtgcaccgcatcgcggagctggagcgagcaaacaacgaaatgcagcgcatggaactgacggagcagataaccgctgaggcgctgacagaacacattgcgcgtctagcgcagagtttgaccgacgagaaaaagaaaagcgcagcgctcgagcgtgattgcggcatttacgacaacacagttaaggagctgcaagaacgtgccggaccggcagagacgcgcgttgcggaactggaggaagcggaactaaaactttgtgctgcgaacgtgtcgcttgatgcccgggcggactttgcggagcgggagaacgcggaactgaaggccaagctggcgacgccggtgcggttgcctgcggcaagcgataaatctcagggctggactatcgcccctgaatacctgacggctatcgctgaaaaggttggggactccgaagatgaggggagtccatcaatggaaatcgtcgaggcgatattgctcgccgccggtgccaaggtcgagggggatgcgtga

SEQ ID NO: 453705 - DNA, 222 bp, Serratia marcescens
atggaacgcgaaaatcgttatctggtaattaaatttaaagacgcaatcgatgcgctcacagttgagcagcgtgaggcgctgagagacatttctcttgcagttacatcacatcgactgaaccgtggcaagccgcagctggatgccgttgtcgttgagtcagactggcctgagtacgaacatgtctggaacatgattgaagcgcgagtaaagggggaagcatga

SEQ ID NO: 453706 - DNA, 540 bp, Serratia marcescens
atgacaatcacaactgagcgcctgcgcgaaatcgcagaagacggatttttggcacatggcgagtcgaaagaactggcgcgggcattgctggccgcgcgggaggcggttgcggtcgagcgtggagcatcgctgcagctgcggggtttgatcaggcaaagacacgctaagtggtcagaagaaactttcgggaatgttggcccggtaggtccactgaagcacctgtctaaagaagcgctggaagctgctgcaaaacctgacgaccttagcgagtgggccgacatacagtttttaatgtgggacgcccaacgccgtgcgggaatcagcgatgctgaaattactgcggcgatggaagaaaaactgacggtcaacatggcgcgccagtggccggagccgaaagacggagagccacggttacacatcaccgccccgccggcgccaacagtgccgagagagattccgctcacatcgccggttgctgccgaatatgttgccggctggaacgcctgccgggccgccatgctgaaaggagaaaggccatga

SEQ ID NO: 453707 - DNA, 357 bp, Serratia marcescens
atgataagccgttacaagttggagcacatcctcgaatacgctcgacagcagaaacagtttggttcccccacgtgcagaataccaccgggggatatggtggaaatcatggagagacttctggctcaacctgtaagccagcgttacaagttgccggatggctacaagctggtgccggttgagccgacggagagcatggtcattgatggctttgagtcagatgagtttttgtccctcgttggtgctgttatcgaaaaaaagggttggccatatggctgtgaagaagccgcagaatgcgtcacggggatttttaaagcgatgattgcccgcgtaccggcggcaccggaggttagtcagtga

SEQ ID NO: 453708 - DNA, 345 bp, Serratia marcescens
atggcaaagacagcagcagaaagaaaggccgcacagcgagaaaggcaaaaacaggatggtgtggcaaaattcgagttgaagctagaccagcaagagctggaaatgctacgcgagaactgcgcagcgcgccggccacagcgggagccgtacgacatggacgagtacatcacgatgctgatcaggaaggataacgctgaactaaaaaagcaaatggcggcgctcagtgagcgctgctgcgggaagtgcaaagacaagctgcccggcgatcctgccgggtgttacttcctcggtgattccgaatgctggcagacatacggctggcatgatttaaaaataactgtgtga

SEQ ID NO: 453709 - DNA, 1125 bp, Serratia marcescens
atggctagaccacgcaaatacaacattaccattccaggtctatcatgctataccgacgccagaactaaaaaagtttactggcgctataagcacccaatcacagggaaatttcatggtttaggaacagatgaagaggcggcgagaatgatcgccgcagaggcaaactcacgacttgccgaacagaaaatgaaccagcttttaatggtccgtgacaaaataagcaggaccatcggtgaaggaatatcggttagcggatggctagatagatactggaaaattcaggaagaacggcagcgattaggagagataaagcctattaccgtaaaacagaaaaagaacccagtaaaagtgatgcgagaaaatataggtaataagcagttatctgatgtcagcgtgcgtgacatcgcagatattcttgaaccttataaagagcgcggacaagcaattatggctcaggtcgttcgtcgggtcataattgatgtttttaaagaagcacaacatgctggtgaggttccgccaggatataacccagcccaggcaacaaaaaacccgaaagcaaaagttcagcgccaacgcctagatttagatgaatggatgaggatttatgaggaggcaagctcataccaaccatatctacgcagatcaatgcagctcgcgctggtaacaggccaaaggctttctgacattgctaatatgaaattttcagatatttgggatgaccacttacacattgaacaggaaaaaacagggtctaggctggcaattccacttagcttacgctgcaatgcgataggaattactctacgtgaggtcatcgctgagtgtagagatcgaatagtaagcccatatctattacaccaccaccactccatttcgacagcaaaaagaggggggaaaattggttaccagagcatcacatctgcattcagtaaagctagggatagttcaggcctgaagtggagcaaaggaacgccacctacattccacgagcaacgctccttggctgagcgtctatatcgtgatcaaggtatcgatacaatgtcactgctggggcacaaaaatcagcaaatgacagacaaatacaatgatgacagaggaaaggggtggactattattgcagtgtga

SEQ ID NO: 453710 - DNA, 705 bp, Serratia marcescens
atgatcgcactgcatcaggcaaccgtcggttatggcggtgcgccgctgttcccgccgttaaccggacgctttgccacaggctctctgacggcggtgatcggcgtgaacggcgccggtaaatccacgctgttgaaaaccattgccggtctgctgccgctgcagggcggctcgctgcagtttagcccctatccgccgccggcgatcgcctatttgccgcagcagcttgagcttgaccgccagtttcctatcaccgtcggcgatttggtggcgatgggctgctggcggcggagcggtatcttcggggccatcacacgagcgcagcggcagcagattacgcaggcgctggagacggtgggcatggcgtcgttggcgcgcaggccgctgaatgcgttatcgggcgggcagctgcagcgggcgctttttgcccgtttgctggtgcagcaggtgccgctgattctgctcgatgaaccttttaccgggattgataccgcgacgaccgatctgctcttgcaggtgattgggcaactgcaccggcaggggaaaacgctgattgccgtactgcatgatatggcgatggtggccggccactttccgcaggcactcatgctgacgccgcagtactgccgctgggggcgcgcggaggcggtactggcgccggatcctacggaccatgcggcagcgtaccggctggcggtcgcaccatga

SEQ ID NO: 453711 - DNA, 150 bp, Serratia marcescens
atgatgtccctgtactctcctgaacgtaacctgaaaacggcggcgaacatcagcgtgttcaccgtctcggccgctcgtcgttgcctggcggtgctattgctgctggcgcttttgtggctggccattgcctgggcggtatcgctgccatga

SEQ ID NO: 453712 - DNA, 423 bp, Serratia marcescens
atgaaaaaatctctcttgtgtctgctggccgtcgtggtgtctggctgccagctgaacgatccgcggccgccgatggagcgggcgacggtcagcgccgtggcgaatcaggtatgcatcagggtgcaaccggaaggggatgaaacgatcggcgctatctatattgaagaggtcggcaacgttagccgcaagctggatcagcggtttggggaaaacggcagcgaacggccggttgtatcggcggacaactgcgtgcccacggcaaactatctgtttataccggacagggcgtataacgttgccgtcgaactctattccgccgataaggtaaaaaaacacatcactcctcaccggcgtgatttttccgtgcagttttccgtatggcgggataacggcggcgtgctgcaggcggcggcgcagtattaa

SEQ ID NO: 453713 - DNA, 930 bp, Serratia marcescens
atgaaaagtgatatgaacagcattccggtttttctggccgccgctgaagccggcagcttctcgcgcgccgcggaaaatctctacctgacgcgttccgccgtcaccaaaaccatcgcccggctggagacccgcctgggcgtcaccctgtttaaccgcaccacccgcagccagagcctgaccgagcagggcatgctgtattacgagcactgtcggcgcgccgttaacgagatccagcaggcggaagatctgctggccggcgatggcctgcagctcagcggacgtctgcgggtgtcgatgccggtactgttcggccacctctgcatcgcgccgctgctgaccacgctggcgcagcagcatcccgggctgcggctggatatggcgttcagcgatcgggtggtcgatctggcggaagaaggattcgatctggcgatccgcatcggcgagctggccgacagcagcagcctgatcgcccgccggctggcggcgcacagcatggtgttctgcgccgcgcccgcctatctggcgcgggccggcgaaccaacatcggcgcaggatcttgagcaacacgccgccattgcctatacccgcgccggccggctgcagaaatggcgcatcggcagcgcgcagggaaaggcgctggaaatcacgccgcaggcgaaactgatgatggatgatatgcaggcgatcaaagatgccgcgctcgccggctgcggcattgcctggctgccctactggctggtgcgcgatgcgttaagtaccggcgcgctgcaggccattctgacggcaaacgacggcggcagttggccggtttatgccgtctggccgcgcaacgcacggctgccgctcaaggtcagagtggcggttgatcgcctgatcagcgagctgcccgccagaatggcggcggcggaagccccgtcgccggatgcgtaa

SEQ ID NO: 453714 - DNA, 597 bp, Serratia marcescens
atgagtaaattactggtgcttaaatccagcattatgggggacgcctcccagagcaacgcgctgattgatgactttctggcggcgcggcgggcaaaggggctggatgacgagattatcgaacatgacctgacggccctggagttaccggtgttggacggtgaactgttcgccgccctgcgcggcgcccagccgcttggcgagcgggcgcagcgggtggtggcgctgtccgaccggctgattgccgagctgaaagcaagcgacctgctgctgattggcgcgccgatgtataacctgaatgtgccgacgcagctgaaaaactggttcgatctggtgacccgcgccggtatgaccttcaactataccgctcattatccggtggggttggtcgcaggggtgaaggcgatcgtcgtcagttcgcgcggcggggtgcatgtcggccaattgacggatgcggtgacgccgtatctgcgcggcgtgctggggctgattggcgtgaacgatgtcgagtttatctatgcggaggggctggatgccagaccgcatggccgggcgcaggggatcgcgcaggcgcagaccactattgcgcagctggcgtaa

SEQ ID NO: 453715 - DNA, 393 bp, Serratia marcescens
atgcaaacctatatcaaagttcgcggctttcaccttgatgtttatcagcacgtgaataacgcccgttatctggagtttttggaggaagcgcgctgggactggctggataaccgcgaagagtttcgctggatgatggccaacaatatcgcgtttgtggtggtgaacatcaatattaactaccgcgtgccggcgctgctgggcgataagctgtgcgtggagagccagctggagcagctgaacggtaaaagcggggtgttaagccagaggattacccgggaaagcgacggcgctcaggtggcggatgcgctggtgacgtttgtctgcgtggatttgactacccagcgcgcggtgccgattgacggcgagctgcgtgaaaagctgcaggcgctgtaa

SEQ ID NO: 453716 - DNA, 375 bp, Serratia marcescens
atgtcattaacccaaaacctggcgcttgcacgccatcaaaccctcgccggcgcgctgctgagcatcgcgctgtgcttgttcccttcactgactgcggcggcggaaaagccgggcgtggtgcagacctcatcggcggtacgggcacagccgacggcgacggccggtatggcgggcgggcaggagacggtcagcatcaatcaggccagcgcagagcagcttgccgaggcgctgaacggcgtcggcctgaaaaaggccgaggccatcgtccgctatcgcgagcaaaacgggccgtttagcgatattgaacagctgcaggaggtgccgggcatcgggctggcgctgctggagagaaaccgggagcggttgagaatgtga

SEQ ID NO: 453717 - DNA, 294 bp, Serratia marcescens
atggtaactgacgttgaaaaagccgtgtttgctctggttgaagaatataacggcttctggttctggttgctcaaacggtatccgctcacgaaaaacgccgatctccgcaaagattttcgcatggcgcccgaagatgcctatgaattattggagcgctacgctgaacaattcaatatcgacccaaaagagattgccttttccaaatattatccgcagagcagccagtcacagcgggaagcgcttaccatcgagatgcttattgaatccgccaaggccggacgctggttgtactaa

SEQ ID NO: 453718 - DNA, 261 bp, Serratia marcescens
atgcgcctgacacggctcaaacaccgctttttcaccttgctcagcacgctgctgtttatcggctgcctgcacagcgccgcgcgcgccgaagggcatctgcaaaccacgctgcagccggtgctgagtatcgtaagcagcgatatgcaggatatccgtgaagcgctgacgcgctatgcaggtgaagacgatgacgcccccactcccctctcccgcgccgaaacccgcaccgccgaacgcaggggctcggaggaagagttataa

SEQ ID NO: 453719 - DNA, 735 bp, Serratia marcescens
atgatcctgcacggcataccgttatctcaccccaaccgccaccttaccccctggcaccagcatgatgacgggcagatttacctgctgacgcacggcgctatcgcgctggaaaccgagcagcgccagtgggcgatgaccgccggcacgctcggctggctgccgccgcgctgccgccatcaggcgcagtcctgcgggcaggtggagggatggctgctgtttctgtcgccggcaacctgccgccctctgcccggcaacgcgcggctgctggccgccagcggcctggcgcaggcgctggtggcgcgcatcgccggtttgccgccgtcgccgttacgggcgccgcagcgacgcatggtgcaggtgttgttggatgaaatgcagggggaagaagaaacggcgctacagctgccgatgccgcaggatgcgcggctgttaaagatcgcccgcgcgctgctggatgaccccgccagcacgcggcggcagagcgaatgggccagctgggccggcatcagcgtgcgcagcctcagccggctgtttatggcgcagaccggcatcggctttgcccgctggcgtcagcaggcgcgcatcattcgctcgctggaagcgctgtcgcgcgggacgccggtcgccagcgtcgccgccgactgcggctatgacaacgtcagcgcctatatcgccgccttccgccgccatttcggcgtcacgcccggcggctattttgccgcaccgcccgcctaa

SEQ ID NO: 453720 - DNA, 516 bp, Serratia marcescens
atgagcgtgacgattcgtctggcgcagcctgcggatatcgatgcgatgatggcggcggaacgttcggcggcggcgctgttccgccagctgccgcagtgggcgtttattgccgatgacgacattatgtcggcggcgcagcatgcggcgctgattgccgaagagggcgtatggctggcgcaggacggcgcggcgatcgccggttttatcgccgtacggcgcgacgggacagagtggcacatcgccgagctgtcggtggcggccgagcatcagcggcgcggcatcggacgccggctgatcgtagcggtggccgactgtgccggccgccagggcgtccgtcagctgacgctgaccacgtttcgcaacgtgccgtggaatgcgccgtattaccagcggctggggtttgaaattatccccacggtggcgctgtcgccgcgtctgcgcgaacagatggccgttgaggccgagtacgggctgccgcttggcagccgctgtgcgatgaaatttacactgttgtaa

SEQ ID NO: 453721 - DNA, 264 bp, Serratia marcescens
atgatgaaaaaaacgttgttgctttccctgctcgcaggcgcagcgctgctgcaaggatgtcagatgaaaaccaatgatgatgcgccaccgccgccgcgggctatcggtatggctaacccggccgatgtctactgcgtgaagatcggcggcaagctgaactccaaagagaacgagcacggccagtatgccacctgcacgttgccgaacggcgaagagattgagagctggcagctgttccgccgcgaccatccggtgaaaaaatag

SEQ ID NO: 453722 - DNA, 915 bp, Serratia marcescens
atggcggtttccgtacaggcccggagtgccggttttgatgaatggctgcaaagcatcaacgcggcctgcgggcgtttttgcgccaatacgctggggccggggtttagcggcgcgatgcggacctaccatacgcatgcgctgcggctaagtattgtggatgcggcgcaggcgcaactgtaccgcacccggcgggagattgcccagagcaacggcggctacttttttaccgtatttcagctgcgcggcagcgccctgatggagcagggcgaaaggcgcgccagcctgtcggccggtgatatgacgctgattgacgccgggcagcccagcaattttctgttccagcaggactcgcagcaaatttcgctgctgttgccgcgcgactacctcgaagcgccggcgcggcagggcaaggtacagtgcgccgtgcgtcttgaggccggcagttcgctggtcagattcagccatcagctggtgcgcggctatctcgacagcccaacgctggctgcggcagagagcgaggcgacgctgagcgcgctggccagcctgctgcgtccgctgctggccggcggagagggggcggacgcggagaacgagcgcggttttaagcaggcgctgagctttatcgaccgtcatattcaatccgagcatctgcggccggagtgggtggcggaggagagcggcatgtcgctgcgcacgctgtaccggctgttcgcccgccacgggctggtggtggcgcagtatattaagcatcggcgtctggagttgtgcgcgcaggcgctgcgccatgcgccgccgcggcagaaactctcccacctcagcgatgactggggatttcgcgaccacagccatttttccaccgcgtttaaaacgcactttggcgtttcgcccagtgaataccgcaggcgctatcagtaa

SEQ ID NO: 453723 - DNA, 1032 bp, Serratia marcescens
ttgcgcctattttcccgtttccgccgcgttatcggcgattattcgtggtcgccgcaggcggtggatcaacgctttcgcaatgcccgcgccgccgcgccggatgaactgccgacctcgacgctacgcgtgtggtggaatttctttttcaataaaccgcgcggcaccgtgccggacggcgacatcccgctcagcccgctgacgcgggagatgctgcggcaggcgccggaccgcagcctgtaccggctgggccattcgacgctgctgattaaactgcgcggccagtggtggctgaccgatccggtgttttccgagcgtgcctcgccgctgtcgttcgttggcccgaagcgcttccatgcgccgccgattgcgctggccgatctgccgccgatccgtggggtgattttatcgcacgatcattatgatcatctggacgccgccgcaatccgcgcgctggacggcaagacggcgctgtttttggcgccgctgggcgtgggcgaccgtctgatcgactggggcattgcgccgcagaaggtgcagcagtttgactggtggcagggaacggaggtggacggtctgcagctgacggccacgccggcgcagcacttttccggccgaagcctgcgcgacggcaatcgtacgctgtgggcctcctgggtgatcattgacgacgatatgcggctgttcttcagcggcgacagtggctacttcagcggttttgccgagatcgggcggcggttcgggccgttcgacgtgacgctgatggaaaccggtgcctatgacaagcagtggccctatgtgcatatgcacccggagcagacggtgcaggcgcatcaggatctgaacgggcgctggctggtgccgatccataacggcacctttgatctaagcatgcatctctgggaagatccgttcgatcgggtgacgcgcctggccgccgagcgtgcgatctcactgtcaacgccgatgatgggagagcgtctcgatctgacgcagccgcacgccggcagccgctggtggcgggctgaatcataa

SEQ ID NO: 453724 - DNA, 339 bp, Serratia marcescens
atgaagaaaataatgactgccggcatgttgggcatggcatttttgttatcaggctgttcatctgagccttcagagagtgacatcaccaaagcgatacaagagtcttacgatgaaagcaataaacagcgcgaagaactgattggtgaacttgctaaagaagaaagcaataagatctcccttgtttccgccagaaaaatatcctgttcaaaatccggggatacaaaatacagctgtgaagtagagatggaaaccaaaatgccgctggtaggcatatcgaaaaccatcagcacgttacagtttatcaaagacagcggcaagtggaggctggtcttaggttaa

SEQ ID NO: 453725 - DNA, 471 bp, Serratia marcescens
atgcaagtaaaaaataaaaatctgctctatatactggcaatgattgcttttctccttgttggctctttcttttggctctcgctgcgtacggttgaaattttctctgttcatgaaaatgataattttagtgatgttttggtcaaagaatttcctctcacggaccacggaaaaataaactggtggctgaacaataaagccatgctaaaggagcgctttaacattcccaagccggcaagttacggcagttttaccataaccttctgggactttggtaacggttatcaagaagaaggtaaatatgacaggctgtgctttgatgatatgaaaacgaagaataattgtatcgataaaaaccccctgttttccgttagacagatcaagaacgatcgcctgctctttattacatatgatggacgttattcactgaacgataagggagaagtggtcaagattaagcgtgaatatgattaa

SEQ ID NO: 453726 - DNA, 849 bp, Serratia marcescens
atggccgcattaaaattcccttgtgttatatttaaaactaaaaagataatggatgactatgctgcagacgatatgcagtatggggatttgtcagagtctcaactgaaaaagaattttaacttgctagatgtttctgctagagctaatccttacacgttgactaaaatatctccgtttacccactcccattcgatgtttcctatcatgcgtgaggagggtgaaaagttaaccaaacaggcatgtacaagaattctttttgatgagttccgttatctatcaagtatcttcgcactttatggtccttataaatacttgattgagaatatgataactcatatgcagaatggtaacggggcaccgttcagtagtctacatttaaataccgcattaaaagagcagatacttaccgatagaacagaaaatagtacacttctattactaaaaaatgcttttgattattatattgattggagtaataagtgttatcctatggaatcactgagtgagttaaagggagcgattcttagaggtaaattacccaagtttaacaggtttcaagataattttaatggtatggggataacagtccatgacatttggtctatgcacatcacgataaagtcactatcttttgataatgatcgttatcgtgctgtagtacactacagagcacaagatcactttgggttagacagtaacgatattttgagtgcgaaatttaaacagtttcgtttttttcgtatctggtttgtgttacaacattataaccagtttggtttcagaccatttatgactaatatggaaactacagtagagatctgcggggaacgaaatgcaagtaaaaaataa

SEQ ID NO: 453727 - DNA, 636 bp, Serratia marcescens
atggccggcaaacggcgtgcgcgcaaggcgcgcaacccgcagagtacccccgcgttcaagcgttattcatcaccgacaacgcagcgtaagtcgccaaagtggctgacgctggtgttgatgggcagcgccgccagcgcggtgtggtacaccctgagagaccccgcctctgagcaggcggtgatttatcattcggtatcagcctgcgtggatgccggcaatagccaggcggcctgtcagggcagctaccaacaggcgcaaaaggcgttgcgccttggcagcctggggtttaaccagatagacagctgtgaggcccactacggcgcttataactgcacctatgatttaccgacgcagcggtttatcccgcggatggcgggctttacgctggcgaaagactatcaggatgatgaccgcgacacgtcttcttcctcgtccggcggtggctactacggcggcgcgagctcaagctcgcgatcgcgtcctttcttccgttcgcgcgatagatttaatgagctgcagacgccgggggatagcgagcgctggcacctgaaaagcacgggtaactatcagccggcctcggcgcatacggtatcgcgtggcggctttggcgcctcatcgcgcagctgggggggctga

SEQ ID NO: 453728 - DNA, 657 bp, Serratia marcescens
atggtcgagttatttgacgagcgcgttggggatatcgccgtgattcatgcggtgccggccgggcaatatgaacagccgttgccgacggtgtttttctaccacggttactgctcctcgaaagaagtgtacgcctacttcggctatgcgctggcgaaggccgggttccgcgtgatattgccggccttgcggacgcatttcgcgcagcgcgggctgattgacggcgcgcgcgtcggcgttgccggggcgtcgatgggcggcatgaccacgctgggcgcgctgacgcgctatccgtggatcgccgcggcggccagcctgatgggttcaggttcgttttcttctctgtcgcaaacgctgtttccgccgctggacagcttggggcagccgctgcctgaggcgcagcatgccgcctgcctggcgccgctggcggatgatgccctggagcagcagtgggataagctgggcgagcgtccgctgctgctgtggcacggcgaggccgatgatgtggtgccggcggcggagagcctgcgcctggcgcaggtattgcgcgagcgcggcctgggggcgcggttgacgctggcgcttgaggcgggcgtgaagcaccgcattacgccggcggcgctggacgcctgcgtggggttcttccgcgcgacgctataa

SEQ ID NO: 453729 - DNA, 648 bp, Serratia marcescens
atgggcagaatcgcgcccaggagaaggaaaaccacccgcgcccaccgctcgttgcaacgcgtctggcagcgtgtcagccagcgcctgccgttcggcgcaccgcgacagacgcccgcggaggcggactcgcagcagccgacaggcggtcagggacaggggatcaaagcgctactgttgaaaatctggcatctgccggacggcttcggctggctggagcctttgccctatttccaccgccgctgggtcatcatcttcggcgccatactgctgctgtcgctgctgtggccctattcaccggatcgcgatgagcgcccgggccatctggagtcgccaagcgcgcagcaaaccgatgcccagccggttaccgacgcctcggatccgggcgggcagtggcagcgttatcacattcagcccggccagacgctggcgcagctgttccgcgacaatagcctgccggttaatgaagtgttcgccatggcgcaggtggaaggtaatgataagccgctgagcaatctgaaagccgggcaggaagtgcgtatcgaacgggacgccaacggcgtcattatcgcgctgtcggtcaccacgctcgacaatcgccaggtcaccttccgtcgtcaggccgacggcggctatcgtcgccagcgctaa

SEQ ID NO: 453730 - DNA, 216 bp, Serratia marcescens
atgaaaagggttctcgctattatcgttggggcggtgatgggcattgtgcttatatggttggcgtatccttatatttcagattggctggtgggaccggttcatggtgaagaccaaatgtccgcgaactttgttctgctgcttgccgggctggggatagggtgcgtcgttggtggtctggccggcggcctggtttattcctgtttgactaagggatag

SEQ ID NO: 453731 - DNA, 243 bp, Serratia marcescens
atgaataagctgcccgccgcgtgcccgcgctgtgaatccgccgggccggaggtgctgtgccactcgccggtaaaagatgcctggacggtgttccactgtgcaacctgcttcttcacctggcgcagcagcgagccggattttattaccgacccggccaaataccccgcacattttaaaatttccccggcggatatggcgcacttcagcattatgccggtcattccggagcgcaaacgccgttag

SEQ ID NO: 453732 - DNA, 1452 bp, Serratia marcescens
atgccgtatgccgacttacgtagctacctggccgcgctggaagcccagcagcaactgctgcgcgtgaccgaacaggttcgtcccgagccggatcttgccgccgcggcctgcgccgccagcagactgggcgacgactcaccggcattgctgtttgaaaacgtgtacggctatcacaccgcgcgcatcgcgatgaacgtgcacggctcctggcccaatctggcgatcgccatggatctgccgaaaaacaccccgttaaaaagccagttcttcgagtttgtacgccgttaccaaaactatcccggcgaagtcgagcagctcgacagcgccccctggcaggagctggtgatcgagcaggcgatcaacctgttcgatattttgccgctgtttcgcctcaaccacggcgacggcggcttttatatcgataaagcctgcgtgatctcgcgcgatccgtcgctgaccgacaatcggcccagtcagaacgtcggcatttatcgcctcgaagttaaaggccctgcccggctgggcattcagccggtgccggcgcatgatatcgccattcatcttcagcgcgccgaggagctgggtgtcgatctgccgatcgccattgccatcggcaacgatcccatgctcaccaccgccggcgcgatgccgatcctctacgatcagtcggaatatgccatggctgccgcgctgaacggcgcgccctatcccgtcgtctacagcgagtacagcggtctcgacctgccgtggagctcggaggtgatgctggaaggacgcatcctgtcgcgggtgcgcgaggccgaagggccgttcggggagtttaccggccactattccggcggccgcctgatgccggtggtggagatcacccgcgtctcctgccggcgccggccgatcttcgaacatctgtacctcggcatgccgtggacggaggttgactacctgatcggcatcaacacctgcgccccactgtacgtgcagctcaagcaggccttccctgaggtggtggcggtcaacgcgctgtatacccatgggttggtggtgattgtttctacccgcacccgcttcggcggttttgccaaaggcgtcgggatgcgcgtgctgaccaccccgcacggcctcggctatgccaagctggtgatcgtggttgatgagacagtggacccgtttaatctgccgcaggtgatgtgggctatcgccaccaagttcaaccccgactttgatctgattaccgtgcccgggctgtcggtgctgccgctggatccggcgtcgcaaccggccggcattaccggcaaagtgattatcgacgccaccacgcccaaagcgccggaaacgcacggccgcttcgagcaggggctggacgaccctatcaccaccgaggcctgggtggagaaactgcaggtcctgattcaggccgcgcaaactgctcaggaacaggaggaggagaaatga

SEQ ID NO: 453733 - DNA, 216 bp, Serratia marcescens
atgcagtttctcattgaaaatgacgccagcttgttggcgcagatggcggacgagcagcacagcgccgacgagcatgaagcctggctgaaacagaaggtggatgacgcctttgcccgccagcatgaagagcaggcggtctacctggatgaattgcaggccacggagcggatgaacgattttaaagccaaagtaagggcaaaatacccggctgaataa

SEQ ID NO: 453734 - DNA, 276 bp, Serratia marcescens
atgcgcatcgaatgggacgacgttgcgttgcaggacagggaacgtctgtttgaatttctctatcccgttaatccgcgggcggcggagcaggcggacgctgaactggaaaaagccgtggcgcgtttaatcgataacccgcggcttggcaaagtctggtatcagcaggcgcgtaagctgctgattgataaggcgtcgctgctggtggtctacctgaacgatggtgaagcgataaagattttagccgtggcccatcagcgcgagaaattcccgaattaa

SEQ ID NO: 453735 - DNA, 672 bp, Serratia marcescens
atgcaggacgaaaccatcgaacggattgtggacgcggtactgatgcgcatgcggccgcggctgttgctgctgctcaacgccgcggacggctaccacgagattatcctggcgcgtctgcagcactgtcgtcacttcgcgccgcaggtgctgtttgccgacggcgcgcaggctgtccatccggcggacgcctggcggcagctcggccccgtcgtcacgccggcggagatagagcaggtcggcgcgctggacaatatcgaccgcgtcatcgcgcccttcctggattttgccaccgcggcggaagtcgctcacgacctgtttcagtccgacggcgcacgctgcattcagctggcgcggctgcacaacacgccggtgctggcgctggattacaactgcaatccgcacagcgagttaaaccggctaaaagggctgggcggcaatcaggacgcccactcgctggcggacaatctgccccggttggcgcagcgcggcattcagttctgcagtctggaacagatgctgtcgccgacgccgctgcccgcaaccgccgacgacgccgtggcggaaaccggcggctatatcaccctcagcgaacttaagcagcgcaacggccattgcccgccgggcgccaggctgaccgatctggcgctggaataccaacgaggaaaccaataa

SEQ ID NO: 453736 - DNA, 429 bp, Serratia marcescens
atgaagttaagcctgggagtcattgaaacctacggcctcaccgccgccatccaggcagccgatgcggcctgcaaatccgcctcggtcacgctgctgggttacaagaagatcggcgccggtttggtcaacgtgttcctcggcggcgagatcagcgcggtgaagagcgccgtagacagcggcgttgccgccgtcggccagccgacgtttatccgcggccggctggttatcgcccgtccgggcgaacgggtggtggcgctgctgaacgatctcgccggcaatgccctgacgccgtctgccgacgacgatgccgtcaagccgaccgtcaccgccgcccctgccgccaaaccggaggaaaccccgccgccggccgccgaagcgaagcccgcgcgcgccgagaaccgcgcaggcggaaaaaaggatcagaaataa

SEQ ID NO: 453737 - DNA, 804 bp, Serratia marcescens
atgaagtacagaatcaatgcctttcttgattatgatgccaccgaaggttcactgcggctgaacgacgacggcaagtccgatacccaactcaccatcaccgccaacgccctgctgtactttattatccagcatcccggcattatcagccgcgacgacgtcatgaagcgcgtctgggacgataacggcctggtctcttccaacagcaacctcaaccagtacctgagcatgctgcgcaaggcgttccgccgctacggcatcgacaacgtgatcgtcaccgtgtcgcgcggccggctggagctgaaccccgaactgcagatagagctgattgacgacacgccgctgcaccccgccgtgctggcggcagagccagcgccgccgcccgcagagccgttaagcgcgccgccaacgccgcccgccgtcgccggcgaccatgaccactactggggctacagcggcgcggcgctggtgctgctggccctgtcgctgttctgctggtcatgggccaacggccgcagcctgacgccgctgcgcttttcacaggtggcgcaggagccgttcgaggtgttctccaccgatgccatgctggatccgcgcatgcgcgaaaattaccggaaaaactttatcgcggtgaaggagaaaaagggcatcaggcagcataacggcgagcagttcctgttcttttacggtgataagctgcagtccaacggattaggccgcacttttctcgcacactgcgtcaagcatcaggataattcgttcagctactgcgataactatttttattactcatggaaggcagtatga

SEQ ID NO: 453738 - DNA, 444 bp, Serratia marcescens
atggatactgttgaagagctgggcaatacctacttttacaaagggatgttcaaccttagcgctggagagctatttttctttatctttttggaagaggctcaaaaacagcttggtgttaaagacgttgcagtcctcgccttgattattttagggcagccgacacaaaacacgcggggaaagccagctaacacaaccaaggggacctctattttgagtgaaaaccttaggggatggttaaaaattcgtgtgtcacgatggcctacgttgacaaccgagagcatcaaacgtttgaagttctcttatgtgaataatcttggcgcttttgtcggccgctggatccctattctggggattgttttcattatgaatgatgttatgcagattgcatggaaagccactcgcaacttcaacctgatagcgagggagggtgacaagctatggtga

SEQ ID NO: 453739 - DNA, 351 bp, Serratia marcescens
atggtgaaggactcgatagaagaggcggtgctggaatggtatgaaagcacctataataccaagccgctctttgctaagagcaagcccgttctaacgttggaaaccagcctttctaccggtaaatatccctgggcgcgggagaccggggatgaaattatgcaggattattttgagcggtttaaagtggatagccgtgactttaatttcctgacgtattggccttatgagaaaggattgtggcctaattttctgcgtcctaaatcacagaaggtgcctgatgtggaaccgaaacccctgacgattcaaatgctggtggagtcggcgagggctgggcggtggatttatgattaa

SEQ ID NO: 453740 - DNA, 426 bp, Serratia marcescens
atgccgttgaaaacggttattaagtggtttcattattccctgactgccgtcttgctgatcgttgttattggttttgtgatgttcaatgcagatggggatgagctggcaggcactcggttggtgagttcaaaacagctgagcgacagcacctggctctatatcacggaatattcaggcagcggggccaccgtggccaactcttaccgctactatttatccgggaagctggagggggatgtgagcgtcagcctggcaaagcaggttcctttcttggttgcagcgggtagtgcagcaaatatcagtactgagggcgataccatcaatatcaagtacagtggccgggtgttttcttttagtaattctgtggtttatgaggggaatggggaaacacagatgccacatcttcggtttgaggtgagtaattaa

SEQ ID NO: 453741 - DNA, 1092 bp, Serratia marcescens
atgaagttatctatagatatttctgaattgattcagttaggaaaaaaaatgctgccggagggggttgactttttcctagatgaagtacctgttattattgaccctatagatatagagctatctacgggtaaagaaattagtatttccgatcttgatcctggtagtggcctcatctcctaccaagggcgtcaggttcttttatatattagagatcataccaatagttatgatgcagccattgaggatggcaaaaaagggaagcgttttcatattgcatggtgtaaaacgctagataccatgcgtcaaaaaaatcgatttgaacggtatcatgcgacaaaccgtgttgatggtttattcgaaattgatgatgggttaggccgtagtcaagatgtaaaactgagagtttgtatgaactgcttggaacggcttaattataaaggcagcattgataagcaacagaaaaaatcaatttttaactcattctctttggatgaatttttttcaaattatagcacatgttttcgccatataccgaaaggtattcatgacaaattgaatagcggttatgtggaaaattggaaagatatatcaaagacgactcgagaacaagctaattacatatgtagtgattgtggcgtaaacttaatttcatcaaaaaaactttgcgatgttcatcataagaacggagtgaaatatgataactcagcagaaaatctaattgttttgtgtaaagattgtcaccgaaaacagcctatgcatacgtggatatttatcaagcaatcagatatggagataattcaacgattacgttcacagcaagggctattaaaaataaattcatgggaaagtatttacgatatcaccgacccatctattcatggcgatattaatatcatgcaacaaaaaggatatccccaaccagtcttgggtttagtcctgaataactcaaagaatgagactacaactacagtagctgctgcatggccgtctataaatatcgctgtaaatctaacaaccgtagaagtagaaggatggcaagtattcactgtaggagagcttgttaaagaaatacaatccggggttgttttttaa

SEQ ID NO: 453742 - DNA, 708 bp, Serratia marcescens
atggataaaatcattggcaaacaggcctcaaataaagatcaggataatgaacattgggtttctatgtcagacttgatggcgggtctgatgatggtatttatgtttatttccattgcctatatgcattatgtacgtatagaaaaagaaaaaataaaagaagttgctgtagcctatgaaaatgctcagctacaactttacaatgccttaaatattgaattcgccaaagacttaccagcctgggatgctgaaattgataaacaaacccttgaggttcgttttaaatcacccgatgttttatttggcctaggtagcacagaacttaagccaaaatttaaacagatccttgatgactttttccctcgctatctgcaagttctggataaataccaagaacacattaccgaggtacgtattgaagggcatacgagtactgactggaccggtgctgctaatactgatgttgcttattttaataatatggagctttctcagggacgtacacgagcagtgttacaatatatctatggattaagatatagttcggccgatcagaaatgggtgaaaagtaaatttgctgctgttggatattcttctgcgcaccctattcttaacaaatctggtcaggaagaccctaaccgttctcgtcgcgtaacatttaaagttgtgactaatgccgagttacagattagaaagatcattcaggagtaa

SEQ ID NO: 453743 - DNA, 1632 bp, Serratia marcescens
atgttagcgcagatttttgaacatttttttcagtcaatagactccactcttgtcacaaacatattcatatgggctgttatcattatatttttttcagcatggtggtgtgataagagaaatatacacagtaaattccgagaatatgccccaacattaatgggtgcattaggtatattaggtacttttaccggtattatcattgggttacttaattttaatacggagagtatagacaccagtatccctgtattattgggcggccttaaaacagcattcattactagtattattgggatgtttttcgcgatattgtttaatgggctagatgctttcttttttgctaacaaacgtaattcactggaaaaaaacaatccagaatcagtcacccctgaacatatccacaaagaactgaaggaacaaaataatcattttgaaaaattaatatcaagcatgattggtaatgaagaaggttctctgattgctcaaataaaattactgcgcaatgagaccaatgataactctcgttctcaactcgcttaccatgcggatttcagtaataagctatgggaacaattacaacaattcgcagacctaatggcaaaaggtgctctcaaacaagtcattattgatttcaataataatttaactgaacagttcggcgaaaacttcaaagcgcttgatgcttctgtgaaaaagctggttgactggcaggaaaactacaaaacccaagtagagttaatgggtgagcaatataaacaaagcgttgaatctttagttgaaactagaacagctgttgctggcatttgggaagaatgcaaagaaatcccgcttgcgatgtctgaactacgtggtgttttgcaggtaaatcagcatcagattagcgaactttctcgtcatttggaaacattttccgcaatacgtgataaagcaactgatgttttacctgagattcagacaaaaatgactgaggtaggagaaatactaaaattgggcgcgacgaatgtcagcgcttctcttgaacaaactagtcaacaaatactgaccaatgctgattctatgcgtgtagctcttgatgaaggtacagaaggcttcagacaatcagtgatgcagacacagcaagcttttgcatcaatggcgcatgatgtcagtaactcttcagaaacacttaccagtacgctgggtgacacaattactgagatgaagcaaagcggtgatgagttcctgaaatctctagaggctcattccaaagaattacatcgtaatatggaacaaaacacgacgaatgttattgatatgttcagtaaaacaggcgatagatttaatcaacaattatctagtaatgccgaaaatatgtttggttctatgcaaacctcattcgataaagcgagtacaggcctaacatctcaggtgaaagaatctattgaaaaatttggtagttcgattaacgaacaactacatgctttcgagcaggcaacagagcgtgaaatgaaccgtgagatgcaggcattgggtaacgcccttctctcaataagcaaaggttttgtcggtaactacgagcggctactcaaagactatcagaccgttatgggacaactacaatcattaatttcgacaaaaccaaatcgtgggtaa

SEQ ID NO: 453744 - DNA, 231 bp, Serratia marcescens
atggctaagtataaggcgtatcctgagtataaggagtctggggttgagtggttgggtgaacttcctgctcattggacaacgttagcaataaagtatattgctcaactaaatccgtctaaatcatgcattagcatagaaaaaatgcaagtgatgtgtagttttattccgatggaaaaactgaaatttaattcattatctttagatgaaataaaatgggtatacatattttga

SEQ ID NO: 453745 - DNA, 954 bp, Serratia marcescens
atgtctatagctgagggagctatgaccggcgctggtggattgaagagggtaccttcagaagtcctaaataactttaaaattggactcccaagtaaaaaagaacaatcaataatagtagattttctcaagcacgaaaccgaaaaaatcgacatcctgatcgagaagcaacaacaactgattgaactgctgaaagagaaacgtcaggcagtgattagccatgccgttaccaaagggctaaaccctgatgtgccgatgaaagattctggtgttgagtggctgggggaagtgccggagcattggtgtataagtcgtattaaaaattacgcaaaaatcgaaagtggacatacgccaagtaaaactaagcctgaatactgggttgagtgtaatatcccatgggtatcgttaaatgattcaaagcaattaaaggttgtagattatattgaagacactttttataaaataagtgaaattggaatggctaattcttctgctcatttattgccagaacgctctgttgttttcacacgagacgcatccattgggcttagtgctataacaacaaaaccgatggcggtatcacaacacttgatagcatggatttgtgatgaagattttatcatcccagagttcctgcttcttgtcttctatgcgatggaaaaagagttcgagcgctatacttttggtgctacgataaaaactatcgggatggataatgtcagggagttaaaatctacattcccaccagttgaagaacagcgtagtttaatcaactgggcctttacgaaagtcgagagtattaaaagtaccataagtaaagtagaggatatgctttctttgctccaagaacgccgcaccgtcctgatttccgccgctgtcaccggaaaaatcgacgttcgcgattgggtagcccctgacgcgcaggctgttgaggagacacaggaggccaccgcatga

SEQ ID NO: 453746 - DNA, 714 bp, Serratia marcescens
atgtatagagtaaatcaaatcataaaaacaataagcaaaatgaattctcatgccccctacagccagataaataaaaaaagtaacttacttagaaaaacacaagtatattcatttctcacatccctattttctcttgtttttatgatcataatagcagttttctacaagttttttcatctccccaaagaaacatttatttcatccacattctctctgtatgtcatcaattcagcttcgagtataatatacttattcacccctataatcccaggtgtgaaatttatgcttaacttcaaaaatgaaatattcaatgacctaatttgtgaaattgacaatgatgaacaaaacatagaaaaactgatgccttactcgctggatgaattaaactattcaatagactggttaaacataaagatacaaagggtgaaatcaaggataaatgatttttttggagaaaaaacggctgtcttatcaataattggattagcatactctgcaattcaaggttttggtgggttagaaaaattgggagataccatatcaaaaggactcttcgattccggaactgcaaatataataatagtatttggattagcctttcttttaggtttatcacttggagcactagcacttaaaaatgtagcaaatcacttgcaatatctgaaagaaattattgagttagctaagaaaacaaagaaacagaataatgagtaa

SEQ ID NO: 453747 - DNA, 660 bp, Serratia marcescens
atgtcgttcccaagctataaagagatagaaatccccttacttttaaatatttataaccggggtggcgaagtaagttcgtcttcatgttataaaccgttaggggaggagtttggcctcacaaacgaagaaatgagcatgttgcttcctgatgatagtaaccgcccccaatggaacaacatggtccaatgggcgagaaaaaaacttgttgactacaaatatcttcataatgcaaaagaatcaggcattggtatctggaaactcactcaagatggcatcaaaaaagcagaatcgctttctaccagattagggatcgattatccagatgacgttcccgaaaccttttatgaaggtgctgtaaagcaaatcaaagttaacaaatacgaacgtagtaaaacagcaagagacaaatgcatagatcattacggctgtcagtgtagcgtgtgcaatatggactttgagaaaacgtatggtgaaaccggtaaggactatattcatgtccaccatattacccccctctctgagattggagagtgctaccaactcgacccaataaaagaccttcgccctgtctgccctaattgccatgcgatgatacacagaaaaaaaccatcactcactattgaagagttgatagccttaatgaaaaaatcaaaaaaatag

SEQ ID NO: 453748 - DNA, 309 bp, Serratia marcescens
atgcaaaacttttatcatcttgaccagctgatccaaggctacttcaaccaagacgccgatcttatcaacgagggcgaagactctatcgaagggattatcgccctgttcaagcagacggcgtctgacgaagagctgaaagagttggcggatgaggttgatgccttcctggagagctatcaggatcgactagaggaagcgtttacgcagcgctatggctttgatttttcgctccagctgtgggagacgacggcgcatgatttcctgctaacggtgcgcaccatggcccttggtcaaacagcagcgccctaa

SEQ ID NO: 453749 - DNA, 873 bp, Serratia marcescens
atgacaacatttgcagcactacaatcggccatctctaacgtttcggtatggcgtcagggcgacgtgtgcgcgccacataagcccttactgctgctgtatgtgctgtcgcagtacaaagccggtcatccgcgcctgtttaactacggccgggagatccatgagccgctgacccggctgctgaaagagttcggccccaagcgccgcaccgactaccccaatatgcccttctggcgcctgaggagcgacgggttctgggagatcgccaatgcggagaactgtaaaccgcgcaaggggaatactcagcccaccaaaaaggagctgattgataaccaggttgccggcggctttgatgaggcgcactaccggcgactgcaggaacacccgcaggagatcgataagctggcgcaacagatcctgaccgatcgcttccctgaaagcgttcagcgcattctggccaatcagctgggctttgattttatcgatcgttccaacaaccgcgatccgcgctttcgggagatcgtactgcgcgcctaccactcccgctgcgccttctgtggttacgatctgcgcctggacggcgcgctggtcggcattgaggccgcgcatattcactggaaggtgtacggcggtccgtgcgtggtcagcaacgggatagcgctgtgctcgctgcatcactccgcctttgatatgggcgcgtttgggctggatgaagatatgacgatccgcatctccggcggcgtaagccgcagcccggtggtggatcagctattctggcagaagaatcaacagcggctgttgttgcctcatgacaaagcgctatggcctgcggagcagtacgtcggctggcaccgaaagcagatttttaaggcttga

SEQ ID NO: 453750 - DNA, 402 bp, Serratia marcescens
atgaacaaatggatattatcaggggcaatactcctgctgacggggtgccccggcccgatggacccggtcacgcttacgctgccggcgcaggctgcggtggtggataaccgggtctgcatcaccgttccggccgaagagggggagaaggtgttctccgcccagtttggcagcgatgcggggcaggggatgtataaaacctttggtgatgcggatacgcagctcaaggcgataaagggcgtatgcctgcccacctttggttttgcgttcaagcctgataatacctatgccgtttactaccgtctggaaaagaaccccacggaaaaagggcggctgtttgcggcacgtttctccctgacgcaagataacaacggtcggctgcaaatagtgcagtaccaacgatga

SEQ ID NO: 453751 - DNA, 1341 bp, Serratia marcescens
atgaccgtacaatccaccatcatggacaccaacagctttcgtgccgagcatgccgacagtctgaccccggagatccgccgcttaaccgataaacgcagcaaagtcctcggcgagtcctaccggctgttttaccgtaatccggtgcatctggtgcgcggccaaggccagtatctgtgggataaacagggtaataaatacctggatgtttacaacaacgtcgccagtatcggccactgccatccggcggtgatcgacgccgttcaccagcagatgacgcagttaaatacccatacccgctatctgcatgaacatattcttgattacagcgagtcgctgcttgccaccctgcccgcagaaatcaaccgggcgatgtatatgtgcaccggctcggaggccaacgatctggcgattcgcattgcccacgcctggagcggcggcaccggtattattgtctcccgcgaggcctaccacggcaccagttcgctcacctccggcgtatcaccggcgctgggcagcggccagcctctgccccctgaaacccgcttagtggccgcgccggatttttaccgcacccagaccgccgaccccggagcctggtttgcggcggagattcaaaagcagattgatgatatggcggcccacggcgttaagtttgccggcttcctggccgactcgattttctcttccgacggcgtgttgcccggcccgtgcggctttctgcagccggcgatcgacgtcgttcataaaaacggcgggatttttattgccgatgaagtccagcccggttttgcccgcaccggcgaagcattctggggatttgcccgccacgatgtggtgccggatgtcgtgaccaccggcaagccgatgggcaacggtttcccggtctcgggactgatggccaaggcggaggtgctggcggcgttcagcgatgcgcttccctattttaatacctttggcggcaaccccgtagccatggcggcggcccaggcggtgttgaacgtgattcagcaggaagagctgcaggcccacagcctgcgtaccggccagcggctgctggcggcgctgcgcaccttgcaggataagcatgaatgcgtcggcgacgtgcgcggcgcagggctgtttattggcttcgagctggtcaccgaccgggaaagtaagcagccggataaagctttggcgctgaatctgatcgaagcgctgcgcgaggagtttgtgctgacctccgtcgccgggccttatggcaacgtccttaagctgcgcccgccgctatgcttccaggagaaagatatcgactggctggtgagcgcgcttgaccgctgcctgacccgcttacgtgggtaa

SEQ ID NO: 453752 - DNA, 1365 bp, Serratia marcescens
atgaaaaagacacttaaacctactctcggcaccctgcagctgtggggaattgccgtcgggctggtgatttccggggagtatttcggctggagttacggctggggaacggcaggcacgctgggctttctggtcaccaccttatttattgccctgatgtatacctgctttatttttagctttaccgaactgaccaccgcgatcccgcaagccggcggcccctttgcctatagccgccgtgcatttggcgataccggcggcctgattgccggtgtcgccacgctggtggaatttgtgttcgctccgccggccatcgccatggcgattggcgcttacctgaatgtccagtacccggagctgaaccccaagctggtcgcggtcagcgcctatctgatctttatggggctgaatattgtcggcgtcagcatcgccgccaccttcgaactgctggtcacgctgctggcggtcattgaattactggtctttatgggggtggtcgcgcccggcttcagcctggctaactttgtcgcccacggctgggccggcagcgacagtttctctgcggcgtccatatccggtatttttgccgcgatcccttacgctatctggtttttcctcgcgatcgagggggcggcaatggccgccgaagaggccaaggacccgcgccggaccatccccagagcctatatcagcggcatcatcacgctggttgttctggcggtgggcgtgatggtgctggccggcggcgccggcgactggcgcaccctgtctgatattaacgacccgctgccgcaggcgatgaaaatgctggtcggcagcgattcccgctggatgcacatgctggtgtggatcggcctgtttggcctgatcgccagcttccacggcattatcatgggctattcccgccagttctatgcgctggcccgctccggttatctgccccctgcgctggccaagctgtcgcgctttcacaccccgcaccgggcgatacttgccggcggcgtcattggcattgcggccatcttctccgatggcatcagcctgcagggcatgagcctgaccgccgcgatgatcaccatggcggtgttcggcgccatcgtgatgtacatcatgagcatgctgagcctgtttaagctgcgccgcagtgaacccggcttactccgcagctacatggcccccggctacccgttaatccccgctattgccctgtgctgcgccgtcgtttgtctggccgccatgctgtggtttaacccgcagattggcgcgttattcctggcgtttatggttgcgggttatctctattttctgaccacgcatgcccggagaaacgcgcttgcccgcactccggttgccgcaaccaacgaataa

SEQ ID NO: 453753 - DNA, 1005 bp, Serratia marcescens
atgagcgcgaaacagtacgacaccctgagtaacgagacgatcctccggctggccgatcgggcgctggccaactatccgcaatacgcgggcgccgcggtccggctgctgtgccgttcggaaaatgccaccctgcaggtcacccatggcagccgccggtttgcgttgcgcattcaccgtggcgattatcacgatcgtcaggatattgaaagtgagctgctctggctggacgccctgcgcgacgccggcattgcggtgccgcaggcgatcagggatggccgtggcgaacggatccagcatttacccctggccgacggcggccagcgctacagcgtattgtttcactggatcgacggggaaatgccgacaaccggcatcgacccggcggccttccgtcagctgggaaatatcaccgcgcgactacaccagcacagccgcagttggcaaaagcctgcgggttttcgccgcattatctgggatcaccagagaatggtgtcggcggccagccactggggagactggcgcgatgcgcccggcctcgatccgcaggcacatcagccggtcgaggaggctatccggcacgtgggccggcagatggcggaatttggtcagtcgccgcagcactatggcctgatccatgcggatctgcgcttaaccaatctgctgttacatcgtggggaaacccgggtgattgattttgacgactgcggtatggggtggtatctgcatgatttagccgcggccatcagttttgtggagcaccacgccagcgcgccgcagtggatcgaaaactggttgcgcggatatgagcaggttgcgcatatcagcgatcgggagctggcgatcgttccggcgatgttgatccagcggcgcatccagctgaccgcctgggtgggctcgcaccgggaaacggagatggcgcgcagcctgggggacgcctggagcagcgataccgtgcgtttgtgtcaacgctatctggccggcgcggcgttaccggtcggcgtatga

SEQ ID NO: 453754 - DNA, 1059 bp, Serratia marcescens
atgaccatgatgcaatcagacagtgcgttatctgcgctctccggcgcagtgggtgggaaccgcggtgtgttgtcggcagccgcaacgggactcagtgatttcatcggttcccagggaggggacgttgaccgaattttcggtatcagcggtattgatcccgagaatctctcctgcccgaccctgagtctggatctggtgagctattgccgggtgatggaggaggcggcccacctggccgtgtgtgataatttcgggctgtattacggccagcagttccggccgcagtcattagggcttatcggctatatcggcctgtgttcggccactctcgagcaggcgctgcgcaatctggtcagcgcctttccgttccatcagcacaacacgctgatccaactgaccgaacgccatgacagctggcagctggactatcaggtgcgccacggggcgatcctctcccggcgtcaggatgcagagctgacgttgggcatgtttctgaaccttatccgccgcgcggcgggcaagcactgggcgcccagagaagtgcattttgagcatccccgcccggaacagtggcacgagcactgtaaggtatttgacgcgccggtttattttgagcagccgtttaactccatgatcattaataaagccgacgttgcgcgcaaaatgcccgatcacgatccgatgctgctgctggttatgcaggatgcgatccggcgtctgagcgcggatccggtgagtcagtgctgcgttcacctgacccggaccggcatccagctgcagctggtcaatggcgaaccgtcgcttgaggcggtcgctgaaaagcaggggctttccgcctggtctctgcagcggcgcctgcgtgaggaaaataccagcttcagcgcgcaggttgatcaggtgcgtaaagagatggcaatccactacctgcggcagcagcatctttccgtttcggaaatggcgctgttgctggggtattccgaggtgagcgccttttcgcgggcatttcgccgctggtttggctgtagcccccgccactaccgccagtccagggcgggttag

SEQ ID NO: 453755 - DNA, 546 bp, Serratia marcescens
atggaacgacaggataacttcaaagaaggaattacgcgtgttttaactcgtggtgaggttaacatagcacgtgatatatttcttaattcaatagattactcttcagtgaccatccactgtgatagttatttcccgtttggtttgcaaaatcctgcttatgcaatggcgccaaatggtgagctatggttcagaaaagagatgtatcaggctgatttttcaaaagctattttgacttatcaattgacatttattcatgagatggcccatgtttggcagtttcaacaaggaatgtgggtaaggctgagagggttgttgagttgggtggccgactacaagtatagatttgatggtagaaagaaacttaaggactactctatggaacaacaagcatctattattgccgattattggttattaaaaagatatggtcaccgaacgtggttagactataccaatagaggtgtgaactttcagggagtcagtgacaagtatatttatttaaagtatgagtatgtactttctaacttcttgaggcacagattatga

SEQ ID NO: 453756 - DNA, 411 bp, Serratia marcescens
atgatgaaaagggccatttgtctcaccgtgttgatgcttctactctccggttgttttcatcttggcgatcctcgtcctcctttgatgcgggctaaagtgctgacgatagcaaataaggtgtgcatgatggtgcgtcctgaaggggatgagcaaattgtgacagtgcgtatcgatgaggtagggaacgaccatcatgggttggtaaaatataacctgaccattcctgcttcaggggataagtgtatccctgactttggctatcaatttgctgctggcaaggcctacggcttctcggtgatccttgagtcgccagccaaactcaaacgaggtgttcagcctgctgcgcgtatttatggcgtcagcttcagcctgtgggaaaataacggccagttggaggccaacgagttgtag

SEQ ID NO: 453757 - DNA, 393 bp, Serratia marcescens
atggcaaggaaggcacttttactgacgctaccattgctcctttccggctgctggatgggggacaaattcccgctgtatccggcgcaggccagcgtggttaacaaccgggtgtgcgtctttgtcaatcaggatgatatcgccgccaaaggggaagatgtacgcaggattaccatttggcacaacgccagcggcgcttatgtgtatgaaaaagcctatggcgataagctgaacaaactcggtttaacgcctggccagtgcctgccgggaatagcggagtataattttgtcccggaacaggagtatagcgtgacgctaaatactgcgcgcaacgcctatatcgctaactttgtggtatctacgcagggcgaagagataacgctaaagccaaggtaa

SEQ ID NO: 453758 - DNA, 390 bp, Serratia marcescens
atgcaaagaaccctacttatagcagtcgtgctctttctgcttacaggctgtcccggccctgcggacagagccgtaccccgtatccccgccaccgtcgttgtgaaggacaacagcatttgcccactgtcgcccatgcgggcgggcgagcagataaccgcgctgcaaatctacagcgatgcgggtgataagttgattaagctgctggatgatgcccctgtctatgccccacaagacggctgtctgccactatttggctatgcatttcttcccgggaaaaattacgtcgtcgcctatgacgtggcagccttgaatcaggcggagtcgcatttgattgtcgctgaattttctgtttcctccgacctcaacggcaagattagcgttggcgattga

SEQ ID NO: 453759 - DNA, 297 bp, Serratia marcescens
atgatggtgcagccggaaggtgatgagaagctgatcagcctgacgattaacgaggtcggcaatgataaaaaccaactcagcaaggtttactatgatgacgcgctaacgatcccggccgatacgtgcgttcccacgtttgactacccgtttaaggtgggcaaggcctacggcttctccgtgatccttgagtcgccggccaaacttaaacgaggcgttcagcctgctgcgcgtatttacggcgtcagctttagcctgtgggaaaataacggccaactggaggcaaatgtgctgcaatag

SEQ ID NO: 453760 - DNA, 942 bp, Serratia marcescens
atggagatgctcagcggccaccatgggcgcatggcgctgcaggtgcggggagataatctgttctgggcgtcgatgctgaaagatcactccggcgtctggctggttatgaacgttgagcatcccgggcagcaaggtcttctgccgccggtaacctcgcacgacgtggagtcggtcagaaacaagggacaggcgcaatggacgggtgagtggtgccgctatttcgcccgtcggctgctggatgtgtccacgccgttgttagccccgggccgctggctgctaaggccaatgttctcgtctcaggcgcagggcacgcctttggcaagctggcgttttgatgcgccggccagcagtatggatatggggtgtgactggtgcctgtacggcgaagattttcccgatctggctgaaccggtgaaggtgcgtctggttgattggtggtggggcggtaatttactgcttggccgttatccggtgcaggcagatgccgggcgactgaaatggtggcgcaaaaagtgccgcgaaggtacgttgccgccgatactggtctggtacatcgccggtctggcgtcgtttgtggttctggacggtcactaccgcctgcaggcggcgatagaagagggaataccgccgcagtttttggtgctcagcgagctgaaggaacagacattggctccggatccggaacatctggcccgggttgccggagcgttggagcagcagctgcgtaagaatcccaaatgcagcatagacagcgtcaaccagtcattaatcaatctgtacgatacccgttatctgtacgccgctactcacagccgcgccgttcttggtaatggtgagcgatgggagcaggaggtcagcgcctatctgctgcgtcatcagcttggcgatggtctggataatattcttaaccgggttaacgatgatgtattgtcggcagaataa

SEQ ID NO: 453761 - DNA, 282 bp, Serratia marcescens
atgagtaaaaagctgattgattttgccaggaattttattgcatccaacatcgatgcagatgaatttgccgatccgtatatcgctatgtggaaagcggagaggaacgccaggcagttaaccatcgacgggccagacgtcgatgaagcctcctccagccttttctgcctggcggatagctataacccggacgtaagacgtgaagagtatgagctggatgacaatgcgctgagaacaggcgtaaaagcgacgcttgagaaatttaatctcctgcataacgtataa

SEQ ID NO: 453762 - DNA, 387 bp, Serratia marcescens
atgagtaatgaaagaaacggtggggatcaaccaggaaacaagcttgggtggtatgcctaccctggcgattcgcagaacgctgagcgcgagctcggcaaacggttggataaaaaatttaagcatgcggcggagttcggcatcgccgacacgcagaaaaaccatgcggcgctgataaaattccgtgatgccgttacggctcatttaacagaccgcgataccataaagtggggcacctatttgccgatcaaagattctacggtttttttcaacaccaaaacaaaaaacgttgttgtactcagtggtgataaccattttgtttccggctggcgattacaagaaggcactcagcaatacaaaaaatgcattgaacaagggattttgggatga

SEQ ID NO: 453763 - DNA, 594 bp, Serratia marcescens
atgtggcagttaaaaaattttgatgatgttgtctttactctcgataaaggtgtgcggtttctgccgggaaagcggtgtgttgtcagtgagtccggcgttgtcgccagtctttctgaaaatagctatcgttttttgctcttattggtaacgggtgagacggataaacaggaaattattaatcaagtctggcacgaacagcgcggctcggtaaccgatagtagttattacgggcaaatatatatccttagaaaagcctttgagttggttggcctgtccggcgagctgataaaaacacttccccgtaaaggcgttatttatctggggaaggtggtgcaggaaagcaaaccggaaggcgatgacaatgatgcatcaatagccgaggacgcgaaactccaggagccacagctccaggaaacgacggcgacggcaatgattcattatgaggaaaataaggtcatgccggcggaaaaaaataccaccgttgaatggtataactcgccgcattggaacaaacttatcagtattttagccgtgttggccgtatgctggctgaccacgcttattcttactgtctattattttattttgcactaa

SEQ ID NO: 453764 - DNA, 231 bp, Serratia marcescens
atgaacgaattaaccaccaagtactttgttgccgctcagctgaacctggagaagtttgcccgggatcggcgcggcgttacggcaattgagtatgcgctgattggcgtagcgatggcgacgttactggctttcgttttgggcgatcagaactccggcttcctcggggcgctgaaagagacgtttgataaaattgcggatgcgattaagagcgtcacaatctcaaaaagctaa

SEQ ID NO: 453765 - DNA, 435 bp, Serratia marcescens
atgagctgcttactatctatcaattttatgctgttggtttgcgtgctggtatttatttcctggcaagatattctcttccgggtgatccctcatggcagcctgttattgctgttgattatcatgttgcctctggcggtcatgcagcagatataccccaactttatcgccgcaatcagcatactgtttgtcggctatcttcttttttgtttcaacgtcattggcggcggcgatgtaaagctgatggccttactgtcgttgctgctctccgattcatcgctggcggcatttttatttatgactgcatgtatcggcggtcttattgctattgccggcctgatattttttaaccgggcaacgcgcctgcaaggcattccctatggcgttgccatctcattagcctttgttttgactttgccgtttaacaccccgttataa

SEQ ID NO: 453766 - DNA, 837 bp, Serratia marcescens
atgaatcatcgcgttttatttttcctgtctgtcacggtcattgtgatcgggctggcgggcatttttatacagggccgacatgctgatgacgtcggggcgccgcaaacggtgtctaccggcgtgaaaactaaatccatcacgattgcggaaacattacgcgatcttaagcctcacgacattattgaggttaaagattatcggttgagaacgattgaggttgcgcaagatagccaggatgagagagatatcgccgccatgggctcatccgatctcaacggttttttagtgcgtaatcatattgctaaacatagcgccattgttgccaaagcggttgagtcgccgctgagtaaaacttttttattacacagtcttaaaaaaaatgaattgccttatggctatctggttcgccctcaggaggagtatttgctctcctcactgtccgttggcgacaaggttgccctgtatatcaggattgccgaggttgataaaagccgcgatgcaaaagccggtgcggcaacgccggacggcgtaggcagcggtacggggtcaacaaataaaaaatatgccttgggaagaattagcgggccgttgagcattcttgatgttcagcgtgaggagaaaaaaggagaaacgaacgcttttgatagtgataaatacgtagggaaaattgtgctgcgtatggatcagaaacaattagcagacctgagggtcgttgagaaatcgggagagattttattattccccgcagaagacggtatgggtaataaacaaaagataaacatggatgaggttttgcctcaatttaaaacaattaaagagttacggggtgagaagtga

SEQ ID NO: 453767 - DNA, 1386 bp, Serratia marcescens
atgaaagctcagaataaggccgtctgctggtccgccgcgctggcgggcgcactgcgctgtgcgctgacattggccgggattttcctggcgcactgcagctatgcgcaggaaatttatatgaatccaggcgcgacgcaaaatattcaggttaagggcgatatcgatacggtctttatctcggcccctgaggttgtcgactatgaagtcattggcgaccgcgggctgattatttatgcgcgcgacagcgggcgcgccgagctggtggcgtttgataaggatggcgaacaaattatgaaggcgacgctggtggtggatgcgctgctgagcgaactgcaaaagcatattaccgaaatcgcgccggacagccaggtcaccatccagaaaatgggcaaaagctacgtcatcagcggcaccgtggcgacagaagaggaccgcgacaaagtgtatcaaatcgtcggggagggcgtgggcgcccagcaacaggtcacgaaaaaagagatcgccgatgtcagcggcaacagcggcggcggcggagaaggacaaaacggcagcaactggctcaatgaggtggtttataagggggtgatcaataagctgcagctgccgtcgaccaatcaggtcaacgtcaagctgtcggtggtggaggtgaccaaggactttaccgataacgtcgggatcgactggtcaaccgtcggttcggcgaccggcaccttccgctttattaaattcgacgccaataccctgaccggtctggtgcacgccatcagcaatgactcggtggcgcgggtgctggcggagccgaacctctcggtgctgtccggcgaaacggctgaatttctggttggcggtgagattccggtcgtcaccacctccaacaataacggcaccaacgtgcagtacaaggaattcggcatcaagctcaatgtcggcgccaaggtcagcagcagcaaccgtatccgcatcatgctgggcgaagaggtcagcaacgtcgacgacaccttcagcacctccgccggcaacagtttccccaccttccagacgcgccgggcgcgcaccaccgtggaactggcggacggcgagagtttcctgctcggcggtctgatcagcagtaacgaacgcgaggcgttgtccagggtgccgtttatcggcgacgtgccgattctgggcgcgctgttccgcaatgccagtacgtcacgcaaacgtggagaactgatggtggtggcgaccgtgaatctggtgaagcccgtcggcgcacgggacgtggtgttgcctgattttcagcgcagttctacctgggcgcgttttttcaacgttgacggcatcagcaatctgcgcgaccgcaagctggcccaggagtttattgaacagggaggatttattaaatga

SEQ ID NO: 453768 - DNA, 477 bp, Serratia marcescens
atgaaaacgctgtgttgcctgttattggcggtcgttgcattggcatcggccgcccatgccgagtcatggcgtatgccgcgcgttgatgagcgtcagctgcaattaagcgataccggccaggttgcgctggagattatggccgggcagatcctgtcgctgaccggcccgcgtttctcgggcagcatccggctggtctgggtcgacgacggctttaccggcagcgccagaatgctgcgcagcatgctgattggcaaaggcatcgcgccggaacgggtggtgctggcgccggaaagcggcggctaccaacggcaggccgtcagcgggctggagatcagaatccgtcagattgtgctgcgcttaccggactgtcattacgccgagcaaaattatcgctttgactatcgcgatgacctggggtgcgcgctgaacaatacccgcagcgccattattagcaatccgaacaagttttatttttaa

SEQ ID NO: 453769 - DNA, 1116 bp, Serratia marcescens
atgctgttattcccccaacagaaagaagaaaaatcggcgcagacggataaggtcttttatatcctttccgcgcgtgacgcagtgaataaacaattaactcagcagctcagccaggccggtttcaacaaggtggagacggtgacctgggcgccggggcagccgagcgacatgacgctctcctcccacgcctggggcgtgattattgatatcggcgcgctgcagcaggctgacgatattgtcctgtcgattcagggcatcgtaccgcgcggcgtctggtgctgcgcggtgggcgacagcgactccatctcgctggcgcaggcgttcgcccgccacggcgttcactatttctatctgcatgcgcaggcggatgaactggtgcaggccgccgccgcgggcaccgcggcgaaggtgcggcgcgcgtcggtcaatatcggcattctgggctgtaagggcggtatcggcaacaccacgatcgcctatcagctggtgaatcgtttggtgcagctgcgccagaaaccgacgctgtttatccaggggaaatccggttcacgcgatcttgatctgctgttcgataaaaagtttacccagagcctgatgcccatcagccggtatctggacgcgatgagctggacggacgcgagcttcccggatctcgacagtgaatcctttgaaaaatataacttcgttatttttgaagagtcgatcaactccgccgacaaggaacagctgcggcgcatcgtcgagcgcacctcctgcctgattctgatgctggaccgctccatgtcgtcggtgcggacggtgagacagatcgccgaaatccacgatgttatctgccggacgcaaaatacgccgcggcgtctgtttatttgcctgaacgacagccgtccggtgacctcggagatgctggggatagaggacctgcagctgttgctggggcgcaaggtggatattgtttttccctggcgcaatgcgcgcacggacacccgcttctccgcgctgagattccggccgaaaaaagagcagttggaaacgctgctgcagcaggtgttgggcgaatttcctcagccgaaaggctcgcgttttcgctggttaccggaaataaaaaggaggtcctaa

SEQ ID NO: 453770 - DNA, 1281 bp, Serratia marcescens
atggatatgagcattgagctacaggaaatattgcgtgaaggcgtcatcaagaatatcgaaattaataaactcgaacatctgatgcatgaccgcagccagctattggtggagatgaaccggctgctggagcgggtgatagaacagcaaaacctctatctgaacggccacgatcagcagcgtatggcggagtgtatggcggatgaaatcatggggttcggcccgatgcgtccgctgctggaagacgacaccgtcaacgatattctggtcaacggcccggaaaaaatcttcgtcgagcggcgcggcaaactggagcagacggagctgcggtttatcaacaacgcccaactgacggatatcgccaaacgtctggtgcagcgggtcggccgtcgcctggatgaaagccagccgctggtggacgcccgtctgccggacggcagccgtctgaacgtcgccatccagccgattgcgctggacggcaccgcgatctccatccgtaagttcggcaagagcaatattgagctggaggatctgatccgcttcggcgccatgagcggtcagatggccaactttctgattatcgccgcccgctgccggttgaacatcattatttccggcggtaccggctcagggaaaaccacgctgctgaacgccctgtccaaatatatcgatccgacggagcgcatcatcaccatggaggatgcggcggagctgcgtctgatgcagccgcatgtgctgcggatggaaacccgtctggcgggggtggagaacaccgggcaggtgacgatgcgtgcgctgctgatcaactccctgaggatgcgtccggatcgcattattgtcggcgagtgccgcggcgaggagtcgtttgaaatgctgcaggcgatgaataccggccacgatggctccatgtcgacgctgcacgccaataacccgcgcgatgccatttcgcgtctggaaaatatggtgatgatggcggggatgaatattcctattgattccatccggcgcaatattgtttccgccatcaatatcgttattcagtcgacgagattaaatgatggttcgcgaaaaataatgaacattagtgaggtaatgggcattgaaggcgaccgcgttattcttcaggatattttttccttccaaagccagtcggaacgtgatgaacagggaagaatacagggagagtttgtgaatcacggtctgctgatgcgctccgccgtgatgcgtaacgccattatgtttaatttaaacgaagagttaaaacaaattttcggcatggagtag

SEQ ID NO: 453771 - DNA, 879 bp, Serratia marcescens
atgccctatttgattctggtacttggcctggcgcttttactggtgaattactatcgcctgaaaaagctgtccggctcaataagcgttgcgcatgagacggccaatgcgcgtccctcgctgctgcagaggcatctgaaacctttatggcgggaatggcagcggtacgcgctgggcaacggcacctggcgggggcgtaaaggagccgtcaccgcctctatcgttgtcgcgctgctgctgttgctgaatgccaactggctcggcttcagtctggcgttttttttaccggccgtcttgctgagcgtgttctacgcgcagatcagcatcggccgcgcgctgcgccgccgctattttgacaaccgcttcccggaggtgctggcggtgattaacgccgccatctcggcggggaacagtattcaccaggcgctgcaccgctgcggcgacggggtggacggcgagctgggcgcggtgttcaagcgcattgatcgccggctgaatctgggcgaggagccggaacgggtgtttaaagacgcctggctggaataccgctaccgcgagttctacttctttgtgatcgtgatgctggtcagcctgcagcgcggcggtcagctgcgggtgctagtcgggcgtttgtcgcgcattatcaccaacagcaagaatatggcgcggcgcaaggcggcgatgacctccgaagcgcggatgtcggccaaaatcgtcgccgccattccgctgctgtttttatgcggcatgaagtatttcagcccggagaatttcgatttcattattaacgatcccgtcggacgcctgattttgtattacgtcatcggcagtgaagccattggcatgggcattatctgggttctggtgaagagggccacctga

SEQ ID NO: 453772 - DNA, 843 bp, Serratia marcescens
atgaatatgctgttttatgcaatggtattgctgccgggcgtattgctgttcttgctggcgctgttcaaattccaggtgtggggaaaaagacgcaaggttattgaagcggaggaaagcggtaataaaaagggcgaaaatccgttattggattaccgcgccattattatcagcaataacgcgcttatgcgcagcctgcagcgcattgacgacaacctgtcgattaaattacgtctgtggggcggatgcggcgcgttgctgctggcggccaaactgctgggtttattcccggtgggcgctaaaggcctggcgatgataatgctgctggtgatggtgctggtcattgtcgcgccggcgatgcttatcaggccgatggttaagacaaaagtgaagctgatgctggacgcgctgccctatttcgtcgatttgattgcggtatgcattcaggcggggatgacggtggaaagcgcgattaagtttatcggcgagcgctctgacgatctggatgaaaacctggcgtcgctgatgcgctatctggtgaagcgcgcgggcgtcagcgggctggaagaggcgctgctggagctgtatcgcgcgatggatatgaccgaaatgcgcatgttctgctcggcgctgcagcagagcgtgcattacggcacctcgctgtatgaaaacctgatggagctgtcgaaggatattcgcgatctgcaactgctcgaatcggaagaaaagatcggcagtctctcggccaaaatgagcgtgccgctgatcctgtttattatgttcccgataaccgtattaatcgctgcccccggcattttaaggataatgaaaaatgcgatgttttaa

SEQ ID NO: 453773 - DNA, 738 bp, Serratia marcescens
atgcgatgttttaacaaatgtgttttgctgacgctgtgcgctttaattttttcaggctgtgcgccccatgcgccgaaagatagcaatgaggtggtgtatcaggaagatattctgctgaaaacgaaaaattacagcgggctgattacgctgtaccgaagctggctgaagaataacgaccgcccggacatcaggctgaagctggcgcgatattattatctggccggcgactataaatcgtcgctgtattatttacagccgctgaatgccaaaccggatctgaaagtgtatatcctgcaggcgcagaatatgatcgcgctgggcgattacggcccggcgctgcgggtcacggataaaatgctgcagcacgatccgcagagcgcagaggcgtataacctgcgcggcgtggcgctggcgctgtccggcaagctgaacgaaggccagcgggcgatagagaaatcgcgcgcgttatttattgcggacgatgtggcgctgaataacctggcgatggtggcgatgatggacggacgttaccaggactcggtggggctgctgctgccgcaatatctgcgcggcagaaaacagcagcagatgctgcgtaatctggtgctgtcgctggtgaaagtcggcgaccgccgctatgcccgcgcgattattgaaagcgagcacctgtcccgcagcccggatgaactgattgatgcgctgtcaggcgtaacgccgaccggtcgggaggtggggtaa

SEQ ID NO: 453774 - DNA, 510 bp, Serratia marcescens
atgctggccggctggaaaagcaaagcgtcgcgctgggcgctggtcaaagaccggcgcggcgtcgcgaccatcgaatttgcgctgacggttgcgctgttcattatgctggtgctgtttatggctgaaagcgcccggctggcctatgtctcctcggttattgacctggcggtgtccgaggcggcgaaagaggcgaaaaacgcctccgccgcccaggccggcggctaccgcgcccggtttgaaaaacgcctgaccgaacagggcggctcactgtggggatttttaacacgtgcggatgcggtgacgattaacatcggctacgcccgttcgattgacgatatggtggcgaccggcggcggcagcagctcacgctatcggccgctggcgcgctatcagctctcctaccgctaccatccgatgttttttcccttccctcatatgtgggctgataacttaatgaatcgtgaggtgatctttgttcaggaatttgaacgttccaaatttatggagtga

SEQ ID NO: 453775 - DNA, 570 bp, Serratia marcescens
ttgttcaggaatttgaacgttccaaatttatggagtgatcggcgcggatcggtggcggtggagtttgtggtgatcgccatcgtgttgattttcatgctgctgtttatcacggatttggtgatgcgtcaggcgctggtcggcaagctggaccgggtgtcctattcggtggccggggtgctgcgcgagcgtattcagctgtttgatgcgcgcgaaaccctcgagcagcaggatatcgagcagaccaggcggctggcggaaaaaatgctgcgtgatatgcatgccagcgccgatctgtcccaactgcgcattcaggtggaagaagcccactacaacgacggtaagggcgtgtcgctgtatcgcgcctggcgcagcggcagcgcaggtgagtgtcaggcgccgcagccgctgaatcagctgaccaggctgacgcctaaagggagctacggccgctgggtgccgctgtatcaggtcacggtttgtctgccgaccgtcagctggtttacccgcctgaccaaagcgctggatgaacggccggtgatgtcgtcgttcgccattgtgatggcgaggtag

SEQ ID NO: 453776 - DNA, 363 bp, Serratia marcescens
atgaagacgctgtgtcttatgttgctgttgttgccgggcatattgaccgcgcagacgcgggcggtggtgtttatcgactcttcccggccggcgcaggggcagttggtcaatgcgatgaatcagatgctgttctacagcgcgtcgctgcgcgcgcagctggcggttgatgtgtttgacattaatccgcatggcgcgcctttttccggcgggttgcactatgtgccggatactcacggacagggcgcggcgcgctatcgcccggatgcgctgccgtttctgatctgcctggaggggaaaaaggaaattctgcggatggaaattgagaaaaaggagcagctatgtctttgtactcacgcctgttaa

SEQ ID NO: 453777 - DNA, 1239 bp, Serratia marcescens
atgtctttgtactcacgcctgttaagcgggccggcgcgtttttgccgcgaccggcgcggcgccttcgccatcagttttgtgctgatgtctggcgcgctgttggcgatcgccgccttcgccattgaagggccgcgctatatcaccgaacgggcgcgcctgtccgatgcgatggaacaggccgcgctggcgctgacggcggaggataacggcgccggcgccgcgcgtaattacagtttatccagcgattacttccgcgcctatatgcgtcacgatgtggaggtatttacgccgacggtggtggtaaaaaatgggagcgctgcgggtcgaagctatgtcgagtaccgggtcagcgggcagacgctgcaggactcctggttcgcctcatcgctgtttccgagctttgataaacaggtaacgattggcgataacggcgccgcgcgtaagtaccgttctaatatcgacgtgattttcgtgacggacttttccaactcgatgaacggcgcgttcggcagcggcagcaaactgagcgaattgaagcggattatcatgaaactctctgcggagctatttcagtacaatattgataataaaattggatttgtgccgtttgactggggcggccaagagaggggttattgcgatttcccattagtgaccacccaaccggtgccggaggatatcctgctcaacggcccaagcgccgatctggaaaactacgtcaatttttccgctacggtggcggcgatcccgcgtccggtgcgcgatatcaacatcccgctggataaggccggcgtaggcacctgcctgaaaggaagttcaagctggaaggtgccgctgacctcgagcatagccggcattgcccagatacaaggcatgaccgctgttggtaatacgttggtcagcaacggcgttctgatggcggtgccatacctgacggcaggcactgcgtcgcgtaaggttttaattatcgtttcagacggcaccgatgcgccgggaaatatcagtattacgccgaggctgatggccgccgggatgtgtgaaaagatacgtagtgtgatcagtacgccggaatccgttgggaaaattgcctttatcggcattggctatgcgccgacctatgactggaaacagtgtgtcggtgaaaagaacttctacctgccgcataacgttaatcaactggaagataatttacgccgcgccatttttgaagaggtcggccataacattctgaaggactga

SEQ ID NO: 453778 - DNA, 543 bp, Serratia marcescens
atgaaaactaaagtgattattaccgcattggcgggtttgctggtgtccgcttcttcactggcggccagcccggcaagttatgatactaaatttaatgtcagcgccaacgtgcctgacagcgccaaaattaccgacccaagcggccgcccgattaccgatatggatgtcgaactggtgccggcggcgtcaggcaagatggaagcgcaaaccgcggcgctgaagctgtggaacaacgatgtcaaacagctgaacgttgcgttaacgctggatgacagccagtcggcaaccggcggtgcatttacgctgtacagcaccggcggcggcaagctgagcgacatgacctataaaatcagcgcggtgacgggcaacggtacgcaggagtttgcggcttccggcgattccaaagatttcgccctggtggccaataacacccacggtgaactgccggtggcctttaaatttgtctcagacaaaaattatgacgaattgggtcaggggatgtataccggcgtggtatacgctaacgtagtcgcgaaaccttaa

SEQ ID NO: 453779 - DNA, 549 bp, Serratia marcescens
atggggcagccgtccggctgcccctgttattctatgagacttcattattatttatccgggctggtcgcggcgattttattatggagtccgttggcgctttgcctgcctaactctcagctagccattgagatctcggcggaatcggtcgccagggtgacgctctattataaattcttccccgtcgccggggagcagtttgattttccgttggcgataaacagccagtcgcgcaagtttgaacgggaagccggttacttttatgccgtgggcaacgttgctcaggcggaagtgctgtttgtcgacgacaagtttgaattgctgccggccggcggccgcggtaatcccatgacgctgcaaggcgcgtttttatttaacggcgcagacaaaccggccaaccagccattgataattccggtattaaaaagcgttgcgcagggtaataaggaaaatggcatcagagtgcgcttctcttccgagtattccatcgatagctatagccagggaagttattccaatacgttcacgttgattgtcagaccagtgatttaa

SEQ ID NO: 453780 - DNA, 2562 bp, Serratia marcescens
atgaataaaaaaataaaaatcagcatggttatgtgtggcgttatggcggcgacgggaatcccgccattgaaggcatcgaattccgtgccggtgcccgccggctttgaggatatctttgatgccaaacaaaacagcatcgttgacattatttatggcgaccgctccattgcatcactggccgtcgagtatgaccgcaatgacgtccagctgctttcgccgaacctgattgtcgagcagattaccgccgtcgatatgccgccgctggcctttacgccggcagagctgctcaagaaactgtcggcgccgttgaagcgggtcaaccggcaagggttcacggacgatcggatcgtggccaaccttgatgagtccaacagcgtgctgcgtctgatctttcctgccgattattttaaatcggacggtaaaacctatgacaaaacctatattccgcaccgcagccaagccggctttgtccataaccacaatatcaactacctgtcggactcctggggagacagcctgagcgtctcggccaacgatacgctgaatctgaccggcaacagctatatcaaaggcacctggagttactcgaaagatatcgactttaacctggacgagctggcgctctatctggaaagccaggacacgcgctttaaggcggggcgtcagcgcctgaatgataacctgatttccagtacgccctccatggcgttcagtttctttaactccgtcagctttgacggcatcgcgttgggctatatggcggacaattatctggatcccggttccggcgccgcctcgccggtcagcctgtatctgccgcaatcgggtacggttgaggtctatcgcaacgggcggatgatcgatctgcagcagttctccgccggtctgcagtatctggatacccgcagctggccgagcggcggctatgacgtggtgctggtgtcccggctggccaacggcgcgcgggaagagaaagtgcagcccttttacaaacgcaacgggatgttccgctcgggcgatctggaatatctggtgcagggggggcgctatgatcagcgtcaggggcggctctcctcccgcacatacacgggcaactgccggcagtgtaatttttgggagcaagacgtcgccgataactatttcgtcagcgccattgcgggctataccaccgagtctgcgctctctctggggggcggcctgatgatggatgacgacctgaattatgccaatgccagcgttgatatcccggtgaatacctggattgccgagcggctctacctggacggtatttacggcgatcggggcagttacggctatcaggccggcatcacgaaaaacttttatcgactgggcctgaatctgagctaccgggataaccgctttcacggcgaccggcaggacttccgccgtttcggcatcgtgcccgcctatgactatagctacctgcagttcagcgccaatacttttctaccctgggatatcgggctgggtgtgaacttcggcataaatacgctttatcaggactatggccgccagaataagaataaatttgaaacctgggatgtaaacctgagccgcgatttttcgctggtggacgatatgaacctgcgggtggatctcggctaccaccgcggcgttaatgcttttgttaatcgtcagtcgcgcaacagcagcagtgaggatcgcgtttttgcccagtttacgctgggaatgcgcgagcgcagttataaccactaccagtctctgtacttacgctcccgcctcagcggcgatggcggcgacaacaatatctacagcgccgactatgccctgaatctggacaacccgggcttcgatcgcggcggcaaatacaccctgaacgcaggcgttaaccatggccccgacggcgaaaacaacgccagcgcggggatgatggtgaacaatcgtctgggctacagcgccgccggtttctcccgttcgtttggtcaggatcattatcagcaatattacctctcgcagcgcggcgggtttgccgttggcgacggtgagatagcgctggggcagggagacggcgcggccgcgttgattgttgacgcgacggcgttgccggaaggcgacttttttgaggcgcgcaaccgcaatgcgcagccggtggtggtgaagggggggcaaaagacggtgctgaccgtgaacccctaccagaaggtcgatccgcgcgttgaacaggtatttaccggtaagaccaacgcgttctacaacctgagcgttgaggcgccgtccacctgggtgatgccggggcaggtttatcgggtcaaggtttccgccacgcgcaaccagacggcgaccggccggctctatgcggatggacggccgctggtgaatgccagagtggtgggcggcaatgcggtatcggatgaggaagggctgtttgtcggggatttcactctgaagacggatgaacgcctgacgtcgttaaccgttaaaaaagagggccagaactacgtttgcccgttgctggagcaaaacgtcaggatgacccagggcattatgcagattcgtgaggttaattgtgaagttcagtaa

SEQ ID NO: 453781 - DNA, 717 bp, Serratia marcescens
gtgaagttcagtaagtgggcggcagtgtcgttggggttgatggggctggcggcgctgaatagcgcgcgagcgattgaggttttcccggtggtgaaagagatccgcgaagagacgccgcgtgataattacatcaccgtgaaatccatgtatcaggccaaagacagcgtgacgggcaacgataccaataagcagaggtatgagtttgtcaccctggaactgttctatgtgccgaatccgggggatggtgaagaacagcgggtcaaggtgctgggctcggcggatccgaagctggtgttttcaccgactcggctggtggtcccttacggcgaagagcgtaaggtgcgcattatgccgctgaaaccggtggataaagagcaggtgtatcgcctgcgggtgcgccccagctacccggagcaggagctggataaaggtaaggtgcgttttgcgatcggctatgacgtcctgctgcgttacctgcctaccggcgagcatcggcagggcgttacgctgagctgcaatgggcggcagtggacgttgacggcgaccggcaatgtgcgcagtgagttgcacaacctggtggtcgacgggcgtcaatccgtcggtcagtttaacgtctatccggggcacagccgccagctgacggtgaatcgcaaactggcgtttgaactgaacaacaaactgcaggtgtacgaacagtgccagcgtaaggagccataa

SEQ ID NO: 453782 - DNA, 891 bp, Serratia marcescens
atgcgaacccggtatgtattactggtgctgttgcctgcgctggcgcaggccgatggcgcgctggtgctgcagccgcagcctgacggaaccctgatgacgtttaccgagggcagcgccggcgcgggcgccaaagacgtgctgagctttacgcaaacggcgggcaaggcgttagcggtacagattatgcccgccggagcggggcgctgcgccgacggcgtgctctcactggatccgttgcggctgacgtttagttttgccaaagacgggcggcggctgtcgtgcggtgagccggtgcagctggcggcggcggatcaaccgcagcgggtcgccgtcagggtggagaataatgcgacggcgcgcggcgtcgactggtgggggaatctcggcgacggaatgcgccagccgctgggcagcgtcagcttcagcctggaaggcggagacgccgatacctatccgctgtacctcgacctgagcgtgctccggacgcaggcggccacggtgacggcggctttcagcaaaccggagatgcggctgggcatggtcggtgagctgaataatgtgaatgcctcgacgcagttgcgcatcagcaaaacgcgacaggccgatgaggccgcgctgccctatgcgctgaccttcgagtcggcccagcagcaggataatcaatatcgtctgcgcgcgtcgtccggtgaagcttatatcccttaccagatcagcgtgggcggcaaagaagtggcgccggacagcgcttaccacggacagatcccggcgggagaggcgacatccgacgtcctggacgtgcagttttcgctacaggggcgcgccacccgcgggctggcggcgggcgtacggctgctggatacggtgacggcggtgattacgccgggaagctaa

SEQ ID NO: 453783 - DNA, 507 bp, Serratia marcescens
atgcaatatcaatatttgccggtaatactggcggtgatgttaatcagcccgcccctggcggctgaaacggtaaaaacctccatcgacgtgcaggcggaaatcagcaccagcgtacgcgtatatgtggagggcaaagatgtcacgaacaacgctatcgccctcaaactgcaggataaagccggctatatgtacggcgttaccccggtatttcagtttgtcggcaatgccagcggcgtgtccctgtcgttgcaggcgccggccagcggcggcctggtatcggaaaataacgacatcatgaagatcaataccgcctggatccgggtcgacggcggtgaggtttccacctcgtatccgctgaataaccaaaaggtgtacccaaccctgcaggatattgacgacccgcaaaaaggggtgaaggtgcgcttttcatccgcccagcgcagcgaaacttacccactgggaagctatagcggaacctatgaggtgatcgtgacgccatcgatatag

SEQ ID NO: 453784 - DNA, 1398 bp, Serratia marcescens
atgactaagacattcccggacgattttttatggggcggcgcgctggcggccaaccaggttgaaggcgcctatttggaggacggcaaagggctgtcgacctcggacgtgatgccgaacggggtgttcggcccggtgcgcgaacgcacgcccggcgacttcagtattaaagacgtcgccatcgatttttatcaccgctacccggaagatatcgccctgttcgccgagatgggcttcagctgcctgcgggtttccatcgcctggtcgcgtattttcccgcagggcgacgagcaggaaccgaacgaagccggcctggcctggtacgacaagctgttcgatgagctggcgcgccacaatattcagccgatggtgacgctgtcgcactacgagatgccctgggggctggtggagaactacggcggctggggcaaccgtaaagtcatcgccttctttgagcattacgcccgcacggtattcagccgctaccgcgacaaggtcaagctgtggctgacctttaatgagattaatatgtcgctgcacgcgccgatgaccggcgtcggcctgccggaaggcagcagccgcgcggcggtgtatcaggccattcatcaccagctggtggccagcggcctggcggtgaaggcctgccacgagctgattccggacgcgcgcatcggcaatatgctgttgggcggcctgacctatccgctctcctgcaagccggaggacgtgttcgccacgctgcaggataaccgcagctggctgttctttggcgacgtgcagtgccgcggcgcctaccccggctatatgcagcgttacttccgcgagcaggacatcagcctgcagattaccccggaagatctggcggcgctgcgccacaccgtcgactttatctccttcagctactatatgaccggctgcgtcaccgccgatccggcgctggtggagaagctgcgcggcaatattctggatatggtgcccaacccgcacctggcaagctccgagtggggctggcaaattgacccgctcggccttcgcacgctgctcaatacgctgtgggatcgctaccagaagccgctgtttatcgtggagaacggcctgggcgccaatgaccagccggccgccgacggccagatccacgacgactaccgcatcagctacctgaacgaccatctggtgcaggtgcgcgaggcaatcgacgacggcgttgagctgatgggctatacctcatggggaccgatagatttgatcagcgcctccaaggcggaggtcggcaagcgctacggctttatccacgtcgacctgaaccaggacggctccggcacgctgaaccgcagccgcaaggacagcttccggtggtatcagcaggtgatcaaaacccacggcgcggcgttaaaggattaa

SEQ ID NO: 453785 - DNA, 1878 bp, Serratia marcescens
atgaactatcaggagttggccggcgacattctgcaaggtgtcggcgggcgggaaaacatcatcagcctggtgcactgcgccacccggctgcgctttaaactcagcgacccggcgcaggcggacgccgcagggctaaaaaataaccccggcgtgattatggtggttgaaagcggcgggcagtttcaggtggtgatcggcaaccatgtgcacgaggtgtatcaggcggtctgccgcgccgcggggctggacgacgagccggccgccgcgccgccgtcgcaggaaaaatccgggctgctggcgcgctttatcgatgtggtgtccggcattttcaccccgttcctcggcgtgatggcggcctgcggcattctgaaaggctgcctggcgctcagcctggcgggcggcgtgctgaacgagagcagcggcgcctaccgcatgctgttcgccgccagcgacgcgctgttctacttcctgccgatcgtgctgggctacaccgccgggaaaaaattcggcggcaacccgttcctgaccatggtggtcggcggcgcgctggtgcacccgctgatgctggaggcctttcaggcgtccgccgacggggaagccctgagcttcttcggcatcccggtggtgctgattaactacgcctcgtcggtgatcccgattatcgcctccgcctggttctgctgctggctggagcgccagtgcaacaaggtgatgccgtcggcggtgaaaaacttcttcacgccgctgatctgcctggcggtggtggtgccgctgacgtttctggccatcggcccgctggccaccgggctgggcgagctgctggccgccggcttccagcgcgtctaccactttgcgccgtggctggcgggcggcattctcggcgcgctgtggcaggtgtgcgtgatcttcggcctgcactggggactggtgccgctgatgatgaacaacgtggcggtgctgggctatgacccgatgatggcgatcctgctgccggcggtgttcggccaggtgggcgccgcgctcggcgtgttcctgaaaacccgcgacccgcgcctgaagacgctggccggctccggcgccgtcgccggcgtattcggcattaccgagccggcggtgtacggcgtcaccctgccgaaccgccgcccgtttattttcggctgcgtcggcggcgcgctgggcggggcgattgtcgccttcagccagagcaaggtgtactccctcggcctggccagcatctttgcgctggcgcagatgatcccgccgagcggcccggacgccacggtatggggggcgatggccggcgtggcgctgtcgtttaccctcgccgcgctgctgacgctgtttgccggcctgccggcgcagcccgccgccgagacgacgccgacggcgctggccgacgcggacgcagttctggcgccgctgaccggcgtcgccgtcgcgctggatacggtgccggacccgaccttcgccagcggcctgatgggccagggcgcagcgatcattcccgccgaagggcgggtggtggcgccgttccacggcgaggtggcgtcgctgttttccaccaaacacgccctcggcctgctgagcgacagcggcatcgaggtgctgatccacgtcggcatcgacacggtaaaactgaacggtgagcattttaccgcccatatcaaagagggcgacaaaatcgcccccggcgatctgctggtggagtttgaccgcgaggcgatcctgcgcgccggctacgatctcagcaccccggtgattatcagcaacagtgaggactacgccggcgtggagagcgtcagcccgacccctgatgtacgagcgggtgcggcatttctgcacgttacgcgcaacaacaaaggagataaccatgactaa

SEQ ID NO: 453786 - DNA, 789 bp, Serratia marcescens
atgaaaaaatggttagcggcactgattttatgcaccagtacggcggtcggcgcggcggaaagtacgccgccgcagactgacgaggcgatcaccatctatttcgcccgtcatggcaaaacgctgtttaacaccttcgatcgcgttcagggctgggcggattcgccgctgaccgaagacggcatccgcgtggcgcgctatctgggcgaggggctgaagggcatcaagtttgacagctattactccagcgacgccggccgccagcgtgaaaccatggcggtgattttacgccaggcgggcgtcaaggattaccagctgatcgagctgcccggcctgcgcgaggccttcttcggcggctttgagggcggctggaataaagatatggcggacgccggcgcgcggcagctggggatgaaagacggcggcgagctgttcagtaaaatgaaggcgggcgagctgacgcaggaccagagtcagaatgcgttggccgcggcggacccgaaagggctggcggaaaactaccagcaggtgaagcagcgcacgcaggcggcgctgcataccatcgtggataacgccaaggcgcgcggtgagaagaacgtgctggcgatctcctccggtacctccatgcagattatgatttccgacctgaccacggatccggccagaaacaagccgctgtccaacgccgcggtggtcaaagtggtttatcagaacggtaaatatacggtgccggaaattggctcgatgaaatatgtcgaagccggtaatcaggcgttagataataataaataa

SEQ ID NO: 453787 - DNA, 1344 bp, Serratia marcescens
atgaaacttaatttattaaccatcgcgttagcggtatgggttattcccgtctgcgcctggtcgtcagtcgatacgcggatgcaggaaaaggatgttattgaccgggtgctggcggaccctttttttaaccagtcgcagatgacgctgtcgctgaaaaattactggaaatatctgaaggaagacaacaccgatccgaaaaaggtgcataacgcctgggggcagggcgtggccgtggattatcagtccggctattttgccgatacccttggcgtggacgtcacctattatggcgcggtcaagctgggggccagcgattattttaacacccgtggcgtgttgtataacaacggcagcggcaatgataaaagtaacgccgaaggctacagcaaattcggccagcgcaatctgaagctgaaatcttcgctggccggcgcgcagctgcacgcccgctggggctggcagacgatgaaaaacgtcggcgtaatctccaattccacgcgcctgtcgcccattacctatctgggctggctgggctcggtcaactatgatgccctgaccctgcgcggcgcctatatcgaaagctccatggaccgtaactcgccggataaaaagcgttttcagaccaatagcggcaactatatcaaccacatcgccagcggcgacctgctgtggaaaagcgacggactgagcctgcagtatggctacggtgaaagcgataactatctgcgccgccaattgctgatagcccagctgatgccgagcaaacggctgaaagtcggcgcacaggtgtacggcacccgcgcgctggaggcgtacaaagcgatgccggccggcaagcgtgacttcgatcgcaacgcctggcactacacgctggagggcagctggcgagcggacaattggagcagcaagtgggggttgggctacacccaggccagaaaagagcacgaggtggggttctatccgcgccatatgagtaaaaactcccgcggcaccttcggttcgatggcgttcgccggcgatgactatatgcgcgacggcgaggtgatgctggcgaatatctcggactataagctgacgccggagctggcggtgggcctggccgcgattgccggccagttcagctaccggggcaatcacgtgcgcagcggtgaggtcagcgcctttacacgctgggcgccttcccacggcaaactcaacaacctgaccgtgtggaccatgttcggcccgggctggtcgtataaggcccgcggcaaaacgccgctgttgaacgaggacggccgctatatgcgtgcccacaccctctcgtccgaggtgattatcgagtacaaattcaaactgttctga

SEQ ID NO: 453788 - DNA, 849 bp, Serratia marcescens
atgaaaatcgccaaaatactcaataataatgtggtggtggttctgggtgagcatcagcgtgaacaggtggtgatggggcgcgggctggcgtttcagaagcgcgtgggcgatgtgctggatacggctcagattgaaaaggtgtttgcgctgcagagcgacgaactggtcagccggctgggcgagctgctcagccagatcccgctggaggtgatgaccgcctgcgaccgtattatcgagctggcgcgcgtgcggctgggtaagctgcaggagagcctgtatatcaccctgaccgaccactgccactacgccattgagcggcagaagagcgggctggctatcaagaacgcgctgctgtgggaaacccggcgtctctatccgaaggagtttgagctggggcaggaggcgcgggcgattatcgcccggcggctcggcgtggagctggacgaggacgaggccgggtttatcgccctgcatctggtcaccgcgcagctgaacagtgccatgccggaggtgatgcacgtcacccgggtgatgcaggagatcctgcagctggtgaagtatcagctgcggctggagtacgatgaggattccctcagctaccagcgctttgttactcacctgaagttttttgcccagcgcatgctgacgcgcaccgtggtgccggacgacgacgtcacgctgcatggcgcggtgaaggacaactacgccaaggcctggaagtgcgcggagaaaattgcgcgccatctgcgcgccggctatcagcgcgagctgacgacggaggagattatgtttttaaccattcacatcgagcgggtgcggaaagagggcaataagagaacggataactga

SEQ ID NO: 453789 - DNA, 795 bp, Serratia marcescens
atggcaaatactccaaacaccccgctcttccccccgacctggcagccgctgctggaacagggccgccttgagcggcagcatatcggtcgctccgatgcggacgttttccgcctgcggcggcacgctggggatctgtttttaaaatcggaacgggccgatgcgttcagcgagctgccggccgaggtggaaaagctgaagtggatgcgtcggcaggggctggctgtgccggaggtggtggagtttacccgccacgccgagcatcactggctgctgatgagcgccctgccgggacgagacctggcctcagagccgacgctgccgcctgaacgggtgatcgccattatggcgcaggcgctgcgccggctgcacgccctgccttaccacggctgcccgttcgaccagcgcctgagcgtgcaaatcccgctggcgcagcagcacctgcaggccggcctggtggacgagtcggacttcgacgccagccggctgggtaaatccgccgccgagctgttcgccacgctgctggccgagcgccccgcgccggagacggaagattgggtggtgacccacggcgacccatgcctacccaacctgatggcggatggcgatcgcttcagcggctttatcgactgcggccggctgggctgtgccgaccgctatcaggatctggctctggcgtcgcgcagcattggctacaacctgggcagcgactgggtggcgccgtttttccgggcgtacggcatcgtgccggatgaggcgcggctggagtattaccggctgctggatgagtttttctaa

SEQ ID NO: 453790 - DNA, 813 bp, Serratia marcescens
atgttatttagtgtaattgcagaaatggatgaatcgaaatgggatgataagccgggagaggagtaccattttccgaaacgttacgccaaaatgcttatatctggtactcgggtagtttactacaaaggtcgtttgagagaccggcggtttcgtgagcagcgcctttctgatgaaccgcactattttgccattgccactatagccaatgtttaccccgatcctaatgcaaaacggggagagttgtacgccatagtgaaagattttcaaccgtttactcagccgctattagccaaaaaccaccaaggctattttgaaaagataccggctaaccggcagtctaattactggcgtgatggtgttcgtcccatcgaccaaggcacctttcaaacaatcattgagcatgcgcaccttggctctgtcatacagccagaagtagatgttgatacggacgacaacacccacttagaatcagcggctagctatcgagaaggtggaaaaataagctactttaacacaaaatatgagcgcgatccgcagctacggcgtgcggcagtgaagttacatggtgttacttgctgcgcctgcggttttaattttaaagcgttttatggtgattatgctgaagggtttattcatattcatcatatccatcctgtgtcggaatttggtggtgagaaagaggtaaaccctgtaacagatttagtaccgctttgtgctaattgtcacagtgttatccatcgtagaaaagatagaactctgtcggtcgatcaactaaaaacgatgattgcattaaacaaggatgtaaaaaagtag

SEQ ID NO: 453791 - DNA, 432 bp, Serratia marcescens
atgggaaagaagttaatattggtagtcgccgccatcggtttactcagcggttgttttggcgacaggttggagcagcgttatgcacctgacttgccgctcgaggcttcactgcgctccggtcaagacgtctgcatttatccgccgccaaaagatggcgagcagcaggatacgctgctgatcgcgggcggtgcggaagacaagctgttggaggtcgacggacgggcattggcgcagggcatttgcgtgactccgcatgattaccgctttcaggcagaccggccctatagcatgagactgaactttgtacctgcagaggcgcgccggcagctgcaggagcgctatggccggacttttatcgccaggttcaaaatcgtcgagcaacatggtcagcgccggattgagaatctgcctgcgatagacggtaaaccgtaa

SEQ ID NO: 453792 - DNA, 453 bp, Serratia marcescens
atgcctgatttctcccgttgcgcctttaccgaaggcagcgtcaagctgcctgacggctaccgcgatcgcagcgttaacgtgctgctggccggggatgatatttccccctctctgaatatttcccgtgatgccctgctggcggaagaaacgctggcggattacgtaacgcgtcagctggcgacgctggccgacggcctgaagggctgggtgcaaaaaagtcgtgagccggcgacgctgggcaatggcgtgctgagcggcgaatgcgtgcacgccagctatatgcgcgacggcaaacgcatctggcagcgtcaggcggtgtttgccctgccgcaggggcaggttttggtctttacgctggcgcagccgcgcaagctgacggcgcaggatgaagcgctgttgcaacaggtattagccagctaccagccggcggcggacgccgcctcacaggcgtaa

SEQ ID NO: 453793 - DNA, 4272 bp, Serratia marcescens
atgggtgaagcagcgcgcgtcggggacagcatcggccactcccatgcgctggcagggatgattggcggcacgcttatcggcggcctgattgccgccgccggcgcggtggcggcgggcgccctgtttgtcgccgggctggcggcctcctgcgtgggcgtcggcgtgctgctgattggcgccagcctggcggtgggctacctctccggcgagctggccaccaaggcgcgcgacggcattgccgccgccggtgccggcagtctgtcgcccaagggcacgatactgaccggctccggcaacgtgtttatcaacggcaaaccggcagccatcgccaccgtcagccgcgtggtctgcgaggatgacggcccgagcatgcagatggcgcagggctcggacaaggtgtttatcaacggctacccggcggtgcgcagcggcgacaagaccaactgcgacgcgcaggtgatggccggctcgcccgatgtgcgcatcggcggcggcaccgtcaccacgctgcccatcaaaccggaagtgcccgactggctgtataaaatctccgacctgacgctgctgttcgccggcctgataggcggcgtcggcggcgcggccagcaagctgggggcgctcggacgtatgctcagcaaggcgccgggcatcaacaagcttggccgcgtggcctgccgcgccggtgcattgatgaccgccaccgcagcgacgggcattatcgcccggccgctggacgtggtcagcgggcagaagtttctcgacggcgacgacgagctggactttgtgctgccgtcgcgcctgccggtggcgtggcagcgctactggcgcagcggcaacccggcggagggcgtgctggggcgcggctggagcctgttctgggagagcagcctgcaaatctggcaggaagggctggtgtggcgcgcgccgtccggcgattatgtctccttcccgatggtaccgcgcggccacaagacctactgcgaagcggaaaaatgctggctgatgcacaacgccgacggcagctggcaggtgttcgacgtcagcgaacaggcgtggcactatccgcggctggaggcgcagcagccgagccggttgagcatgatgaccgacgccgtcggcaacgccacctcgctgttctataacgacgcggggcaactgagcgagctggtggacagcgccgggcagcgtctggtctgccgctacctgacgacggccaacggtgcgttgcggttggcggcggtagcgtggcaaaacggccaggatgcacaggtgctggcgagctacggctacgacgacgcggggcagctggtcaccgtccgcaaccgcgccggcgaggtgacgcggcgttttggctggcaggacgggctgatggtcagccatcaggaccagaacggcctgctgaacgaataccgctggcaggagattgacggcctgccgcgggtggtggcctaccgcaacagcgccggcgagcagctgtccgtctattatgatttcgccaacgggacgcgccgggcggtgcgtgacgatggcaaacaggcgctgtggcagctggacgatgacgacaacgtcgcgcagttcaccgactatgacagccgtcgctacggccttatctacgcgcgcggcgaactgtgcagcgtggtgctgccgggcggtgcgcagcggcagagcgagtgggatccgtacggccgcatgctgagcgagaccgacccgctgggccgcaccaccacctaccaatattcccgcaacagcggccgcctgttctcggtcacctggcctgacggcagccaggcgttccagcactgggacgagcaggggcgtctggtcagacagacggacgcgctggggcagagcacgcattaccattacccggacccggaagagagcctgccggagcgcatcaccgacgcgctgggcggtgaggtgcagctggtctggaacgcacaggggcagctgacgcgccataccgactgttccgacagcgtcaccgcctacacctatgacgcgctgggccagctgacgcaccgcaccgatgcggaaggccacctgacccgctaccgctgggacgatgccggccggctgcagcagttgctccatccggacggcagcgacgagcagtttgactggaacgcgcagggccagctggccgcgcaccgggacccgctcggcagcgagacgcgctggcagtacaccccgctgggcctgccggacagcatcaccgaccgcatcaaccgcacgcgtcgctatcactacggcccgcgcggctggctgatgcggctggagaacggcaacggcgccgactaccagttcagctacgacgcggcaggccgcctgcaggtggaacagcggccggacgggcagcgccgttactaccattacggcgccgacgggctgccgacgacgctgctggaaaccggcgcaccggccgctgatggcgcggtggcagagcggcggcagcacttccgctttgatgaggcgggccagctgacggcgcgcaccaccgacagcgccgaatggcgctacgactacgacgccggcgggcggctgacgacgctgacgcgcacgccgaccgccgccggtgcggcgctgggcatcgagccggacagcatccggctgcgctacgaccgcgccggtaacctgctgagcgagcagggcgttaacggcgagctgcagtatcagtgggacgcgctgggcaacctgcaggcgctgacgctgccgcagggcgaccggctgcagtggctctattacggctccggccacgccagcgccatcaagttcaatcagcagctggtgagcgagttcagccgcgaccggctgcaccgggagaccggacgtacgcagggggcgctgcatcagcggcggcagtacgacgcgctgggccgccgcagctggcagagcagcggcttcagccacgggcagctgacgaagccggaagacggcgtactgtggcgggtgtaccactacagcggccgcggcgagatagccggcgtcgacgacgcgctgcgcggagaaatccgctacggctacgatgcggaaggacgcctgctgcagcaccgcgaggcgcagcagggcaagccgggccaccgcctgcagtacgacatggcggataacctgctgggcgcgcagagcgccagccgcacgctggaggagcagttgccgccggcgccgctgggggacaaccggctgacgcactggcagcagctgttctaccgttacgacgcctggggcaacctgataagccggcgcaacgggctgtacgagcagcactatgtctacgatgcggacaaccggctgacggcggcgcacggtcgcggcccgcagggcgagttccgggcgcagtatcactacgatgcgctgggcaggcgcacgcgcaagcaggtggactacaagggtaaggcggcgcagagcacgcgtttcctgtggcagggctaccggctgttgcaggagcagcgggacgatggcacgcgccgcagctggagctacgagccggacagcccgtggacgccgctggcggccatcgaacaggcgggggagagccggcaggcggatatcttctggctgcacagcgagcagaacggcgcgccgctggaggtgacggacggcgagggcgggctgcgctggtcgggggattacgacaccttcggcaggctgaagggacagacggcggcgggcatcatgcagcgtcggggcgcagcctatgagcagccgctgcgctacgccggacagtaccaggattgcgagagcgggctacactataatctgttccgctactatgagccggaggtaggtcgctttactactcaggatccgatagggctgcagggtgggctgaacctgtaccagtatgcaccgaacccgtatgggtgggtggatccgttggggctggccgtatgtaatgcaggaagtaaagaagtagaccctagggatattcggtttagccagagctctgttaatggggcagcagaattaacacacagtatgaaaactaagggctgggcaggagagccagtagatgtagttaggatgagtgatgggaaactaacaactatcgataatacacgcattctagcggcttctagggctaagataaaagttcaagctcgtattcatgaagggaatagtccattgcctgaggagtttatcgaacgttttacgacgaagaagggagtaccttcaacttgggaggaagcaatactcctccgtatcggaaagcaggcctctgggtacagatatggttatccaaatggctcaatgattataggatctatggattaa

SEQ ID NO: 453794 - DNA, 321 bp, Serratia marcescens
ttggcggccatcgaacaggcgggggagagccggcaggcggatattttctggctgcacagcgagcagaacggtgcgccgctggaggtgacggacggtgaaggcgggctgcgctggtcgggggattacgacaccttcggcaggctgaaggggcagacggcgacgggcatcatgcagcgtcggggcgtggcctatgagcagccgctacgctacgccgggcagcgaacgcttatctgctgcgtggcatccggacgattaaacaaaccgtgccgttatcaccggtcaaaaccgccctcaatgaaggcggtatgtaagccagtatag

SEQ ID NO: 453795 - DNA, 675 bp, Serratia marcescens
atgacgttttcgatcgccgcgcgctgcgacaaaaccggccagttgggcattgccatcagttcttccagcattgcggtcggcgcccgctgcccctggctgcaagccggcgtgggcgcggtgtccagccagaatattacgctgccgcggctgggcagccagacgctgcagcggcttgcacaagggatgccgccgcagggcgcgttagacagcgctctgagcgaggatgcgttcagcgcttaccgtcagttgatcgccatcgaccatcaggggaacagcgcgctgttcagcggcgacaaggcgttaggggtttaccatggcgtgcaggggaaagcgtgcgttgcggcaggcaatatgctggcggataaagcggtggttgaggcgatgacggcgacgtttgcaagtgcaaccggccagctggcggatcgcctgatggcggcgctgcaggcggggcttgagtgcggcggtgaggccggcgcggagcactccgcggcgctgaaggtggtgggcgaacagagctggccgctggtcgatctgcgggtggactgggcacagcaggatcccatcggcgagctggcggcgctgtggcaggcctatcggccccagatgcaggactatataacgcgggcgatcgacccgcgggaggcgccaagctatggcgtaccgggcgatgagtga

SEQ ID NO: 453796 - DNA, 2130 bp, Serratia marcescens
atgaatagaaaatccaaaaaacagctgattgccaaattatccccgatttgttttttcagtctgctttcctggggcgcggtcgcccatgcggccatcacgccgtcggcgccgattaacggcggcccttccgtcagcgccggcgccaacggcagcaccattatcgacatcaacgccgcgggcaaaggcggggtttctcacaacatctattcggaattcgacgttaaccgcggcggcgtagtgctcaataacagcgcctccggctccacctcgcatctggccggtaacattgccggtaacgccaacctggccggcggctccgcctccatcatcctgaacgaagtcaactccacccgcgccagccagttgaacggcctgatcgaagtcgccggtgataaggcgcaggtgattgtcgccaacccgtcgggcatcacctgcagcggctgcggctttatcaacgccgaccgcgccaccctgaccaccggtaaagcccaggtcgccaacggcacactgctgggctacaccgtggataaaggccgcgtgatcatcaatggcgacggcctgaacaccaccgatgccgactataccgatatcattgcgcgcgcggtgcagattaacgccgatatcgtcgccaaggatctgaaaatcaccgccggacgcaacaacgtcaacgcggacaatacgcagatcaatgagctgacgccgggcggcgtcaagccggcaatcagcatcgacgtcgccaaattgggcgggatgtacgccaataaaattacgctggtcagcaccgaccatggcgtcggggttcgtaacgccggcaccatcggcgccatgacaggcgacctcaacatcaccaccgatggcgtactggaaaacaaaggcgtcatctccgcacaccatgacgtcaatatcgacaccacgcggggacgcaatcgtcatgccggttactactacgccagcggccgcgcgttaaacaacacggcaaacggcgtgatcagcgccggcaacgatctcaacatcaatctggccaagagcaagctgaacaacgtcggcggcgaactgctggcggatggcgatatcaacctcgtcagcggccacatcgacaatagaaacggcaaggttcacagccagggcaccgttgatatgcgtcacgatccttaccattacggttttaaccgaacgctggataacatcagcggcgttatccacggcaaagagggcgtcgttatttcctctaacagcctgaataacaccggcggcatgatcaaaagtgagctgggcggcattgatattaataccggcggctaccacctgaataatacccgcggcagcattgaggcctgctgcgaactgaccctgaacaccggcacgctgacaaataacgccggcgtcattcagtcgacggaaaacgtgacgattaatacccaccaacgcgcgctgaacaaccagtccggcgtcattcgcggcggtagcgatgtctcgatccacagcctcggcgtcaataacagcaccgggcgcatcatggccgacaaccacctgaatatcaacgccaacggcagcagcatcatcaataccaacaacgccagaaacaccgacgaagccgggctgttcagcggtaagggcggtatgacgctggtcgccagctccatcagcaacggcaaagggaaaattatctcccagggcaacattatcacccacgcctcttcaaccctgagcaacgtcggcggcctgattgaaagcgacggcagcatcatgatgcgcgctgcaacgctcaataacagcactggcctgatcaacgcggctgaagacgtagtgattgacgcccgtacgctcaccaacaccggcggcgaaatcaatgctgaaggcgaagcgacgctggcgctgagcagcggttacgcccaccgcggcaagctgagcggcaaagagggtatccgcattgatatcgagaaaggtggcgttgccaactacggtacgctggcctccgccaacggtaaaacggtgattaacagccgcagtttcaccaaccacaaaaatgcgctggtcgacagccctaacggcgttgaactggtgctggacaagtccggcaccttcaccaacagcggcgcagtgaacggcaatatcaccattcacaaataa

SEQ ID NO: 453797 - DNA, 759 bp, Serratia marcescens
atgtcacagcaacaatgcagcactgcggaacaaaaagaaatcattcatatactgttgcccagagcgctgacgccggccgattgctatttttttattagcgccggcgccctactagctttgatgattgaactcagcagcatattctttccgcaatggaacaacgagattttcatcacgctgattaacgaccaaatgccattggccacggtgatgctgctgttctgtcttcttaccactctgatactgcttgccatcacactgccggcgccaggtccgcgactgagcctgctgatccagctgctgacgctgcgtatacatcagctccttatcccgctgctgctgatgctgctgggtattatcatcattctgctggttcttggcctgatgaccgccaacgcgcaatattttggttacgtcgtgcagtttggctgcacgtttctaattccttacttatatatcgttatcaccaatatgggcagttgggcggtgaaacatcatatctttgtcaatgccagccgctacctctctgcccatccctggcggcgtatcgctattcaactcacgattgtgtcatgcattttcccggcgctgctttatttcacccattccagcagcgccagtattggcatcaccctgaatgccgacgaatacgcccggcttcgggcgctggcgcagtcacaacaaatcacccctgaagagtggctgaaaaaacaggcgcagcaatccctgcaggcatcggcgtctggtaattctctttga

SEQ ID NO: 453798 - DNA, 264 bp, Serratia marcescens
atggtcactccaaaagggaagtcaagaaaacttagtactggtgaaataactttatcacgctatatatataagaactcaatcgactattcacgagtgatggttcataacggaagctattttccttttggactacaaaacgaagacacagccgtcacaccgaacggtgaaatatactttatgcccaaacgtttcaaagaagacttctccatagccaatgctaatgatcaacattggttcattcatgaaatggctcatgtttggtag

SEQ ID NO: 453799 - DNA, 924 bp, Serratia marcescens
atgcagcagatgaacacgatggtactgggagcggggctgatgggtatcggcatcgctacgcactttgcccgccacgggcggccggtgctgctgtacgacaccgaccccgcgcgtctggcggaggtgccggcggcggtgggcagcattctggcggagctggcggcggccggactggccgacccgcaggagagtgcggccacgctggcgcgtttgcacaccacgaacgagctggcgcaggcggcgtcggcgcagctgctgatcgaggcgatccctgaacggctggcgctcaaacatgcgctgtacgcccagctggaagcgctgatcgccgacacggcgattatcgccagcaacaccagcggcctgccgccggaccagctggcggcgcctctgcgccatccggagcggctgctgatcgcccatttctggaacccgcctcatctgatcccgctggtggagatcgtgcccggcagcgccaccgatccgcgtcatctggcgacggtcgaacggctgctgacggcgctggatctggaggcggtggtgttggatcgcgctgcgccgggctttgtcggcaaccgcctgcagtttgcgctgctgcgcgaggcgctgcatatcgtgcaaagcggcatcgccagcccgcaggtggtcgaccaggtgatgcgcgcctcgctggggcggcgctatgcgatggtcgggccgctggaggcggccgatatgaccgggctggacaccgtggcggatatcgcccgccatctgttgccgacgctggccgccggcgacgggatgatgacgctggtgcaggaaaaggtggagcaagggcagaccggcctgcgcagcggcgacggcttttatcgctgggacgacgcgcgcaggacgcgcattgcgcagcggcgtacccatcagttgcgctttgcgctgaagccttaa

SEQ ID NO: 453800 - DNA, 771 bp, Serratia marcescens
atgaatctacacggtaaaaccgcgctggtgaccggttcgaccagcggcattggcctcgggctggccgatagtctggccgccgccggcgcgcagctgatccttaacggtttcggcgacgttgatcgggcgctggcgcaaatcgcgcagcggggaaaagcgccgggctaccacgatgcggacctcagcgatccggcgcagattgaagcgatgatggcgtatgccgggcggcggtttggcggcgtggatattctggtgaataacgccggcattcagcacgtagcgccgctggaggactttccggtggcgcagtggaacgcgattatcgccgttaacctctctgcggtgtatcacaccagccggctggcgctgcccggcatgcgcacacgcggctggggacggattatcaacgtggcgtcggtgcacgggctggcggcgtcgaaggagaagtcggcctatgtggcggcgaagcacggcgtggtggggctgaccaagaccatcgctctggagaccgcgcgtacggcgatcacctgtaatgccatttgtcccggctgggtgctgacgccgctggtgcagcggcagattgatctgcgcgtcgcggccggtgagtcgccgcagcaggcgcgtgatgcgctgctggcggagaagcagccgtcgcaggagtttgtgacgccgcagcagctgggtgagctggcgctgtttctgtgcggcgacgccgccgcgcaggtgcgcggtgcggcctggaatatggacggcggctggctggcgcaataa

SEQ ID NO: 453801 - DNA, 384 bp, Serratia marcescens
atgccctttgacgcagccactttcccctatgtccgtatgtatcagcctgccgggcagccgcgtgatgttgccgccgaatttgccgagtttgacgcgctgctggcgcgggaacagccgtttgtgattgtgtgcgatccgcgttccgaagagcagggggagccggatcgcgatgaacgcacgcaggtggcgctgtggaaacgcgatcgtcgcgccgcgctgaagttatatgtaaaaggcatggtgatgatagagccggataatgcgcgccggcttgtcaccgggccgtttgccaagttcgccagtaagttctggggatatccggtagaggtggtggcagatagcgcacaggcacgtctgcaggcgcaagcgtggttgaaccaataa

SEQ ID NO: 453802 - DNA, 1542 bp, Serratia marcescens
atgatgagtacagcccttgaagaaaataccggttacttcttgtcaccggaaatgttcggcgccgtgggcgacggcgtgcacgatgacagcgatgccatacagacagccatcgaccatgcgcgcgtgaataaatatcgtaaagttgtcggcaaaggcaattacctgattaataaaacgctgttaatcagttctgatggcaacggctttgcgctgcacctgcaatcgctgatcgtcggcgagcagttccccgcgctgccggaaaaatggtgggacgccgcaccggcgatcgccccccataaatccgccggcagtcaaaacaacatcgacctgcgcgtcgaatatttcaatggcgccaataaggcgacctggttcagaaactgggggaacggcatcaccgcctccaaactgtactgcggcagcatgaaaaactacattatcggctaccgctgctaccgagacacccagcgggtaacgggcatgaacgacctcgccggctgcagctggcagggcggctacctgggagcgctgatcggcaccggtgaaagagtgccgggctttaccaccgtcgcggagtgccactcatttgatattcaatggttcgcctccaacaaatatggcggggtgattctgctctccggcgcgcagtatgccaatatctacaagggtacctacgactacaatggcaagttctcggtctggatgaacctgggcgccaacaacccggatacggaaaataacggcaaggttatcggcttcggcgacaccatcagcgacggtgtggttaccggcacggtactgaccgaaccctcctatcatcagggcaactattacattctggttaccgatacgcagaatgccctggacggcaacagcacctggacggcgggcaagccgctgagcacgccggacggcagctggaaggccagcgcggagaaaatcattacctgcaccaccaccgaagcccgctactttgacgtggtcgccaatatccgcaccggcggtttcggcaaatgcattattgagcctgaatatatcggcggcctggtcgggcataatcttttcaccagccagtaccgggcggccagcgccacgtccatcaacgatacctccaactatcgcggcctgggcgtagccagcacggcggatcgcctggagatgacggcaaccagccacagcaatacgccgtttatcagcgcttataaggacgaaacgcaggtcagaacccatttgcgccttttcaatcagagcaaactgctggggttaaataaatcggttaatgtgcccaataacagcccgacctggatcttctcgctgggcgcgaactcttcagccaccatcgccatgtggaaggtatacgtcacctccaccacgacgggcatttcaggggaagcgaacgtcaccgtccggggcaatgaagcgtttatcaccaacgtggtctatgccgccaatatgcagttcaaggtcgacggcctaaaactgctggtgcatcaaagcaccggcgccagcagaaatatctttatgaacgccattcgcgtcgcctga

SEQ ID NO: 453803 - DNA, 1236 bp, Serratia marcescens
atgaaagaacataactctgccgttacatcagcgactaacgcctctgcatttgacagaaaaatcgccagaggggtggccagataccagaaactcaacggtgactactcatttttcttcagcaaaataaacggctatgacgataataacgaagcctggatctacagcgaagaaaaacggaaactcaatttttgcacctactcctacctcggcctgttaaaacacccggtcattgaagccgccgcgcagcaggcgctcaagaaatatggcaccggcacccacggcgtgcgcctgctcggcggcaacctggatattcacgagcaactggaacagcgcatcgccgatttcttcggccgcgaagccgcattgaccttcagctccggctttatgaccaacctgacggtgatcgacagcctgctcggtaagggcgacgtgattttttgcgacgagctgaaccacgccagcattatcgacggctgccgcatcggcaacgcggaggtggtcaggttcccccataacgatatgcaggcgcttgaccggctgctggcggacgcgccgccgcaggtgcgcaagctggtgattgtcgacgccgtctacagcatggaaggcgatctggcgccgctggatacgctgatcgccctgcgcgaccgccacccgaacaccctgctgatggtggacgaagcgcacagtctcggcgtgctgggcgccaacggtaaaggcattgaagagcacttcaaccgccgcggccagatcgacattctgatgggcacgctgagcaaaacgctgcccggtcagggcggttttatcgccgccacgcaggcggtgatccactacctgcgcatgaccgcccgcggctttatcttcagcgccgcgctctcgccgatcaccaccgccgccatgctggcggcgttcgacgtgctggagcaggaaggcccgcagcgacggcagaaactgatggagaacatcacctacttcgtcgcggcgttgcgcagcgaggggtttgaagtccgggcggaacaggcggcgatcgtgccgattatgatctacaacgaaagcaaggcctttgccatggcgcaatactgccaccagcaggatatttatgtgatgccggtcggctacccggcggtgccgaagggccaggagcgtttacgcatgaacgtcacctaccaccacagcaaggaggatctcgatctggcgctgcaggtgctgtgcgcagcaagggaggcggtggcgtcgtaa

SEQ ID NO: 453804 - DNA, 588 bp, Serratia marcescens
ttgatcgccttacctccctcggctgagcgcctctggcgacatgagccggccggctatcgcgccggcggcgcgcttgagcggctacaggcggacctgcgcccgtatgactgcgagcggctgtccgccgggcgtttacgcctgacgctgccgcaggggccggtgctggaggtcagcgagcggccgcaggcgctgtttctggcgcatatcgtcagccaccgcttttgcctgggcggcgacacttcactgcccggcagcgtccggctgacggtgcgcggcgcaggctggctgcggcgccgcggcgtgcgctaccgcaccgtgggcgataaggccgccgcgcggcggatcacggagtggctggcgcgttatccgcagattggcgcaacgctggcgcagctggatttccgccatgcgcagctgacgctggcggcggggcgctggcagttcagcgtcgaacattttgccgcctgcgaggtggtcagccgcctgccgccggggcggcgctatctgcgcctgaccgcggcgcagcgctgtctgctgctcagcgcctgtctgatggtggcgcaactgatggagaaaatgaatgactag

SEQ ID NO: 453805 - DNA, 510 bp, Serratia marcescens
atgtttgattacgaggtttcaaaatattcacattttgatatggcctgccgccagttctctgtgcgtcataacttggttacgcttggcgatagcattggtatgaggccgcaggtattacgcaacaaactgaacccggagcagccgcaccagctcatttgtgtagagctattggttatcactgatgctaccgaagatgctaccctactcgatgcactgctggcacaaatcaactgcatgccgtctgtacctgtcaacgaagccagcaccgggaacatctcagcctacgcgctgcacgctactgccgcaatcggcaacgttgccgccgccgctgtgcagggcgaccacaaaacgccggtacgcaaaagcgcactgcttgaaagcgtcaacacggcgatccgtcatttgtcgctgatcggcttgacagttcagaaccgcatccaatccaccccggctctgccctccaccgttgacgtgatcagcgggctgagcgctgttgctggtttaagctga

SEQ ID NO: 453806 - DNA, 1737 bp, Serratia marcescens
atgtctcatagcgataaactttctaaattaaaaaacgctaaaacgctgcaggacttagccgatgttattaacgtccctcttcagtctcttacatatgcgttgcatggcatgcaccggcttggcataaataaatataactcattcccaatccccaaaaaaagtggcggggttcggataattaattcaccggtaaaagagttaaaggatgttcagaaaaagctctcccaaactctatatgattgttacaatgaaatgttaatagtcagcggctatcgaggacttgataaaaaagggataacaatttcgcatgggtttattaagaataagtcgatcataactaacgctgagtgccatcgaaatagacgatttattttaaacttggatttggaagatttttttgggagtatacattatggacgagtatatggtttttttaaaacaaataaacacttcggtcttcatgatctcattgcacatgcattggcaaacttggtttgctatacacatggtctgccgcagggggcaccaacatctcctttagcatcaaatttcatagctcatatattagatatacgtcttgctagtctttcaaaaaaacatggactttattatacaagatatgcggatgatttaacgttttcgacaaacaagaagatttttcctgccgatatagcatatctagaagctgggaaaacggttattggttttgagttaaataaaattataaacaagcatggtttttctgttaattcggcaaaaacaaggttgcagttcaatgactcgaggcaggacgtaacgggtttaatagtaaataaaaaagtaaacattcggaaagagtatgtaagagcagcaagaatattagccaataaattatttaacaacaaggtaatatatcgcattgaatcaaagaaaaccgaagatgatatatgcgacataaactacctgataggtgtaatggctttcatatataatgttaggcagagtcagttgattagagtttcaggtgacaaatccgcggagctaaaaaatttcacaaaaaaagatatcgactctagtttagatgcaaatgccagattgtatagggacttaattttcttcaagaagttcattgtaagtgatgagccattgataatttgtgaaggtaaaacggatgttatatatctacgcactgcgatgctttcactttcagcaaaacatagatcgttagttacaaagggtagggtaaatgttgcgtttttaaatcatacccaaacaatcaaagaactctttaaaatacgaggaggcactggtgatttaggaaatctaattagcaattactcgagttattgtggcaagtttgcaagatttaaaccaaagagtcccgttattattatcatggataatgacagtggggcgccgaaaataagatcattagttaaagcaattactgggaaagtatacgataagaacgacggatttagacatttaactaataatttgtatctaatacaaacgccacctttagcaggcggtgcagactctgccattgaggatttgtttgataagaaaactcttgatgtaagactatcgaataaaaagttctcatacaaaggtgagtttataaaaagcaagcattatggtaaaaatcattttgcagaatatgttgttaaaccaagaagaaaggatatagattttaatgggtttaacccacttcttgatgagataaaggcagttataaaacactataaaaaaagttaa

SEQ ID NO: 453807 - DNA, 153 bp, Serratia marcescens
atgcaaaacgtgacgcttattggtatcgatctcggtaaacattctttccacgtacactgccagggtaaacacggtaacgtcttgctgcgtaaaagttttctcgcaatcaacttatgcgttttctcgcatcttgtgaggctgcaaccgtggtga

SEQ ID NO: 453808 - DNA, 858 bp, Serratia marcescens
gtggtgatggagtcctgtggtggcgcacactttatggctcgccgcgtagctgattttggtcataaggcaaagctcatttcctcgcagtttgtccgtccgtttgcgaagagcaacaaaaacgattttgttgatgccgaggctatctgtgaggcggtttcccgcccctccatgcgttttgtgacgccccggacagaagaccaacaggccatggcggccctgcaccgggtcagggactcactcatacgggaacgtgttaaaaccaccaaccagatgcatgtctttttactggagtccggcgtcagcctgccacgtggagttgctgtgatacgacgactggcggcggtgctggaggaaaatcacattccgacctacctgacccggctactgaacaggttgcacagtcattacgtttatctcagcggagaaatagaggaacttgataaggggctgaaaaaccatctggcagaggatgcaaccgcgcagcggctgctgaccatcccgggagtggggccgatgacggccagtctgctagccacccgactgggtgacggtaaaaactatgccagcagtcgcgcctttgcggcgtcaacggggttggttccccggcagtacagcacgggtggaaaaagtacgctgatgggtatcagcaagcggggagacaggaatctgcgccggctgctggtgcaatgtgcacgagtctttatgcaacggctggaacataatccggggcgtctggcagagtgggttaaaaagcagcttgcgagccatcattcaaacgttgtggcctgcggactggcaaacaaactggcgcgaatagcctgggcagtgacggctcatcaggcggtgttcagcaaataa

SEQ ID NO: 453809 - DNA, 918 bp, Serratia marcescens
ttgaacattgtcattctttcgtgtgacggtgcgctgtattcctgtcgacgcctgcgcgccgcagcggagcggcgcggacaccgcattgaggtgatcgatccgctctcctgcgtgataaatatcaacccggccgcgcccgccattcactatcgcggccgtcagctggcgcgctatgacgcggtgatcccgcgtatcggctccgtcatcacctattacggcaccgccgtgctgcggcagtttgaactgctcggcagctatccgctgaatgaagccgcggcgattctccgggcgcgcgacaaactgcaatccctgcagctgctggcgcagcagggcatcgatctgccgatgaccggcgttgcccactcgccggatgataccgatgcgctgatcgagttggtcggcggcgcgccgctggtggtgaagctggtggagggccggcagggcatcggcgtgatgctggcggacacgcggcaggcggcggccagcgtgatcgatgcgttccgtgagctgaaggcgcatgttctggtgcaggagtatgtgcgcgaggcgcaggggcgcgacattcgctgcctggtggttggcggccaggtggtggcggcgatcgagcgtcaggccagggcgggggagtttcgctccaacctgcaccgcggcggcacggcgtctgcgacgcatatcagcgatgaagagcgcacgttggccatcaaggcgacggcggcgctggggctggatattgccggcgttgatattttgcgtgccgatcgcgggccgctggtgatggaggttaatgcctcgcccgggctggaaggcatcgagaccgccaccggcctggatatcgccgagatgatgattgactatgttgagcagcgtgcggcgcacgggattttccctaaaatgacgccgataaccagtaaaaaataa

SEQ ID NO: 453810 - DNA, 345 bp, Serratia marcescens
atgcggctgaatgtggtgtgttacggtgtgttggcgttaaccctggcggttagcgcatttttcccgcatccggggtggacggggctgttactgctgaatttgctgacgctggcgctgtatggcgccgataagctggcggcgatcaaggcctggcagcgggtgccggaaatcacgctgttggcgttcggggcgatcggcggctggccgggggcgctgtgcgctcagcggctgttccggcacaagacgcagaaacagccgtttaaaacctggtttatcgtcagcatcttgctcaacgtggcggcgtgcggcgcggcgtggtacatcgtctatggccgctttctatag

SEQ ID NO: 453811 - DNA, 2223 bp, Serratia marcescens
atgctgccgctgctgtttttaccgcagttgccgccgcctatgctgatcgggggattggcgttggcgatggtgatctgctggcgccgcacgacctcggcgtattgccagtatgccgcctggctgctgtgcgggttggtgttggcctgcggcagtgcgcagcagcttacgagccagatcgccgtattaagcggtaagccgctgcatctgacggtcagcgttgccagcgtggccttggctaaccatgagccgggcaaggtgctactgcgcgttgagcaggttaacggccgctggctgtttccagcgttatctttcagcgcctactggaagcatggcccatggtgcgccggacaacggtggcaactcaaagcgcgcctgcgcccggtacacagtcggctgaatcagggcggttttgacagtcagcgctgggcaatagcgcgccgtcagcccttaagcggatatgtccagtccgcaacgccgatcgatgcgggctgcagctggcgccagcgtattgtcagcgcggcgcagcggcgtacggaaggtttacctcaccagagcactctgctggcgctggcgtttggcgagcgtactctgctgagccagggggagcggaatctgtttctgaaaacgggcattgcgcatttaatggcgatttccggcctgcatatttctctggcggctatggtcgcgtggtgcctgttgcgcctgatgcagtttacgttaccggtgggcaggattggctaccgcgggcctctgattgccagcctgttggcggcgttaggatatgtctggctggcgggggcccagccgccggcggtgcgggcgctgctggcgttgacgctgtggacgctgatacgcttacggggaatctgttgcacctcctggcagatttggctgtggtgcgtatgcctgattttgctcagcgatccgttggcagtgctgtccgacagtttctggctgtcggtactggcggtggcggcgctgatcttctggtttgaatgggcggcactgccgtcccgcttcagcaccggctggtattgggcgccgctgcgttggctgcatatccagttggggatgacgctgttgctgatgccgatgcagtttggactgtttcacggcgtgacctggacctctctgccggccaatctctgggcagtgccgattgtgtcattgctcagcgtgccgctgattttgtttgccattatcagcggcgccgggagcatagtggccggcgggttttggcgctgggccgacctgtcattgacctgggcgatgtggccgctgccgtggctggaacagggatggctacgcgttggcagcgcgctgctgccgttcagcgtactgggctggctggcggtggttggctggcgcttgcgttgctgggcttcttcaccctgcagttgtattgtcgtgctgctctgctgcctgacgtggcgcgaacgtcagccggactatcgctggcgcgtcgatatgttggacgtggggcatggcttggcggtggtgatcgaacgtgacggcaaggcggtgatgtacgacaccggcgcccgctgggcaagcggcagcatggccgagcgggagatcctgccttatctgcactggcgcggtcttgaactggagaagattatcatcagccacagccatcaggaccatatgggcgggctgagtacggtgcaacgggcctttccgcaggcggtggtgtattctcctctgtatgccgccgggcattatgcctgcgtacgggggcggcagtggcaatggcgcgggctcaatttccgcgtgctgtggccaccgcagcgcctgaagctggtgggcaatgatgattcctgcactatccgcgtcgatgatggcaggttcagcctgttgttaaccggcgatttggaggcccgcggggagtcggcgctgctgaaactgcgcgctgagctaccctctaccttgctgcaggtgccgcatcacggcagcaagacctcatccacgccgccatttttacgggcggtggcgccggcagcggcgttagcctcggcatcccgctacaatcagtggcgtctgcctgcggaaaaaatcatcaagcgttaccgttcctatcgcattgcatggcacgacacttcacgctccgggcagttgagcgcgttatttttcgacaatgattggcaaattaaaggctttcgtgagcaattaatgccccgttggtatcatcagcggtttggcgaaaggggggataatgagtaa

SEQ ID NO: 453812 - DNA, 1701 bp, Serratia marcescens
atgaaagttaaataccttatttatttttttacctttttattaaccgcctcgttcactattgcaatttgcgatgagtgggcggaagccaaaaagcaatataacgacagcgcctggaacctgaataaaaccctgcactcggaagaggtatcttcggtgttgcaaaataccctgcggctgcatacggtaaagcgcctgagcctggtcaatccggagctgaagcctgcactctggcaggaaagcgaacgggaaacgcgtaacaacatccggcagatacgccgctacgtcaactcgggcgccctgcaacacttaaccacccagcaaaaaatcgacatccgctccatgcttaacctgctggagaaaatgctggataacgatacccagcaactggcgccgatgaataatgccatccgtaatttattcaatatcaacagcgcgtattacatcacccagtccagcatggattattacagttacacctacgaaagccgtattctgaatgccgacgcctttttattcctcgagtcaatccgcctgaataatcagcttaatatcaccctcaccgagattatcgatcagctggtggatatcacgctcaacggacagaatgacaaagagtcctatctcaaaaccatccagttgaccggcgtgctgaacgtgctgagttcacgcctgctgtttatggaaatggtttatagcgacccgcaaatcagccgtattatcaaccaactgctggaaaagctttccccgcagcaaaccgacggcctggccggcgagctgtacgattcgatggtccatggcaaagcgttcgacgccgcacgcatttacgcctatgtcaaagagatggaccggctgtcgcagcagcttttccagcgcagctttgagctggagatcgccaaatgccgcaagcaaatgtaccagagccaaacggcgattaacggcctgtttgcctttgcctggctgctcgccatgtttctgctgatgccgaccctgattttctgttccaacatcagccgttggctgaccaaaacgcaaagcaatattcagcgcctttcgcacggcgatatggcgatcgatgcgccggaggtgttttacagccaggagctgattgccatcaccgacgccatcaatcagctcaaacagtatcatttggaaaaggtgcggctggagcaggagaagcatgcgctgattaccgagctggaggcgtcctcctatctcgacccgctcaccaacatttacaaccgtcgccgcttcttccgtgacgccgaacagctgccggacgccagctacccgctggccttctgcctgatcgatatcgataacttcaaggcgcttaacgacacctacggccacaatatcggcgacctggccctggtggcctttgccgatctgctgcgccacgccttccgcgccgaggacatcttctgccgttacggcggcgaggagttcgccatcctgctgcaccactgcgcgctgccggacgccagaatggcgctggagaaactgcgtcacaaggtccagcggctgcggctgccggttcccgacgggcagccggtgcgttataccatcagctgcggcatcgccgcggtggcgtccccgcgtcagctgcaaaccgcgataaaactggccgatgaggcgctctacttctgcaagaaaaacggcaaggatcgggtggcgatcaacgacggttcaagctgccgctaa

SEQ ID NO: 453813 - DNA, 489 bp, Serratia marcescens
atggcgagtaaatcgattcgttttagcgcggaagttctcgatagtccgttgaccgtgcccgaactgggcggcggcctgctgccgctggcgacaccgccggtctctgaaccgagcgtgcgcgccgctgcagaaccggccgacgtagagatcatgatggcgacggtctctgtctcggtatttcgcgtggccggcagcagcgcggccgccatgcaggggcgggtagtgttcaatcaggcgtgcaaggcgatggtgggctattttagcggcgcgagcgcgccgggtgacgaagcgctgtttgccacgtcgcatccggatatcggcattcgtctctcttgcatcggcaagcctattctcccggagcagggacagagtttcccgctggttggcgatatgctggtgtttgaagcgatgctggtggcgttacatgaccaggtgaagccgggagcggttgaggcgcggattgcgttcaactacggcagcgactggtag

SEQ ID NO: 453814 - DNA, 279 bp, Serratia marcescens
atgacgcagatgtgtaaagtggcctatgtctacggcctggtgcagggcgtggggtttcgttacaacacgcagattaaggcgacggcgttgggcctgaacggctatgcgcgcaacctggatgacggcagcgtggaagtgttggcgtgcggggaagcgcagcaggttgaggcgctgatcgactggctgcagcagggcggcccacgcagcgcgcgcgttgaccgcgtgctggtggagccaaggggcgcgcaggccctacagggatttacgattcgctattga

SEQ ID NO: 453815 - DNA, 1350 bp, Serratia marcescens
atgaaaatctatcgtccgttgtggactgacggggccgtactggccccacagcagttccagcagcagtctgaatgggaagcattttccagggcgggagtatcttccctcaactcacctttcccgtggggagttgagcgtgttgaactggataatcaacatctggcgtcggggcgcattcaggcacagtttctgcgtctgtggctgcccgacggtacgctggttgacacgcagaacagcgatttgccgcctgagccgcgtgaaatcccgtcccccgtcaggggaagcactgagcggctgacggtctttctggctctgccggtgatgcagccgggcatcgttaacgttcagaccgataccgtgcgggccgagcgcccgctgcgttatcgtgaagagtgggcggtggttccggatgcgtttggcaaggaagaagaatcgatggcggtggctaggtttaatcttgctttccgttttgacactgagagcaacgatgcctggcagacctgtgcggtagcccgtttgctaccggacggaaacgcaggctggcgtcaggatccggactttatcccgcccatggcgctattttcggcaagcggcctgttgcacgaacgtctggtgctgctaaatcgtcagttgcgttctcgtcgtcagcgcctgatggcgatgcgtcgcgaaagtaatgaccgcatggcggacttcgcggttgccgacgtctcgttgttctggttgctgaacgcgctgaatactcatgctcgtgtgctaaccgagtttgaacgtttcccggcccgtcatcctgagcaggtatgggcggagctggcacggctggcaggcagtatgctgacgttttcactggatcgcgatctggacgctattccgggctatgaccatcaggccccggaaaacaccttcccgccgctatttgagcttattagtgagctgcttgaagccagcctgccgtcccgcgttattgccgtggagatgactcgccaggacgagcagacctggaaagcggtattgcacgatattcgtctgcgtgaagaagccgatttctacctgtctgtccgttcaaatctgccggcctggcaagtggctgagaagtttgccgatatggccctggccggaactccggatgatgtaggtcagatttccggcgtagcaatggaaggcattggactaatccctctcagccgtgtccctgcggcattgccggtgcgtctggaaaatcagtacttcgtgctggatatggagagccgtgcagcgcatgacatgctggagcagggggtatgcctgttctacgtgccgtcattgttgggcgagcttgaacttgaactgtttgcggtactgcgctcatga

SEQ ID NO: 453816 - DNA, 720 bp, Serratia marcescens
atgagaaaggatatcgatattgacagcctgatggcggatacctggcttaccgtggcgcagctgcgtcacggcgccaaggcgccgaacgggcaggcgctgtataaaaattgctgtgcacaggtggaaagcgtgcgtgaagcgctggaacgagccggttatgacagtgagagcatcacacatatttcttatgcgcagtgtgctctgctggatgaagcggtgatgaaccgtaagcccgtgtctgcagatgaatacgtgaattcgccggactctgaatctgaggctctacagaaaaccgacatggacgaaggcatcaaagcctggcgtgccgcaccgctgcaggcccgttactttggctcgctgcgtgcaggtggtgcattgtatgaccgcatcgcggaagtgctgcgtcagccgtctccggttcctgcggtgctgacctgctaccagcgtgttcttgcattgggatttcaggggcagtttagtctctccggcgtcggacaatcgcagcgagacgaagtaattgccgccctgaacgagcgtgtcccacgactggagacggggagcgatctggttgtacagaaaacaggtaagcggcgctacaacattctgcgttcagtgtggttctggatcgttatggccgtggtgttcacggcgctggtttggacaggtggccacctgtggttgcaacaccttctgcaccagcaattaccggagctgcgctga

SEQ ID NO: 453817 - DNA, 1704 bp, Serratia marcescens
atgcgaaagtctgcgctgatatgggctgcattaccggtgctgatttgtctggcggctgcgctctgggttatgaggggatttctgaatgtctccgtgctggttaaaagcgtgctgacgttggctggcttcatggtggcgctgctgctgatgcatcgccgctatcgccgtcagcagcctgttggccagcatgttgatgaggatggttacccgccagctggttttaccggcccagttttactggtatgcggcgatatcaacgatcgcctgtttgcggatggtggatgtcgcaccacggcgcagggctgttatctgaaagtggggtcaacggataggttaagcaaatttgctgaccgcttactggtgcgtgaacctcgcatggccggacaactggtcgtcatgttccgctgtctgccggacttgcacgaagatgaagggctgttgcgtgcttctctgaaggtgctgcgccaacaggtgaagcagatgaagaatctttccggctatttgcctcctgtcgtgctgactggagagttttccgggccggaaacgccgtggattatgattcggggcaaaacgccgttggtctgcccgacggatgagcctgcgctgacgctggaggagtggcgtgccctgcctgaaaacgtaacgcgtttaccatatctgtcccatgcaatgaacctgctgcagcaggtggtgatggaggaactgaagaaagcagaccgtctgtatccggccgtctcgccgtttgcggtggttgttcgtagcggcgcagttcgaactcagacggaagccgtctggccgcagtggctgttccgccattcgacattgttacctccgacagcgaccgcaacgtatccggcgcagtggcattttgccgacccggtactgccggtgcttgctccttatgccatgccgcttcagggcggaaaaaccgggcgttgggtggtgatctccctattgctttgcatcatcagcgcgctgggcttgtccgtactgcacaaccagtctcttatcgggcggattgcctccgatctgcagcgttggtacgccattccgatgacgctctacgcgccgaaagcgcagtccctgcatgccctgcaacaggatgccttgctgttggaacgctggcagcgccagggcgagccgcagcgttacggcctggggctttatccgggcgagcggttgtggctgagcgtacagcaggcgattgatacttatattccaccgccgccgccgccgccaccgccgccagaagtcaaaccggaggcgccggcgccgaaaattgtccgcctcgacagcatgtcgctgtttgactccggcaaggcggagctgaaagccggctcgaccaaaatgctggtcaattcgctggtgggcatcaaggccaaaccgggctggctgattgtggtcagcggccataccgacaacaccggcaaggcgcagctgaaccagcggctgtcgctgcagcgcgccgaggcggtgcgcaactggatgcgcgataccggcgacgtgccggaaagctgttttgcggtgcagggctacggcgcaagccgccctgtcgccgacaacgatacgtcggaaggccgtgcgcttaaccgacgcgtcgaaatcagtctggtaccgcaggcggacgcctgccggctgccggacgcaaccccgccgtcatcattggaaggtgacggcgttgataacaacgagtggagaaaatga

SEQ ID NO: 453818 - DNA, 2361 bp, Serratia marcescens
atgagtgattctgtgattgccttggcaaaggaaaaaatcaaccaacttctgggaatgtcccgctataagctggacgttcacgagtgcccgcactttctggatgtcttcagtttcaggtcggaagaaaagctcagtgcaccgtggcactacaccgtcaaagtaacctgttcagaaagtgatatttccagtgacgatatgctgctcaaaccggcatcgttcacgttccaggttccgctgtataacggtggtatgcccgccacacctgtgcgtaccgtttatggcgtggttcagacatttcagcgcctctctacttctgccgatgaaacccggtactcgctgaagattgtgccgcgtatcgcgctgatgcaacacacaaagcgcagtgagatttacctcaatcagtccgttgtggaagtggtggagcaggtcctgcgctcccacgggctggcaggcgatgattttgaattccgtctgtcgcagagttatccggtacgtgaactgctcacccagtggcgtgagactgacctcgaatttgtgcagcgcctgcttgccgaagtgggtatcttctggcgctttgaaatggatggacgtctcgaaaaggatgtggtgattttccaggacagcccggagcactatcagtttggcgtggttctgccgctgatcccgccgtcacgtaccagcgataacgggcagctcagcgtctgggatataaaaaacggtcatcaggtggtgtcagaacgtgtcgccaaccgcgattacaactaccgcgaggcgctgaagccgcaggacagctccgcgtctgtcagcaccacggatggcatcacgacgggcgaggtgtatcactacgcagaacctttcctgagcggaggcgatgccgcaactccggagagcggggcgtactatgcccgcctgcgccatgaacgcattctgaatgcgcagcaggcggtcacggggaaaacaaccagccccgtgctgtcaccgggggaggtgcttgaaccgcagggctcgcttcctgccagcctgaaaaacggcatcgttatcaccggtgtgcagagcagtggttcgcgtaagcaaagctttaagatgacctttaccgggatcccttacagtgaagccgtgtgctatcgtccgccgttacatcatcgcccggtgattgccggtaccttacctgcacgcgtggaaagcactgagaaaggtgatacctatgcctggctggacaatcagggccgctaccgcacgaggctggacttcgaccgcagcgacagcgagcagggctacgcctatttgtggctgcgtctagcgaagccgtatgctggagacaattacggctttcatgcgccgctgctcgacggtactgaagtctcggtgatgtttgatgcgggggatcctgaccgtccgtatatcgcccatgcccagcacgattcagaacacccggaccacgtcactgacgataaccatacgcgcaacgtcctgcgaaccccggcgaacaataaactccgtatggaggataagcgccaggaagagcacatcaagctcgcgacggagtttggcaagacccagctcaatctcggccatctggttgatgcgcaacgtgaaaagcgcggtacgggttttgaactgcgcagcgatgagtttggcgccgtgcgcgctgcccgcggtgtttacctgacagccgatgcgcaggctaaaggccagggagaggtactggagatgaacccggctgtcagccggataacccaggccaacagcgagatgcaggcactgaacggggctgccgaacaggcgaaagccctgaccagtgatattcaggcgcagaataacctcctgcggaaccgcctgaaagatttgcagtccgccgtagtgctggcttctgcccctcagggcattgcccttacgtccggggagcacctgcagctgaccagcgcaaaaaacaccatgataaccgcagggcagcatgtcgatatcggggcaatgaagaatgtcacggtcagcgcggagcagtctctggggctgtttgcccataaagccggggcgaaagtcatcgccaaccagggcagcgtagaagttcgcgcccagcacagccggcttgagatgagtgccgaccagcagttcaccgtcaccagcagcaaagatgaaatcaccatcagcaccccgaaaaccctgacgctgaacggcggcggttcgtatctgaagctgagtgaaagcgggattgaacacgggacgaacggggattttattaccaaagcggcgcgctatcaggtgccgatggcgggagccaatatgcagtgcgagccgcccgttttcgataaaaccacgcttgaacttgtgccgcctgaatcaaatggtgtgatgtcacgctaa

SEQ ID NO: 453819 - DNA, 450 bp, Serratia marcescens
atgaatattatctcttgtttaacagtgattttttttatcgtgtcggtaggtagcgctaatgcgactaggacaacctgcacttctcctgaaaaaacgacttcagatttctatcaatggtatttgcatgagcttaaccaggataaatatcctctgacttcaactgcagctacggacaagcagaagctgaataaatgggtgtctcctgaactgctgcaggaaatcggcaagtcattatcggaaaatgatctggatgcagaatatttcactgatgcccaggaaatttttgatgattgggtaaataacatttcagtccagaagggaaatgtggctgagcaccgtgcaagtgttgaattaacactgggtgtgacgaaaattaagagaggctatgacatcacactggatgatagtcacggatgctggaagatcgatcatgttgtctttaagaaataa

SEQ ID NO: 453820 - DNA, 2832 bp, Serratia marcescens
atgtgggatgtacaaaaagcagtccagcatctgaatgagcatgcagaggcatcgtccaaaggctattgtgcccgttatgttaaagctgcaatcaacgccggcggtggtataagcaactggccttcaatcgtatcggcgaaaaattatggccccgctcttattgaaagagggttcaatataatagctgttacaggcagttttttggccggcgacgtagtgattattcaggggataaagaaagcagactttcctacgggggaaataaaaaaagaccaccctcatggacatatggctatgttcaatgggcggcaatgggtctcagatttcaagcaaaataacggttattatccaggtggtgattatcgcaaagcaaagccaacctttgttttttatcgtcacaaggatgttggtactcaaccttcggaaaaaagtacagctgcagataataaaccaatgaaaacctgtttccctgcccgtaagaaaaacggggagaactacgccacgctggatgaaatgatggctctgatcggccgggaaccccatggctcctggctggcgggcaccaataacatgtggcatggcgggatccatatctcggagatatcagccccgggttctgttcttaaaccaaacatgacggagacagcggttccgctgcagtgcatggcggacggtgaggtggtggcctggcgtctgaacaaggattaccagaggtgcacctatctcgatcagcccgtgcaatatacgacgacgtttgtgctggtgaagtcaacctgcctgccggataagggcaaggaacaaacgcagctggatttttattcgctctatatggggctggcaccgctgtctgcgtttgagaaacgcaaatgcatggttgcccaaaaaaaggtgattaaaagggaagttggcaagtacgaaagcagccgacaatcaggggatgcccctcatgcgcctaaggctatagggcggctcccaaagggagcgcggatccttatcctggaagagacagagttcctgaataagcctgtttcgccgaaggcgcgtccgggcacgaccgagctacagccatttgggttggcacaggcgtttgacaaaaacggcaagctgacagaggaaaaattctgggtcactctgctgccgggatatatgacggaggagggtgagcagtatgcgcacctgccgttctggatgcagaaagcggttgaacagggtatctttgacgccgtgacgaaacccgcgacagcgctgaaaatcaacgcgggtgatgccatcggttttctgggggaagatatagccccgatgggccaggcaaaaaccagccgcagcacgtatgcccatatcgaggtgctcagtgccgacagccgcatgccggcgtttcttgataatccggggaaggtgacggcaggacgcaaatatattcgcgtccatccgactgcgaaactttacacgctctccggcggcacgtttagcaatacgggcaatccggtcgaaaaggataggcatatcatcctgccggtggataaatgcaacccgaagaagagcggcggcaagagctggtatcaggtcgggcagagctactggctgagccaggatgacgtggatctgatcgatcagtacaacctgaaggaactggggttcacggcgctggcggaagaaaccacgcctgatatgtcggcctcgctgcaagagggctggatgaagtccgggctcgggcggcttgccgagcaggtgaggcccgaacgcggtatccgggagcagcagatgtcgtccttttataaagggatgctcgagaagatggataccgacaaggacgggcaactgtcggagagagagctgtttgccgcgctgcagcatccagaaatgggggttcgcgacatcgttgcccggatgatagtgaagcatcaaagcgagtggtttggcggcagcagccatcaaaaatggacggcgtttttccagaactacgacattctgcgcatcggctttgtgaagaagtggctggatgatatggagtggatgagccaggtggagccgtttagttcgggccaggcggtatggcatatgcatccagtgatgtttttggatgcattatcttcaacatattctgggctaattactcttgaaatggtttttgctgcaaatttaaatagaaacaaatctcagtgtgaaaagatacttccataccttaataaatatgctcaagcttataatgtgaaaagcaaaaaagaaatagcgcattttctttcacaagttggtcatgagagccaatttaatatagtcagtgagaacttgaattactcacctaaacggatgcgaaagatatacggttgcaagggaggtgaggggaaatatgatgaacggaatgactcttgtataatcggtgttttgcgaggtaagctgtggagtgaagagggaaagtatgcatatcatcctgaaaatttagcgaattatgtatatgggaatagaatggataatggtgatgaagaatcaggggatggttacaagtaccgtggcagaggtatgatccaattaaccggcaagagtagctatagggatttcaccgctatacacaaccgttttaatacgggggatattcgtgattttgttaacactccagatttgttgatagaagaaacaagatatggcgttgaatctgcttttgccttttgggtgacaaaaactgatcggctaggacaacgtttgaatattatggcgaaaacagataatgtgaaaactgttactaaaatcgttaatggtggactgaatggatataaagatcgcgttaacaggtttaatgcggtggcaaaagtaatggggattgataatgatagttaa

SEQ ID NO: 453821 - DNA, 264 bp, Serratia marcescens
atgcaaggaatcatccgcatcggcgataaaaccactcacggcggcgcagtcctgtcaggttcctccaccatgattttcggtggcattggcgtagctcgcaagggcgacaaagtttcctgtccgcagcaaggacatggccccactgtcatcaccgaaggtaacccggactatctcgataacgggatcccggtggcgtttcatgggcacaaatgcgcctgtggctgcacgcttataagctctctgcctaacgctatggtgggttaa

SEQ ID NO: 453822 - DNA, 1161 bp, Serratia marcescens
atgcccgtcattctggaaaggatcccggaaaagagagccaaaccgccgcgtccggtgaccaggcgctggctgattttcggggtagtggttctggctgtcgggatggggctgacgtttctgttctgggagggcgagcgttccggctccgggttctggctttttgccgttgtgctgccgctgctgctttggggagccatattctcggctcgccgcgcgggctacaaataccaaagcgtagggcaggatgcggcgaaccgaaggatcgaagcccgtcacgaccatgataaaaatcgcgggcagcgctttgcctggtttgtcggtgaatatctggtgaatgccctcgagcgccagcatgtggcaacgcaaagcgcagcactcgctaaaacgccggtactgcaacccgtgatgcctcgtggagcgggaaagcccgtcaggcactcccgattagctgaagaaggaagcgcgcctgacgtgctgaacggataccagtacgaagtggtggagcatatcaacgtgttgctggatacgttacctgaaactatgacctgctacctggcactggatttggccgaagacttgccggacatctccctcagctggttatcggggattacccggccggtgatccacatccgtgatctctcagggctgcagatcattgattactggcttgattaccactatgcaaaaccgtccgcgctgctggtgatcagcgcacagctgaacgatgttcctgcggatgactccggggaagctctggcagtggtgctgatgactaactgtcgccttaatgacacgccgctgctatcagcccgtattcatcgtccgcaaattaatcacaccggtgatatgcgccatgcgctgcgccacgcgatgttgtgggccggtcttgggaaagacgcacaactgcgtggctggataaccggtggccaacttgcttccagcgatacgctgagcacggcctgcgaccactatgcgccagagttgacggcgcaacgttacgtcaatatcgacagtgtggcaggtttcgccggcgtgacggcagcctggcaggctttaattctcgcggcccgtcagtgtatcaccgaccaagaagcacaactggttgtgaccgaatcatcaccagattaccgacagctctgcgctgtcactccagaataa

SEQ ID NO: 453823 - DNA, 3381 bp, Serratia marcescens
atgaaaagaccatccgcactcgcatccattattttcctggcgctctgtattaccggcatagtcggctgttttctctggatttacccggaagagactgccgctacggtgcgcgtgggtcctttcagccattcaggtgtgatcattttctgcctggcgctgaccatcgtcattctggtcgtcgggtggtttgcacaaatgctggcggtggccgccggggagaaaggcggcgataagaatgaggacgaaagtcgcggtgtcggggatccttcccagccggaattagctccccacaccgatgaggatacaacgcgctttacttccggcccgctcatcgaccacctccgcctgcgctatggccgtcgctggaaagccaaagttcgcttactgctggtgcaggggagcgatgaccatatcgagaaagtggtgccggggcttaagcatgaccactggcaggaaaacgacggtattatccttattcatgccggactggcaaaagccgtacctgacccggaatttgttggtgtgttgaatgaggttcgtcctcagcgcccggtggacggtattgtacaggtgatggactgtgcgcagctcccggatgccgctgcgctggacacgctggttcgcagccgccagaaagccgattcgttgtttggttggcaggcgccggtctggctgtggtttatccgtgaggaagcctggagccaggaaagcgaaggcgttccggcgacaggtacattgtttggaccgggggcagcgccggacgctgccgttgagtctctggccacgctttcttctcgtctaagccgtgcgggcatgccggtactgctgagtaatagccgtcacgactggctgctacggttatccgagcagctgcgtggccgtctcaaacaacagctaacgccattgctgaccggcctgatgaccggcccggcgccttaccgcctgcgtggggtgatgttcagccctgcacaggctgcgattgccacgctgccgcatgcacgtctgagttcgcctgcatggcaggcgctggaagaagactgtcttcaggtccacgcccgtaaaatcggtttccactggcagcgagctctgcgcctgctgttactggcatgcgtgctgctgtggggggcgggaacgctgctttcgttggtggttaaccgcgcacaaatttatcaggcgcaggcaacggcgcgcgtagccgctgatacaaaacagccgctggctgaacgcctgcgtaatcagcttgttctgcaacagaccattgctcgtctgcaggacagagaagcccatggtgcgccgtggttcacaaagtttggtctgaatcaggatcgcgacaccctgaacgtcctctggccgctgtatgcccgtaacaaccaggcattgatgcgcgacgcgctgagggatgaactgcataaccagcttaccgcttatgtccaattgccgccgggaagtgatgcccgtagtgctgcgacacagcgagcctatggcctgctcaaaggctatctgatgctggcgcgcccggataaagcagatgcctcctggcttgctgccaacatgctgaaagcctggccgacacgtgccggcgtgccagccagcgtctggcagacccaggctcccaaactgctcgggttctatgctcagaacctgcctgcacatccggagtggaaaattaagccggatgcagagctggtcggcaccgtgcgtcagattttgcttaagcagatcggacagcgtaatgcggagtctggtttataccaggagatgctgcagcggatcgcccgcaactggccggacttaacgctgacagacatgaccggtgataccgacgcgtcaaccctgttctcaacttccgaagtggtgccgggcatgttcacccgtcaggcgtgggaggagcaggtcgagaacgccattgatgaggtggcgaaaacccgccgtgcggaaatcgactgggtgctgacggataagacccatcaggctggcagcgatatctcgccggaagcgctgaagcagcgtctgaccgagcgttactttagtgacttcggtaatgcctggctgaatatggccaacagtattcagtggcgtgaggcgggttccttgtctgaagcgatcgcccagctcaacctgctggcggacgtgcgccagtcgccgctggtggcgctgatgaacacgctggcctggcagggacagaccggggccaaaggcgcagcgctggcggattcaatcgtcgattcagcgaagaagctggtgggccgtaaaaagaatgcgcagcagtttatcgagcaagcgcgggggccaaaagggccgctggatagcgtgttcgggccactcaatggcctgatggccgggaaagatggcaccggctcaaatggtaatctcagcttccagtcctggctggcgcgcgtgacgcaggttcgccttaaactccagcaggtgaccagcgcgccggatccgcaggcgatggcgcagatgctggcgcaaacggtgttccagggcaaagccatcgatctgacggatacccgcgattacggcagcctggcggcggcaagtcttgggcaggagtggaacggttttggtcaggcgctgtttgtacagccgcttgatctggcatggcgtcaggtgttggccccggcggcaggcagcctgaacacccgctggcagagtacaattgtcgcccagtggaacacggcgtttgccgggcgttatccgtttaaggccacgggaagcgacgcctcactgccattgctggcgcagttcctgcgtggtgattccggccgtatcgcggcattcctcaaaaccaaccttggcgggatcctgcatcaggaaggtagtcgctgggtggtcaatccctctgtaagtcagggcatgacggttaatccggcgttccttacggctgtcaaccaactggcggatatcgctgacattatctttgcacagggtgatgcgggcgttcattttgaactgatggcgcgtccttcacgggatgttgcgcgcatgcagctgacactggacggccagagtctggactacttcaaccagatggaaagctggcagagttttacctggcccggaaacacctactatcccggcgtggatcttagctggagaagtgtgaatacggaaatgcgcctgtatgaacaccatcaggggaattggggctttattcgtctgctcgataaggcgctgattactccgctcgacagcagccgcactcagctggtgtggatcaccccggatggtaatccgctgaaatttattatgcgcagcgagctgggcgatggtccgctggcgctgctgaaactgcagggcttccgcttaccggattctatcttctcggtgagcgcagacgccgtgaataatacctttgcatccaccgaggggaaataa

SEQ ID NO: 453824 - DNA, 1770 bp, Serratia marcescens
atggatgatttaaccctgcgctattacgaagcagagatgcgctacctgcgcgaagccggcaaagaattttcccgcgcccatcccgatcgcgcagccatgctcaatctggataaaaccggcgcccgtgacccgtacgtcgagcgtctgttcgaaggttttgccttcctgatggggcgtctgcgtgaaaagcttgatgatgacctgcctgagctgactgaagggctggtgagcctgctctggccacactatatgcgcaccattccgtcactctccatcgtggcgtttgacccggaatggcaactgatgaagcaggcggagatcctgccagaaggtttttcggtgctgtcacgtccggtggggccggacaagaccgtatgccagtaccgcacgacccgtgaccttaccctgcagccagttcatctggccgatgcccggttgcagactgagcctgacgggcgtgccgccattcgcttgcgctttgaatgcagcagcaaggtggattgggcgaaaagcggcattgataaaattgccctttatctggatgctgaaagcccggtggcatcagccctgcatctggcgctgactcgtcgggtgcaggcgatgtatgtccgtcatgcagcgacgcatactgagcgtatccgctttgacggctggtgtaagccgatgggctttgaagataacgagcgtctgtggccgaaaggcgattctgcattcagcggctatcagctgctgctggagtatttcagcttccgccagaagtttatgtttgttgagcttcacgggctggagttgatcggtcttaaccaggataccacctggtttgaaaccgacatcgtgctcgatggcggctggccgtccgatatgccgtttgaaacagaaaactttcggctgcattgttcgccggtgattaaccttttcacgatggaggctgatccgctgaccatcgacccgctggaaaacgagtacctgctgcgcccgctgcgtgtgcaggatggtcatacagaaatatacagcgtcgataacattcacggcgcagtgaaaaatggcaaacacccttacgtgccgttcaccagtttccgccatcgcggcggcatgatgcgccacgatgctccagagcgttatttccacacccgcgtaaagcgtggtccgtccggtctgtatgacacctggcttatcctcggggggcggtcgtttgagattgagcagctctctgaaaagcctgaatcactttccatgcgcatcaccggcaccaacgggcaactgccccgcaaggcgctggaaagcacgctgctcgatcgggtagtgaaggccggtaaggcggcggtaaaggttattaatctcaccgcaccgaccctgccgctttatccgccagcgaacgatcgcttccactggcgggtcatgagtcatctgggttcgagcttcctgagcatgatggataacccggatgtgctgcgcggcacgctggcgctgtatgactggaccgatgatgagatgaaccgccgccgtctggaagccattgtagcggtgaaacacgcgctggttcgtcgctttgagcgtggctacatgctgcgcggtgtggacattgaaattacgctcaatgcggataattttgcgggtgagggcgacgtcaatctgtttggtgagatgctgcaccgtttctttgcgctgtatgccgatgttcacctctttaatcagctcacgttggtactgcaaccgacagggaaacgactgcgatggaaagagaatcacagcctgcacgtgccaggctga

SEQ ID NO: 453825 - DNA, 1080 bp, Serratia marcescens
atggaaagagaatcacagcctgcacgtgccaggctgaccgaactacttggcagggatatctggcgggttaacttttaccgcttctgccagttgcttgaacaggagaatgccggcgcaccattattgggtaccggtgagaaacccgctgacgatccggtgcgctttcgcccgtggccggggatggggttccctgccagtgagctgcgcgctgttgaaacggacgaagaccaccctgagctgccgccctcggttcgcacaacgttcctcggaatgtacggtgtggattcgccgctaccgaccgcttatctggacgatatcgcccagcggcgggaaggttctgaagcgacagcggcctttctcgatatcttcagccatcgaatcaccacgcagtactaccgcatctggcgtaaatacgcttacccggcgacgtttgaagcgggagggacggatgaaacgtcacaatgtctgctgggactggtggggctggggatccccggtacggctgaaaatatcgcaaccccggtttcccgttttttggcgctgctcggtacgatgcgcctgccgacccgcaatgccgaaggtattcgccggctggttagcctgttggccccggacactaccgcgaccatcatcagcccggatccggtaaaagtgcaggtggcgcagcgcagtgggctggggaaagaaaaccgggtggccctgtcacagcgcgccacgctcggtaaaaccggcaaagaagcctgtagtcgtattctgttgatgctggcaagcaacaatccgagcgagactgaaggctggctccccggtggccagttgcacaccgatctgatggtgctgctgcgggtgtatctgggttatcgctcggatgtgcgtctgcgtctgacagttcccgtaagcgtactgccggagccgcgtcttgggcaaaaacgccgcatccagcttgggcgtaccggcattctgggactgagaaatgaccggcccgccaagtacagccatttgaccgtcagcctggggtgctacgaagggctggagtgcgagccgctgcatccggcacaggacggcggttatcgcttcgactaa

SEQ ID NO: 453826 - DNA, 525 bp, Serratia marcescens
atgacatctgtttccctgcgacagattgctctgctcgtgctctgcggtttgctggccggttgcggcctgagccagaccgtctccgacggtgcggtcagcatgaccaaatccatcttctacaaaaaaattaaggtgctgcacctcgattttgaaccgcgctcggcagccaatgcggatgaagcgcagacgccgctggcgaccatggtgcgtatctatcagctcaaggatcgtcagaaggtggatgccgccgactaccaggcgctgctgcggaatgccgacagcgtgctcaaagaagatagggtggcgagcaagtctttgctggtaatgcccaaaggcagcatgatgctcaatatgccgctggatgaagaagcgcaatatgtagcggttatcgggctgttcaatcgcccggatatgaaagacaacgcctggcggctggtgctgagtcgcgatgagctggatccggataagccgcgcaccatcgaactgggcaatggcttcctgaccctggtcccggttaaggagtga

SEQ ID NO: 453827 - DNA, 2337 bp, Serratia marcescens
atggcaatggataactggctggcgctgttcgacggacaggctcgttaccagcttgagatcaacgacagccgggtaaaaccggacgtactgaatttttacgggcgtgaagcgctgagcgcgccgtctgcctggcgcatcgagttcaccacgccgcaggacgatgtggcggcagaagatgtcctgttgaaatacgcgacgctgcgcatgcgcagcgggcgggaagttcacggcgtgattacggcgtttgcatggctggggtcgaccgcggatcagacgcactacagcgtgacgctctcatcccgcctggcgctgctctcttatacccggcgctgtgcggtgtaccagaacctttccgtgccggagctggtggaggaggtgctgcgcaggcatggtctggaaggttcagactttgcgttccgcctggaacgtacctacccacagcgtgagctcattacccagtggcgggaaagcgacctgcagtttatccagcgcattctttccgaggtggggatctggttctgcagcggggtgaacgatgtcaccgggctggatacggtgacctttgccgacagtcagcagttctatcagtttggtcaacatctgccctaccaggagccgtctgcgctgtatgacggtgccactgagtccgtatgggggctgcgcacctggcacaacacggtgaccgggctggtccgcacgcgcgattacaactatcgcacggcgaccacgccgatgaattccaccgttatcgtcagaaacagcgccaccaccacgggagaacactaccgctatgccgcgcctttcctggacgccggtgatgacggcacgtcagagccggaaaccgaaagcggggcgttttatgcgcgccttcaccatgagcgcgagctgaacagctcagccagactgcacctgttcagcaacgccgcacagctgacgccgggtggggtgctggaagcggacggcagcaggctgaatgacctgaaagacggtatgctcatcacgtttgtcacgtatcgcgccgcccgcgacacgcggctgcatgtgtcggtgtggggcatgccgtacagtgaacggttctgcttccgtccagcggaaaaaccgcgtccgaagatgaacggcacgctgccggcgcgtattgagagtcgtgagaaaaatgatacctacgcgcacctcgacaatcatggccgttaccgggtgaagctggacttcagccgtgaagaggctgaagcggggtacaactacctgtggatacgccaggcaaagccgtatgccggtgatacctacggctggcatatgccgctgattgacggcacggaggtgggtatcgcgtatgacgacggcgatatcgaccgtccgtatattgcccacgcctttcatgattcgaaacatcaggacatcgtcacccgcgacaaccgcagtcagaacgtgctgcgtacggcggcggataacgaactgcggatggaagaccagcgcggtcaggagcatatcgcgctgacgacgccattcggcggcacgcagctcagccagggacatctcgttgacaagcagaataaacggcggggcgccggttttgagctcagaacggatgaatacggcgtaatccgcgtggcgaaagggctgttcatcaccgccgacggacagcataaagcggcgggtgaggtgctggatatggacacggcgttgaaggagatcgaagtctgtcagcagcagctgaaggcgctggccgccgccgcagaacaggcgcaggcgctggaggccgatatcgccagccagatagcgatgttcgaccagcgtctgcaaccgctgaacgcgatgatccacgtttacggcccgcagggcgtggccttcagcagcggagagcatatgcagctgaccgccgctcagaacgtggcggtgaacgcagggggagattacagctgcggggcattaggcagcaccgcgatgctggccggggaacagattggcctgtttgcccgaaccggctcactgagcctgaacgtcagcgaaggcccggtgcagatacaggcgcaaaacggcgcgatgcacatcagcgcagaacagaagctgagcctgatatcggcagcggatatgttgttcgcaggcaagaagaaagtgaccttaatcggcggcggcagctacctgaagattgagggcggaaagatagagtacggcacggacacgacgtatacgcggaagattaagcggacacatcataccgggccagcgactcaggcagtggacttcccggaaattaacccggtgatacaggacaaaatctgtattccgtgcttgttaaaagccattcaggcaaatgacggtattgtgcagggagcataa

SEQ ID NO: 453828 - DNA, 768 bp, Serratia marcescens
atggataacaccgcactactggcagcattgcctgagaatacggaggagaatatctgcctgttgtttgaggcgggtgctcagccggaagaagattttctgacgtttaaaacgaaacacgaaaacagtctgcattcgctgtacatccacccacagctgacggaatttcagaactacggcccctggctgctggaagtggatgataaagagcagctaaagggctatctggagacactgcctggctgtgtggccgtgactatatccaggcgttatcccccctcgctcgccgtacagttgtcccgcggctgcactctcgtgccaccagaaggggcggcggtgctgacccgcttctatgccgggcatgttattgaggtactggctgcccgtgcggagcatgactggcacgcttatctgttcaacggcatcacgcagtggtggctacccggcgaaacgcaatggcaacggctcagcattgctgcctccgaaattgaacatcccggaaatcatatcatccggctggataaaaccacctggcagcagatagcggataggccggaagtgaccagcgtgttgagcgaatggcaaaaaatgccgagcagtaagacgtttccaccgtgtgcgcagcgtttgatggtgataaaggcgctgaagaaagctgagcgtctggaattggagagacctgaagaccgaatactatatgctctttttttcctgaatggggagagaaagataccggaatcgggtgcgctggctcgtgctacaagcccctga

SEQ ID NO: 453829 - DNA, 552 bp, Serratia marcescens
atgatgggattttttgaccggcttgaacgtgttgattctgcaataaatcggttttattcgcggcgtaaagtgtggctttggagtgtgatatcgctgccggtactgtttgtcctgggctggatggtgtgggtgatgttctgggcgcccccgatgggcggggtgacgctgattatccacagtaaaatcgacagacctattctgggatttagtgtgaacggcatggcgggggggaatgccagggcccataatccgaacaataaatacacagatgaaagtgggggggcaacaacctgctgcggcagtgtcagcggaaagaccgccgaggtgatctggaccgttacttacaccagagcgcaatacaacgccggtttacgcactgaggttcataaggtcattatgccgctgccagagcgtaaacgaggcgaggacgacctgcacgtccatttcttaccgggtgacaaggtgctgctgggatggagtgacaacgccttttctccctacgatccccgcagtccgcactatacgccatcgccgcttcaggcagaaaaataa

SEQ ID NO: 453830 - DNA, 549 bp, Serratia marcescens
atggatttttttaacaggctggaagcgatggataaaggtttcacccggttttatgctcgccggaaagtctggctctggagcgtgatgttactgccggtactgtttgttctgggctggatggtgtgggtgatgttctgggcgcccccgatgggcggggtgacgctgattattcacagtaagattgaccgccctattctgggattcagtgtgaacggggtcgctggcggtaattcctgggcttttgatcctaacaataaatatgcaggggagaatggaaaagcaacctgctgtggcagtatcagcggaaagaccgccgaggtgatctggacgctggatgttaccggaccacagtatgaggcggggatacgaccggaacagcggcgggtggtaatcccattaccagagcgtaaacgaggcgaggacgacctgcacgtccatttcttaccgggtgacaaggtgttgctggggtggagtgacaacgccttttctccctatgatccccgcagtccgcactacactccgccacccgagcacacagaggacaagtga

SEQ ID NO: 453831 - DNA, 1803 bp, Serratia marcescens
atggaaaaggatttggatgcgattatcgcggccgcgtatcgggcgcagcaggcctgtgattaccggcttggtaactgctcacggatactgcatatcggttttttctttgatggcgtggggcgcaatatcaagcaggatgcgccggaaaaccgattaagcaatattgcccgcctgtttcgggcttatcctgcaccggtgttaggtagctctacagtatcgtatcaagcatattacatatccggtctgggaacgccctttattgaaagagaaggggaagcacttcagcaggttatggacggcacaagtaaatcggtactggagagccagaaagatcagcccgccgatgccctgaaagatattgtcaaggcgaaactgggcggcgccagtaatcaggatgtccgcgatgcgatgagaaaaaagctgctgacgcctcagggccagttaaagatgctgagggacgccaccctgaaaggtgtgctccgggcgggtatagaagccacgccctggctgcgcgacagtgaggtgatggcctacagcatggtgaccggcgcagatactcgccttaacagcgcgaaaaagcgctttgaacggtcagtggatgaagcagtaaaaggcggggatgttcccgtacggctgatttcggtatcggtgtttgggtttgacatgggcggcacgctggcgcgggagtttctcgacatgctgctggatgatatatgcgacaggacgacggggggaaaacccacctttcgcggtatcccggttgatattgtgtttgccgggctgtttgactgttcacgcgatacgccgatgagtagtgataacggactggactatgcgggtactattctggactgggtgccggaaaaacgcgcggaaatggcggggcagatcgtttcgctgttcggacggaagttcctcgaccatcagtcaccgttaccacaggccgtcaaaaaatcgctgcatctggtggcggcccatgagcgccggcgctggcgatgcgtgtatcgcaccgggcggcacggcgttgaacatcatcaggagttgctgatgccggggtgcagtgaggatatcggtggcgggatgaagcctgatgtacaaaagccgagcgcggagctgtgccgggtgtcgctgcggaagatgtacgttgaggcgatgaaagccgccgtaccattccatgatttaaagtcattgagagaagtatctgcgacagttgcatcatattttgatatgcgtgacagcgtggaaaaccagtcggctgagcagtgggtgacatcgtaccagagcgcggtcaatgccgcggcgctgagctaccgggcgatgaaccgccatcttgacggttattttgagtggctggggcggcagttttacgaatacaagcgtgaacttcgtcggctggaaggtatccgggacggaatactgttatcgccgtcctcaatggctgggttggtggggatgacgcctcaggcccgccttgcgagggatgaagtggcggatgatattgcgacgctgaaaaaacactggggatggctgtccgatgtcgccaatgcggcccatcttttgctgacccagcagtatcataatcctccacagctttatctggacaatatccttatgcctgcccgcgctcgcgctgagcattttctggagtgcggtgttgcagggcacgggggaaaatcaccgccaatcagatggtgcgtggatgcatcggtgctttatgcgtggtttgtgcatgatgtacaacgcacggaaggtatcaacgacgggtattttgccgtgcgatggatggagcccagaagttcataa

SEQ ID NO: 453832 - DNA, 474 bp, Serratia marcescens
atgtcagcaaaagcacagtttcttaaaaagcttcaggccagccaggcgagatcgatccagccggaaagccgagggcaggcggatatggcagaattccgccggcgaatgattcagctgcaggaaaccatagagggttggcttgaacagaccggcatccgggtggaaagcaccgaggttcctctggtggagttgcttctgggggcgggggcatttcgcattgccggtatccggatccattatcaggagcggctggtaaccttcactccttcatttttatatgggcaaggggtaaccggctgcgtcgatattaccctttatgcgcaaggagagcgtaggtctctggggcgtttatttatgcgctcgtgtgacgcgcctgactggacatatatgccgtccgtctctccgggcagccgcagggttgcgttctgtgagccggtcttttttgaattgcttgatagcctgctgccacagtga

SEQ ID NO: 453833 - DNA, 153 bp, Serratia marcescens
atgtcgctaatggataaagcgcttgttgtgaccccggatatttattacgtcggcggacataaacagggatgtaccgtattggcaactcagcctttctgtttttatccctcagtggcattgtgcatttctattcattgcctgaaacagggataa

SEQ ID NO: 453834 - DNA, 2646 bp, Serratia marcescens
atggaaaattcagctgtcctgttacgccgtcttaatccttattgcgcccgcgccctggaaggggcggcgtcgctgtgtcagacccgcgcccatgcgcagatcctgccggagcactggctgctgaagctgctggagcagggcgaaggggacctgacggtactggcgcggcgttacgaatggaatatggatgagatctggcaggcgctgctgaactggctggacggcctgccgcgctcggtacgtgggcggccggaactggcggacagtctgctgacgctgttgcaggaggcctggctgctggcctcgctggccggcgagacacagatccgcagcgttcacctgctgacggcgctggtgggcaagcccgcgctggcgcgctgcgacggtctgtggccgctgctgacgctggggcagagccagctggagcgcctgcgcccgctgatggatgcgcagtcggaagagcgtccggaggtgaagcaggaggccgggctggcgcagacttgcaccgaggtggcagagcctgcggcggacgccgacctaaaggcgggcgaactctccccggcgctccagggcgcgctggataaattcaccctcgacgtcaccgccaaggcgcgggccggcgcgatcgacccggtgttcggccgtgataccgagatccgccagatggtggacatcctctcccgccggcgtaaaaacaacccgatcctggtgggcgaacctggcgtggggaaaaccgcgctggtggaagggctggcgctgcgcattgccgagggcaacgtgccggccagcctgcagccggtcaccctgcgtacgctggatctcgggctgctgcaggccggcgccggcgtgaagggcgagtttgagcagcggctgaaaaacattatcgatgcggtgcagcagtcgccgacgccggtgctgctgtttatcgacgaggcccacaccattatcggcgccggcaatcaggccggcggcgccgatgccgccaacctgctgaagccggcgctggcgcgcggcgaactgcgcaccatcgccgccaccacctggagcgaatacaaacagtacttcgagcgcgacgcggcgctggagcgtcgtttccagatggtgaaagtggacgaaccggacgacgccaccgcctgtctgatgctgcgcggcctgaaatcccgctatgcgcagcaccacggtgtacatatcaccgatgaggcggtgcgcaccgccgtcacgctctcccgccgctatctcaccggccgccaactgccggataaggcggtggatctgctggataccgccagcgcgcgggtgcgcatgagcctggataccgtgccggaagcgatcgtccacgcacaggccgccgttaccgcgctggcgctggaagagaaggcattgctggcggatattgccgtcggcaatccggcagaagaaggacggctggcggccatcgccgtccagaccgcggaactgaaccagcgtctggcgcagctggaaggccagtaccgtcaggagcaggaactgattggtcaactgctggcgtgccgtacggacggcgcgcgtcaggcggagatcgcgactgtccagcaggcgctggcggcgctgccccacgagcaggcgctgctcacggcggacgttgacgcccgcagcgtggccaacgtgatcgccgactggaccggggtgccgctctcttccttaatgaaggacgagcagaacgaactgctgagtctggagacggaaatcggccggcgggtggtcgggcaggatgcggcgctgtacgccattgcccagcggctgcgcgccgccaaaaccggcctgaccagcgaaaacgggccgcagggcgtgttcctgctggtggggccgagcggcaccgggaaaaccgaaaccgcgctcacgctggccgactgcctgtacggcggtgaaaaatcgctgatcaccatcaatctctccgaatatcaggaaccgcacaccgtttcccaactgaaaggctcgccgccgggctacgtcggctacggccagggcggcattctgaccgaggcggtgcgcaagcggccgtacagcgtggtgctgctggatgaggtggaaaaggcgcaccgcgacgtgatgaacctgttctatcaggtgttcgaccgcggctttatgcgcgacggcgagggacgcgaaatcgacttccgcaacaccgtgatcctgatgacctccaacctcggcagcgaccacattatgcagctgctggacgaacagccgcaggccacggaggcggatctgcaggagctgctgcggccgctgctgcgcgaccacttccagccggcgctgctggcccgtttccagacggtgatttaccggccgctggcggcggaggcgatgcgcaccatcgtgcagatgaagctggagcaggtcagccggcggctgcagcgccactacggtctcgccacccagatcggcgacggcctgtacgacgcgctgaccgccgcctgtctgctgccggataccggcgcgcgcaacgtcgacagcctgctcaaccagcagttgctgccggtgctcagccagcagctgttaagccagatggcggcgaagcggaaaccgcaggctctgaccctcgactggcatgacgaggaagggattgttttggcgtttgatgcagaaagcgcggctgacatgtga

SEQ ID NO: 453835 - DNA, 1596 bp, Serratia marcescens
atggccacactggaaactctttctaacgcctgcggcgctgcgccgcaggtgctgatgcagcatacgcaacaatcgctcacgctgtgggcgcgctggctggagccggtctctgcgctgcagccggccggcgaagacatcagttacgacgatgactttcagctgatacgtgaagaagtaaacaaactttccggggtaaacagcgaacttatctgttcactggcggaaaagctgctggttcagggcggaaaagacgttcgcgtcgccacgttttatgcctgggcgcgtttgcagcaggacggcgaagccggctttgcccaggggctggcgctgctcgccgcgttgctggcgcgcttcggcgcggagattcatccgcggcgtgaaaggccgcgtaaagcggcgctggaatggctggcgggcaaccgcgtgcttgatacgctgtcgttgtacccggaggtcagcaaggatgactttaaacagatcgtgggcgcgctggcgctgattgagcaggagacggcagcctgggaggcggcggcgcggcctgaacttggcgcgctgtatggcgcgctggaaaaccgtatggcgcagtccggcggcatggaggccgtcgtgccgcaaaacagcggtggcaatgagccgctgccggcgggcggcggcgtattcggcgtcacagaggcgatctcatccggacgtgagctgatggagcaggccaaacggctggcgaagtatctgcatgaccagcctgagggctggctgtccgctcaccggctgatgaaaagcgtgcgttgggacaccctgcaccagttgccggcgctggatgcggccggcagaacccgcctggtgccgccgaaggcggattaccgcgcgcagctgaagcggctgtatctgcagcaaagctggccggaactgctggagcaggccgatcggatgtttgccgaaggcgtaaaccatttgtggcttgatctgcagtggtatctgtaccaggcgttaacccgcatcggcggcatgcatgaagcctgggcggacattgtgcggcaggatctgcggggcgtgctgcatcgcctgtcgggcgtggaaagcctggcctggaatgacggcagcccctttgcggatgaagtcacgcttaactggataaaccagcacgtgctggacagtgcggagggatggggcgacgacatggaaagcgcggccgcccccgcgcaggatgacattctgctgctggagccggaagcgctgaccctggcggataaagacggtatcgatgccgcgctgggctggctgcagaaccgcccgggcgccgacagcgcccgccgtcgctggctgctgcgcctgctgatggcgcgggtggccgaacagtacggcaagaatgagctggcgacgcacctgctgcacgaactggacggcgccgcgacggcgctgaccctgacgcactgggagccggaactggcgtttgaggttaaggcgcgtctgctgcgtctgctgaggatgagagccggccgtaacgacagcgataagcagcggctgcagccccagatggaggcattgctgagcggattaattcagctggatccgctgcgggcggcggtgctgtgcggataa

SEQ ID NO: 453836 - DNA, 1341 bp, Serratia marcescens
atgaagtctccatctgaacgtaaactaaaaatcggcggcgacccgcgtgcgctgccggactatgccgtgctgcgcgatgaactgctgaaattgtcgcacccggcgcggccggacgttgagtggcgcacggtggagacgctgtgcctgcggctgttcgaacataacggcgtcgatctgcagacggcggcctggtacacgctggcgcgggggcatcttgccgggctggcgggcattcaggaggggctggcgctggtcaatgcgctgacggcctaccagtggtcggtgatgtggccggccggcgttcatacgcggatggagattattatcggccttaaccagcggctgcagaacgtgctgcgcacgctggcgctggacgatcgcgatgagctggaacggctgtatcagctggaaaaaagcctgaagcggctgacggagacgctggcgcgccacgagctgcagcaggtcagccgcacggaagggatccagcagcgggtccgtcaggcgattacccggctggaaaatatgccgcgcgacgaagggcaacagccggccgtcgcgctgccgccgcaggcggtggtcagccacgccgatgagccggccgccgctgccgaccggctggtcttggtggtgccgccggaaccgacgggagagaggacggcaacgacgccgcgcgccgtgcggccgtttctggccggcgtctgcagcgcgctgctggccggcgggctgctgctgtggggctggcacagcctgaacgcgccgtcagcggcgcagcaacggctgacggcctcgctgacgccgctgccgggcgcgctgaccagggagcagctggccgtgctgcgccagacgccgccgcaggccgacgcgttgacggagcaaacccggcagcagctgcagtggctgatgacgctgccgccggactggtcgctgcgctatggccagcagctgatggatcaggcgcaggcgctgtggccggatcaccccgacgtggcggccatgcagcaggcgtggcggcagcatctggaggccaacgcgctgccggcaagctcgctccttggctggcgcgacggtatgcagcggctgcagcagctgaccaaccggctgaacgggctggatgaaaagcacggtaaatatatgaccgtcagcgagctgaagtcgtcggtgttcgccattacccaggcgtttaaccgccacccgccggcggaggagcgtctgcggcgctatggcgtcggcacctcggaggcgcggcgcaaacaggcggaactggcgctggagcagctgcaggcgcgttatttcctgcagcatgccgccagcgcggaaaagatgccggacgacgcgcgctag

SEQ ID NO: 453837 - DNA, 534 bp, Serratia marcescens
atgcagactaattccgttatcaaatggctgaccggcgcgctggtgctggcagcgctgctgctggttaacctgtcgatttaccaaaaagagcagcagctcaggcagggccgcgtggccatcctgcagctggcgccggtcgacccgcgctcgctgatgcagggcgactatatggcgctggactatgcgctggccgcgccgctgcggacgcagatgcgccaacagcggcaagcctgccgggccggcgactgccaggcgccggcatcccgcggacagctggtgattgaactggatgggcggcagcacgcggtcagcgcgcgcttttatcgcggagagccgctgaaaccgcagcagattctgatgcagtatcacctgtccgccagcgggctgcagatcggtacgccgagctactttttccaggaagggcacggcgacaggttcgcccgcgcgcgttacggcgagttccgcgtcgcacaggacggcagcgcgctgctgacctatctgcgcgatgccgacgaccggcgcattctgccataa

SEQ ID NO: 453838 - DNA, 2190 bp, Serratia marcescens
atggattcgtcgtatcaccctgcccgcatgccttccggcgcggcagcacacgtatgccgcacgctcggcgcgctgcaacgctcatcgccggacggcgacgggctgtccgccgctgcctatcaacagatcctgctgtactgcggcgtgcggccggatcgccccgcctggcgtcgttttctgctggccgcgctgacgctgctcggcctgctggcgctggtcagcggcggtattttctttatcgcctggaactgggcagcgatgcccaaaatggccaaattcgccctggtggagggcgggatcctggcgttgacggtcgtcgtctggtggcgctggcgacagacgctggcgcgcatggcgctgctggccatcggcctgagcttcggcgggttgctggcgctgtacggccagacttatcagaccggcgccgacagctgggagctgttccgcgcctggacgctgatactgctgccgctggcgctgctggggcggcagaacggcctgtggatctgcacctgggcggtcgccaacctggcctttcagttctattacgccaaccaggcgctgctgctgatgggcgacgacgcctggcagcctttcccctggtcgggcaacggcctgctgtacgcctacttcgccgcccaactgctgtgcctgatcgtacgcgaggcgctggcggactacgcctcccgccggcagccgacgtcatggctggccaaacgctggccgtcgcgcatcctggccggctatctgctgctgaccctcaccgtctgggtagcggccacggtgctggagtggagcagcacggatgaccgcctgattattgtgccctgggcgctgttgctggtgatcggttacggcgtttaccgccaccatcggccggatctgtgcatgctgacgcttggcatgaccagcctgatggtggtgggctgcgtggtgattctgcagctgctgcatctttcctgggatgtcggcaatctgtttttgatctgcagcctgatggcgctgtggctggcgctgtgcggcgcgcgtctgctgcactggcggcgtgaaatgtacccgcaacagccgccggacatcgcgccggatgaggtcggcgcactgctgcaggcgctgcagcagcgtcggttgctgaacgaccggcaggcggcggccgtggcgaacttcgaccattccgcacggctgccgtggtatttacgcctcgcgctgacgctgggcggctggctggcggcgatgattatcctgacgttgctcgttctggtactgtatgtggttggcctgctcgaatcgctcaacggcgcgtcgctggcgttctattccgccttactggcggtgccggctgccctgctgctgcgtaaaccgacaatcggccagcagcagatcggtctggcctgggccatcgccgccacctgcggcttttatctggcgattttgctgctcggcgacggctattcgcacttcagcatgatgctgagcgcactgtgtttcctgccggtgctggcggtgatggcatggacgatgccgaacgcgctgtatcgtctgatggcggtctgcgtcggggtcttcctgctggtgcagtcgctgggctacttcagcggccgctatctgccgccgacgctggctatcggcctgacggcgctgctggtcgcgctgctgctggccggctggctgcagcaggttatccgcagcgctgcgcggccgtcagcgggcggcaacgcgtggcgctacggcattcccgccgggctgatggcgctgtgcctggccgccatccaccgcggcctgctgaacgatattttcggcccctctgccggccacgccatgctggcgaccatgctgggccttggcatcgccgtcggactggtcggcagcgcgctggcctatacccggcgcaccgccgccgacgcaatgccggtttacctacccgccgccctgttctgcggcgtcaccgccctgttctcacccgggctggggctggggctgctgctgctgctcaccgcgcgctatctgggcagccgcgcgctgctggcgaccgcgggcgcttatctgctgctctaccttgccgactggtattatttcctcggcatcacgctgctgcataaagcgctgctgctgatggtcagcggcagcgcgctgttgctgctggcgctgtgggtcaaacaatggcagacgcagggaggcgaccatgcagactaa

SEQ ID NO: 453839 - DNA, 750 bp, Serratia marcescens
atgaacgccttgatacgcctggccgatgcttacccggcatgctggctgggattgctgatgctggtgggttgggccgtcggcagcctgcttaaccgcgtggcgctgcagctgccgttgctgttggagctgcgctggcgtcgcgccgcgcagcgccagttgaacctgccggcgacggatggggatgcggccgggtggcggaagctgtttacgcgtgcgccggcaagccgttacccggcagcggcgctggcgctgctgtttctgctggcggggatgcggctgccgccggggttgccgctgttggcgctgctgctgttttgctcgctggtgctaacgctggcgctggttgatttcaacaccatgctgctgccggatgcgttgacgttgcctctgctgtggctgggcctgctgtgcaacctgaacggttggtttgtgccgctggatcaggcggttatcggcgccgttgccggctatgccgggctgtgggcgctgttttggctgttcaggctcggcagcggcaaggaggcgctgggctacggcgactttaaactgacggcggcgctgggcgcctggtgcggctggcaaagcctgccgaacctgctgttgctggcggcaggcggcggcctgacgtatgtgctgctgaggcgcggatggaataaagagggcgggcaagagccgctggcgtttggcccctggttggcaatcagcggtgtggtaaacctgctgtttcttgtcgcgccaataaattattaa

SEQ ID NO: 453840 - DNA, 621 bp, Serratia marcescens
atgaccgaacttattgccgtcgtcaccctgactttactcgccgtgatcagcccaggcccggatttcgccatggtatcgcgcaacagcctgagcggttcgcgcgccgccgggctttactgcgcgctgggcatcagccttggcgtgctggttcacgtgggctacacgctgatcggcgtcggcctgctgattcaacgctcgctgtggctattcaccctgctgaaatttatcggcgcggcctacctgatttatctgggcgtacagatgtaccgtcatgcggccgcagcgccggcgcacgcagcaacgccggtgccgcacatcagtgactggcgcgcactgaaaaccgggtttctgaccaatgtgctgaaccccaagaccaccgttttcatcgtcagcctgtttatgcaggtggttaacccgcaaagcccgctgtggctgcagatcggctacgggttgttcatttctctggcgcatatgctgtggtttggctgcgtggcgctgttcttctctgccccgggcgtcagcgcgcgctttctgcgcctgcgccggggtatcgaccgcctgttcggcgggttgctggttacgttcggcgcgctgctggcgctgagcaacctgagccgctga

SEQ ID NO: 453841 - DNA, 576 bp, Serratia marcescens
atgagcaatatagtgcacaacggcaagtccgacgcgccccaggtgctgcagtacctcagcagcaacgtgcgcggttatcgtcagcaggcggcgctgagtcagacggcgctggcggcgctgtccggcgtcagccgccgcatgctggcggggattgaggccggcgaccgcaacgtcagcctggcggtgctggataaactggcggcggcgctccaggtctctttcagcgacctgatccaggcgccggcggcgcgcggcagccatctggtgggcgagctggcctggcagggcgaacaggcgggcagccaggcgattgttgccgccagcgtgccggcgcgccagcgggtagagctgtggcagtggacgctgatgccgcacgaacagtatcactcgcagcccgatgccgaaggctggcgcgaaatcgtgcatgtgattgagggctgcctgacgctgctgctggagcagcagacgctgatgctgtgcgccggcgatacctacgtttttaacagcgatcagcagtacgcctacgctaaccgcggtgacggcccgctgcgctttatccgcaacatatccttctaa

SEQ ID NO: 453842 - DNA, 339 bp, Serratia marcescens
atgatcatacccgcacttttcctcaacggctgcgtccaatgggagcgcaacgacgccagcaataccctctggcaggccgaatatgccaaatgcaaagagcgcgcgtaccagcgatttccgcctgacgtcgtcaaagacgttgaggttgagtatggcgatcagtacgttccctgcaagaaaaacaagaaaacctgcccggacggccaccgttatgaatcacgcccgacgctgcgtacattacacagcgacaacaacaaggacgcccgcaacgccatcataaaatcctgcatgtacgagaaaggctggtatgaaaaggtctactactggccgcgcagctaa

SEQ ID NO: 453843 - DNA, 1155 bp, Serratia marcescens
atggcactgaccactgaagctatcagaggcgcccattcactgctgagcgccggagactacacaccacagaaccaactggcggagctgtcacgcgtgccggcattcggcgtaatgctggggggcaaggcactgacggtgctggatgaccggctgatctcactggagatggtggacaaccgcggcttcgaagcggatgagctaacaatcgtggtggacgatagcgacgggcagctgcagttgccgccgcgcggcgttgaaatatcggcatcgataggctggcgcggtgaagcgctggtattcaaaggcgtgtttattgtcgacgaagtggcacatgcaggcccgccagaccgcatgaccatcaccgcccgcagcgccgattttcgcgacgagttcaacgttaagcgggaagtgtcctggcacgatgtcacggtagagcgtgtggtgtcagccattgcgcggcgctatgacctgaaacccgttatctccgcgcagctgatggagctggagatcgaccacgccgatcagacgcaggaaagtgatatgtcattcctgacccgcatggccgagatgcttggggctattgctactgtaaagaacggcagcctactgtttattctgccaggcggtggcgtaagcgcatcgggcaatgctctgccttcgttcgctattacacgcagcagcagtgaccggcacgcatttcgcattgccgatcgcgatgcctataccggtgtgcgcgcctactggctggatctggaatttgggaaaaagaaaaaggtcacggttaaaacccgacgcgccaaaaaagatacaaagcctcgcagcagcaaccgggaaggtgattatttagaaggtgaggatggaaatgtttatgtgctgcgaaaaacctacaatagcgagacggccgcgaagcgcgcagcagctgctaaatggcagcaattaaaacgcggcgctgctgagtttacgcttactctggcatatggccgcgctgatttatatccggaaatgcacggtactgtttcggggtttaaaacagatattaataaccaggattggattattgccaaggcaagccacacgatcgacagcggcggctttactactcgcctggaactggaagcgaaaataccggaatggattgcagaaagtgagcagtga

SEQ ID NO: 453844 - DNA, 300 bp, Serratia marcescens
atggctgtaactctctctactccaatcaagcgcggcggtcaggaaatcactgccgtatccattactgagaccattaaacaggcgggctctctgcgcggtctgcgtctggttgatgtgctcaacttcgattatgacgcgatttctacgctgctgacgcgcgtcactgcgccagcgctgacgccggcggacgtggcgcagttggatactgccgactttgtggcgttcattgaagagctcacgccttttttgaccaaagcggcgccgtccgtaacgggcgcggcggagacggcgagcaaataa

SEQ ID NO: 453845 - DNA, 2913 bp, Serratia marcescens
atggatcttagtattcgcgtcgcgttcagcgcgatagacaaacttacccgccctgtgaaggccgccggcaaagccgtcggcggcctgtctgaaaacctcaaaaaaacacaaaacgcgatcaagtccctggataagcaagcggccagttttgacaagctgcgcagccaggcgaatgacacagcccaaaagcttaacaaggcgcagcgatcctttgacgggctaaaccagaaagtgcgtgaaggcggccagctgacggaggggcaagccgcgcgattggaagccttgcgcgggaagatttcgcagttaacgcagacctacgggaagcaaaccacaaaactgcgtgaagcatcccaggctgtgcgtcagcacggcgtaaacttagcggctggcagtggggcggtgcagagtgcgattcggcgcaccgagcaatacaaccagcagcttgaacgcgagcggcgccagctggcagcggttactcaggcgcaatcccgctatgcccgtgcaaaggatatggcaggcaagatgcgcggggctggcgttggcatgatggccggcggcgcagttgcaggttatgccggcggacggttcctggcgcccgccgttggattcgatacggaaatggcgcgtgttcaggcaatgactcgcctggagaaaaactcgcccgagctggccaatctgcgcgcccaggcgaaaaagctcggctctgaaactgcctttaccagccgtgatgcggcaagcggtcaggcgttcctggcgatggccggctttacaccgcaggcggtgcaggcggcgttgcctggcgtactgaatatggcgctggccggcggcatggagctcggtgaatcttcagatatcggctctaacatcctttcacagttcactttgcccgcgggggaaatggatcgcgtgagcgatgtgctgaccgcggcatttactcgcagcaacaccgatttacgcaacctcggcgatacgatgaagtatgccggcccggtagcttccaaacttggcattagtctggaagaggctgccggtatggcggggattctggcgaacaacggtctacgcggtagcgatgcaggtacggcgatgcgtgcatccttggcgcgcctgtcatcgccaccaaaagctgcggccaaggcattgcaggagctgggcgtgtccgtcgcagatgccacaggaaaaatgcggccggcggaaacgatactgctcgatctctacaatgctacaaaaaaatatggtcaggtcgatcaggtcagcttctttaaagatattgccggcgaagaggcatttgtcggcctgcagacactggttgctggtgccggcagtggtgagctgcagaagttaatcggcgaactcaaggaggccagcggagaggcgtcaaaagttgccaagacgatggcggataacctggggggcgacctgaaaaacctggacagtgcctgggaaggattccgcattcaggttgaagaaactggcgacggttcgttacgtaaactgacgcagggactgagcgacgcaattacagcaaccagtgactgggtgaaagagaacccgaagctggcacagtcattattgctggctgctggggcgttgaccgcgctggttgtcgggttaggcgccatcagtctagcaaccggtttactgatcggcccgctggccaaattgcaactgggcttttctgttctgactggcgggcggggtgtcatggggcttgtcacgtcattacgtggactggggggcgcatcgggtaacgccatggcaaggatcagcggatggccgagggttttgggggcgctgtccggtggtttccgtggtttatccgtttctctgggggctgttgtacgtggattcgccggcatggcgtttaggctgacggggctgccggcgttgtgggggatggttaccggtacgctttccgtgttgggtgctgcgctctcgtttattctcagcccgattggcgcgttagttgcggcgttcgtcggtgccggcctgctgatctggcgctattgggaacccattaaagtgtttttcatcgggtttggtgctggcgtcatggaggcgctggcgccgctgcgtgaggcattttcccggctttcgccgatctttggtgtcattggcgatgcgctcgggcgcgtatgggactggtttaccaagctgctgacgccgatgcagaccagcaaagagacgctggataaatgcgccagcgccggcgagacgttcgggcgggtattcggcaccgcgctgcaggtgctgctgtacccgctaacgaaactgatggatggtgtgggctggctgctggagaagatgggcctcatcccggatggcatcgagcaggccaggcgcaaggctgaagagctgcgcaatcagccggtgatgtgggagtgggatccccagcagaaaaaaatggttaaaaaggggtggagttgggccggtcccggcctgcctacgggagcggcaacggttaaccctaacttgggcgggccgccaccaccgatactgactggcgatacagggacgcagcgccggctggggcagatcgcggacaacaccaaaaccacggcggataacaccaaagcagcggccaagcgtatcggcccgggggatattgtctttaaaaacctgccgcgggcgttggctttgcgtggtgcctaccaggaggcgcgggttatgtcacagccggggccgcgtgttgcagcatcgtctggcggcgtgctgtccgtcccgtctgttacgcagccggcgacagcggcgccagtgtctgcaccgggtagcgggccagttgtccaggtgatttttaatgacgtggggaagcgcaccgatcaggagctggaaaggatggtgcgcaacgcgctgcgtgatgcgatggccagcacagccagatataaccgcggttcattccgcgaccgagattaa

SEQ ID NO: 453846 - DNA, 1080 bp, Serratia marcescens
atgaacgagaagaaattcaccaccatcatcactgacactggcgccgaacgcctggccaaagccgcggtagatggcacgccactggcgatcaaagaaatgggtgttggcgacggcggcgggcaactgccgacacctcggccagatgccgataaactggtaaacgaactatatcggggagcactgaacaagctggtcattgccgataacaatgccagtattatcgaagctgagctgatcatgccgcccaccgtcggcggtttctggttgcgcgagatcgccctgtttgccgaggatggcgcctgtatcgccatcggcaatatgccagaaacctacaaacctaagcttcacgaaggctcggcgcgcttccaggtgatcagaatgcagatcaaggtcagcagcaccgccgacgtcgagctgattgccgacccgtcggtcgttcttgccaccgtggaggaaaccagtaaggccagggatgaagcgaaggattacaccgaccaggttgctgcatccatcggcgaagataccgcggcggccatcaatgccgccgttgaaaaagcgatccgtgaggcctgggaattggataacccggtcggcacatcgcgcctattcaacagcaacatagaccccaacacgcgctggccatggtcaacctgggaatatgccggcgagcacgttacgatccgcaccgctgctgccgatggttctgatgttggtgcgttcggcggcagtgatacggtcaatattgccagagggaacctgcccgcagaaacaatcagcctgtctggctccaccgaagaacacgccgcccagacgttacaaaccaagccggcaggcaaacacgcccatatggccggagtgcgcgcgcctggcgctgaatacgccacgtcaaacatcggcaccgatgccgatcaaccgcacaaactaggttggacgagcgaagaaggggagcatgttcacgaatatgatattcctgcgcatcagcacccgttcagcggaagaacggaaaatcttggcgacggacaaccactgcagattgtcgaaaggcacaaactgcagatgctatggcaccgagtagcataa

SEQ ID NO: 453847 - DNA, 744 bp, Serratia marcescens
atgagcggcgtccgtattttttgcaatgaaattatcccaatcaccgattggaaccacgactttgagatcatcagctccaagctgcagaccaaagcaccgctgccaatcatcgccagccaggacctgctgaacccgctggataacaccggcagcggctacaatgtgcaacaaggcggcgcccaggtgcgcgcctggggcgtgcatttcgaggacggtgccaagccggcgccgacggcactggttaagccagggcaaggggcggtgtcatttttgacggcatttcgtttcgatgccctcaaccgctacaccaatatcttcagctgtcgcaacgaggcggcagacagtggccatgggtttaacctgtactggagcggcgacttattgatgggatttgcttacccatctggcgaggtgcgcagtatcagcggtggtgacgtcgctcagccggaaacgggcaaatggtatgtggccgccggtgtattcgaccccgtcaaccgcaaggccagcgtgttattcagcgatctggggcttcggttcggcgacctgggcgagaatatcgccccggatcaaacactcagcacggcgctggctatcggcggcgggccggatggcaaaaccacctcatccatgcgtggtgatatcgccttcctggccacgtacgacggcgcattcagtgcggaccagcgcacggccatgattgccgttggccaggacattttgaaagaccggaaactgattgcttaa

SEQ ID NO: 453848 - DNA, 2958 bp, Serratia marcescens
atgacgaacattacagaaaccgccagttgggaagatcacgtttaccagatcaagcgcggcgatagcgtaagcggcggccgtgatggcattgccaacattcaggcgacgcagctggcaaagcgcacccgctatctcaagcaggcgatcgacggtttccaggcgggcgaaatgccctacacctccatcgacgcggcgaacgccgctatcgccgagggaaagctgccgcccgatgcgctgttttccatccgttccgatgagtccggcgtgtgggcgttcgagtgccgcaacgtcagcggcgcagcagtacccaccggcaagcgcctgtactccgccgatatgattgactacctgatcgaccgcatggcgacgcttaacgacacggtgttggcaaccgataccagcctgtttgaggtggtttccgcaaacggcattcggccattcaggatccgcaacagtgacggcgctttagaatttgccatggctgtccgcctgctgaccggtgacaccggcatgaactttgccggcaatatgctggatagcctggcgccaccgggctggaaatttctgatccagtcggcgaacggcctggttattgccggtgtaaaagacgatggcacaaaagtcggctggggcagtggtagcggcaatggcgggcaggccggcggcattacgccgggagataccgctaccggctatgatgacattcgcaactataccggtgacgccaccgtgcgtgacgtcgttggcgctcgtatcggcggccgcttcgttgcctaccctgacctgactgatgaggacgatggcggcggtgtgctggtcggtgtggatggccggcgctgggtgcggctgaccgatcatgtcacttacgatatgttcggcgcaccacgcattccgaccgagacatatctgcgttatgaagcgctgtcgaagaacggtgaagaagctgcagcacagtcattgctggccgatattgaacctgcagatgaagcgatcgcccgctgccatgcgttcgccaaccggtacggcctgcccgtggtgcagaacgcgggggcgtttctctgggtgggcgctgagtggattgtccgcaccccgtgcaacctggccggctcaatcattgttacctgtaaccgcagcggcactaacgaaacgcgctggggccgggttgacggtgtcgatgatggttcaccggagccgatgtatatgtatcgcatccagggtaaaagccgcatcgactttaccgccgacgagctggccgacctcaacaccaactatgcgcaatacatcaaaaaaggcagtacgtacctaccgatgcctaagctgtatgaatttcgcggtgggctgttcggctacatttcttccgctgtggagctgtaccgcggcggtaaccaggtgaacccacgcacgcaggtaaaatatcgcgacttttcgcggattggccgcaatggcgccctgtccgatcagctcgtcaaaaacacgcccgccggcacggtttcagaagcctggatccaacccaaggaaaacgcctggctcgccttcacaccgccggcgttctttgaggccggcaacggccgcaagtttgtcaatgtgcagattgagcgctccatggtgaccgtcaacgacctggtgcttagcaattgggcgagcggcaacgttgaatcgcgtgttgtgattggtgcctacggcgtgacggatatccggctgaataacgccacggcagaatgcatgccgaaccagaacggcggcgcttatgccatctgttttcgtaacagcattgaggcacatgtcaccggttattacggcttgtacggctggggatttcagggacaccacggcgtcaaacgcctgtttatcgatcgtagcgtgatgaatcgctttgatttccactcgttcggttacgacgtgaacatcagccgctcactgtttaaaggcaagcagatttacctgcaaggcggaggaaagtatacgttcgatgataacgccttcgtcgtgacgcagtattccattgagcaagacggcggcgcgctggaataccgacagggctacatgatcgccatgcgtgaggattatgccggcgactgtgagtgtaatcttaccgtacgcgaacaggtgatccgcttcgatagcaacatcgataaagcctgggccagcagcgtactgtcgtttgatgtggtgctgatgaactccggtgaagcggaaaactacggcgtcacgacgaaaaacccgcataccattgtcggcgaaaatgtcgtgttcgaccttgaaggctcgccggaatcgctaccggataactttgcgttcacgttctgccgcgcgtaccgctcacgatacagcacctacaaccgcacctatttgccatcgctggtcagcattcgtggaatgaccgccatcaacgtgccggaagggaaaaacgcctgcatggccatcttccgcatcggtgccgatctggcgagcaatccttatggcagccgccagaagctgcggccggatggcaccaacgcacgggtcatcggcgagaacgtgatcagtgttatcaacaacccggtaattgctgccaatgcctgcccgatggtgtacctgccaggggatacggccgattgggataaggtcgttgacggcacgacgtaccgccaaagcccgtatgcctgggtgccaaaagtgacgctgattaactgcgacccggtgattatcaacgccgccggcgcgcgggcaaccttcgacattcacggcgggctgctggcgcgctatgacgtcggcgatactggcaaccgctgccgcgtcaccggcgcagatatccagctttacccggatgctagcggcgcgacctatttcagcgcggacagggtacgaaccgcaaactgcgactggcttgaccctgccgccggcgccacctacgacggcacactaaacggcgtcggtaacgtcaaccttggcaccaaagaacattcaccaaatatttaa

SEQ ID NO: 453849 - DNA, 603 bp, Serratia marcescens
atgaatagcagtctgttgccgccatccgccggcgcctggatgcgcaacaccgaagcggtgaccgtcaaattgtcggcgatcaccgtggcgctgcgcacgctatggacgccaacagattgcccggttgacctgctgccctatctggcctgggcgctgtcggtagaccgctgggacaagaactggccagcagagaaaaaaatcgcggcaatcaaacaatcctactggctgcaccgccggaaaggcacccgcgccgccgtgcgacgcgtgatcgagggtatggggttttcggccacgtttgcggagtggttcgacaccggcgaccagccgggcacctttcgccttgatgttgacgttaacgacgttggcatcagcgataagacactgagcgaactggagcgattgatcgcgggcagcaagcccgttagccggcatcttgcgcagctgaacatcgcgacaaaaagcgccggtgtggtttattccgctatcgccacacatgacggcgacattgtgaccatttacccggccgaccatgagccgattaaccagattaaatataacggactgcctgattttggcggtctttatcagtacaccggggtgtaa

SEQ ID NO: 453850 - DNA, 900 bp, Serratia marcescens
atgccgacgattgacctttcacagctgccaacgccggaaatcattgaagagcccgacttcgagagcatcctgagcgacaacaaggcgatcatgatcgccgcctttcctgctgaccagcgggaagccgtggcggcagcgctgcagctggaatcagagccattaaccgtgatcgcccagaccgtcgcctatcgcgagatgctgctgcgccagcgtatcaacgagggcgcagcggcctgcatgctcagccacgccaggggaaccgatctggataacctggctgcgaacctggacacgcagcggctaaccatcaaacccgaaaccgatacggaaaacgccgtgctggaaagcgacgaggcgctgcgcctgcgcgcgcaggccgcgtttgaaggcatgagcgtcgccggaccgtccgccgcttacgaatattttgcccggagcgccagcggtaaagtcgccgacgccaaggcaaccagcccggcgccggcggaagttgttgtcgctatcttgtcgaccgacggagatggaacagcgtcacccgagttgctggccgcagttaaggacgccgtcaatgacgaggaagtgcggccgctgggtgaccgggtgacggtgcgcagcgccgatatcgtcgattacacgatagacgcagaactttttctgtacccgggtccggagtcagaacccatcatcaacgcggccatggcatcgctgcagcgctttctggcagataacgacaagaagatcggccgggacgttgccaggtcggcgatctccgccgcattgcacgtgcaaggtgttcagcgcgtggtgctgcgcgcgcctgccggcgacctgcagatcaccgatacccaggctgcgcggaacacgggctacaacgtagaaaacggcggaacggatgaatag

SEQ ID NO: 453851 - DNA, 369 bp, Serratia marcescens
atgaccgaaaaatatcgcggcatgaatgccggcagtaccggcacactgaccgatcaggatcacgtctggcaatcggccaatgacattttactgacgcctatcggttcacgcgtcatgcgccgcaactacggctcgctggtgccagacctgctcgacagtccacaaaacgacgtcacacgcatgcagatcatgagcgcggccgtgatcgccctgtcagcctgggaaccacgcatcgcactggacaccatcaacattacctattcgccgaccggtgccgtaacggccgaactctctggcctgctgaccgagagcctggaaaaaagcaccggttcggtgacgctaaggagcaacagccatgccgacgattga

SEQ ID NO: 453852 - DNA, 558 bp, Serratia marcescens
atgggaaatgtgatccgcgttggcatcgtgaccgaaatcgacgagaaaaactggcgggtacgcgtcgccagcggcgagctggataccgactggctgcgctggagcacacagcgtgccggcgccttcagcgtttgggcgccgccctccattggtgagcaagtctggctgctgtgcataggcggcaacccggagactgccattattggcggcagcctgtacagcagcgaacaccctgcccccggcaccggcgtcagcgagctggtgatcgtcgcacctgacggcgcccggtttcgttatgacgccagcgccggcgcgctggaagtcagcggcatcaagacggccagcattgccgcagagagcaaaatcacgctgacaaccccggttgtcgagtgcagcgaactgctcagagcctcacggcttgaggtcacagaaggcggcgagatgcacggcagcatcacccacagcggcggcgcgttcacgtcgaatggagtacaggttgataaccatcgccatggcggcgttcagagcggcggctcctggacggagggcacgcaatga

SEQ ID NO: 453853 - DNA, 642 bp, Serratia marcescens
atgaatggcgatgccgcgctgtttcatcagttggatcaggtattcagcgacattcttggcggcatgtcaccggccggccgtctgcgcacggcgcgagaagtcgggcgccagctgcgccagagccaatcgcggcgtattgcacgccaggagaaccccgacggctcgaaattcgaaaagcgccgccggaaggtgctgcattcccaggccgggatcagttttgtctggaacggcgaaacccgccgcctgcgcaactggcgcgccacgaaaggtaaacgcggccgcatgttgaccggctttgatgaagagcgcggcgaggtgcgctcgttctatcgcgaagatatcgagcgctatctcgacatcaactttatgcagacccgccgtgacaccagtaaagccgatccgatgttccgccggctgcgcacggcccgctacctgaaagcgcgtgccgataccaatggcgccaccgtcggtttttctggcgtcgccgcccgcatcgcccgcgcgcaccagctcggtctgcgcgacaaggtgaacgaatccggcgccatggccaaatacccgcagcggcagctgctgggactcactaaagccgaccgcatggcaattgcgcgccaggtcatcgacgcattgggggtgaaatag

SEQ ID NO: 453854 - DNA, 462 bp, Serratia marcescens
gtgaaaaaagccgagttattacgtgaagcgctggtcgccagcaacacctggtgcaaggccaacccggaacaattcacggtatgggtggaaaaaggtcatatcgagatcatggccaccggtgaaagctcgttcatgtacatctacccgatccaggtattggccatggattttcccggccaggttgatgacctgatgctgcccttgctggcgtgggtgtgggagaaccagccggatctgctgctgaaccccgagaagaaccagcacattgagttcgacgccgacattatcagcgacgacagcgccgacattctgctcaaagtgccggtgtgggagcgcgtgatcgtcactgccggcgagaacggtaagccgacagcgcagcacctggcggaagataagccgcgcctgggcggcggcgactggcaggtagtgtttgatccagacggcggagaaatacggccatga

SEQ ID NO: 453855 - DNA, 384 bp, Serratia marcescens
atgaaagcggtatcggtactggctttactgctgctgatggcactggccggcatcgcctggcaaaagcatcagcgcgaactggccgagcaggcgcaggtaagtgccgagcgtcagctcggtgatgccaaggctgtgctgacagagctgcgcagcctgcgcgctgacgtgagtgcgattgataacgccataaagacgctgggcgataagcgcagcgcaaacggggagaaacgacgtgaaaccatcaagaccgcgctggacagcgatagatgtgctgttgctcctgtgcctgctgctgttgctgacagcctgcaaaagcgcgccgccgaagtccgtgccgcagattattcacgagcctttgccggccagccggacggccagcactga

SEQ ID NO: 453856 - DNA, 552 bp, Serratia marcescens
gtgaaaaaacgctttattgcctgcagcgttggcgcagtcatcgccattgccggcgcaacctggccggagaaggtgcgcaccagtcaggcggcgcagcagaaaatggccaagtatgaagactgccgtagaaccccctactactgccccgccggcgtgttgacggtcgggatcggctcaacagctggcgtccaaaacagaacgtaccagctcgacgagattgccgaacgctgggtaaacgacctggtccgcgccgaaaagtgcattaaccagaactttaacggcgcagcggcaccgcagtttgttttcgatgcgctgaccgatatcagctttaacgtcggttgcaccggcatcagttggtttactaaccgacagggtaacaaacagagaaccaccctctggaagcatgcgcaggcaaaaaactggatcggcgtttgtaaccggcttaccgacttcgtgaattcgggcggccggcgcatgcaggggctggtgaaccggcgtgaagagtttcaagcctggtgcctgtccgacccggcactgcaggggaaaaaatga

SEQ ID NO: 453857 - DNA, 282 bp, Serratia marcescens
atggacttgattgatcgcctctggagttgggtaacgttctcctggtcaaccttgctgatgggcgtcggcatgatgacgcagcgcgaatggttggccgccggcggtctggtgattggtgtcatcgcggcagtattgggtgagatccatcgccgccgcgtgtctcgcagccaggataagaccaatgccctgctggctcagctgatcaccgcagtgcgcagcgatgccgagaaccggcaggaagttaaggagctgatcagctcactcaaagggggttcccggtga

SEQ ID NO: 453858 - DNA, 201 bp, Serratia marcescens
gtgaaagtgaaagccatgcagggcgacacgctggatctgctctgtcagcgccattacggcaccacccagggcgttactgaagcagtgttgtcagccaatcccggcattgccgagcaaatattcttaaccgttggccaggtcattgagctgcccgacattgcgcaatcaaccgaacgggaggcggtgcagctatggacttga

SEQ ID NO: 453859 - DNA, 498 bp, Serratia marcescens
atgagtcttgttgccgggcgaaccgtcaccccagccgccgacgacgtgcccgataccgatgatggcggcgaaaaaatcaatgccggcagcttctggccggagattgccctgcgcaatatccgcgtggaaatgcgcattaacggcgcagtgaccacctcacgcctgaagcatgcagccattgaggcgctcgctcatgttgtcgagcagttgacaacctggcaggcgcaccagaaagaagccggttttgctcacctcgacgaggtgccggcaacggcaatcaacggtgagagcatcaaggtgatccgctttcgccgcgccgtgtacagcctgacccgagccctgcttattgagaactaccgcgacgtagacagcaccggcgacgccggtgagaagcatgctgccggcctgaccctgcaggcggcggatctttggcgtgatgtacgttgggcgatcgctgatattcagggcaatgtgcgctcgctggcggaggtgttttag

SEQ ID NO: 453860 - DNA, 834 bp, Serratia marcescens
atgctgacaccggcacaacgtcactttcaaaaggtgatggctgagcgccacgggaaagccgaagaactgtcggaaaccgcgcgcacggcacacgagcagattttgcaccggctacgcatggatcagagtgcgctcagaaaagtgcagtctgaccaggcaaaagccgagatgaaaaaacagctgctgcctcactattcgggctggatcgagggaacgctcgacggcaacagcggccgccaggatgaggtgatcgtcaccctgatgatttgggctatcgacgccggcgattatccgctggccgtgcgcatcgggcgctatgtcatcgcgcatggtctgaaaatgcctgaccgttttcaccgtacctcggcgaccgcactggttgaagagttgtgcgacccaatcctggtacaggttaaagccgacgacagtgccgatatcaccacatatcagcccgtacttgacgagctcgcgcaaattgtcgaggggcaggatatgccggatcaggtcatggccaagctgttcaaggtgcgcggttttgccctgcgcaacggcacggttgccgaccagacgacagcgttggcgctgctgcgccaggcgctgaaactggacgccggtgccggtgtgaaaaaagagattgagcgcctcacccgcaccgtgaagaaagccagccagagcgctgatacgcctcaagatgatgctgcagcatcgccgccagcgactgtggtggccacaaaggcacgcaaaccgcgcagcacgacgcgtaaggcgccagccaaaaaagccaagaccggtaaggccgtgaccaaaaacgccaagccggcaccgaccgaataa

SEQ ID NO: 453861 - DNA, 1050 bp, Serratia marcescens
atggataacaatacccgcgcactgtttgatcagtacatcgcccggcaggcacagctcaacggcgtatcgcctgccgctatcgctgcaaaatttgcagtatcgccgacggcgcagcagaaaatggaagccgcagcccaagaaagcgactcgctgctgagcaaaatcaacgtgttcggcgtcaatcagcagatcggccagaaagtgctgatcggcagcaaaggcccgctggccggcgtcaacaacagcaccaccacccggcgcaaccctggcgataacagcaagatggagccgttcgattacatgtgccgcaaggtcaactacgactacggcattggctacgaacagctggacgcctgggcgcacatgcctaacttccagccgctgatcagcgcggccatggcgcgacaaatgtcgcttgaccgcatcatgatcggctttaacggtgttaaatacgccgatccgtccgaccgcgcagccaacccgctgctgcaggattgcggtatcggctggctggaaaaaatccgcaaagaagccccgcatcgcgtgatttctgacgtgaccgtgaccgctcgcgacgatgaaaacaagatcatcgccaaaggcacctacggcaacctgacctccgcggtttatgatgccaaaaacagcctgatggacgaatggcacaagcgtaacccggacaacgtcgtgatcctggctggcgacctgctgacaaccagcaatttcccatccatcaacgcgatgagccagaccaacccgaacaccgaaatgctggccggtcagctgatcgttgcgcaggagcgcgtagggaacatgccgacctttatcgcgccgttcttcccggtaaacggtgtcttgatcacgccgttcaagaacctgtcgctgtattaccagcgcggcagcctgcgccgcaccatcaaggaagagccggaatataaccgcgtcgcgacctatcaatcctccaacgatgatttcgtgatcgaggactacggcaacgtcgcgtttatcgatggcatcaccttcgcgcaagccgcggaaacgggcgagtaa

SEQ ID NO: 453862 - DNA, 834 bp, Serratia marcescens
atggcaagcacagcgagtaatcgtaaaaagtttcgcgtcgccgtttccggaaacaccgtagatggtcgcgaaattcaaccgcagcacctccgcgatgcggcagcaaactacaaccctgacgtctatggggcacgcgtcaacatcgagcattacctctcgccatacccgggcagcgatttcggcgccatgggtgacgtggccgccctcagtacggaagacattaccgaagggccgctggccgggcgcactgcgttgtatgcggagattgaagcctccgagcgcatgaagcagatgaccgacaaagggcaaaaagtctattccagcattgaattgcacccgcagtttgcgctgaacggcaaggcgtacatggtcggtctggccatgaccgatacgccagccagtctcggcaccgaacgtctgcagttcgccgcacaacagcgtgcgcaggtgatggccttcaacaaacaggacgctgaggcgcccatgtttaccgaagccgtcgaggcagagcttattgagctgcacgatcagcgcagcgatgaagggaagcagtggtttaaccgcgtcatggggatccttgggaaaggtaagaagacggacgatcagcgctttacccaggtgcatgaagcggtggaagccgtggcgcaatcccaggccgatatgcaggaccaattcagccgtaccgaacaggcgcaggaaagtaaccagcaggccattaccaagctgactgccgacctcgccgcgctgcagcagaaggtcgccggcaccgacggcaacttcagccaccgaccgcctgccagcgggggtaacaacgcgcagatggccgattactga

SEQ ID NO: 453863 - DNA, 270 bp, Serratia marcescens
atgcttaaacaaaagattgtccgggcgtttgtagatttcaccgactcttggaacaaagagcttcataacgccattgaagataaagttctacaagcgcatcgggaatactacccaccgagggaggatcaaagcacagaggaaagggataatcgctttaaacaaatgcgcgagttctactatgcgcgaatgatgaacaccgccgtgatgctgttggcgacgatttctattgtgattgctttgatagctctggttgtttccattttttcctaa

SEQ ID NO: 453864 - DNA, 363 bp, Serratia marcescens
atggcacatgaaatttgccggcactggataccggaagaagaacatcattctgatcgcgctaaaaagttggccggcattaccagccgccttcagaacgtcatgctaacagagaatatcaccgccgatgagttggtaggttgcgctcgcgttgtgcgcagaaatcacgcgagctttaaggcaatggaaaagaacgaacgaccactcgcggcttccccatcagagaaaagcgattacttctgtagcttctgcggcaaaggcaacaacgaagtaaacaagatggttaccgcgccaaaggtatatatctgcaatgaatgcgtggagctttgcgaagatattattactggcttcagagacggttattaa

SEQ ID NO: 453865 - DNA, 2478 bp, Serratia marcescens
atgagtaaatcctataaaggtcgccattcaccaaccccgccgccgccctatccgggcagcggcgttgtcgtgtctgattatcctcacgaatggaataaaccaaaagccgctatccatgttgataaatctcccgctgttgatctcgttgagctggctcaagagcaggagttttacgcctgggttaaacggacgctggagccattgccgcgttttattcgccgccggctaagcgaccggatagacagcattaacacgaaaaaaggccggcacattgccagcctgaagctgaaagatattattcgtcgtgatctgccgaccatcatgcgcgtcagcgaaaggtatgccatcaatctcacccatgacgagataatcccgctgattgcgaaccttgggccattctcccgcgagttcccgcaactgaatgaaatgatcctgcgctttaaccaactaccggattacaccgatgaagatctcgatctgctggcgaaggatatcgccatttatattaccggggcgctgagcgtagtaaacgacgtgctgggcgatgccagcgatcgagaggctgccggcaaattttaccgggaagcggccaagctgacggccatctttaaactggccccgccgttatcatcaaaaaaaacaatcctcatcgacgaggcagtttcagcggtccatcgcatgcgtgatgctgcgtattggcggagaaatttgcgcaagtacgccaggcgctggcgtgagcacctgcacattgctttcggtgatgtgcgccgtggcatttcaccatactgcagcaaacaccacgccgaagcttgggaacagcgccgcaaacgcagccgtgccatcatgagcaagctggaactggaagaccaggatacgggtgaacgtatatcacttatcgagcagatcgataaaagcaatgcgaacccggagaagcgacgtgcagaattaatgactcgcatcggtggtttcgaaaaagtggccatccaggaagagtttgccggcagcttcttcacgcttacagccccatccagctatcacgcctacgcgtataccggtcaccgtaacagtaaatggaacggcgccaacccgcgcgagacacagcaatacttaaaccgggtatggcaacagatcagggccgaactgaaacgccaggaaatccctgttttcggtctacgcgttgctgagtcccaccatgacggaaccccacattggcacggcttactgtttaccctgccagagcacacggcggagctcgaagagatcatgcgggattacgccacacgcgccaatcctgaagaactccaaggaaagcacggacagctgccacgctttgagttgaaaccgattgatgaaagcatcggtagcgccacgggctacatcgttaagtacatcagtaaaaatatcgatggctatgcgcttgatggacagactgatgacgaaagcgggcgcccgctgaaagaaaccgccaagcatgccaccgcctgggcgtcgtgctggggcattcgccaatttcagtttataggcggcgcccctgtatccgtatggcgcgagctgcgccgcatgaaaaatcaggagctggctgatcaaatcaatccgctgtttggcgagcttcaccgcgccgcccacaagggggcatggaacgaatacaccctgctccagggcggcccattcgttctgcgtaaaaatctgcaggtgcgcacctattaccaggcaaaagtagaacccaacgattacggcgagtatcagaccgtgatcaaggggctgatcatgccatccaccggcattgagccggttgaaacccgcacgcgtaatttccgcattgtcagaataaaaccggaacctgccaccgacactgatcagggtgttgccgttgacctggcccttgaccttcagggcgcgtctgcgcccccttggactcgtgtcaataactgtaccgagcgcgaaaagcgagcgatctctgagggtgttccaccgccaaataatgagccggagcagcttgaaatcggacaaaaaacagccgggcaacgaaaacgccttgctgacagcctcaaaaaccacaaaccagcgcggaaaaaatccccagctgaagagtttgaggcgctggcgtatgccattacggccggcgagtgcagtgaggcagaacgccagcgcgccgaaagctacctgcgtgcagcaaaagcaatcagggaaaacgaggaaaaactttcgccactggttatcgacgtcgcaaaacacgtgaagcgctgggcgaaaatccgcggtatccacgtcggcgaagctcaggccatgcagctggcacagggcaaaaaagtcacggtactggacactgtttaccgcgccaacactgtgactggtgaattgatcgttgtcggtgtcgataaacaatggagaaaaactatggctcagcaccaaactgcaggcctgttgtcgcgctggaaagcgttggcaaaaaatcgcgtaactaccggcactgcataa

SEQ ID NO: 453866 - DNA, 288 bp, Serratia marcescens
atgaaacgatggagcagcgcagaagataagaccttaaaagaccatgccagcacactgacagcaaaacagatcggccatttgctcggcagaacggcaagagccatcagccagcgtgcggccaagattggagttgagatgaggaagcacggtgacgcataccacggccgaaagtatccagaagcagatattgagacggctcgccagctatacagctcagggatgagtttgaaactagtggcggaaaaaatggagatcccatttgcatcactgaaaaattatttttactaa

SEQ ID NO: 453867 - DNA, 822 bp, Serratia marcescens
atgatccgcactccgcttaaatggctcggtagcaaagctggcattattgacacactgcgccagcacctccccgagggtaagcgcctggttgagccgttcgtcggttccggcgcggtgttccttaacaccgactacgacagctatctgttatgcgatatcaacagcgacctgatcaacttccacaacgtcgccaaagagctgccggaaccactgatccgcgagactcgcaatctgttcagcgaacacggcgacgaactgggctactacactgtccgcgctgacttcaatctgcgctgcgacagtaacttcctctatcgcgccgcgcagttcctttacctgaaccgccacgggttcaacggtgtgtgccgctataacctgagcggcagctttaatgtgccgttcggtcatcgcaaatcgccttacttccctgaagatgagatccgcgcattctcggaaaaagccaaggcgaaaaaagccgtattcctgtgctgcacctttcaagaggcaatcagaatggctcaggccggtgacgtaatttattgcgatccgccgtacatcccggccagtaccaccgccagcttcaccagctatcacaccgacggctttaccagcgaacagcagcagaagctggcgcgcatgttgcgcatcgctgccaaacgaggccgccacgtcgtggcatcaaatagcgaaaccaccgcggcgctggagctgtattccgacttcgatatcaccaccacgaccgcccgccgatctgtcagtgcagcagctgctggacgagctcgcgccggggagattatcgcaacgatgagggcctcagcatga

SEQ ID NO: 453868 - DNA, 561 bp, Serratia marcescens
atgacaccgcaaaagaaagcacagcactggctgaagagtaattttttgatcctggacaccgaaaccaccgggcttgatgacgatgccgaaattgtggaaatcagcattatcgattgccagggcgaggtattggtaaacaccttggttaaaccatcaaggccaatccctgctgaagcaaccgctatccacgggatcaccgatgaaatggttgccagcgcgccaacatggtgcttcaccctgattcacatggttgcccccgccatagcaggccgagaagtggtgatttacaacgctgattatgatgttcgcctgctcaatcagtcctgtaccatgaatcgcctgcctatcccgcagttaggtattaaagcccactgtgcaatgctggtatacgctgagttttacggtcaaaaaagcgatcgtggcgggtataagtggcaaaagctgactgctgcagctgagcaacagggtgttacaagcgaaggagtggcacaccgcgcactcgcggattgcctgacaacgctgagcgtaatacatgctatggctgaaggtggtgccgcatga

SEQ ID NO: 453869 - DNA, 219 bp, Serratia marcescens
atgcctgaccttctcgatgctgcgcaggagcttagcgagattacgctcgccaaccaaatcgccaaagcccgcccgcagcaatgcgggccttccgcacatatctgcgaagcgtgcggcgaccagatcccgtccgcacgccgcgcgctcatccccggcgtaacacgttgtgttacctgccaagaaattcacgaagccaaatcacgccatatcaaggggtaa

SEQ ID NO: 453870 - DNA, 708 bp, Serratia marcescens
atgaataataaagcacaggcagttaataacattcatcgcgcgatcggtttcatcgaagcgacccaggaaacagacgctgcccgtcgtgtaattatcgggctgcatgcatcagtagaaagtattaaaagtgacttttcacatgaagagtgtcacgcctactggttaacgctgcttaataccctgcacgcgattgaccctgactgggagcaaaaatataagagtggtgatgtttgtggcaacgcctgccaattcattactgacctggccaaagaatttaaagcggtcagcatcaagttgggcgagatgaaagatttttgcgtcggtgtcgattttgctgcattcaccaacgaccaaactgcgcgtttgatctctagcatccagccaggctgtagccatcatgtttgtgagggcgtctatttccgtgacctgctgcacagcgtcgccgttgcacaggtaaaagaagaactggagaaggcagagaagaaacaccccgcatggcctaccgacactgtacacgcaaccgcaattctcggtgaagaagctggcgaactgattaaggccgcaatcgactaccactaccacggtggatcattcgaagccgtccgcatcgaggccgcacaagtcggcgctatggccatccgcgtactatgcggcctgccttacgccaagcgccagaatgaaaccagcgaggcaacggggaatgcctga

SEQ ID NO: 453871 - DNA, 168 bp, Serratia marcescens
atgctgaagcaattccgccttggccgtcgcgtgttcacccgcatcaagcctcacggctatctgaaaatcaatatcagccaccgctggcgcctgttgagtaagaacggaggcaaggactggcggctaatgactcatgaaacctacaacgtggagaacaaaaaacgatga

SEQ ID NO: 453872 - DNA, 186 bp, Serratia marcescens
atgcatgacgatgaattgcacgctgcatttataaaagcccgccgctctgaacggctccagctgcttgacctgctgagcagtaagctcgatcgcctggctgccagcagcgcaaccaaagaacaggttatcagcacgctgaaagactggatcgacaaccatcaaagcacgggcggaggtgacaagtga

SEQ ID NO: 453873 - DNA, 261 bp, Serratia marcescens
atgaaacaggcgtataaaattctcattgaagagctgctgcagcagtaccacaccaaagcaaaaaatttgcagcaagcatcagcggttgccgatgccgttcgacaggtatcaatgaacgattacgcgttccgactgagcattggcctgactggattattgagcactgcggaggccgccggcgatggcgccactgcgttagttatcgatcacctaatatcacgttgtagtaacggggatatcccttcaattaattctaattag

SEQ ID NO: 453874 - DNA, 204 bp, Serratia marcescens
atgcaacacaacgccctgatacagctatcaaagcacacgtttgtttaccgcgggttcactatccagaagtgtccacgccatagcgcgaccgaccgcacggcgtatcagttgatgagcaacggggattatttcggtcgggatttcgcgctggcggaagccatgcgcaccatagacacaatgctcaacagccgggggaaggcatga

SEQ ID NO: 453875 - DNA, 204 bp, Serratia marcescens
atgggaaacgtaactatcaatatttctgttcaaacagcctacgtttcgctggaaagatattcagagctggcgaacattccgattggcacctgccgccggatggtcagagacggacgcatcattatccgcccgaaaaagaacgcgaaagacaaggttgaggtaaacctcgtcgcgatgctgaaagacgcaatcgacaatagctga

SEQ ID NO: 453876 - DNA, 627 bp, Serratia marcescens
atgcttgagctggagcgactttcgcgtgtggcaatggcgtccagttcagcacgctctacctctgatagacgcattggaaccgggtttttggcagcaatcccacgaggcaaacgtgagcgccgttcatggagttcttgtttcatagtggtatattgtgatctgctaagtgtctgtgacttacattctggtatcaaaataaataccagtcaagagatttgtatgaaaatagatataggctcgcgtttgcgagaggaaagagagcgcctggggctgagccaggcagcaatgggggaaattggcggtgtcaagaaattggcccagctcaagtacgagaaaggggaccatagccctgacgctgcctatctggctgcgttgtccaaatttggtttggatgctctgtatgttgtgactggagttcgctcaacagaaaacttaagcgatgacgaacaagagctacttggttatttcaggaaagcacctcttgcagttaaagctgcagcccttgctgctctgacggcgggaacttctgctgcgggcaacaatcaatcggattcgaaggcaatcaatgtaacaggtggtattggccagcgtattgcgggccgtgactacaacgagcataaaaaatga

SEQ ID NO: 453877 - DNA, 657 bp, Serratia marcescens
atgggtaatgactctggtggcagggacaaccggattgctgggcgtgatttcaatgagaagcatgtaacggcggagcattttgtcgacgggcatcaagtcaatattgcctttcctgctgttgagaaagatacgcggccattagttcctgcacagcgtaaggagctaaatcagcttgtttcatccgtagccgaggccggaaatgaagaagcctacgaggtatggcggcgcgttcatgctgaaattggtgttgagagcattgaaaaaatgacggtcagccaatatcagccagcctgcagttaccttcaggcgcaaatggatatgatccgtgaaaaagctcataaaaacgaattgatatctgccttgctgaagatcagtacaaacagtgatctccgtttggaacttgccaaatactgccgaaaaaactttggtaccagccatctaaagacgcttaagcgctctgatctgcagcgggctctcttgtggctggatgatgaatgcatcagagaaggctctcaatcctctgcagatatacccctccaatcttcgccatcaatgccatggtggcgtttggcatgggattatccagtgtttacgggctgtgcttttcttgctggttttgctgtgcaggccattattgattttattgttttgttctaa

SEQ ID NO: 453878 - DNA, 402 bp, Serratia marcescens
atggttggtattaaaaaaagaactcagtttttttatatggttgtttccgctctattactgattttttctacaaatagctttgctaaaaattggtatgaaggagggactcttagtaatgccaatgccctcacttggcagaaagctacatatgaaaataaacttgctacatgctctgacttcattgctactttgtatagcaaagataagttatctcctaccattaggcgtaatttgaaaaatattgatgatttcaaaccgtatgccgaagagttagtaaaacagcttgatgctgcatttgaaccggatcccaaccctacgaataacaagaaaatgtttaccaatcaaaaggtagcttcatcagctgtcatgattatgatcatgagtggctgggtaaaaaaataa

SEQ ID NO: 453879 - DNA, 1005 bp, Serratia marcescens
atgaccgttcgtaagttacccaacgggaagtggctgtgtgagtgttatccctatggagcatccggcaaacgcatccgcgtgacgcgagcgaccaaaggagaggcattatcgtacgaacgacgcattatgaatagcgtcaatagtgccggtgttcaaggcagcacccagcgcctctctgatctggtttcccgttggtatgaaatgcacggtaaatccctgacgtcgggggaagagcggaaaaacaagctcgaggctatttgtgatcgcctcgaagatccctatgtcgaccttttcgataaaaacatgtttgcggtctaccgcgaacgccggctgcgtggcgagtggaacccgaagggcaagaagcagctcaaagaggccacggttaaccgtgaatattcctacctgcacgctgttttttctgagctgaagcgcctgggggaatgggagcgagacaaccccctggatggtattcgccagtttagagagggcgaacaggagctggcatttctgtatgacgatgaaatcagaaggctgctcgatgcctgtgatgcgtcagcaaataaagatctcggaaaggttgtgcgtgtttgtctggccactggcgcccgctggggtgaggctcaagggttgaagcagtctcaggttatgccgggcagagtgacgttcacacagacgaaaagcaaaaagaaccggactatccctatctcgtcgaagttgcaggcgctgctgccgaagaaacggggcaatctgttctcgccgtgttacgaagccttcgagcatgcgttaaagcgtgccgatatagagctgcctgcaggccagcgaacgcatgtattacggcacacattcgcaagccatttcatgatgcggggcggcaatattttagtactgcagcaaatactggggcacagctctatcacgatgactatgcgatatgcgcattttgcacctgaacacttggatgcggctgtatccctaaaccctttcgacagcattcaaaaggactga

SEQ ID NO: 453880 - DNA, 639 bp, Serratia marcescens
atgcaagctagcgaattagctaaggcagtatatgaaggggtgataaccatccctgttgatttttatttcggcctggagagaaccctggaagatctaaatctgaccgcaggtgggtttatctaccagagtagaaatagggcggaggatgatcgctttattaaggggattatccaagtagccaaaaatagtaacgtgttgtttgacatggttaagtttattgtcggtgatgttattgagaagctgcctgaaccggccgtaaaaaagatagcagaaggggtatccctcactggatacactctcgtatcaaagagtcaggctcaagctgctattgcctactatattgcaacgcgtgtagttcgcggcactttgtcgccagcccttatcaaatttggaaggctgaacacgctggggctgatctcggtggttatgatacagggtactgttgctcgggcagcccgctcttcgcgtaaactgctgaatgagaaccccaagttgtactatgcgctccgggcgcgtaattgggacatgctttatttcttggttgaagacgcgctgagcaagtttttgattctcgaccgcctctactacaaagaccgcgctgccttcgagagggttgtaaatgaaatcgaaaaactctaa

SEQ ID NO: 453881 - DNA, 207 bp, Serratia marcescens
atggctagcctgacaaacaaacttgtgtcaaaaacatttgttggggtggctaacgccattggtgctatggcgttagccattgctgggtattttgcgttcgtctccgactctgagcacaaatacaccttggcttttctatcttgcgtaggacttgtgcctgcttatttagtataccgactggcaatgcgtttttatgatggtgtgtag

SEQ ID NO: 453882 - DNA, 1452 bp, Serratia marcescens
atgacgtatcgtttacttattctctggctgctgggctacgcggcggcgtggacgctgctcagcgcgcagcttgaccctacgctgccttacgacgccgttgaagcgctgaactggagcctgaacgccgaatggggctcgccgaagaacccctggctggtgggcgcggcgatgcgcccggcgatctggctgccgggcatgccgctgaacgtttactggtacgccgggcactttgcggcgatcgccatcggcatgctgggcgtgtggctgctggcgcggcggctgagcggcagccgctctctggcctggctggcgctgctgacgctcaacctgtccggcattatcaatttcgacattatcccctacaacgacaactatctgctggtgatgctgtggccgtggatgctgctgttctttcatctggcgatcgagcgctccgccaactggtggccggcctttgccgtggccgccgggctggcgatgatggcgaaatactccaccttcgcctttgtctattttattgcgctgtcgacgctgctggtgccgcaaatccgccgctgttaccgccagccggtgttttatctggcggtggcgatctggctggcgctggtgctgccgaatgtggtctggctctggcagcatgatttcgccgcctttaaatgggtgggatcgcagacgcgcatgcagctgaacttcggcattctgcgcgcgctgctgctggtgttttacccgctgctggcgctgtggtggctgctgcgacgcagcggcgcgacgctgggctggccgggcgcgctgccgacgcgggtgttgctgtgggtgtgcctgctgccgctggggctgattgccgtctggttctccttccatgccggcggccggctgaccgaatggctgcagccgttttttatcgtggcgccggcgctgctggtcggctgcgtgcgccggccgccgtcgcgctcactgcggacggcgacgatagcgctgctgtgcgccgcgctggcggtgtacctgggctacgccgcggtgatgttgggcaacgtgcgcaacgccgggcagaagatggtgggcgtcaaggcgttcagcgccgcggtagaacagcgctggcggcagcgctacggcgtcgatctgcgctacgtcggcggcggctatttgtcgcagtggatgacggtgtatgccgcttcccgtccgcaggtgattgcgcgctggtccaacgcccggaagccgaatatctacaatgctcgcctggacgatgcgcagctggcgcggcacggcgtggcgctgttcggccggctgggagagacgtgtgcgcagagccattttgacgatgcgctgacgcagtggccgtcgctgcacattgactggcggcaggagctgacgttccaggccgacccgcagacgccgcgccagacgctgtgcgtaacctttgtccggccgaacggcggtcagcggcgcccataa

SEQ ID NO: 453883 - DNA, 597 bp, Serratia marcescens
atgaagagatctaagcacgccggcagcgcaacccacaccgccaggggcttcttccggagcttattattctctcgtccttacgttctcgggctgctcctgctgatgtcatttaccggccggagcgccaccgaaccggcagagcgggtgcagtcgcgcacccaggccgtcaccaccgtggtgttgggtattatcagctatacccgctggcccgcgccgcccaatcccgtccgtttatgcgtcaccgcgccaacgcactacgccgacggtctgttcagcccgctgctgctgcaggccccgcatccgattaaaacgcagcgtctgccgctcgacagcgaccagttggcgcagcagtgcgacgtgatttatctcggcgaagtcagcaatgtgcagcgccaggcgctgatcccgcgcatcgccggccattcggtgctcgtcatcagcgagaacgacgcggagtgcagcgcgggcagcgcgttttgtctgcagccgcgcggcgaacaggtcagctttaaagtcaacctggatgcgctggcgcgcagcggcgtgcgcgtgcaccctaacgtcctgcagctggcgcgtaagctggagtcgtcatga

SEQ ID NO: 453884 - DNA, 531 bp, Serratia marcescens
atgtaccacgttgttgctgcaactaccaacccggcaaagatcaaggctattcaacgggcctttgacgacacctacggcgccggccaatgccacatagaacccgtcgacgtcgccagcggcgtctccgtgcaacccatcggcaatactgaaacccgcaccggcgcgcgccaacgcgtgatggaagcgcgtcaggcacgcccggaggccgacttttgggtcggggtggaagcgggaattgaagacgcgatgaccttcgcctggataactattgaaaatccgcagggacgcggcgaatcgcgctccgccagcctgatgctgccggcggcggtgctgcaggggatccgcgccgggcgcgaactgggcagcgagatggcggccatcaccggcaacgccgacatcaagcgccagggcggcgccatcgccatcttcacccacgggcggctgagccgcaccagcgtttaccatcaggcgctgctgctggcgctggcgccgttcatcaacccgatttatcagcatccccaaccacgctaa

SEQ ID NO: 453885 - DNA, 1425 bp, Serratia marcescens
atgagattgatttcactatcaacggaagagctcgaaccttttcaattttcccgtatttttcatcccagttcggcacgttatgagttggagtcaaaatatctgttcggggcgtcatcgatgccctcgatcaatcgtcgctatccggtcagccgccgtgagatttccggcgtgggtgtgtcgcagttccgggaagaccggcagataaaaaatcaggtgctggccgagctggaatcggggcagctgcttgccattgatgacaactgttttggctggtcaccggcgcggcacctgttctttatcgaccaagccggccgcctggtgcagtacccggccattttgccgcctctctacccgacggagcggataattcagcgctatgaagcgatggttgcccgctatcacgtccgtccgccggcaacggtactgccccccagctaccggccgaaacagaaatcgccggcagtcgccgcggcggccaccgcggtggcggtgcgccgggatccgctggccgcgatgcgggatatgagcaagcgcgaacgctggcaggcccggcaaaatctgatcggccgcgggcagcgcagcatctaccccgatgcgcgcatcgccgcgacgcggctgggtgagaacaatatcgccgttgagaaggccaagctggcgcaaaatgtttacggcattgacgggcgaccgattaacgcgttggaaacgatgccgaacgtgcccgaagggtggcgcgatattagtaataataaaaatgctttagaccggctggggttaaagccaggaatgttgtatgacaaggagaaaatgccagacttttttgccagagtttatgcgccagatccgacggtgttcggtaacgctatggaaccaaccgtagtattccggggaacccggatggaacaaatggttgattggaaaaacaacctggggcaaggagctagtgtccattctgagtattatgagaaatcggtcactattggcaataagttgatggatttcccaggccaggtagctattgccgggcattcgttaggtggcggccttgcctctgcggcggccgttgccagtggtaagcccgcctggacgtttaatgccgcaggcctcaatgccggcacggtagagaaatatggcggcacggccatcggtgacggttcaaaaattgccgcctaccgggtgcatggcgaggtattaacgaagctgcaggaattccacctcttggatgatcttcagagtgtgaactacgatattccgctgctaatggcgaagcggcagctctctgctctattaccgagcgcggcgggcgccgcgaaatggctgccgggcggtgagggcagcgccattgataagcacggtatgcagcaggtgatcgacagcctggaggagcagaaagaggcggatatgaccaccattactaacaggttataa

SEQ ID NO: 453886 - DNA, 681 bp, Serratia marcescens
atgaaaaaaattgtaccggaagaatactttaccggccaacagctggttttggccaaggctattgaggctggcgacctggagagggtaaaacagctggcgccggaaacggatctgaatacccccggcgaacaggacttaaccccgctgtttttcgccctcaacgaggcgatgtataacgataatccggccaatcgactggaaattattacggcgctggtcagtgctggtgcggaccctctaccgaagggaagagacaagcctgctgtatggatggccaagggcgataaggatatctggcttaaggcaatgctggatggtggtctatctccagatgctagaaatacggacaatgatgatcccataatctatgaaactatgtatgccaagacgaccgatacgttggcattattagttgcgcgtggtgccgatgttgatgcgcgagattctttaggtgaaacaccgttaatggcagctttttacagcaatagctttgagcacgctaattatttgttggaccacggtgctgatcctaacccggtaaataagaaggggtgggtatttgcttcactggtgcaaaagcgccttaataaaagcaagccagatactgaataccaccagaagtgtcagcagctgcgcgacaagatgatcgcgctgggggtgaagtggccgccggagacctaa

SEQ ID NO: 453887 - DNA, 1524 bp, Serratia marcescens
atgcatgatatttccgttgtggagatcggcagccagcccgtgcgctggcaggatgtcgtcgccgtcgcccgcgatggcgcacggctggccctcaccgagaacgcctggcggcggatcgaaaacgctcaggccatcgtgacgcatatcgtcgccggtgaacagcgcgcctacggcgtcaacaccgggcttggcgccttatgcaatcaggcgctgcacggcgaacagctggcgcaactgtcgcgcaacacgctgatgagccatgcctgcggcgtcggcgaaccgctcagcgtgccgcagacgcgggcgattatctgctgcgccatcgtcaactacagccacggcaagtcggggattcaacgtcacgtcgtggagacgctgctggcgttgcttaaccggggcattacgccgcaggtgccttcacaaggctccgtcggctacctgacgcatatggcgcatgtcggcgtaagcttactgggtatgggacaggtcagctaccgcgggcagctcgtctccgccgcccaggcattcgccgccgaagggctcgagccgccgtcgctcggcgccaaagacgggctgtgtctggtgaacggcacgccatgtatgaccggtctggcctgcctggcgctcgccgatgcctggcggctggcgcgctgggccgacgtgctgggcgccatgagcttcgaggcgctgcgcggacagatcgccgccttcgacgccgagatcctggcgctcaaggctcaccccggcatgcaacaggtcggcggcaacctgcgcgcactgctggcgaacagtgagctgattgccgccagcgaaggcatccgcacgcaagacgcgctaagcctgcgcgccataccgcaagtgcacggcgcctgccgcgatcagctggcgcacgccacgcaacagattgaatgcgaactgaacggcgctaccgataacccgctgctgctcggcacgccggaatgctaccgcgtcgtatcgcaggccaacccccatggcgagtccgtggcgatggccgccgatctgctggccatcgccatcgccgaactgggcggtattgcggaacggcgcatcgacaggctggtcaatccgctggtcagcggcctgccggcattcttagtcagcgaacccggcgtcaattccggcatgatgatcgcgcaatacgtcgccgcctcgctctgtgcgcagaaccgccagctggcccagccctgcagcgtggataattacgtcacctcggcattgcaggaggatcacctcagccttggcaccagcgccgcgttacgcgtgcatcagatgctggcgaactgccagcaggttctggccattgaatacctgctggcggcccaggcgtttgaattcctaaccccttgccgcttcggcgacgggacggatcgcgcctggcgctatctgcggcaaagcatcgccccgtatcaccaggaccgctggctcgcgccggatatcgccctcagcgcggcgttaatcgctgatgaacgcgcactggccgagattgctcccaccttaacctga

SEQ ID NO: 453888 - DNA, 864 bp, Serratia marcescens
atgatgatgaacaaaatcgatatcaaaaacgtctacaagatcttcggccataagaccgcagcggcgctggcgctgagccggcaggggaaaaccaagcaggaagtgcaggcggaaaccggctgcgtgatcggcgtgcacgatctttccctgtcgatcaaagccggtgagatattcgtcatcatgggactatccggttctggaaaatccaccttggtgcgccatatcaaccggctgatcgaacccaccagcggagaaattctgatcgacggtgaagacattctgcgttacgacgaaaaacagctcgagcattttcgtcgtcatcaaatcagcatggtctttcaaagtttcggcctgctgccgcataaaacggtgctggaaaacgtcagctatggcctgaaaatccgcggcggcaaaaaagaggcctatcaggatcgcgcccgccactggattgataccgtcgggttagcgggatacgagaagtcctatccgcatcagctgtccggcggtatgcgtcagcgcgtcggtctggcgcgcgccttggcgaccgataccgatattatcctgctggatgaggccttcagcgcgctcgacccgctgattcgcgccgaaatgcaggatcagctgctggccctgcaaaaagatctgcacaagacgctggtctttatcacccacgatctggacgaggcggtgcgcatcggcaaccgcatcgccatcctgaaagacggccgcctgatccaggtcggcacgccgcaggaaatcctgagtaagccggcggacgaatacgtcaatcgcttcgtccagcgccggctggccctggatgaaaatatgcacaaaccccgtccgcatatcatggccagcgcctga

SEQ ID NO: 453889 - DNA, 981 bp, Serratia marcescens
atgcaaacaacaacatcggggttggtgaaaacactgcggctaccgcttatcacacttggactggcactggccagcggcagcgccaacgccgccggctggtgcgaaaccggtaaaccggtcaagttcgccggtctgaactgggaaagcggcatgctcctgaccgacatcatgcaatacgtactgcaaaaaggttacgactgtaaaaccgacaccctgccgggcaactcgatcacgatggaacaggcggtcagcacggatgatattcaggtgtttgccgaagagtggatcggccgcagcgaggtctggaaaaaggccgaagcggccggcaaggtggtcagcgtcggcgctcccatcgtcggcgctgaagaaggctggtacgttccgcgctatgtgatcgcaggcgatgccaagcgcggtatcaaaccggcggcgccgaacctgaaaagtattgcggatttgacccaatacgcctcactgttccgcgatcaggaggaacccgataaaggtcgtttctataactgtcccgccggctggacctgcgaactggacaacaccgccatcctgaaaaaattcaagctggacgacaagttcaccaatttccgccccggcaccggcccggcgctggatacggcgattttatccggctaccgccgcggcgaacccattctgttctactactggtcgccaacgccgatgatgggccagctcgatctggtcaaactggaggagccaggcgcggataagcaaattcacatcaaagtcggcctgtctcaggtcttcaatcagcaagcgccggaactggttacggtgttgagcaaggtaaacctgccgctggatctgttgaatcagaatctggcgctgatgaaacaaaagcgcatcagctcagaaaaactggcgcaggcgttcttcaaacagcatccggaaatttggcaaaagtgggtaagcgacgacgccgcgaagaaaattcaggcgtccttgtaa

SEQ ID NO: 453890 - DNA, 423 bp, Serratia marcescens
atgatgctggataaactggacaaccggctgggcgtcgttgagcaacagattgagcgcatggaccaacgtgctgaacggatggagcagcgcgtggaacagatggatctgcgtgtcgaacggatggagcagcacgttgagcgaatggatctgcgcattgaggggatggatcggcgtattgaaggcgtggaaaaacgcgttgaacgggtggaggtggacgtcaaccaggtcaaactggatttggcggcgctgaacatgcgttcgctggagtttgtcaccaagggcgatctgcataaggaggtggctctgttgcaccgggaaattgggctggtgaataaagaagtcgtcagccaaaccaagtggatggtcagctgcatattcggcgttgccgcactgtgcatgaccgccgccaagctgtggttctga

SEQ ID NO: 453891 - DNA, 372 bp, Serratia marcescens
atgcaagttaaaaaaacgctgctcgccctggggttactgctgcctatggcggcgatggctatgccgaaaggctttgtcgatcccaccaccttcaaaggcagcgaggcggaaaaacagtcggcggtcaactacatcaaagccagaacgcaaaaagatatgaaaaccatcggggttgatagcccggccacattacgcatgatggaacagagcaatctggacgcttttaaacagctgacggcggctaccgataagaaactgctgaaaaaagtcatcaagacgtattgcggtcagatcgatatgtgcacctatcaaaacctgaagatgatgtacgaccgcgatcttgaggccagcaagcaggacttaaactggtaa

SEQ ID NO: 453892 - DNA, 2058 bp, Serratia marcescens
atgagtaaccaacaggctgccgacgatattattctcaacggcattacgctaaaagcagccaaccgcgatgtcattctgtcgaccaagcgggttcactatgcgcaaaaacagctcgcacagctgaaaaagttggcggcgctgaagcgccaggctgacgaggttcaacaacagttaaatcacaaccgggcggcgcgcgcatcgcagcccgccaccatatcctctatggaggatatcaaaactggtcagcaattaatcttcgatgccgtcatccaacaggcgcggagcaaaatactgtccttccagcagggccggctgagcaaaaaactcggaaaaaaaggtgtcaacaccgcgcaactggatgaagccacgcaacagcaaagtaagcgcctgaattgggagcaaatgttgctcggggcgaacaaatccatacaaagcgaccaacgtcagcgcagtcgtgcacaagtctttgttaaccaggaccgccgtcaggggcgtattgatgcgctgggcaaatttaccgaacccgcagccgcagtcagcaatacgctgttcagcggcggcaagcagctatttacgcccggcgtgcagtttgagcagcagctttctgctctgcaggcacagctgggattggcgcaaaacgatccacacttgcaggcgctgcaacagcaggccagccaacgacaaaacggcgccgatacgccagccgatatacagcaggcacaggcggcgctggcaaacagcggctatgacgccaacgcagtgctggccgccgcgccggccgcattacgtttagcccaggcaagcggcagcagcattgacgaggcggtaaaagcgctcaccggcgtacagcaggccttcaaactgccggtcgatcaggccaataacatcgccgacgttatggccaaagccagcaacagctatgcgctccctctgacggacctgaacaaacagctggtctcggcagcgcccgacgcgctcagccggggaacaggcctggaacaaacggcggcgcaattggctccggccggtaaacagttaggcaatgttgccggcgccgctcaggcgatagtgacggtacggggcgacaacctggacggcgatatacaaaaactgttcgccagctgggatcgcatccgcattgatctgttcggcggacagaacagcgcgttgcgggagctaacgcaaacggcgaccaagtggctggatacgctgcagcaatgggtaaccaataacccggaactgaccgcaacgctgatcaccgttgccggcgctatagccgtactgcttggcggccttgccggcatcggcacatttattgttccggccctcagcgccatcaatatgctgatgagcggcgccgcactgctcggcggtattttcagcggtgtcggcagcgccatcgccgccgcatttgccgcgcttggcctccccattgttgcggtcatcgccgctgtcatcgcgggcgcggcggtcatttataaatattgggagccaatttccgcatttattggcggcattatcgacggtgttcttgaagcactggcgccgtttaaaagcctattcgagccgatcggtgaagtgttcagcttcatcataggaaaaatcaaggagttccttactccggtcaaaatgacgcaagaaggcttaaacaagatttcagacgttgggagaaccatggggaaagccttggctgaagccttaacctacccactatcgctcgtaaagagcgtcagcggttacgtcgtcgggttgctggagaaagtgggtttgcttaagaaggaggaaaaacaggaaaacagcctgccaccgcctgccgatcccgcattgagacacgatacccccattaacgcagtgcgttctccgctaacgacctatcaaccggccataacgcccggcgtcgctgccacggccggcaacagaactgtgaccaataacgtgacgattcataccacgccgggcatggaccgcgaggaaattcataatatctattaccaactcaatcaggagcagcagtgggaaagcgaccgtttttcacaatcccaatttgcccatatttaa

SEQ ID NO: 453893 - DNA, 600 bp, Serratia marcescens
atggctaaagcaaaacttactaaaaaattgatcgcgaccaccgccggggatattaccgtctttaactactctggtgatacacgcgaatatctctcttcatccgtggaatatcttgccgctggcgttggcctgccggcaaactcatgtatcgacgcgccgggagacaaaaaagacggctatgccatctgcagaacggccgacctcttggcctgggaatatctgccggaccaccgcggcgaaacgatctacagcaccctcacccgggagccgcagctcatgaccataatcggtgattacccgcccgacaccacgccggttgccccccgttcgccctatgacaagtggaaagggaagaaatgggttacggacagcgcagcgaagcgcgacggcaatatcgccgcggcagaacagcagcgacaaacgctgctggcacaagccgacgccatcaccgccgactggcgggttgagttgatgctcggtgacctcagcgccggcaataaaacaaaactgtcaaagtggatggcctataaaaaagcggtaaaagccgtcgatgtttcggctgcgccggagatcagctggccggcacagcccaaactgtaa

SEQ ID NO: 453894 - DNA, 1125 bp, Serratia marcescens
atgaataccaaatttattgccatattaaccaatcaaggtgcggccaagctggccaacgccaccgcgctgggtacccaattggagataacccagatggcggtcggtgacggcggcggcacgctgcccacccccaaccctgaacaaacagcgctggtggcggaaaagcgcagggccttactaaactccctcagcgttgatgccaataacagtgcgcaaatcatcgccgaacagataatccccgaaaatgaaggcggctggtggatccgtgaaattggcctgttcgataaagaggatacgttggtggccatcgccaactgcccggaaacctacaaaccccagttgcaagagggcagcggccgtacgcagaccatccgtatggcgctgattgtctccagcagcgatgccgtgacgttaaagatcgaccctgccgtcgttctggcgacgcgtgcctatgtggatgatgaaattcaaaaacatgccaagacccgcaaccatcctgacgccagccttgcggataaggggtttgtgcaactgagtaacgcaacggacagtaccgatgacaccttggcggcaacgccaaaagcgatcaaaacagtgaacgacgacgttgcaaaacgcctgctgagaacggatatgcccgtcggtattccactgccatggccaaccgacacgccgccagcaggctggcttaaatgcaacggcgcaacatttaataaaacgaaatatccgctgctggctcaggcttatcctacattgcaactgcctgacttacgcggggagtttattcgaggttgggatgatggtcgcggcattgatggcgcgcgtttaatgatgtcggctcaagctgcgacagcattacgcaccggtgcaatggattattacggtaatgataataccggcgaaaacggcgctgccggtctcggatttgccagtgaagactcattgtttgcttggcaaccgacagatgcaaaaacaccagccggtacgctacagccagccgagggcaattttagcgataacgctatgattagccagacagataccaaatggatcgctgagggttcgcgctggataacggtacgcccacgcaatatcgcatttaactatatcgtgagggccgcataa

SEQ ID NO: 453895 - DNA, 609 bp, Serratia marcescens
atgagtagccgcctgttgccggtcggctcctcgccgttggaagttgccgcagcgcaggcctgcgccgagctggccgaaacgccgacgccgctgcgccaactgtggaatccggcgacctgcccgctcaatctgctgccctatctggcatgggcattctccgtcgatcactgggatgaaagctggaacgaagagaccaaacgcagcgtcgtctcctccgcgtttttcgttcaccgccataagggcaccatcggcgccattcgccgcgtcgtggagccgctcggttacctgattcgcgtcgcggagtggtggcaatctggtgaaccggcgggaacgtttcgccttgacgtcggcgtgcagaatcaggggattacggacgagatgtaccaagaactggtgcggctgatcgacgatgccaaaccggtcagccgtcatctgatcgggttggcaatcaatttatccgtacacggcccagccaacgtctttgccggctgttatagcggcgatgagctcaccgtttatccctacctgcctgagcttctcagcgttagcggctacagccacataggcggagccatccatattatcgacaacctaagagtaaacgtatga

SEQ ID NO: 453896 - DNA, 465 bp, Serratia marcescens
atgttaaaacccaaccagctgcgtgacgccttgttcaaggcgctaccggccctgcagacccaaccggaaaaactgacgatgcaactggcggacggccgggtcgtcgccacgccgggcccatcgttgtcatttgaataccgctactcgcttaagttgacgctggccggacatgcggccgactgcgatctggtgatggtcaccgtattggcgtggctgcgtagccaccagccggatctgctggctaatgtggaaaaacgcaacaacggctttgcgttcagcctcgacgttacagagaacggccagctcgatattcagctgcagcttaccgagcggattttggtggagcagcgtgaagatgcattgcatatcacgccgctgccggagccgccggagccgcaaaacgtgctgcgttttaccgacgtttatctgcatggggaactcatcagccagttgcaacagccctaa

SEQ ID NO: 453897 - DNA, 414 bp, Serratia marcescens
atgaaccgctggctgctcagcctcggcgcgctgctgttagccctgctcgccgcgtcgcaatggcagaaccagcatctacagcagactctggaacagcagcagcagcgtcttggcgccacgcaggccacgttaacggcacgcgacgcccaaatcagccaactggaacaacagctccaacagcgtgagcgcgctgaactggcgctgcgtcaggcgctgagcggcgctcagggtttaacgctgcaacgtgaacaacgcttacaggggttactcaatgaaaacaagaaactacgcgactggtatcgcactgggctgcctgatgatgttatccggctgcaccagcgtcccgccttcaccaaacccggagattacctacgctggctgtccgaaagtcagcagttgccccattcccggtaa

SEQ ID NO: 453898 - DNA, 219 bp, Serratia marcescens
atggaaaaactcacctcaacgctctcctacctctccgctgccgcactggcatggtttggccgttactcaacggcggatatcaccaccatgctcggcgcagcggtcggcgtaggcaccttcgcggtgaactggtactaccgccataaaagctaccagttacaaaagtcgcttaaaaagaaaattctcaaacggtggaaaaacgatgagcccaactcttaa

SEQ ID NO: 453899 - DNA, 198 bp, Serratia marcescens
gtggaaattatggataaacaacaactaacactgtcacgcatccagttcatcgccgatgtatcacaggctgcacagtgcaccccgtccgagttcctggtcgccatgtcactgatttccgatctggccgcgcaggaactccccgagaacgattatcaaaccgtctactatccggcagaccagcaacaacgctcccgctag

SEQ ID NO: 453900 - DNA, 900 bp, Serratia marcescens
atgcaagctttaattgtgaccggggaaaatatggctgaagatactgtgaatgagcgcgccgccgtcggggccgtgatagaaagaattctgtccgcttacggcatcacgacgcagaaagagttgagtgagattttgggcattgcgccaaataatgtgagcagttggcagcagcgcggcagcgtaccgggctatgtcattatcaattgctcattgaccaccggcgctgatttgtcctggttaatgaccggagagtccaccgcggtgaaaccgaaggccaaacaacaggcggcggttcacggtaaagcgctgtacgagcgcgtgctggcatccggtggtaaaggcgtgctgcgtcgcattttggacgcttatggtttcagcctacagaaagaactgggcgatttactggggatttcgtccggcaccatgagcacctgggtgcgccgcaactatttccctggggatatcgtggtgacctgtgcgttggataccggcgtttccctgcagtggctggctaccggggagggggaaatgctcgaggcgggatcggcgcaggcgaaacaagctgaaggtgcgcgggtactgccgctgtatcgactgatcgccggtcagctgaaagatggcggtgagtgggtggccgaccgaacgttgattccgtccacggctgaacggccggcgtatgtggacggcggccgcctcgcatggctggtggatttgtcggtgacgaatatcgccaacggacgctggctgcttgatatcgacggtaacttggacgtgtacgatattgcccgcttaccgggcaatcagctgcaggtcagcggcaacagcgccgatttccagtgctgcaccgatgcggttaaggcgctggggatggtgtggctgacgctgacgccgcaggcataa

SEQ ID NO: 453901 - DNA, 648 bp, Serratia marcescens
atgaacataagcgcaaaagacctcgcgcaacgtatggccgacgcgttaaatgtggataatggcttcttaactggattcgcccaaggtgctatatcgcttcccatcgatcttggttatttggcatacgacttccttgatactgaaaatcggtcagccaatatggatgatactgaaaggatgatccgcctgattaagtctggtttagccaataaaaagagcttggccaaaattgcgagattggtcgctgatgacttccttgagaaaacagatagcgaacgagtaaagctaattattgaaaaaggttcgggtaagttcctgggtaggttcgtgaccaaccaattacttggtgtcaacctaggtgctttgattgccgaacggtttgttctgcagttcgcagcaagcctttcattggggtcggtgttatcccttggcgcgatgaaatcccgtgcgatttatacgtcacgcgagctgcgctcaagaaacccatggctatatgaccggcttaggagaatgggaaaccttgaccttctttattttttgatggagaagcgcaccaggccgtttgaagatgcgatcgcagtttggcatagcagtaggagtgactttaatcggattgttgaacttttcttccaaaaggtagctaagtga

SEQ ID NO: 453902 - DNA, 189 bp, Serratia marcescens
atgattggaaccctaatcgggtttgttctattggtcagcccttgtggttatgatgcatgcgacgcgctattggcctctgaaacggtttatccgacccgttcggaatgtgtggaggtcaaagaagctgtccagcggcgtctccctgaggtcgtgctgttttgtcaggaagcctatcgatatgaaaactga

SEQ ID NO: 453903 - DNA, 246 bp, Serratia marcescens
atgaaaaaaatcacactatgtctcttggccgcagcgattatcggcacgtcgggatttgccagcgcggcaaaatggtccacggcccccgccgtctcagccgttaaaacccgcctggcatatataacctcaaatgcctcttttgtttactgccattaccagatctacaatataaaaactggctacattcataacacttataatagaatgtatattgccagactattcaaagggtgtcctagccgttaa

SEQ ID NO: 453904 - DNA, 372 bp, Serratia marcescens
atgttaaccccatcgaatatcatgatggcctgcctgttttatatgctgctgcccgctcccgggcatgccgcgagcgtgctgcgcctgaactgcccagagcgggccatgatgaccgttacacgctttaactatggcctgaccacgctagcgtgggccgagcgtcacttccaggtagcggcgggcgtgaagcgcaatcgcacggcggaaggttcgccttttcgggtgatcagcttccgcaatggcgacgacctggtgtaccttcctgaaaagcatctgcatatctttttttatgccgaccacgaaaaccccgtcgtctgcgaagatatagacacctttactacacatgctatcaagcttccgcgctatcgctag

SEQ ID NO: 453905 - DNA, 345 bp, Serratia marcescens
atgccgcgtagcaaaacaacgctgatactcacctgcatctttctctcttccgcactctccgcctgcgccaaagaggaaagcgcccccttcacgcccgaccctcaatgccagttcacccggttaaccggcaaacatatcacggccgttcaactatgtgctgatgagaaaacggggaacacgattaccgtggtcaaagacggacaagcctatgatatcgcgcgtatggcctatacccgcttccagcgcttcaagttcagtactgaccccgacgccttcttcagcaaggtcattgaacccaaccatacggtgacgccttatcagggaagcacgcatccacaaggctga

SEQ ID NO: 453906 - DNA, 765 bp, Serratia marcescens
atgatggctgtcgaccataacggatatatcgccacgtctggcgaggctagttttcaggctgaatttaccggcgtgattgatgacgccgtgcgccagctgacggcgacgctgggcgacgtcctgcacagtatttacgtctatggcagcgttgcgcggggcaaggcaacggtgggacgctcagatctggatctttgcattatcttttatcgtccgctgcagccggcgcaggagagtgcgttggcgtcggtacgttcggagcttgaggcggcgcatcccatggtcagcaagattgatctcgactgtggcattctgccggaggttatggcggcggagaacctgcacagctggggctattggttaaaacaccattgccgctgtgtgtacggtgtggatctggccggtcgtttcccgcgttttaaaccttcacgcgcgattgccgtagcgctgaatggcgattacctcagcgtgttgcacgactatatcgagcgtatccagcagatggatgacgttaatcaacgcaggcgtttgcagcagtcggcggctaaaaagctgattcgcgccacaagtctgtggcggggagaacaagatagagactggccggagacgcttgaagaacatgcgataaagtttatccgccgctatccgcagttaacgggcgagataaattactttctcgcacagggtcaacaaaccgatgcgcggcatcgggagtttattgtgcggctgcacgcgttaatggcgtgcctggaacagcttgaacgctaa

SEQ ID NO: 453907 - DNA, 1203 bp, Serratia marcescens
atgatgtttgatgtgaaaaaagtaaacaacagggaagccttttttatttatttgaacgccgaggatcaattatctaaacatacattagttaacatggtcgagaaggacgcacatatccagggctattcggtcgtacgccgcagttaccgaacgtttagaaaagatcgaatcgtaagaatgttcacgacgcaagccgagttggaagaggctgacctggcgcaggagcaacacgctaacgttacgccggcggtgggctcccgccgtcagccagctgcaaacggcggttgggaaatctgcttcacgggctttgataagcgggaaaacgatgaacttgccgcgctggctgtttcatcccactttaaagttagaagcggtgtgacggcgaagctgacatgcttatgctgcggcgccaatgcaggctggcgcaagatcgaggaggcgaatgccaaaggggccctgattttgagcggtgaccagttccgacattttatcgctaccggggaaattccctataagtcaaaagaaaccgacggcagaccgtctgataataccgcgaccgaacccgataaactgcaggcgttaagagagagcgccgccgccacgtttaatacgctgagatccctgccgcgcagcaatatcttaatcgcgcaattcgtcgacggttatgcggtcggctggcgcttcgccgtgaaatccgtgtttaaagaggcgttggacatcaaacaaaccaccgcggtcttcgatggctataagtatgaaacctggactcagggaaaccgctatgcttttcatcgcggtgatgcgttttacagcgataagctcggctatacggactggccggcatttttaaaacttgaacatgccgctattgtgaaggtcaggttcgagtgttttgccggttatgaaacggtcgcgacgctggatggccttttttccggcgacttcgtgccggaaaacctgattaccgcacccaaggtgtttgagcggctacccctgcgtattgaaagccagtcttacgatcccgggacgctggttatcgatgtgctgcgcccaacctcggaccagaagcgggtggagcgggttgaaacgctgtctttaactcaggatgagtttattgcactgttgcagacgggatattactggaaaaaagagaaagggcatgcgccgatgcggatagatatcttaagcggtaaaaacgtataa

SEQ ID NO: 453908 - DNA, 561 bp, Serratia marcescens
atgatcatcaggccggcgcagtccgccgattaccccgctattctggcgctgcaggcgcaaaacgtgccggagcacctcagcgccgaacagcggcggcaaggatttatcgtctcgacaatggatgaggcccagctggcgcgtatcaatgcggcgctcgggattctggtggcggaagcggaaggagagctggccggctttgtctgcctgacgcaggccaacgtacagcctcgccctgaggtggttgacgccatgctggcgacgctggagccgcagcgctttgacggccggccgattaatcagcagcgctactttctctacggcccggtctgcctggcccaacgctggcgcggtaaaggggtgctgaaacagctgttcgcggcggtcaaggcgcatacgcgcgcatcatacgatctggggattctctttattgacgacgctaacccgcactcgctcgccgcccatcagcaagggctgggcatgacgacggtgacaacgtttagctgccggggcaagcgctattacctgctggcgttcgccacccgcaacgccggctactcataa

SEQ ID NO: 453909 - DNA, 1512 bp, Serratia marcescens
atgacaaaaaataacatcacgcccggttttgagctgaaaaaacgctatgacaactttatcggcggccagtgggtggcgcccagcggcggcgagtattttaccaacctgacgccggtcaccggacagccgctgtgcgaggtggcgagttcggatacgcgggatgtggatctggcgctggatgccgcgcatcaggcaaaaacaggctgggcgaaaacctcggtggcgcagcgtgcggcgttgcttaacgccatcgccgaccggatggaggctaacctgccgctgctggccgcggcggaaagctgggataacggcaaggcgctgcgtgagacccaaggggccgacgtgccgctggcgctggatcacttccgttattttgccgcctgtatccgcgcccaggaagggagcatcagcgatattgaatcggagctggtcgcctaccattaccatgagccgctgggcgtggtcggacagattattccgtggaacttcccgctgctgatggcctgttggaaactggcgccggcgctggcggcgggcaactgcgtggtattgaaaccggccaagctgacgccgctgtccgtgctggtgctgatggagattatccaggatattctgccgccgggggtggtgaacgtggtcaacggctccggggccaagattggcgaatacctggccacttcgccgcggatcgccaaggtggcgttcaccggttcgacggaagtggggcagcagattatgagctatgccgcgcagaacgtgattccggtgacgctggagctgggcggcaagtcgcccaatatcttctttgccgacgtgatggataaagatgacgccttctttgataaggcgctggaagggtttgccctgttcgcctttaatcaggggcaggtctgtacctgcccgagccgcgcgctgattcaggaatccatttacgagcgctttatcgacagggcgctggagcgcgtggcgaagatccggcgcggcagcccgctggatatggcgacgcagatgggggcgcaggtttctgctgatcagctgcaaaccatcatggactacattgaaatcggtaagcgcgagggcgcggaggtgctgattggcggcaaccgcgtcgatctgggcggtgagctgagcaacggctactatctggagccgacggtgttgttcgggcgcaatcatatgcgcgtcttccaggaagagatctttggcccggtgctggcggtaactaccttcaaagatgcggacgaagcgctggccattgccaacgatacgccgtttggcctgggcgccggcgtctggagccgcaacggctcgctggcctataaaatgggccgcggcattcaggccggccgggtctggaccaactgttaccacgcctatccggcccatgccgcctttggcggttataagctgtcgggcatcggccgtgagacgcataaaatgatgctggagcactaccagcaaaccaagtgtctgttggtcagctactccgataaggcgcagggactgttttaa

SEQ ID NO: 453910 - DNA, 399 bp, Serratia marcescens
atgctgccaaaaaatgccgtgctgcgcattgcacggccgaccgatcggttacaggtcattgcggccatgtattgcgatggtctgggctttagccgattgggcgagttttacgatcatcagggatttgacggcgtaatgctgggacatccgcatcatgcttatcatctggaatttacccaccatcgcggcgcaacggtggggcatgcgccaagccgggataacctgctggtgttttacctgccggatgaggcggagtggcaggcccagtgccgtcagatgctgactgcgggctttcaacgggtggccgcctacaatccgtactgggatgtcaacggccagacttttgccgatccggatggttatcacgttgtgctgcagcggcagcagtggcaggcataa

SEQ ID NO: 453911 - DNA, 609 bp, Serratia marcescens
atgaaactactcgtcgtggacgaatgcggttatacccgcctcggtatcgccagctatctggccgacaacgccgccaataccgtaaccggttgtgatacgctcagcgccgcggtgcagcacctgtccagcgataacccctcgcatatcctgctgaacctgacccactactgccggccaaatctagacaatccctggttacagacgctgatcgacagcagtaataacgcggtgctgtttatctacctggatgctccttacccttacggcgaccgaccgatgcgcatcgccgataacgccttcctgttcaataaggctgcattgcccaaagcgctgcgtatcctgcgcgatacgccgcattccttgatggaaaacagcctgcattcgctgttcagcccgcaggagctgacggtcatgaagcactggatggcggaagtgccgaactaccgcatcgcccgtaaactgcagatcagttcgcataccgtttatgtgcataagcggcatatcacggagaagattaacgcccgtaaccggctggagttttattcgctgtacaacatcctgcgatatttttatccgcccgatgcgcccgcagtgcgcatggcgggctga

SEQ ID NO: 453912 - DNA, 3339 bp, Serratia marcescens
atgaaaagaatgttgattaacgcaactcagcaggaagagttgcgtgttgcccttgtagatggacagcggctgtacgatttggatatcgaaagcccgggtcatgagcagaaaaaagcgaacatttacaaaggcaaaatcacccgtattgaaccaagtcttgaagcagcgtttgttgactacggcgcagaacgacatggtttccttcctcttaaagaaatcgcccgcgaatacttccctaacagctattcctcccatggccgccccaacatcaaagatgtgctgcgcgaaggccaggaagtgatcgtacaggttgataaagaagagcgcggcaacaaaggcgccgccctcaccacctttatcagcctggccggcagctatctggtgctgatgccgaacaacccgcgcgccggcggcatttcccgccgcatcgagggcgacgaccgcaccgaactgaaagaagcgctctcctcgctgcaactgcctgacggcatgggcctgatcgtccgcaccgccggcgtcggcaaatccgccgaagcgctgcagtgggacctgtcgttccgcctcaagcattgggaagccatcaagaaagccgccgaaggccgccctgcgccgttcctgattcaccaggaaagcaacgttatcgtgcgcgccttccgcgattacctgcgtcctgatatcggcgaaatcctgatcgataacccgaaaattctcgacctggcgaaagagcacatcgctgcgctgggccgtccggacttcagcagcaaaattaaaatgtacagcggcgaaatcccgctgttcagccactaccagattgagtcgcagatcgaatccgccttccagcgtgaagtgcgcctgccttccggcggctccatcgttatcgacacgaccgaagcgctgaccgcgatcgacatcaactccgcacgcgccacccgcggcggcgatatcgaagagaccgcgttcaacaccaacctggaagcggcggatgaaattgcccgccagctgcgcctccgcgacctcggcggcctgatcgtcatcgattttatcgatatgacgccggtgcgccaccagcgcgaggtggaaaaccgcctgcgtgatgcggtgcgtcaggaccgtgcgcgcattcagatcggccgtatttcccgcttcggcctgctggagatgtcccgccagcgcctcagcccgtcgctgggcgaatccagccaccacgtctgcccgcgctgtaacggcaccggcaccgtgcgcgacaacgaatcgctggcgctgtccatcctgcgtctgattgaagaagaagcgctgaaggaaaacaccaaagaagttcacgccattgtgccggtacaggtcgcctcttacctgctgaacgaaaagcgtgaatccgtcagcgccattgaaaaacgccaggccggcgtgaaagccgtgatcgtgccgaacgatcagatgcaaacgccgcattactcggtactgcgcgtgcgcaaaggcgaagaaacgtcaaccctgagctatctgctgccgaagctgcatgaagaagagatggtgcagccgttggaagaaacgccgatggagcgcaagcgtcctgagcaaccggcgctggcctccttctctctcggcgccgacgcaccgcctccggcggctgaatccgccccggtgaaaaaaccggccgccagccagccgagcgcgccggcagccgccgcagcgcctggcctgctgagccgcttcttcagcggtctgaaatcgctgttcgccggtgaagaaccgcagccggcagtcgaggaaaaaccggctgaaaccgcgaagagcagcagcggcgaaaaccgccgtcaggatcgtcgcagccagcgtcgtcagggttccggccgtaaagaacgcggcgagcgtggtgaacgtagcgagcgcaatgagcgcggcgagcgtaaagaacgcagcgagcgtaaagaacgcggcgaaggccgtgagcgtgacaaccgtgaaggacgcgatcgcgataaccgcgagtcgcgtgacgagcagcgccgcaaccgtcgtaacgccgcgaataatgcgccggcgagcgccgatgcgcccgttgttgatgaagccgctaaagcgcagcgcgaagagcaacagcagcagcgccgcgagcagcgcgcagagcgtcagcgtcgtcgccaggaagagaagcgtcaggcgcagcaagaagtgcagcagttggagaaagccgcagtcgaaccggtagcggccgctgaagaggataaggaagaccgccatcagcagccggcgcagcgtcgtcaacgccgccagctgtcgcagaaggtgcgtatcctgtccgcggaagaagagctgcagcgcgctgcagaagaactgttggcgccaaaagcgccggcggcaaccgctgaggaaagcaaagcgccagcggcggacgacagcatcaagctgctgccggaaaccgtcgccgtgaccggtgaggaagaagcgcaggaaaaccgtaacggtgaaaacggcatgccgcgtcgctcacgtcgttcaccgcgccatctgcgcgtgagcggtcagcgtcgccgtcgttaccgcgacgagcgttacccaacccagtcgccgatgccgctgacggcagcctttgcttcgccggaaatggcctctggcaaggtatggatcggttaccctgtcacaacagctgcgcaaccggttgaagagacagaagttaaatcgccatccgccgacatcgttgagcagcagccggcagcggaaaccgccgccagcgttgccgcgcctgtcatcgccgctgctcaggatgaggttcaggcaccagtcgctgctgcggccgccgccagcgtcgagccggaggaaagcacgccagccgccgctctgccgcaggaagaggtcaaagcgcctcagccggcagccgtagaagcaccggccgacgtcgccagcgatgcagaacctgtcgctgaagccgctccgtctcagcctgaagagcagcctgctgcgcctgtcgccgttgcgccggcagccgacaacgctgttactgaagaacaagcggtgacagaacaggccgttgaggaaccgaccattgcggcaccagccgaagcggtcgtcaccgagcctgctccgcagccggtaagcgatgagacggcggcaacccctgcgccagccatcgtggcccagccggcagagacgcgctacaagcacatcgccagcgcgccgatgaccaaagcgccggcaccggcttaccagccggaagcgccgaagcacagcgactggcagcgcccggcgtttaatttcgacggcaaaggcagcgccggcggccactcggcagtaagccaggctaccgccccggccaccaagccgcagccggttaacgactaa

SEQ ID NO: 453913 - DNA, 420 bp, Serratia marcescens
atgtttgagataaaagcaggcgattccctgtttagattcacgttcgttgaaagattggaagaaattgaagacagaaatcaagatctgattatctgctggttggaggtgcagggctcgggcatgagtctgcagtgcgagtgtgagtttagtctgtttgatattaaggcattacgcgatcaattagagcagttttatcaatctttatcacaagggcgctttcctaagaagatcgactattctccacgtgttccaacgtttaactgtgagattgtccaggctaaagataccgacgtcataggtttcaactttaaggtttgcccgagtatgttgaccttatggaccatgcaaggagggatgctcatcgatcagagttattttcccggcctcattgctggcttgaatgacatacttagtaattga

SEQ ID NO: 453914 - DNA, 1227 bp, Serratia marcescens
atgaataactctgatgatagaaccctgcgttttaacccggcctctcccttatttaatcagcatatttatcagatttatcagcgaatgcgccggcagcagccgctgctgcgcatcggcagaacctgggtgctgacgcgttatcaggatgtcagcgcggcgctgcgcgccccgcagctcagctgcagcggtattccgcggcatctgaccgcggagttcgcgcgcctgcaaggcgggctggcgcctgaattggcgatgttggtgcaggagatggcgctgtttcaggataacggtacgcaccggcagcaccgtaagccgctgatggcgctgttcagccgcgagccgctggcgcagctcaggcggctggtcgtcgatgaaattaaccggtcggtcgtcgctctggcgaagacggatcgcctggatgtgatcgtgcagctggcgcggccgctgtggccgcgtttgtttgcccgctggctgaatctttcaccgcagcagagccaggtgattgagcaggagaaggagagtattcgtctgctgctcgatcccagcgccatcgatcgggccggtcttgagcggctggcgtcagcgctgcggcgtctggacacgttgttcagccagctctaccaggagtgcgccgacggccgtccttcactgttctttgctgcgctggcgcagggctatggcgaccagcaggctctgatgcagcgctacttcagcgccgactgcgtcaccattctgattggcggcagcgaaaccaccgaggcgctgatcggcaacctgatgcaggttgtggcgcaggatgaaccgctccagcagcagctgcggcagcacccgcagtggattgcgcaggcggtgcaggaaacgctgcgctatgagtcaccactgcagatggcgcggcgtacccttatccagccgtggacgctgtatggccgcacgctgcgtgagcaggatgcggtgctgctgtgtctgggggcggctaatcgtgatgaaacacagttttgtgacgcgcagcagttcgatgtgcaccgtgaaaataactcgcggcatctggggttcggcggcagcgcacatttgtgtgcggggcaactgctggcaaggtttcaggcggaaagcgtttgtgccgcactgctgcagcactttccgcgcctcaggccgctggagcaggcgcagtggcagacggacagtctgattttacgttcgcttaagtcgctgccgttggcgctgggctag

SEQ ID NO: 453915 - DNA, 738 bp, Serratia marcescens
atgactcaccgtttttttgccgctcgtggcgcccaccggcccacgctctgctttccctggtgcgaagaggggtacattgccgccctgccgacgattacctactgccggctgacgtttgacgcagcgtactaccatgaccggcagttcacccgctaccgtatcccgttgccaacctggctgagcgggatgcccactgcgcgtaaggcggactatctggcggggcgttactgcgcgcggcgcgcgttaatgtgcttgggcgctcacgttaccgacgtcggcgtccacctggggcgggttccccgctggccggaaggttttatcggctccatcagccattcagccaaacgtgcgatcgcgctggcgaccaatgacgccaggatccgccatctgggggtcgataccgaacgtcatcaaccggaggcgatgcgggaaattgcagaaatgctggcctcgcacgcggaagcgcagtacatcgcccgtttgccgctagcgcgtgaatggatgctgacgctgctgttttcagccaaagagagtttgttcaaggcgctatatccggccctgcaacgcgattttgattttatggcggcggagctggccgcgctggctccggctgagcgacgcttcacgctgcgcctgaccgtaacgctgtccgcacactttaaggcaggcgattgctttgacggttacttcagcgaagacggcgaccacctgacgacgctggtggtcgtcaggcaataa

SEQ ID NO: 453916 - DNA, 1743 bp, Serratia marcescens
atgggaaaacatgcttcctcgttggcggctgtggatgagcatatctcgctgaattaccagcaacttggctgtgcggcacgcaatgtgagtaaaacattaattaatgatgatgttttcgatgagtgcgtggggatctctggcccgccaagcgtgcggacgctggcggcgctgcttggcgtggtgctgtcaggcaatcattatctgtatgttgacgtcagtcagcccgccgactggctgggtgaccatctgcgccacgttggctgtcggcgcgtgctgcactgcggcgatacgctgcccgacattgtgcttgcgggggtggcgtttcttcccgtcacgctcgatacccgtgaatccgcggtggcgctgcctgagctttccgcgcagcacgcggcctacatcaatttttcctccggcagcaccggccagcccaaagcgatcgtttgtacccatgcgggcgtgacccggctgtgccagcagcaggatttcctgccgttcggcgccgcgctgactttcctgtttcactccccgctctcatttgacgccgcgacgctggagatatggggggcgctgctgaacggcggctgctgtgtggttaacgccggcggtatgttgacgccggaaaaactgcgcgcgcatatccggcagcgcggcgtgaatacgctgtggctgaccgcgtcattgttcaacacctttgttgatgtggatctcgcctgtctgagcgggatacaacacctgctgaccggcggcgacgcgctgtcgacgtcccatgtgcggcgggcgttggcggcccataaggcaacccgctttatcaacggctatgggccgacggaaaacaccacctttacctgctgccatgttattcgtccgcaggatgcggccgcgcaggatattcctatcggccgggcaatcaacggcactgaggttgggttgtacgatgcggcgggtgcgccggttacctgcgccggggaaacgggggagatttatgcgttcggcgccggtctggcgcggggctatcaccgttcaccggacagaaacgcacgggcatttgtcacggtggagctgcggggaaggcgcatgcgcgcctatcgcactggcgacctcgcccgctatgacgacgacggttatttgcactttgtcggccgcgtcgacagtcaggtcaaaatcaacggctaccgcctgaacctggcggcgctggaggcctattttcgtcaggtgaatgcgatacaggattgtgcgctgctggtggttgaacaacagggcagcaaacgtctggtcgccgtcttactggcgcaggatgatggcccggcgcgtgatgcggcgctggcgctggcctcctgggagcgacctggcgcctatctttgcctccgctgcttcccgctgacgccgcatggcaaaaccgatcggcgggcgctgctggccgagtggcaggcgcatcaacgccggcataccgaggtcgaggagccgctaacgccgatgcaaacgctgtgcgcggcctggtgggcccagattctggggcagccggtggttgatcctgagctggattttttccaggcgggagggaattcgctgctcgcgctgcggctgctggccatcactcaggctgacggcggagaggccgacatttcgctcaacgagctgtatgaccactctacgttggccgctttcgcccgcctgctgagcgccaaaggccgctcggcgacgtcgcgtcataccgcaatcccggaacagccgctggtgctatga

SEQ ID NO: 453917 - DNA, 1266 bp, Serratia marcescens
atgaacgatctgagcaaacgggatatttattgtcagccgttgcatgggcggctggtggtgttcggacaatggcagcgtctgaccgttcaggaacgcgccgcgctggcgcagcagaaggcggcgctgctggcgcaggccgataacgaatggcgtacgccgctgcccgcctggcttaacgccatcgtgctgggagagatgatgagcggcgacctgacgcagtacggcctgttttttttggccgtcggcggagcgccggaggatgaacagcggttgacgcagcttggcgcggcgctgtatcgcgcttttccgctgttagcgagtaacgtggcgtgggacggcgagcagccggaatggtgcgtcagcacccggccggcggcctatttgccggaagaggccggggaatatgccgacgatgaggcgtttattcaggcgcagctcgtccgtccgcactcggtgttccagcgcggcatgctgcgtatcgtaacggcgcgctgcgccggcgaacggcgctgggggatttggctgcatcacctggtggccgacgctgattttatacgcgtgctgctgtcgctggcgcagcgttggctgcaggacggcgaaatgaccgctccggatttttcctttatccagctgcagtggcgtcttggacgtacgctggcgctgcagcattcgcgtttacagcgtttctggcgcgggcaggcagcgctattcgccgcgttgacgccgtgggaggaaacgttgccggcggtgacgccgacgacgaccggtcagacttttgatctgcccgccggccgcggcggcgcgacattggtggcgcaggcgttggcgcaggcgctgcggcaacagggcatcggcgggccgttgctggcggtcgcgccggtaacgctgcggcgcggcgacggcggggcggcggccagcggttgctatatcaatcttattcctttggtactggatgccggctgcagcgcggcggaattcgagtctcgccgacgcagctggttggaacatgcgctgttgccgcaagaggagattgccgaggcggccggggtgaattaccgccgggcgctggtgatgctgaacattatcgaccgtccggcgacgccgccggcatttcgtcatagcccggagcagcgcagccgcaaaccgatcaccctgacgctgaccggcatcgaacagggcggctggcgcgtggcgctgaccacacggctgggtgaggcgttcagccaggcgctggggggcgcgctacggcgggcattgggcgcatga

SEQ ID NO: 453918 - DNA, 609 bp, Serratia marcescens
atgatttggctgttgccggattttatcggccaccctggctgttttcgcgcgttgttgccgcatctgccggcggcgacccgcagcatcgattatcaccgtctgccgctgtgcggcagcctggccgcgttggcgcagcacctggccgacaacgccgcggaaccgccgtccatcatcgtcggttactcgtttggcggtgcgctgggttttgagttattgcagcgtttacccggcgcgccgcggctaattatggtggacagtcatcttccccgcgccgaatttcgtcgtacgccggccgagcaacagtttacgcgctggctgacgacggaaacgcgcgactggatcgcgctgatggaacagctgggggagattcggcaggcggtgattttgcacaacatcgcactgttcagcgactggcgaccgcaggggcggatcgtgcaggcggactggatatgctgccggggcgaaaatggcgcgccggccggcgactggcgtgaacaggtcagggagttgcggcgtttcgacagcgacgccgcccaccataccgtgatgacggatcgggacgttatcgttcatatatcgcaactgatcaatgggggagctatgtcatga

SEQ ID NO: 453919 - DNA, 654 bp, Serratia marcescens
atgaagcattttcagcaggtgattacctcgcattaccagcagcaggccctgacgtggatcctgtccgcgtcggaggcgccgcagccgttgttggagccggagttcgatattaccgatgacgacgggcgctatgcgaaaaagatccgtaatctgagtgaggccgatccgtccttctggcagcagtggtttcagctgtccggcctcaatgcgttggtcggcgaccatttgtcgcggccgaagctgctgcgtcatgccgcctttatcaaacgccacgccgatgaatcttatattccgctgcatcaggatattgcgctgtgggaaaaagcttatgaaagcgccgtgacgttttggattgcgttgaccccatcccgcaatgaaaacggcggcatgttctattgccgatcggctgagaccatctatccgcatgaattcaacctgcaatacccgatgttcaaatgcattgacgttgaaaaaaatcgcattccgccggaaagcatcgtcgatgcgccgctggaggcgggtgatgttctggtctggccggcgcgcacgccgcacggcagttatatgaataccagcggacagttacgcatcggtatgcccgtggtgtttgttgatgaaagtgaatatcagaaacttaatgtgaggtcacaatga

SEQ ID NO: 453920 - DNA, 225 bp, Serratia marcescens
atgaaaaattggatcgtaagtcatttgcaaacggtattccccaacgaagacattgccgaagagaatattgatgtttacctgccgcagctttgtcagcactcgctgaaaatggtgaccttcctggcgcgtttttcccgtcagttcggccgggcgccgaagattatggagtttatcgccaaaccgaactttgcaacgctggccgatagcggggaggcgcagcgatga

SEQ ID NO: 453921 - DNA, 1377 bp, Serratia marcescens
atgattaaggtgatcgattgtaccctgcgcgaaggcgtacaggcgcggcaatgcagttttactgcccagcagtcggcgttgctggcgcaagagatcggcgcattgggcgtggacatgattgagtgcggccacccgtttatttctgcgcaggaagtcgagcgggtgcgcagcgtggttgcggtttccccggtgccggtgctggcgcacgcccgggcgcgctcggaagatatcgacgccgtggcgcgcagcggcgcgcagtgggtagggctgtttgcctccatcaacgctatttcgctgacgaccaagttcaaagggatgacgcgcgaagacattctcaccatgttcggcgacgcgattcgctacgcccgcggcctgggactgcaggtccgggcgacggtggaagacgccgggcgcacctcggtatccgatctggtcagtatggtggccgccgcgcgggacgcgggggccgaccgcatctgttttgcggacagcgtaggtatcctgctgccggatgaaacttttgatgtgctgtcgctgctgcgtcaggaattttatgacgtcgagtttgagtatcacgtccataacgaccgggggctggcgttggcgaatacgctggcggcgattcaggccggggtgaagtggcagtcaatcagctgcaacggcatcggcgagcgggcggggatcacggataccttccaactgctgaccctgctgcatacgcgctttcagcaggagcggttcaacctgaaaaacatgatggcgctctccgagctggtggaggcttacagccgcattccgttgtcaccgatgcagccggtggtggggaaaaacgcctttgtgcacgtagcccggctgcatcagcttgcgatgcaggaggacagcgctgcctacagcgtgtttgaccccgagctgatcaacggtcgggtgtcgctggaacgcttccagccgatgcaccagcaggcgctgttcctggcgccgttcgagaaatcggcaaccgagctgaaatatcatcgccacggaccgggcaagcgttttgttatgctggataagcggctggtggacggctcgccgttctactttatcgcccgccagtttgctgacgcggatgccgacgattcggcggtcagcggccatgtggacagccatatccataactgcgattccgtatttttattcctgggtgatggcgcggattacgccggtctggaagtcgaggtggatctcggggggacgcggaggcgtttgacttcgcccgccagcgtatttattccggccggcgtggcgcactcttaccgctttatccgcggctgcggcacctatatcaattttgtgcataaaggcgattaccacgacagcttactggagataactcaatga

SEQ ID NO: 453922 - DNA, 747 bp, Serratia marcescens
atgaaacagttcaataaaaatgctcaggcctataacgcagtgcgcggcaagatcgcctatcccgatgcgctgtacgcctcgctggcggccagagcgccggcccataacgccgcattggatattggctgcggcaacggcgtctccacggtgcgtctgcaggggctgtttcaacatgtggaaggctgcgatattggcgaggcgttgattgaaaaggcccgccaaaactacccggatctgactttcagcgtctcccctgccgaagatttcgtcccgcagcgccgttttgatctgatcaccagcgccacctcgttctactggatggatcgtaaagcggtgctgatgaagatggcgcagtggctggaacccggcgggctgttttgcgcgtacaaatatgattttccggtggcgtatggtccactgcgcgattttatcgaacatgaactggttaccaagtggtcacgccaccgcgacccgcgtctgacccagtacgacgacacgctggaggtgatgcagagttgcgaccatttgcgtcaggcgcgccgcgaagtgttcgccaatattattttcctgacgccgcaagaggtggcgctgtttttcctgtctaccagctacgtgacgcgctatatcgaagaggagggcgggcaggactatatcgatcagttcgccgccgccgtgttggatattgagcgggcgccgcaggtggcgatgaatttcgatatccatgcgtttaccgctgtcaacggctaa

SEQ ID NO: 453923 - DNA, 1479 bp, Serratia marcescens
atggtgcaaacacccgcaacgctggatgccacgctgcgtcgtatggcgtcagagcagccgcagcgtattttactgaccgatgcacgcgaccccgatgcgccgatggactatcgctggggcgagaccgatcagctggttaacggtctggccaggcaactggcgcagcagcctggcgatgccgtaggcgtgttactggataactcataccgctgcatctgtctgatctatgccgtgatgcgtgccggcaaggatctggtgctgatcgatccggaatgggggcaggcggccaaacgcgcgattatcgatgaaatgtcgcttcgcgtgttggcgggcaacatcacgttgcacgatgaattcgccgggttgcaggcgcctctcgacttcgtgccgttgccagcaggcgagcaggcgccggatcgcgcggcgcagagccggatgatcctgtttacctcgggcactaccggtaagccgaagggcattgtgctcagccagcaggcgatggtcagcgcttatgccatcggtcaacgctgtctgcagatcggcgagcacactcgcgccggctgcttttaccgggtcagcgggctggggatcctcggcattaattttctgttcccgttgctgtatggcggcagcgtcgtcttgttgccgctgcactgttgggctgaaagcgacgacttttggcgttatgtggaccggttcgccattacgtttttgtatatggtgccgccgatcgtcaattttatggtgaaagagggcacgccgccgccgcatccttaccggcttgagcgcttgctgtgcgttgccggatcggcgcggctggatgccgaagcgcagcggctgttccagcagcacttcgcgccgctggccaatatttatggtttgagcgagtgcggctttgcattcctgttcggccggcgtcagggcgaactgttcgacaattcggtcggcccggcggtcggattgtcgctgcgtttaaccgatgagagcggcgcgccgttgaaccggcctggggcgcgcggacgcctgtgggtaaaaacccccagcctgttttcgggttatatcaatcagccggcgctcaccgcgcaggtgttgcaggacggctggctggatacgcaggatgtcgctttctttgacgcgcagggcggggtccacgtgctggggcgcgccgatggcacgatcaataaaggcggcaatctgtttcatctcaatgagtgcgaacagctgctcaacgggcgggaggatgtggtggacgcctgctgcctgaaagtgccttgcgacgtatacggggaagattatatcgccgttattcagagcagcgggcaagaacgacaggcgttgacggcatggttggagctacaactggggacgcagcgcgcgccgcgtacggtggtctgtttgagtcagagtctgccgctgaacggtgcgggtaagcacgatcgtaaagcgattgcggcgttgatcggtcaggaggtcgtctga

SEQ ID NO: 453924 - DNA, 1599 bp, Serratia marcescens
atgtgcggcatagtgggttacctcggcgcggagatcccctccgcgcgctttcaggccgcgttggcgcagctgcgtcaccgcgggccgtacggcgaaggcagcgttgcgctgccgcacggcgggctggcgatgacgcgtttgccgatgtccagcgccgcgccgacgccgttgccggtcaaaacgccgcagggctatgcggcctacaacggagaggtgtacgtgcgcggcgcggatatccataaggaaatcgcgctgctgcttgacgggatggcgcagggccggctgccggacggcatgtttgcgctggcgtcctgggacgcgcagcgcgccaccctgacgctgctgcgtgacggattgggcatcaaaccgctgtattactgttaccggccggcagacggcagcctggctttcgcgtcggaaatcaaaccgctgctgactctggtcgggcaggtcgcgccagactatggggcgatagccgaactggtggccaccggcgttccgctgagcgagcagacgctgttcagcggcgtgcggctgttgcagccgggggagagactggtgttcgccctggaggacggacgggcgcagctgctccggcgcgatagcgtcaccagcgcggcggaggaggcggaactgccgttggacgcggcgctggagcgcgcggtctcattcggccgggagacgtttcggccgagtgcgctgttgttgagcggcggtatggactccaatctgctcaatacctatctggagccggactatcccaaattccatctggcgctggaacaggacgcggaaccgatgctgccgcagcgcaacctgcagcgggtgccgttgcggcagacggattttatggcggtgctgcggcgcgcagtcgccaatttcggcagtgcgacccgcatgtccagcctggtgatgtaccagcagttggccgatgcgattggcgacgccggctaccactgcgtgctgctgggtgagggagccgatgaactgttctggggctatccgcgccatgtggcgttgtggcggcaaggggcggcgccagcgccgcgtgaattctgccgcgcctggttcggcgattatgccgccaaggccgagctgctggcgccggacgtggggcgcgcgctggtcgcacggattgacgcgttgggggacagtgcgttgcaagggggcagcgaagcggccatcgacggcttcgaccggcgttattcgctggagccgctgttgcggcgcgccgatcacttgctgatgtcgcgcaccattgaggcgcgcactccctatctgcatgcgggggttccggcgttggccggcgcggcgccgcgcattgttgatggtctggcgaaggcgccgctgtcggccctgctgcagcgccgtttgccagcgtggcgctatcagccgaaacgccatttccgtttacctttcagccactggccgcaggtcgtcgaggccatgcgtcgctacctgtcggcgcatggcgagagcctgcgtcagctggggctggtcaatctgacgccggagacgttgacgacgatcgatgcggcgcagttgttcacattaaccacgctgtcgttctggcagcaagagtatgaggtggcgttatga

SEQ ID NO: 453925 - DNA, 960 bp, Serratia marcescens
atgactttttcccgctacccgcggccgcgcgcatggcgcggtaatgcggtgtttgacgcttcacgtcactttgccgccggtttggaaggggtgatccgcaccctgtcgcaggggcgtttgccgggcggtgacgtcgtcgacctgcgccgccggctgcatcaggaacttgaacagggcaccggcgtactgctgcacgagtccgagatgctggcgtcattgccggaaagcgagtttcgccgcgtgttccaggcgctgtgcgtatggttgggaatgccggtgccgatcaaccgtcaggggcaatacctgaaggaggtgcgggatcacggcatgcgcgatgagattaatgcgccgcagcgtggacatctcaccaaccaggaactggcgttccattccgatcgcgccgatatcaccgtgttgggatgctggtcaccggcggcgcagggtgggcagttccgtatccgctcgtcggccgatgtggtggagcagttagagcaacggcgtccgcactggctgaagttgttgaccgagcctattcctcacgatctgcgtgatgagggcggggcaccctatgcgcaggtgccgttgctgaccgagagcgagagcactttcacgctgcgctatattcgcaaattcaatgaatctgtggtgcggcacggtctgacgctgccggatgcggtcagacagatgctggacgagatcgatgcggtgatcgaacagccgggccattatgctgaactggacttcaggcgggggagcatcgtcatggtgaataaccatatttcgctgcatgcccgcacccggtttgaaaatagcgccgactatcagcgctgtctgctgcgctgctggctcagcagcgaatttacccgaccgctgccggacagttttatgccgctgttccatcatacccatgccggcgtactgcgcggcggcatctgcgtggcgacagaggtctcgtcatga

SEQ ID NO: 453926 - DNA, 1242 bp, Serratia marcescens
atgagtgtcggcaccttcaactgggagcgattccgtacgctgccggcagagatccatctgatgttggcgggcacgctgctgacgcgcggggcctattatatggtctggccatttctggcggtgctgctttaccggcagttccatctgtcggcgacggcgatcggcgcgctgctggcggtggccacggtgtgcggcgcgctcagcggcgtgtataccggctggctgtcggaccgctttggccgccggcgtctgatattgggcggcaccacgctcagcgcgctggcgtttgtcgggctgtgtctgggcaatcatccggcgctctacggggtgggcatcgccggcgtcagcatcggctgcgcactgctggagtcaagctgcaaggcgctgattggcgaccgggtgcaggataagtcttcgcgcgagctggcgctgtattgccgttactatgcgatcaatatcggcgcggcggtcgggccgctgtttggcgtcaccgtcggactagcggcgcgcagcggcacctttctgactaccgccgcggtctacttttgttacggcattctgctgtggcgcatgctgcgcggcgagacggcgcgtcatcatcccgccggtgcatccccgccgccgccggggttcttcgccacctgcggcgtgatgctgcgccaccgcctgttttgcctgctgctgctgtgcaatacgctggcggcgctggtttacgccaattttgactccagtctggtgcagtacctgacccgcagcggcataccggacgtggtgcatatgatcgccgtgctggtggcgatcaatgcgctgaccattgtgctggcgcagttccccctgctgcatctgctgcagcgttactcatcgggcggacgtttattaatcggcatgctgctgatgctggcggcgcagtttttgtttgccttttcgccgctgagcagttttttcgcgctggggatcgccaccgtgatccttagcctgggtgagctgattgtgtttcccaccttcagcgtggcggtcgatcagattaccccggacgccgtgcgcggcagttactttggtgcggccaacctgtatagcctgggcagtgcgctggccccgctgtatggcgggttgatgctggatcatctgggcggacgcgcgctgtttctcggcctggcggcgctctgtgcgctgatcatggtattgcaggggagcgccaacgcgctgaaacgaacgcaggaagaggaggtgcaatcgtcatga

SEQ ID NO: 453927 - DNA, 621 bp, Serratia marcescens
atgaatcaacgtgtgattatctccggcttttttttacgccagaacgcctggccgtcggccgcggacgcccagtgttttgacgactggcgggatgtgcagggtatggatctcaacgggtggctggacagagcgcaggcggcgctggcgacgtgcgtggaaccactgaccctgtgcgggcacagtttcggcggctatctggcgcagtgtctggccgccaggctcggtgagcgcgtcagccatctgtgcttgttcagcgggctggtcagtgagggcggcagcgcgctggaaagctatcaggaaagccggcagagcgcgctgatgtcgctgtgccggctcgaggcggcggaggggcagattcggttgcaggagccggcgcgattttgcgagctgttgcaggcgtccgtcgcgttggcagccagtgagccggcgcagatgctgttggatgcgccgccgccggcggtgcggaaactgcgctgccgggtcagctatgtgattccgcttaacgatgcgctgacgccggtggcgacgcagcagcatttcgcccggcggctgaatgcccgtgaaatttattgtccgggcggacatctgtcgcccctgcgtcaagcctgggatgtggcctga

SEQ ID NO: 453928 - DNA, 315 bp, Serratia marcescens
atgacaacatacgactacctattacttgataatgctatcggtacggttttcaaccaagacgctgacattatcactggcgcagacaccatcgaaggcatggtggactattttattgcgaatgcttaccaacctcatgtgaaaaacaaaatgctggtcctgctgctggatgaattaaatgagtttgagaacaaccatagccagaatttggatgcggcctatcaacaccgttatccatcggatctacacttcgccggcggaaaagagttctttgatatttttcgcgagcatattcaaaaaacgttgaagcgcagttaa

SEQ ID NO: 453929 - DNA, 1092 bp, Serratia marcescens
atgaataacaacaggctgaccgccgcatatctgcctgaaaaggcggccgtgcaggaggattgggatgtgttattacctttggtgccgaacattatcaccggcacggcaggggacgatttgttgaatggcactatcggcaaggatctggtctttggctatacgggtaacgataccatcaagctgaataccgagggcaataatgccgacattgtgtttgccggcagcggtgaggatacgatttacaccggtagcggcgcggtgatttttgccggtgatgataacgatgtggcttatattaccaacaacagttttgtcgatctgggggccggtgacgacgttctgcaaagtgaacgttttaccgatggccataatattattctgggcggtgatggtaatgacaccatcagcacgctccatccggttgacctcaacaatccgccggatggcgtcagcgtcgtgccggtcaacgatgttatttatggcggtgagggcgacgatcgcatcgatgtcatggggcagaacttccgggtgaagggggacgccggcaacgatgatattatggttcgcctgatgctgttggcgccgagtgataacggcaaaattgacggcggcgacggtgacgattttatctttattgccaataatgacgcgtatcaggtggttggtcaggaaggaacgcattttgagattgacggcggcgccgggaacgacatgattatttcctcgtcaatgggcggtgatacgctgaccggcggtgaaggtaacgacaccttcttttatgaatgggagctggtaagctcagctgacgaccccgatgtgattaccgatttcaccttcaatgaccaggaacaggacaaaatagatttatcaaagatggacgatctctgcgcctatgactatgacggcaagccctcaaatctgacgtttattggctataacgaatttagtcgtcatggttcagaagtacggttggttcataccgaagaggggactaacgttgaggttattccgggcacctctttctacgatccggtgattatccagttagccggtgtgacacaggagctgacgcaagaggcgtttattctttga

SEQ ID NO: 453930 - DNA, 210 bp, Serratia marcescens
atggaaatgttaaatagactatccgctattctaagtttaccgttaaccctgctgtgcgtgtcgttctcatcactgaagattatgggagcaaacaactcactgatggatgttttcctgtcggtgattgttctgctgggctttcttaatttatttcggctgatggggcggtgtatcgtttggtttaacggaaacgataaacggtcagattaa

SEQ ID NO: 453931 - DNA, 624 bp, Serratia marcescens
atgagtcaagtgatttatcgcattgaagagagcgtgatctttagtcctgaagatacaggactttaccgacataatcagacggataacgtcgtcgccatttccagcgccgccgccaggctgtttactctgttgatcaaaaacagagggaatatcgttgagcgggataccattctggaaaaggtctgggatgaatacggactgcaggccagtaataataatctcaatcaatgcctgagtacattgcgtcgcattatcaaaaacatgggcattgataaaaacattattgaaaccatccctaaagttgggctgaggatctcccatgccattcagatagaagagatcaatctacagccgcccatgcagccgacgccggacaaagcgccggcctccgccggacgcgccaggaaaaaaatcaaaaagaagctcttttactctgcgctgctggttggactgctgctgatgctgtccctcttttttaacgtttttcatctctataacaacctccaggacgcgcaaacgtcactgtcacgcatttattccccactggaccaaagcgcgctgtgcgacgcgcaacctgcggagatgccgctgttgtcgacgctctcttttaataaaccgcactag

SEQ ID NO: 453932 - DNA, 891 bp, Serratia marcescens
atgtcacctctcgccgtatcccataaagctacctcgctggggctgttagccattgtgttttggagcagcgtcatcggcctgatccgcagcgtgagcgaagggctcggcccgatcggcggcgcagcgatgatctacagcgtcggcgcgctcttcctgctgctggtcatgggcatgccgaagctgtcaaccttcccccgcgcttacctgctgttcggcagcgtgctgtttgtcgcttatgaaatctgtctgtcgctgtcgctgggctatgccgacaaccggatgcaggcgattgagctgggtatgattaactacctgtggcccagcctgacggtattgatggcgatcttgttcaacggacaaaaggcgacatggtgggtgctgcccggcctgttgctggcgctgttcggcatcggctggatcatgagcggggagggtgcctggtcgctgcaacagatgctgggcaacgtgcgcagcaacccgctgagttacagcctggccttcagcggcgcggtgatctgggcgctgtactgcagcgtgaccagaaggctggcgcaggggaaaaacggcgtggcgctgtttaccgccctgacggcgctggcgctgtgggggaaatatagcgtcagcgcggagggtgccctgcatttcagctggccgatagcgctgatgctgctgtgcgccggcgtggcgatgggggccggctatgccttgtggaacatcggcattctgcacggcaatatgacgctgctggcgacggcctcctactttgctccggtgctctcttcactctttgccgccgtgatgcttaacacggcgttgaccgtcagcttctggcaaggggtggggatggtgatcgttggctcgctggtctgctggcgcgccacccgcggctga

SEQ ID NO: 453933 - DNA, 618 bp, Serratia marcescens
gtggcggatacggcaagtatcggcgttaatcgtggtttgttaacgtttaacgcggaaggtaataatataagggaatcattgttctatagccgggttattcattttccacggatggggatctcaggcgttaccatcgggcgtgggtatgatatcggcagtcgttcacagcaggaagtgtttgtcgatttaacccgcgcagggatcgctccggctcaagcacaggcaatatcattaggtgtagggcttagagggaagcaggctgatgattttgtaaaacggaacaggaacagaattggtgagataacggagcagcagcaagttaatttatttaattcgacttatcctgtttatgaacgacgtgctgaagcggtttataacgccaagacggcacacattgaaggccgcgcggcgtggaaggatcttcaccccgctattcgtgacgttctggttgatgtggtatatcaagggtacaaaggtgtaacaacgatgcctgcggcggctaaaaacgatatcgattattttattcaatttataaaaagtagtgagctgattaccgatgagaagaacagaaatcggatagggcatttggaattgaaccgagggagaagcggtaagtga

SEQ ID NO: 453934 - DNA, 414 bp, Serratia marcescens
gtgaaaaaatacctgttagtcttagcggtcttgccaatgttttcattcgcggcgcaatctctggatgagttgaaaacggatcatcccagcctgtgccaggatatcaaacaagaagatggctattacggcgatatggaatgtgccgggcggctgcttgacgattctgagacgaaattaaccacgcgagttgcgcaaatccgggctgaattaaagaaaacccacgccggcctttaccaggacgctttcgagcgtgaccagcaatcctgggaggcataccgtaaaaaccgttgtgcttatgtggctattggggtggatgagcagagcaattattacgcctatcgcatcgcgttgtgcagcgcatcggaaaattacaaacgtcttgcaacattgaaaggtgagccgtcagtgagttaa

SEQ ID NO: 453935 - DNA, 561 bp, Serratia marcescens
atgcagattaaccgttttgattttgcctcgctgccggtcagcccgtggcgcaacggcggcggcgagacgcgtgaaattgtctgccagccggcggagggcgcgaacttcgactggcgggccagcatcgccaccatcgcacaggacgggccgttttccgccttcgacggcatcgaccgctcgattaccctgctggagggcgacggcgtgcggctggtcggcgacggcatcgaccatcggctggcgatgccgggcgaacccttcgccttctccggcgatgtggcgctgcaggcgcagctgctggggggcgtcagccaggatttcaatattatgacccggcgcggacgctggcgcgccacggtgcggcggcagacggcggcgtgcgagctgccggccggccaggccggcgtctggtacgtgctgcgcggcgactggcggctgccggcggatgtccggctcggcgcccggcagggcggctggtggccggagagtgcacagggcgggccggcggtgccgcagagcgacgatgcgctggcgctgtgggccgatctcagccgggtgtaa

SEQ ID NO: 453936 - DNA, 1125 bp, Serratia marcescens
atgaataatctgaaattaaccaccttgccctggctagagaataatgcgctcagccagggtatcggcgcattattaccgcaactacccaatattattctgggtaccggaggcgatgatctcctgaaagggagtaacggtaaggattgggtgtttggttttgccggagatgacattatcaaacttaatacgccggaaaatgatgctgatacggtatttgccggcgatggtgacgatgaaatttacaccggcgataacgcaacggtttttgccggcgcgggcaacgactctctgcgcatgaccgagagcagcacgatctttatgggcgacggggatgaccgggttgatgccgggctggatgttcatgggcacaacacggtgtttggcggcgatggcaatgaccgcatcaattttaactacggcatatactggggtattcattatggcatcgacgatcccccaagagagattatgccggaagacgatgtcatctacggcggcgccggtgatgattggatacagccgatgggtgagaacaatctggtgcatggtgatgagggcaacgatctgattagcgtcgaactcttgctgcagacacccacggataacgggcgtttatacggtgatgacggggacgataaaatttatatcgtgaatgagccattccccggctataacattggtcagttaggcacccattttaacctcgacggcggggccggcaatgatttgctgctctcttcctcgtccggtggcgatacgctgaccggcggcagcggcaatgatgtctttttatatgaatgggttggcgcaaccagcgctaaagatcccgacattattaccgatttcaccttcaacgagcaggaacaagataagattaacctccgtgagctcaacgatagcggttatgaatactatgacaacttgatcggctgggaggtagacagcgacctgacctttatcggctatcagccgttcagcggcaatggcaaggaagtgcggctggagcatacggcagaaggcaccaacgttgaagtggatcccttcgttgaaccgagtgcggagctgtttcaaatccaacttgtcggcgtgacgcaagaactgacgcaagaggccttcatactttga

SEQ ID NO: 453937 - DNA, 522 bp, Serratia marcescens
atgttcgctatttcacgccgccggctggtgctcggctcggcggggttgctggcggccggcgccctcgctcagaacctgttggggcgcgccgcgctggcggcccctgacgccgcaccgacgccgggtaatttcctcgccgtttcccgcgccctgaccggtatgccgctgcccgacccgcagctggcgcagcggctgtatcaggcgctgctgccgcgtttcccgcagctcaacccgcagcttgacgcgctggcgacgctgctgcaacggcatgacgtccaggacggcgccgccctgcagcggcagctggcccagcacgccgccccgctgacgcacctgtatcacgcgttaatcagcggctggtatctcggcgtgatcggcgatgccgaccgccccgagtgcatcgccttcgaaaatatcgtcagctatcaactggtgcgcgattcgttaacgccccccagctattgtccgggtgagcccaacttctgggtccggccgccgcagaaggagagtaaccatgtctga

SEQ ID NO: 453938 - DNA, 462 bp, Serratia marcescens
atgaaaaaaatgcttctgttaaccgccgcgctgctcactgtcagcgccggccacgccgtggcggcggccgccgcgccgctgaccaaccagcaggccaatcaactgatcgacaacgtgcgccacagcctgcaggcgcagcgcagcaccggctgcgtcgccgtggtggaccgcggcggcctgctgctggccttccagcgtttcgacggcgcaccgctcggctgcgtggacgccgcgctcggcaaagcacgcacctccgccctgtaccgcacgccctcactgaaatttatgcaacgcctgcaaaacggcgaaaccaccgtcctcgccatcccgcatgcgctggcgctcggcggcggctacccactgacgcgtgacgacgacgtcgtcggcgcaatcggcgtcagcacgccaaagcaagagctggataatcaggcgtcgcaaaccgccgccgccaccctgcagtaa

SEQ ID NO: 453939 - DNA, 165 bp, Serratia marcescens
atgatgagtctggtggaccaactgatggagtattaccgcgcatcaagcgcggcggaagtccggcatccgatttgccgctggtggctgccgcagggagaggcgcgggtggcctatttacgtgaactgctggagccggcggcaggaacgtccgctgcacggcgctaa

SEQ ID NO: 453940 - DNA, 165 bp, Serratia marcescens
atgacgtttaacaaaggatttatacggctagcgggtgtgatatccatcgtctccgttgtcagcggtttcacccgctggcctgacgtgatgtttatctccagctgcgcgatgatcgcgatctggctccatgccgaatgggactggcgccggaaggataaaccctga

SEQ ID NO: 453941 - DNA, 675 bp, Serratia marcescens
atgcggcgcgtattatttccgagcagcagggctatcacgactacccgttctgatagtcacgccctgccggcgcgaatgcccaacaacctgcctttacggcaggtttttttgtatttgccgttcccctgcgccatcggcgatccgcccgagaaccctctgattgtcggccgcttttctgcacgctactatccttgcaaggagtacggtaaaggactgaggcgacaaatggatacggttgaagagttaggtggcagctatttttttgatgggatgattggattgtctgcgagtgaattagcattttggatagtggtcgatgaagccaggaagcagcttggcgtgagtgatatcttgtcacttgcgctgattattggtggtttacctctggtgcctgttcccggcaaactagatgccaaacgaacaaccaaagggacatcttatttatctctggcctcgagaaaacttatcacctatcagctaaatagttcttggaagacattaacctggaagaagatgctaaaaggaaaatggacgccgacaaagagtttaggggcatttgtcggccgttggcttccttggattggggtatttattactgcatatgatcttacgatgattggaacaaggtcgctgaagcgctataacctgctagtgaggccagaggatagattgtga

SEQ ID NO: 453942 - DNA, 345 bp, Serratia marcescens
atgagtgacgatatagcagtcgatgtcttgcatttttttcaaatagaaatattcaacaaggtaggatattcgaaggaaattatcagccatgattactcgttgagtaccggagaacgtgcactgtattcagacgatgccgatgagattcttgcgaaattttcaaaagtattcaacgttagttttaaggatatgcaatggaataactactttccccaagcgggcattccctttatcccaaattgccttttgccaaagcatatgcaaaccgaccacaacgacccactgccgctgactatcaatatgttgatcgcttctgccaaagccgggcgctggctgtatgattag

SEQ ID NO: 453943 - DNA, 180 bp, Serratia marcescens
atgattgagataattgcaaacgtcattatcaatattatcggcgcgctgctgacgttgatctgtgagattaccgatctggttttctcctgcctgaaagggccgctgtggcggcggctgttgatttccctgctggtttttctggtgatgctggccggactttgctggcggtgggggcgttaa

SEQ ID NO: 453944 - DNA, 1443 bp, Serratia marcescens
atgattacaaagccaataaatagccaaatctcaagcgcgatgacagcggcagcgccggatgaaaacgggcagagcgtctgcgataatactcttcgccatgatctggcgcagccgaccggtgctgggctgtcgggttaccaaaatccagagggtggatcttctgcgactaccgtggcgagaaagctgcgcacatctatcgacttggctgctgatttcgtttctggcggtgagattagcggaaaccctgaccttactgaacaattgcaggcagctatcgatgcagccttcgcattgagggttccagttgtcacggtaacgggcgtgtttaagatatcagacacaattttattgcgtaccggggttgaagtcagagggcaaggcgcacattacacatatatatcagccagctcatcactgcagggaaagacagcattccgtacagttaagcaatccagaacggaaagaaataaggactgtaaaatgacagggataagttttgatgccaatagcgtgttgggcgttgttggtctggatatcgatgagtcagattactttaaaatagaaaactgcagcttttggaattgtgaaaatgggatcgcatacaataagtacacgtgggatactagagacgctagcacaataccgccaacatacccaaatgcaaataacattacagatggcggtatgtcgtattttggtgttgtacaaggcgtatcacttccttcatgtacgattgcgcataaatactacggggtagtaaataggtgtacatacctatcgaatagctactcaaactgcggtgttgtctatgatttcgctgaacctcacgcggtcgtagaaagcaatacgtatatcagttgcaatatagaagggtgccggagcgcgtttgagtggccaaactacggggagaataattactctccgtttagtaatacatggataacgaccagtatcgacaataacaacacattcacgacgctcgtgaaggatccgggaaggcagacgtttatagggttgtctctattccctagagacgatatgagtaaggtatcatattacaatataaatcaggagcatggtcagtatagcactttggttgggagtaattttgacccaaggtacgcaacctatcgacagtttggagccacattcaatgagcaagtaaatgcaattagagggataaataataaagtttttggcactgcaaattataacgcaacaattgcacccggggaagttggggaggtaataatgcacattgatgggtttacgcctggaatggcagtttgccttggcttcacaaacagtaatcctgaactcattattaaccattcagccgtggctggaagtagtttgctcattactttttgcaataaatctactgatagtatacatctaaatacaataatttcagcgacatgttttggtggagtgtcaatgtag

SEQ ID NO: 453945 - DNA, 150 bp, Serratia marcescens
atgcaccagttcgtatttttccaccagaaaattcacggcatcagccagcgtgataccggcatcgatatgttcctgtataacacgttcctcactgaatggtgtgtcgttgagggtgagaccatagtgctgttccagcagacgtttcagtaa

SEQ ID NO: 453946 - DNA, 318 bp, Serratia marcescens
atgagcaacatcacttggggcctgcagcgcgatatcacgccgcgcctgggaacacgtctggtgcaggagggcaaccaactgcattatctggctgaccgagccagtatcaccggtaaattcagtgacaccgaatgccggaaactggatgaaacattcccgcactttgtccgccagatggaatcgatgctgaccaccggtgagctcagtccccaacacgcccactgcgtcaccctgtaccacaacggtttcacctgtgaagccgacacccttggcagttgcggctacgtatacatcgccatttaccccactcagcgttaa

SEQ ID NO: 453947 - DNA, 300 bp, Serratia marcescens
atggagcgcttttgtgatgagtacaacggtggtatctggtccttttatacgctcagcaatggcggcgcgtttatggcccctgatgcggactgtggtgataaatggcatctgttcaacagcatgaacggtaatggtgtggaaatgagtgtggaagcggcaggtatcgcggtctgcctgattgaatacagccatcacgcctgtcgtacagaatgtgacgcaatgaccgcacactattatcgcttgcgggactatgccctgcagcatcctgaagctcacgccattctgcgtatcatcgactga

SEQ ID NO: 453948 - DNA, 1668 bp, Serratia marcescens
gtgcatcttgcgctgtaccaggccattaccggaccagaagaacaccagaaagcctataaacaggtggcgcctgatttcttcgacctgattgtcattgacgaatgccaccgtggcagcgcctccgaagattccgcctggcgagaaatactggagtatttcggcagtgccactcaggtcggtctgaccgcaacgccaaaagaaacggaagacgtctccaatatcgattacttcggtgagccggtttacacctattcgctgaaagagggtattgaagacggtttcctcgccccttacaaagtcgtgcgcgttgatatagacgttgatgtccagggctggcgacctgtcaaaggtcaactggataaatacggcgaagaaattgaagaccgtatctacaatctgaaggattttgatcacacgctggtgattgatgagcgcaccatgctggtggcgcagaccatcaccgattacctgaaacgtaccaacccgatggataaaaccatcgttttctgcaacgacatcgatcacgccgatcgaatgcgccatgcgctggtggtgctcaaccccgagcaggtgttgaagaacgaaaagtacgtgatgaagatcaccggcgacgatgatatcggcaaggcgcaactggataactttatcaatcctaaaaaagcctacccggttatcgcgacaacgtcagaattgatgaccaccggtgttgatgctcagacctgcaagctggtggtactggatcagaacatccagtcgatgaccaaatttaaacagatcattgggcgcggcacgcgcatcaacgaaaaacacggcaagctgtggttcgccattctcgatttcaaaaaagcgaccgagctgtttgccgacccacgctttgatggcctgccagaaaaagtgctggtggtaaaacccggtgatatttctgacaaaaattcagacttcaatgaacaactggatgcggaaaataacgctgatggcggtgataatgacgccagtgaagcgcgagaagacgtcgctgactatcaggtcaatcgtgacaagcattcgggaaacggtgagttccatgacgatcatgaaaacaaagtccgcaaattctatgtgaatggcgtggatgtaaaagtgctggctaagcgcgttcagtattacgattctgatggcaaactggtgaccgaatccttccaggattacacccgtaaaacgatgctcaaagatagcgaatacgcctcactggatagcttcgtgcgcaaatggcaggatgcaccacgcaaacaggtgatcatcgaagaactggagcaactggggattctgtgggacgtgctggccgaagaggtgggtaaagatctcgacccatttgatttgctctgccatgtggtgtacggtcagccgccgttaacccgtcaggaacgcgtggccaatgtgcgtaagcgcaattacttcaccaaatacgccgagccagcacagcaggtacttaacacgttgttggataagtacgccgatgaaggcgttcaggaaatagaggacgttcaggtactcaaactgaagccattcgatacgctggggcgtccgatagaaatcatcaaaacccgctttggcgacaagaaggcgtatgagcaagccgtcaacgaactggagaacgaaatctaccagttaccgccgcgctcggcctga

SEQ ID NO: 453949 - DNA, 1743 bp, Serratia marcescens
  misc_feature (191)..(200): n is a, c, g, or t
  misc_feature (1690)..(1699): n is a, c, g, or t
atgatgaccattgagaagctgattaccgaccatatcgatatttggtcttctgcactgcaaacccgctccactgccgggcgcggcagcaatggcaaaattgatctctacggtatcaagaaactgcgcgagctgattttagaactggcggtgcgtggcaaactggtgccgcaggacccgaatgatgaaccggnnnnnnnnnntgagttactgaaacgtattgccgctgagaaagcggagctggtgaagcaggggaagattaaaaaacagaagccgctgccggaaattagcgaagatgaaaagccgtttgagctgccggtagggtgggagtgggtacggttattagatattgcaacgctaattggcgatggtctgcatggaacaccaaattatgtagatcgaggacattatttttttgttaatggtaataatttaaaaaatgggtgtatacagataacaaactctacaaaaatggtaagtgaagatgagtttaaaaaacataagaaagagttaaatgagagaagtgtacttctttctatcaatggtacgcttggtaatattgcctattataataatgagccggtaattcttggtaaaagtgcttgttatataaatctgacaagtgaaatggcaaagccttacttaaaaatgctatttgagtcatgctactttaagcaatttgctatgagtaacgccaccgggagcactataaaaaacttaggccttaaatctctttctttaatgcttgttcccttggctccaaaggaggagcagaatcgtattgttgctcacattgaacaaaatttgattctatgcgaccaactggaacagcaatccctaagcagtcttgatgcgcatcagcaactggtggatactctactgtcaacgctgaccgacagccagagtgccaaagaactcgtcgaaaactgggctcgaatcagccagtatttcgacacactgtttaccaccgaagcgagcatcgacgcacttaagcaaaccatactgcaattggctgtgatgggaaaactggtaccgcaagatcctaacgacgaatctgcttatgagctgcttaaacgcattgaacaggaaaaagcgcaactggtgaaagaaggtaaaatcaaaaaacaaaaaccgttgccgcctgtgaatgatgaggaaaaaccatttgaattaccggagggatgggagtggtgtaagttacaaaacatcacgtcaaaaataactgatggtgatcataaaaccccaccgagaattactaacggccataaattactgtcggctaaaaatgttcgagatgggtatattgattatgataactgcgactatatttctgaaggggattatcttaaatcaagagagcggtgccttcctgagatcggtgatcttttaattgtatctgttggcggaacaattggtcgtagttctttaataaaagagagtgctaactttgcactagttagaagtgtagcaattataaaaccattgttgtttaactctaactatcttaagttttcaatggactcatttttattgcagaaaatcatcaatgaaactaaacgggggggagcacaaccttgtttgtatctttctgaaatatcgaattttcttttccctatgcctccagagaaagaacagaagcgaatagtttcaaaaatagaacacctttcgtcaatttgcgatcgccttaaatccnnnnnnnnnnagctcaacctggcggatgccctcgccgacgcagcattaaactaa

SEQ ID NO: 453950 - DNA, 1101 bp, Serratia marcescens
atgccggttcatcatgcaatctggcggataggggagaatccccagccgctaactatcagcaaactcgccagcgagcaactgctggagaagatgattttaaacgaccccactatcctctctgatcagtggatgatcatcggccatcaggaaaatacgctcgataaagggcgtatcgatctgctggcgattgcgccggatgcctcgctgatcctgattgaactgaaacgcgaccgcacgccgcgtgaagtggttgctcaggcgctggattacgcctcctgggtggatgacttaagtgccgagcgtctgtcgcagatttacgatagattttccggtggagggaacttgggtgacgcattcagacaacgcttcaacgccgagctggaagatgattccatcaacaagtcacatcaaatcattattgtcgcagcggagctggatccctccaccgagcgtatcgtcgactatctgagcaagaacggcatctcgattaacgttctgttctttaaagtattccagcacggtgacgaacaattcttaagccgcgcctggcttatcgatccgagcgaaacgcaaaccaatgccgcacagtccactgccaccagcgccagtgcgaaagaaccctggaacggtgagttttatgtctcgtttggcgattcaaacagtcgcgtctgggaagaggcgcgccgctatgggtttatcagcgcggggggcggaagctggtacagtcagacgttaaaacagcttcagcctggcaatcgtgtatgggtaaaaatcccggcgaccggttacgtcggcgtcggtattgtacagagcgccgttgagcctgccagtagcttcaccatcaacactgacgacggcgaaaagcgggcgatggatgtgcttaagtacagcgatctctatcatcggaacgcagatgaccccgataaatccgagtattttgttcccgtgaagtggctggaaacccgcagtgagcaagacgcggtgaatgaggtcggattcttcggcaatcaaaacacagtgtgtaagcccaccacgccgaaatggcgtcacaccgtcgaaaaattaaaactctattttaaaagctgggatattcaagtgtaa

SEQ ID NO: 453951 - DNA, 189 bp, Serratia marcescens
atgccagtcaaaagactggtaaaagaatacttcaccgagatggaacaggcttttcataccgagcccaaattttcccaccgcattttcgtcacccggtttggtgccaatgccaatggagaggatcccctctacatcttcgagtgtcagcggcgcattattgataaagaaaagcgcaggatcacccagtaa

SEQ ID NO: 453952 - DNA, 1293 bp, Serratia marcescens
gtggaacatatctcagcattgttgcagcagttgcgtcagcggctggcgcaacctttcccagacgcggccggtttccggcagatctcccttcccgtcagtgacgcatgcagcgacgacctgctggcgtggttggcggcgcaatccacgtttccgcagttttactggcgtcatcgggatgagcaggaagaagtggcggtatgcggcgcgctgcgccagtttagcgatgcggccgccgcgcaggcgtttattgcggcgcaccccacggcgcgcgtctggggattaacggcctttgacggcccatcctgcctgtttttgccacgcctggcgtggcagcggcgcgataagcgcgcgagcctgacgcttaacctgtttacggaaaaagcggcggagacggccgactggctggcgacattggcgccggcgacgccgatcgcgccgctgcggacgacggtcgagacggtggcgcactatcccgatgcggcgggctggacgcagatgctgcagcaggcgctgacggcgattgccgcagcgcggctggagaaggtggtcttggcgcgctgcagccgtctcacgctggcgcagccgctgcctgcgccggcgctgatggcggccagccgccgggtaaatcatcgctgctaccactttatgctgcgttttagcgccggctccgcctttctcggctccagcccggagcggctctatctgcgcgacggacggcggctgttgaccgaggcgctggccggcacggtggctaacgacggcgatgacgcccgggcgcagcagttggcgcagtggttgctggacgaccgtaagaaccagcatgaaaacctgctggtggtggatgatatctgccagcgcctgcaggggcgcgtcagcgcgctggacgtgcagctgccggaagtactgcgtttgcgtaaggtgcagcatctgcgccgccgcatcgccgggcagctgcagacggcggacgatgcggactgcctgcagcgtctgcagccgacggcggcggttgctggtctgccgcggcaggcggcgcgggcgtttatcgccgcgcatgagccggcggcgcgcggttggtacgccggctgcgccggctatctgtccgccgagcgctctgagttttgcgtggcgctgcgctcctgccagattgacgacgacagcctgcagctgtatgccggcgccggcatcgtcagcggctccgacccggcgcaggagtggcaggagctggacaacaaggcggcggcgctgcgcagtctgctgcagccggagccgacgacggctgaggccgcggattaa

SEQ ID NO: 453953 - DNA, 1392 bp, Serratia marcescens
atggcgcagctgaacgactggccgtggcgttactgggcgcggcggcggccggcggacaccgcgctgacggtagagcggcagacggtcagctggcggcagctgcggcagcgggttgatgcgttggcggccggcttccagcgtcagggcgtgacgccgggctgcggcgtggcgctgtgcggcaacaataattatccgctgctgctggcctacctggcgctgctgcagtgcggcgcgcggctattgccgcttaacccggcgctgccggcgcagacgctggcggcgctgctgctggcgctggatatgcggtttgccgtggcgccggacggtgcgccggcgggaataagcggcgtaccgctgctggacgtcgatgcagcgggtagcgccgaagcgtgcgacagcggctggcagccggggcggctggcgacgctgacgctgacctccggctccagcggcctgcccaaggcggcggggcacagctgcgccggacatctggccagcgcggaaggggtgttgcagctgatgacgtttcaacccggcgacagctggctgctgtcgctgccgctgtatcatgtctccgggcagggcatcgtctggcgctggctggcggcgggggcgcagctggcggtacgcgccggcatgccgctggcgcaggcgctggcgggctgcagccacgcgtcgctggtgccgacgcagctgtggcgtttgctcagtcagccgcaggcatcattaacgctgaaagacgtgctgctgggcggcgcgatgatcccgctgtccctgacggagcaggcggaggcccgcggcatccgctgctggtgcggctacggcctgaccgaatttgcttcgacggtgtgcgccaagcgcgccgatgggctgccgggcgtcggtatgccgctggcgggacgggaaatccgcctggtggatgaggaggtgtggatccgcgcggcgagcatggcgctgggctactggcgcgatggccggctgtggccgatcggtgatgcgcagggctggttccacagccgcgatcgcggcgtgatggcgcagggtgaactgcgcattatcggccggctggataatctgtttttcagcggcggcgaaggcgtgcagccggaagacgtggagcgggtgctggcggcgcatccgcagatctcgcaggtgtttgtggtgccggtggatgacgccgaattcggccagcgtccggcggcggtgattgaaggggacggcgagctgtcgctggatgcgctgctgcagtgggcgcaggggcggctggcgaatttccagcgtcccgtggcgctgtggcatttgccggagcagttaaaaggcggcggcatcaagattgcgcgccggcaggtgcaggagtgggccggccggcagtggcgggcggcggatcgataa

SEQ ID NO: 453954 - DNA, 417 bp, Serratia marcescens
atgccgctcacccttgaacgcatcattgaaacggcgctgtacgtcagcgacatgccgcgcgccagccatttttatgaaaccgtgttacggctgccggcgatggtggtcaaagagcgctttcgcgcttacaacgtcggcggtcagaacgtgttgctgctgtttatccgtggcgacggacggcaagggttccgcgaagaggccggctatataccgccgcatgacggcaacggcccttatcatctggcctttgcggtcagcagggcgcagctgccgcagtgggagcaacgcttaagtcagcacggcgtggaaatcgaagggcgcatgcgctggccgcgcggtgcggaaagtctctatttccgcgacccggatggccatctgctggaattggcgacgcccggactgtgggataattattaa

SEQ ID NO: 453955 - DNA, 444 bp, Serratia marcescens
gtgaaactgtcaacgcactcaatacgcacgctggcctggctgggtctgtttgccatgctgatggtgtttgccgggccgttaatctccgcacagttggcaaaaaactcgcagcataacagtatgatgggcatgaatatgccgatgggcgagcacatgatgatgatgcatcatcaggccgacgacgcccccgctgcgcggcaccacgccgccggcatgatggacgaagacagcggcgatttttgcggttactgcagcctgttccaccatagtccgccgctgcagattacgctgccgcccttcctccacgccccattatccgccggcacgattagcgccgttattattcccgctccggttatccgccgattattccagccctatcaaacgcgcgctccaccgaaaaatattaacgccaataatattaaatccacgtttatactttaa

SEQ ID NO: 453956 - DNA, 645 bp, Serratia marcescens
atgtctgatgtcgtaaagataagcacctttaacagccaccccaaggcgcaggtgatgcgcgaatcgccgctggcgctgtcttaccgtcataccggccggccggaggccggcgaacacagcggcgtaacgctgcgcgagcacccgttccgcgggcatctgattctgcgcggcggcgccatcgtgctcgatcaggcgctgcgcgacgtgctggggatcggactccccggccagccgctggggctggtcagcggcgacgacggcgaaagcagcatccaatggctgtcgccggacgaatggctgctgatcgtgccggaaggcagcgagtttgacgtggagaaacggctgcaggcggcgctgggcgacgcccactacgccatcgtcaacgtcagcggcggccagacgctgctggagctgcggggggaaaaagttcgcgagctgctgatgaagtcggtggtctatgacgttcatccggacaatttccccgcgggcaaggcggtgaccaccgtcttcgccaaaaccaccgcggtgctgcgccggcccgacgaggcccgctgggagctgatcgtcagacgcagctttgcggattacctctggcgctggctgctggatgccggggaagagtacgacattggcgttatcccgtga

SEQ ID NO: 453957 - DNA, 402 bp, Serratia marcescens
atgctggacacctgtatttgctcttacattatgcgcgagcagccggcagcggcgatccggcgtctggagcaggcggtgatgcaacgccaccggatcgtggtgtcggccattacctatgccgaaatgcgctttggtgcgatcggtaaaaaggcctcaccgcgtcatgcgcagctggtcgaggccttctgcagccgccttgacgccattttgccgtgggaccgcgccgcggtggatgaaaccacggcgctgaaggccgcgttggccgccgccggtacgccgatcgggcccaacgataccgcaattgccggccatgccatcgccactggcgccattctggtcaccaataattacaaggagtttgcgcgcgtgcccgggctggcgctggaggactggtcggcatag

SEQ ID NO: 453958 - DNA, 231 bp, Serratia marcescens
atgagaacagtatctgtgtttaaaaacggcaataaccgcgcgatccgcctgccccgcgatatggattttgcaggcgtcaacgaactggagatcgcccgtgaaggcgacaccatcatcctgaggccggtaaagccgagctggggatcgtttctgctggaagacaaagccgatgcggactttatgacggaacgtgaagacatcattaatgacgagggacgcgtcaaaccatga

SEQ ID NO: 453959 - DNA, 468 bp, Serratia marcescens
atggattttgtgcaacgcacgatcgatctggccatgcagaacgtggaggaaggcggccggccgtttgccaccgtcatcgcgcgcaacggtgaaatcatcgccgaaagcgccaaccaggtcgcccagaccaacgacccgacggcgcatgccgaaatactggcggtgcgcgccgcctgccgcaagctcggcaccgagcacctgacggactgcgacatttatattctggccagcccgtgcccgatgtgtctgggctcgctctactactgcagccccaaacgggtgatttacctcaccacccgcgaagactacgcgccgttctataaggacgaccgcaagtactttgagctggaaaccttctacgatgagtacgccaagccgataggtgaacgccgtctgccgatgattcagcaacggcatcagggggcaatcgccgtgtatcagcgctggcaggcgctgaacgcccgctga

SEQ ID NO: 453960 - DNA, 471 bp, Serratia marcescens
atgattcagtctcaagtaagcaaccacgcgcgtcaggcgctgaccgaggttattttgctggccaaggcccgccaggacctctcctttgcccaaatcaccgacggcaccggcctgagcgaagccttcgtcaccgccgccctgctcggccagcacgcgctgccggcgcaggccgccgccagcgtgggggagaaactggggcttgacgccgacgccgtcgcgctgctgcagagcatcccgctgcgcggcagcattgagcagcgcattccgaccgacccgactatttatcgcttctatgagatgctgcaggtgtacggcaccacgctgaaggcgctggtgcatgagaagttcggcgacggcattatcagcgccatcaactttaaactggacgtgcagaaagtggacgacccggaaggcggttcacgcgcggtgatcacgctggacggtaagtatctgcccaccaaaccgttctaa

SEQ ID NO: 453961 - DNA, 657 bp, Serratia marcescens
atgaaagacattattgaaggtttccttaaatttcagcgtgatatcttccccgagcgggccgcgctgtttcaggatttggccacgcggcaaagcccgcgcgcgctgtttatctcctgctccgacagccgtctggtgccggagctggtgacccagcgcgagccgggcgatctgtttgtaatacgcaacgccggcaatatcgtgccgtcctacggcccggagccgggcggcgtatcggcgtcgattgagtacgccgtcaccgccctgcaggtggccgacatcgtgatttgcggccactccgactgcggcgccatgaccgccgtcgccaactgcagctgtatggagcacctgccggcggtcagcgcttggctgcgctacgccgattcggcgcgcattgttaacgccgcgcgtcagcacccgacgccgcgcgccaaagtggacgacatggtgcgtgaaaacgtgattgcccagctggcgaatattcagacccaccctgcggtgcgtctggcgctggaggaaggacgcgccgcgctgcacggctgggtctatgacatagccagcggcggcatcgatgccttcgatggcgcacgcggcgcctttgtttctctggcggaccatccgcaaacccgcgcactgccccgccagccggcggcggtgtaa

SEQ ID NO: 453962 - DNA, 885 bp, Serratia marcescens
atgcttctgcggcacatcaactattttattgcggttgcggagcaccgcagcttcacccgcgcggcgtcggcgctgcacgtttcacagccggcgctgtcgcagcagattaaacagctggaagagcggctcggcgcgccgctgtttgaccgcagcggacgggaaattcagctgaccgacgccgggcaggtctatctgcgctatgcgcagcgcgccttgcaggatctgtccgccgggcagcgggcgatccacgacgtcagcgatctgagccgcggcgcattacgcatcgccgttacgcccacctttaccagctatctggtcggcccgctggtggaggcgttttatcagcgctatccccggatcacgctgtcgctgcgtgagatgtcgcaagagcagatggaggaacagctgctcgacgatcggctcgatcttggcattgccttcgaagaggtgcgttcgacggagatcgttacgcagcgtttgctggtggaaacgctggcgctggtggtgggccgccaccatccgctggccgggcagcggacgcttggcctgcaacagctgaataacgaggcgctgattttattgacggcggaattcgccacgcgcgagcagattgaccgttactgcagccgccagggcatttatccccgggtgcagatggaggccaactcattaagcgccgtgctggaaatcatccgccgtacgccgttatctacgctgttgccggcggcggtggccaaagaacaggccggggtggtcgccatcgcgctggagccgcagttgctgcagcgtacggcggtgctgatgcagcgccgcggggcgtatcagaccgccgccgcgcgggcgtttatcgcgctggcgcaggaaaaattaccggatgacggttaa

SEQ ID NO: 453963 - DNA, 1152 bp, Serratia marcescens
atgcagcctgctaagaagtggtcacaagaactggaagggctacgggggttggcttccctgtgggtcgttctgggacatatttgcatcctggtcgattttcacttccccatcctgtctgaccccgccatgggcgttgacctgtttatcctgctgtcaggctatctgatggcgaaaaactacatggagcgtaaagagaaagagccctggaccgccgccagcaccttcaaaaaattctggctgcgccgcttcttccgtatcgccccgctctattatgtgctgctggtgttcgccattggttttggcagctatttcggcgaagcgcgcgacgctatcgcccagttctatccgggcacccagaccaataccagccgctacagcgacggttcgctgatgaacctctttacccacgtcagcttcctgtttggcttcctgccctactattcatttaataccgtgttgccggactggagcatcgggctggaaatgcagttctacttcctgttcccgttcattatgctgggcgtgatgcgcttcggctttgcagcggcctgtatcgcggtggtattactctgcgtcggcgccagaacgctgtggcctgattacttcgccgcattcccgatgccatcgatgatattgatcaagctgaacctgtttattgccggtatgctgatcgccaagggcgtacgtgataaaagcgtcggctatattctgttggccctgctggccacggtcgccagcctgtatcagcacgacagtatgaacaagctccgctatgccgcgcagctcggtatgattgtgatgatggcgaccatcctgtggagccgtgccgagcacagcgccattgccaaactgttgcgcctcccgcgctgggtgctcaccaacaagttcagcgtatttctgggcgacgtctcatattcggtctatctgctgcacttgctgattgtgctgccggttatcgcgcatctgctcacaggcagcgcgtttgccgacctggccggcccggtaaggtttgccgccgccgccgcgattattctgcccgttacctacggcatcagcctgttgctgtatcgctttgtcgaaaagccgggcatcaagctgggtaaaaccattattgaacgcggccagaaaaacaaagccgtggcgctgccgtaa

SEQ ID NO: 453964 - DNA, 546 bp, Serratia marcescens
atgactaatcaacgaattattctgaccggcggcccgggttcaggcaaaagcacactgattgacgccctgagccaacgcggctatgcatgcagcacggaggcgggccgggccattattcagcagcaggtcgccacgggcggtaatgccttgccctgggaagaccgtcaggcatttgccgagcggatgctcagccgcgagatatgcgcgtggcagcgcgccggcagcgccgagacggcgtacttttttgaccgcggtattcccgacgtggcgggctatctgacgctgtgccaactccccgttcctgctcatctggagcaggccatagcgcactttcgctatgccgagcgcgtatttattgccccgccgtggcgtgaaatttatgcccaggacacagagcgcaggcagtcgttcgccgaggcggagatgacataccaggtcatgcgtgcaacctaccaacaatacggttaccgtctgctggaactgccgcgcgtaccgttagaggaaagagtaagctttatgctcgccgccctgcggcatgcgggctga

SEQ ID NO: 453965 - DNA, 462 bp, Serratia marcescens
atggatacggttgaagagttggatggtaagtattttttcaacggaatgagcctcgacaaagatgaacttctcctgtggctgattctcgatgagtttcagaaacagttcagcgggatggttgacttactggctatcgcctccatgttggtcagtctgcccgtgattcccgtgaaggggaagatcggtaaggcctctggtaaaggtacatcaggaagcagcccattatctatcgcctcacgtacgctaattcaacaaaggtttaagaaagcccaaaaaactattacatgggccaaattaagacgtggcgagtgggcttacaccacaagtattggtgcctatgttggccgctggcttccttggattggtgcagttctgacaacctatgatttagctatagtaacccgtaatgtcatccgccgttatgagcttatcattgggaaagggggggtagggaatgaatga

SEQ ID NO: 453966 - DNA, 315 bp, Serratia marcescens
atgaatgaagttaatgaagtccacgagttactcagaaaacacttctgggaaatgacgaatgatgcgtcgctgagtacaggtaaaaagagcgtactccctgaagatgcttatggttttctggaagagtacgcggatcaactgcatgttgatatgagcagttttgagtttcgcaaatactttccaaactcggggctttggttcttacccaatgctatcctccccaaacatatgcaaacagatcgccataagccggcggcgttaactgtcgatatgctgattgaatctgccaaggctggccggtggctctatgattag

SEQ ID NO: 453967 - DNA, 294 bp, Serratia marcescens
atggtagataaaattgaagcgcgcatttttgaactggtggaaccctataatgggcgctcttggctaacgtttaacaagccggttcttactggcgatagcgcgttgaatcacaccatgagaatggatgagcaggaagcgatggagcttttggatgaaattttcacagaatttcaccttgaacatgacgccttggacttcagtacctattttcctgctactaaggcgcaatcaaaacccctcactatcaatatgctgattgaatctgccaaggctggccggtggctctatgattag

SEQ ID NO: 453968 - DNA, 1791 bp, Serratia marcescens
atgcgcgtttttgccgctctggtgcttgccgcactgagtttagggttgcacgccgaacagcttaatgaaagctatgcgttcgcactgctcggcgatcccaaatactccaacgatttcagccactacgattacgtcaatccggcggcacccaagggcggcgatatccggctggcggccatcggcagctatgacaatttcaacccctatgccggccgcggcgtgccgggccagcgcaccggcgagctgtacgacccgctgttcgccacctcggatgacgagccggccagctactacccgctgattgccgagtcggcgcgttatccgcaggatatgcgctggatggagctgaatatcaacgccctcgcccgcttccaggacggcagcccgatcaccgccgccgacgtggcgttcagcttcgataaatttatggcggaaggcgtaccgcagttccgggcgtattatcagggcgttaccgtcaaggccatctcacgcctgacggtgcgcatcgaacagcgcagagcggatcgcgtacagatgctcagcctgctggggctgaaagtgctgccgcaaagcttctggcagaagcataagctcagcgaaccgctcagcacgccgccgctcggcagcgggccatataaaatcagcgattatcgcatcggccactcgattacctatcagcgcgtgcgtgactactgggccgccagtctgccggtcaaccgcggccgcttcaatttcgataccatccgctacgattactacccgaatgaacaggcggcgctggcggccttcaaggccggcgcctatgatttccgcagcgaaagctcagccaaaagctgggcgagccagtatcagggcgataatttcagccgcggttatatcgtcaaacgtgacgatagcagccagacggcgcaaaacgcccgctggctggcgtttaatatcacgcggccccccttcaacgacccccgggtgcgggaagccgttacgctggccttcgatttcgatgcgatgaataaaacgctctacgccgacgcctaccagcgtaccgacagctatttccagaacacgccttacgccgccaagggctacccgaacgccgaagagctggcgctgctgaaaggccaggtgccgccggaggtattcacccgcgtttatcagccgccgcgctcggacggcagcggcaacaaccggcaaaacctgctcaacgccgcccggctgctgaaagaggccggctgggaggtcagaaaccagcgcctggttaacgccagcaccggccagccgctgaccttcgagctgctgctgccggacaacagcgccttccagtacgtacagccgttccagcacagcctgcaacagctgggcatcacgctgcaaccgcgtgaagtcgatgccgttcgatacgcccagcgcctgcggcagcgcgattacgcgatggccgccatcgtctatccggcgatggcctaccccaacgccgatttgtcattctactggggatccggcaaacgtgacgccggctataacgccgccggcgtcagcgatccggcggtcgatgccctgctcgcgcagatcgtcaaaaaccagcataacccgcaggcgctgctgccgcttggccgggcgctggatcgagtgctgacctggaaccgctatatgctgccgatgtggtactccagccacgttcgctatgccttctgggacaaattctcctccccgtcagtccgtccgaccaacgccgtcggtctgaacgactggtggttcgacgtgaataaagccgcgcgactgccggcgcagcgctga

SEQ ID NO: 453969 - DNA, 1593 bp, Serratia marcescens
atggggttaaaaaaggcatttacccgccatatatcacatcgtcggcgcagcctggttaaaagttgtattgtggccctggtcttttttatcctgttcagctcggcaacgttgtttttgatctatcatcaacgcgcgcaattccaccaggatcttgcgcagcgcacccagcgcttcgccgtgaattatttaaacacgctgaccggcgtaatgcgcaatatactgccgctgacgcgggaaggctgccaggcggccctgccggagattggctaccgcgctgcgttcacgccggacgtacgcacgtttttgctgattaaaaacggcgtcgcctactgttcgtccgccaccggtgatatgcagagcgaactgaaagccattgctccggaaattaacgggcaccagccgctggatatgaaactgcaggcgggcacgccgatgatccccgaccggccggccgtgatggtctggctgcgcaagcccggcgacagcgccgacggcgtcctggccacgctggatattcatctgctgccctatctgctcagtacgcccggcgcgaaaaactccggcgtggccgtgattatgggcacccaggccctcaccaccttctctgccgatctggtcccgctggaccgtctgccggcctatcagtccgaccggctgtccatccccggctatccgctggcgctgctgttctataatcagaaactgaccagcaatgacatccgcctgacgctgctggccgctctggtgctgtctctgctgattggcgtgctgtgctattacgccatgctgctgcgccaaagccccgaacgcgcgctgctgcgcggcatgaagcgcaatgagttctttgtcgaatatcagccggtgttccataccgccagcaacgccatttccggtctggaagtgttgctgcgttggcagcacccgaccgaggggcgcatcccgccggacctgtttatcccctatgcggagagcgaaaacctgatcgtgccgctgacccgccacctgttcaaactgatcgccggcgatgccgtcaagctgaccgaagcactgccgccgggcgccaagctgggggtgaatatcgcgccgtcccacctgcgtgaccccggcttccatcaggacgtgctggagctgttaacgcagctgccgcagcacgactttacgctggtgtttgaaatcaccgaacgcgatatcgtggaggaagactgcgcgcagcaggagtttgactggctgcaccggcaagggatcgagattgctattgatgatttcggcaccggccacagcgcgctgatctatctgcagcgcttcaccatggactacctgaaaatcgaccgcgggttcgtcaataccatcggccgggataccgtcaccgcgccggtgctggacgcggtgttgacgctggcggacaagctgcagatgcgcacggtggccgaaggggtggaaaccgctgagcaggtcggcttcctgcagcagcgcggcgtcagtttcatgcagggttactattttagcaaaccgttgaaaatcgatgattttgtcgctttttgccaggcaaattcggtctataattgcctgaccggtgaaaccaccggcccttag

SEQ ID NO: 453970 - DNA, 312 bp, Serratia marcescens
atgaatacccataggtttatcactgtcgtaggcgcattgtgtttatggatgatggccggccatgccggcgcgctcggcggcaccgtccgctttattggcgcagtggtggagagcccttgcgagctgaatattacggcaacgacggcgcagacggaatgttatcgcaatgggcgtcactatcaaagccagcaatacaccttgccgaacttcgagacgacgcgcaaagaactgccgcagcatttgggtacgacggagattcgctgggtggatcagcaacaacaacttgccataatgacgatagattatcgttaa

SEQ ID NO: 453971 - DNA, 1947 bp, Serratia marcescens
atgttaacgatttgcttatactttcgcatcattttgcttactttaggtgagattgtgaaatacagagcagatatcgacgggttacgggcgctcgccgttctgccggtcatcgcatatcatatgggatttcccggcattcccggcggatttaccggtgttgatatattttttgtaatatccggctatttaatttccggcattatctttcaggaatatattaagggtgacttttcctacgtagacttttataagcgccgcagcttaaggattctcccgccgttatttgtcgttttacttgtcactctggctatcggttaccatatactgcttcccgcacaggtcgccgaactgggaaaaagtgcactggccaccacgttattttcctccaactttttcttttttagccaaaccggttacttcgacggaccggcagaattaaagccgctgctgcatacctggtctctggcggttgaagagcagttttatatcctgttcccgattattctgtttaccgcattaaagttcttccgcaaccgcaccacgctgatgattgtgcttattatcatcggctcgtttatgctcagcctgctggggctgaagtttcagccaagcatgacattttatatgctgccgacccgcgcctgggaattggcgctcggcgctctgttggcggtaggcggactggagcatgccgcattgctgaaaaaaaccgcaacccgccacgccttgagcctgctggggttggcgctgatcgtctttggttttctgtggctggacaccaccaaaaaattcccgtcgtataatgccctttacccttgcgtgggtgcatttctgattattctttccggccgtgatgccattatcaacaagatcctggcgatcaagccgattgtctatattggcatgatctcctactgcctgtatctctggcactggccgattatcgtctataccaatatcctgtttgacggcgcgctgtggcagaaaagcctgctggtgctttccagcacctttattctggcaatcgcctcccgctatctgatcgaaattccgttccgctataagctgaaaaacgtaccgtcaaaacgtattgttaccgcctcggccgccagcgtggtgctggccgcctcgctgacgtcggttatcggctactggcaatatgacaatggaaacttttccgacagctcgttgaaaattgccgattacattaattaccgcaccaccagcgaatataattatcagtaccgctttggtgaatgttttatcaacggtgaggcaggcagtaccggcaattacgacaaagagcattgtctgaaattgtctgataccaaaaagaacgtcgtgctaattggcgacagtcatggcgctcacctgtggcgcgccatcagcctggcggcgggcgaaaacgtcaacctgatgcaggccaccgcttccggctgcaaaccggtcaccgaacaaaagttcagcaaccgctgcaccgccattatggactatgtctacaaagagttgcttatcaagcataagatcgacggcgttatcgtctctgcacgctggaatgaatacgacaaaccggcgctgatcaagactatcaactacctgaagcagcacaccaaaaacttctacatcctagggccgaccgtcgagtataaagggccgctgccggaactgctggcctatcaggaaaatggcgatccggcgctggccagccgctccgtcgtaaaaagccgtaaactgatggacagtgaactcaaagccctgtctagctcgatgaaaaccaactacatctcggtttacgatttagtctgtccgggggatcgctgcctggaaatgaccaccagcggccagcctgccgccttcgattacggccatttcaccctgagcggagcaaactacgtcgcgaaggggattgtcgaacagctcaatactcatcacttcttttccccgtag

SEQ ID NO: 453972 - DNA, 390 bp, Serratia marcescens
atgcgcatattcgcaatcgcaattttggccgcattgctgggcggtttttactacatttttcttgcagagagcgatgtagccgttattgatgcgcattatgacggaagtactgcggcggtcattgttgataggctaccttctgccgaagcggaaaagatcgcctggtggaaaagtaatcagcaaaagattagagaaaaataccgcattccttccggtggtacagggccattcctgataatggtgtatgcatttggtgatgggtacaaagaagaggggaaggaggatcgggtgtgttttagtgatatgaaaccacctcggaattgcatcgataaaaacatactcatgatggtttggcgtactcgagaaggcggcgttaagtatgagttttaa

SEQ ID NO: 453973 - DNA, 1185 bp, Serratia marcescens
atggctatcagcgatacaaaactgcgttctatacatggtaaaccatattctggtagtccagaagtatcagatgctgacggactcagtgcccgtatatcgcccaagggcgtaatcacatttcaatacaggtatcgctggcatggtaaggctcagcggttgggtattggcagatatcctgcggtagcgctgaaagacgcgcgtgcaattacatctgagctgcgtattctttatgaccgagggatagacccccgtcagtattttgaaactaagggtaacgcagacactaaggtcacggtcaaggattgcctggactattggaaagaaaattatgttgatatgtcgctacgtgaaaacactaaggaactgtataaatctaccgtcattaaacgtttaagtggcgcgtttgaaggccggccagtcacagacataacagtcaaacaatgggttgatctctttgcgcgggaagagcgggaaaacagcaggagggcgcggcaacttctagtacagttgcgctcggcgatggggtggtgtatccgtcggcatttcatacctgattgctctgtgatgaagatagaaccgcgtgatgttggtagcaggtctgagaacggggaacgggtactgacatattatgagcttgcagagatatggattgcgatagaacgcagcagggcatcaacgtcaaataagcttcttcatcagatgctgatgttgtggggggcgcgtgtttctgaacttcggttagctgagcggaacgagttcaatatgcgtgagatgatttggacggtcccaaaggaacacagcaaaacagggaaggaaattagacgcccgatcttcacccaaatggagcctttgctggaaaaagcaatgctgacgtatgacaaggttcttttccctgggaataaaattacagaacctttaactatcgcggctgctaacaggtacataaaacgtattcgtgaaggattggacttgggatactggcgtgctcacgactttcgcagaacgttggtcacacgcctatctgaggaggatattgccccacacattactgaaagaatgctggggcatgagttgggtggggtaatggctgtatataacaggcacgattggatagaagggcaaaaagaagggtatgagatacatgcagacaagttgttctggcatgttaagaagatttctggttga

SEQ ID NO: 453974 - DNA, 561 bp, Serratia marcescens
atgaaacacatgatgctcgacctggaaacaatgggtaaaaaacccaacgcacctatcgtggccattggcgccgttctttttgagccaagcactggcgacctgggcgagtggttctatactcccgtcgaccttcaaagctcaatggccggtaaagcaacacctgacgccgataccatcatttggtggatgaagcaaagcagtgaagctcgcgccgcgatctgcgttgatggaacgccatccctgctatctgcgttgtatgacctgaataaattcattcgtgccaatgtcactacgcctcgcagtctgcgcgtgtgggggaacggcgccgtattcgataacgtgattctgcgcgaatcataccagcgtgagtgcgttccgctaccgtgggaatggttcaatgacagagacgttaggacaatcgtcgagttgggccgggctgttggttttgatcctaagcgtgatatgccattcgatggagaacgccataatgccctggctgatgcaatccaccaggcgaagtatgtttccgctatttaccagtgccttatcccagcagaataa

SEQ ID NO: 453975 - DNA, 165 bp, Serratia marcescens
atgatactcctgatagcgacaatcatcagcctgctcgcatggcctgcgctgggatacgttgcggcgttattaatggccgtgaactacataatcattatatttatcgtgaggttcattgaaaatcgtaaacgagaagagatagatggctgggatgggtacgaatga

SEQ ID NO: 453976 - DNA, 261 bp, Serratia marcescens
atgacaatcacagctgacgcattggcgcagataaaagccgatatagcgaagcgtaaggcgctgccggagttcggggaaagcgcagagggaaatattcagcgcctgcgggttggagctgagacgcgtaaatcgttctcccataagacggtagagattctggtgaatgctctggaagaagcgctggccgcgcgggaggcggtgccggatggttattgcatcatgccggtggcgctgacagcagcgccggaggtgaagccgtga

SEQ ID NO: 453977 - DNA, 255 bp, Serratia marcescens
atgagcaaattaaccaaagccgaacagaagtggatcaacgacgtgcagcgggtgctggataagtgcccgtctaagcggctggggttcgccaccactggcgaccgagacgttacggtgtttgacctcggatatttaagccaaattggtgagagattggatcggggtactgccgattttgtgcagacagcggatgctatgggcgcggttttgggttcgctcaaatttcctgcgccggtcgaatcaacagctggataa

SEQ ID NO: 453978 - DNA, 804 bp, Serratia marcescens
atgtccattaacgttgtcagcttctccggcggccggacatcagcgtaccttgcatacctcatgcgacagcgggaccctagcacccatttcgtattcatggacaccggtgcagaacatccggccacctaccagtttatacgtgatgtagttaagcattgggggatcgccctggtatgtctgcgcgttgtagtaaatccagtgctcgggaaaggcaatagctaccgcgtggtcagtttagacgacattggccccgacctagaaccgtggcgcgccatgctggagaaatacggaactccatacgttagcggagagttctgcacggaccgcatgaagcttggcccgtttaaaaaatactgcgacgagcatatagggcgcaaaggctaccacacatggataggtatacgtgccgacgaaccaaaacgcctgacacagaagccgcgcaccagctacctggcagatatttccagccttggtaagcaggatgtcctggactggtggagccggcaacctttcgatctgcaaattccagagcacctagggaactgcgttttttgcattaaaaaatccatacagaaaattgccctagctgcgaaagatgaaccagcgctggcgcgtcaatttttgtcggtccttacctgtagcagcgtccgaaaggtggcaagtcgtaacgacactgacttaatcatgtaccggggtaaaaactcgttcgaagggatcattcaaatgttttctaacgatacccgtaatgagctggcagctcgaatgccgagccagcgtagtcaagcttctaaggaggcagtatga

SEQ ID NO: 453979 - DNA, 816 bp, Serratia marcescens
atggcaactttaagtcagcgttattctgcaaaagaaagtatcggttctgatattactacccgcaaaacgttcttagttccactcagcgaaatttatgccgaagagggctataacgttcgtgagttaaatcaggcacacgtcgaagagtttagggatgcgtggattgccggggaatatatacctccacttgctgttgaagtgactgaaaccggcgtgaaagtcatcgacgggcaccaccgctaccacggcgcacttttggccgttgaagctggtcatgaggtagtgcgcattgagtgcaaagattttgtgggtactgaggccgataagattgcattcatggtcactagctcacaggggctggcgctaacccccattgagcgtggcgcagcctatcaacggctggtgaaccagggatggactaactcagagatagcaaagaaagttaagcgatctgaatctgacattattcaacacctgcaattgcaagaatgcagcccctacattaaaagcctggttcgcactggttctattaactacgcactggctatccaaataaaccgagagcatggcgtatacgcagaccgtgaagcctcgcgcctaatgaaaaaggctgaggcctcaggtaagaaaaaaatcactaagagcgtcgcccagccacaatttagcgccaagaaagcgcgccgacttgtagagctgttgtttgatgcagcaccaatcatccaaggagatagcgacatgctattacttccttcaggtgttaaagacgaagtggtccagatcatcagtgattatcgcaatgaaggccaccagcagtga

SEQ ID NO: 453980 - DNA, 366 bp, Serratia marcescens
atgtctgaagaaattaaatgtaccccgtttagccaacagttggcctatatcaacaaaggaacgctggacggagaattgaccgaagcactggcaaaagtaattaaggctgtacgtgaaaccggtaaaaaaggttccgtcacgctaacgttaaattgccagatgctgaatacgcgtgatgaaaacacgatgaaagttacgccgaacgtcaagttgtcaattcctgagctggaacgcgccgatactattatgttctcaaccgccgacggtgatttactgcgtgatgacccaagccaggtgcagatggaccttaaagttatcgataccagttcaccggccgcacctatcaagttgcaatccaacggctaa

SEQ ID NO: 453981 - DNA, 915 bp, Serratia marcescens
atgctttacgtgaaagaaggcggtgttctgataaaacttgatgattgggagcaagtctattcaaggccaaattttattaaggatctcgacctcaaggataaaaaacttaaggccttgattgggtattataaaaatgagcctccacgaaaatgtggaattagtaattgccatcgtactcataataaaggggcgatagttatcactgaagataactgtgaggcctcgattggtcacatctgtggctcaaaaaaatttgaagaaaaatttgagactcttataaaacaactggaaaaagaagttgacgcggagatctataaagaggcagttgcctcccgaaaatcgcgaatttttgactactggaatcaagcggcagctttaaccgtgggagctgatggcatacttaagcttgcggaaaaaatatcacaactaaaagatccacttgttgttggtcgttttgcatcaatggaactgatgaatatggcagctaaccaacgaacaaaggtaactatgcctgtttgggttgagaagtcaaaaagtgaactcaccgaagaagaaattaagagcggtgaaaaaaaatataaacttgaagattctgttattggtcaaattaaaaatactgaggttttgctttcgtcaaatgacatgaagaagttatatcatgaagaaatcgaacatgtcttaactgccttgcaggatcttgatttagaaaaagctaaattaaaacagattaacaacattggacgtagagttgctgtaatagacgcaaggatagcaagagctaataccttgaaggctcttgctatagattttttgactcacaaaaatctatatccactttatgagaagatgcatccaatggatacggtgagcaggaaagatttggagttatatgaggcatttattaacgctctgtaa

SEQ ID NO: 453982 - DNA, 243 bp, Serratia marcescens
atgatctttaaacttgagtttctgccatcaagcgttactccaccaccagacttacaaggtaaaaagcatctggtaatttgcaatgagggtgactatttcttaggtcaccctatgtttgataatgagggggattttctgtgctttatcgtcgatgagattggtgactctggttttccattccatcaggacgattatgtcgcttgggcttccttgcccaacacagacggcgttacagagcgttaa

SEQ ID NO: 453983 - DNA, 231 bp, Serratia marcescens
atgaacaacattcaagcgattcgcaagcgcttgggcctaactcaatctgagctggccaagcttgcaggttgcactcctggcgccatcgggcattacgaggcaggccggagaagcatggatatacaaacgtgccgcagttttgtggcgatttttaacaaactcggtgagcaggttggtctggatgaggtttttcctccagcactaccaaacaagtctcgcccatcaatctga

SEQ ID NO: 453984 - DNA, 912 bp, Serratia marcescens
atggcagatccaacactggatgtcgaatccgttttaaagggcagcctgatcggccaggatgacctgcgggtgattcttgcctttattaatgagctggatgaagaaacgctgatgcagttcgaaaccgacaccgactccggcatcatgaatacctttgccgagttacagcgcgccagcgaccgcagaaacacgcttgcagactatggcgaaagccgcgatgaggaagaaagcatcgggctgcaggatatgaccggcaatatgctgaaccgacggcccgacgttttcaataaatacggcacctcgctcagaggttatggcggcaacgtctatgacgatacgcaaaaaagcaattacaacatggccgctgcggcggtaggggtcgttggcgcgctgtcgagttccggcgcctattttgccgcgaccgccgccgctcaggccggtgaaaccctgatgaccaatgcttacgcccgcttcgccctgggcgccgtcggtgcgttgggtatctccagcggctgcgtgcttgcagtacgcaactttctgtccgaccgtcgcgtcggggagaataaaaagctggtggacgccatgaaaaaaatgtcgaaatcccgtaacaagctcaccgcctttttcaatgaaacccgcgtcaagatcctgaaagacgaagagaaagcgaaaaagagcgccatgacttacatgagccgccgcccgattaatctggccggcggcggagatatcaaggcgcgtatggaacatctgttttcgaacattttgctgacggatacctcgccggtgaaggcgaaaatcctgctgatcagcaatgaacactatgtttctttaaccgacgacagtaatcgaccgacctacatctccaaagatgaactcaaactgatgggtgaaattgccggaatgttctaa

SEQ ID NO: 453985 - DNA, 483 bp, Serratia marcescens
atggctattgatacctttttgaaagtcgaaggcgtaaccggcgaatcccatgattccaatcataaaaattggatcgacgtcctgtcatttacctggggcgcgtcccaacccggcaatatggcggtgggcggcggcggcggcaccggcaaagtgaattaccgcgacctggaagttcaggcgctgatcgataaagccaccccggcgattttaaaattctgctccagcggcaagcacgtcaacaaagtggaagtgtccatctgtaaagccggcggcaatcaggtggagtattcgcgcatcgtgctggaagacgtgctggttacgctggctgattttaccggcgtcggccacaccgataatattctggtgaaatatcgcttccaggcgtcgaaagtcaatctgcactactgggaacagacggataagggcaccaaaggggctgaaaccaaatccggttgggatatcaaacagaacaaagaaatataa

SEQ ID NO: 453986 - DNA, 417 bp, Serratia marcescens
atgatgagtcaacaggaggtattggaacgctaccccggcgcgcagcgctgggcgttcggcgacggtccgcagctggcggatgagctgctgcagctggtgttagcgggagagaaaacggcgacctgcagctcctacgtggcctatcagcaggaaaaagtgccgcagatcggtgactacagcgtgattctggacggccggggcgaggcgcgctgcgtgatccgcacgcgtgcgctgctgcttatccgcttctgcgacgtcagcgccgagctggcggcgaaagagggagaaggggataaaagcctggcctgctggcgcgaggggcatcaggcgtttttcacccgcgaaggcacctttgcgccggatatgtggctggtgtttgaggagtttgaacgggtggcggttcttgagggagaatga

SEQ ID NO: 453987 - DNA, 270 bp, Serratia marcescens
atgctttatcaacaggcggcgcgcgtgatgcgggccgttgctgtgctgattgatgcgtcggatgaagccgaaattgcctgcccgccatatgccataactttgttggtcaactatttgcttgcaaaatatccgcgttatatcaaaagcttaatgttcccgccgttttgcattctcgctgaatgccgcgatacccatccccatccctatggttttaccatgcgcatacttcctgcccgaacatcttcgccatgtgtaaaaatcgccatctaa

SEQ ID NO: 453988 - DNA, 648 bp, Serratia marcescens
atggctatcagcaatagtcgtcacgcgaaagcgaggattagcgtggcggttgctgaaagcggacgccacagcgcagagccggcgctgcagcaccggctgcgggtaaggggcaatgcgcgcgcgctggccgtagccttgttgaaccgggtatggagtgcggatgacgcgtcggctgaggccggcggcttcacgctgcgggcgcggcccggcggccagccggttggcaaacatccgctgcggggggcgcggtgcgtatcgctcagccattcgcaatcgtggtatgccggcgcgaccggcgacggcgcagtcggtattgatctgcagcactatcgcccctttggcgtcgccgcgcatcgtcaggcgtttaccgttggcgagcgtgggttggggccggttcagtcctgcgctgcctgggcgatccgcgaggcttttttaaaaagccatggccgcggtttgccctaccggctgagcgatattcatattgactggcgcaatcagcaggtggtgagtgctgcaggtggcctgacgcggcggcgtttttggctgtggtacagcctggagtgggtatgcgcgctgtgttactcgggggatgcctctttgacgccatgggtggagatactaccgttggaggtgcgtgatgacgcatga

SEQ ID NO: 453989 - DNA, 849 bp, Serratia marcescens
atgacggcattacaattcccctgcacgatatttaaaaccaaaaacataatggatgattatggtgcagatgatatgcgctgcggagatctatccgcatcccaattaaaaacgcattttcatttggttgatgtatccacccgggttaatccctataccctgacgccgatcacgccgtttaatcagccgcattcgcgcttttacggcatgcgcgggcaggggactacgctcacccggcaggagtgcgccagaattctctttgacgaattccgtcagttatcccgcctgtttgcactctatggcccctataagcatctgattgaggaaatgatcggccatatgcagcacggcaatggcacgccgtttagcagcccacatctgaatgccgcgttaaaggcgcagattttgagggatcgagagaaagagaacagctcacggttaagattacaggatgcatttagtagaaatatagattggaaagataaaatttttcctgaaaaagaaaggcaggaattaatagatgctatagtgtttagcaaactgcctaaatttgatcgatttcaggataactttaatggtatggggatcactgtacacgatatctgggctacgcatatcacgataaaatcattgcaggttgataacgaaaaatactgcgcgctggtgcactatcgagtgcaggaccactttggactggatgatgccgacatcagaaaggttaagtttaatcagtttcgcttcttccgtatctggtttgtacttcaacactataatctgtttggttttaagccgtttatgactaatatggaggcaacggtaaagatctccggaaggcgtgatgagaaaaattaa

SEQ ID NO: 453990 - DNA, 468 bp, Serratia marcescens
atgagaaaaattaaaaatattatatatgcgttggcgttggcaggcatcgtactactgggctatttcttctggcgctctctacaaccggtggagatcgttgccgttcaccaaatgcatagcactagttccgtcctggttaaccacttcccatttacggataaaggaaaaatccactggtggctggatcagcaaggaacattgaaaagtcactatggcataccaaaacctgatgatgatggcaggtttactatcattgtgtgggattttggtgagggctataaggaaacggatggttacgatcgattatgctttgacgatctgaaagctaaggaaaactgcatagaaaagaatcgtatcttcaccgttgagaatgatagaagtaacgatgttgtgtttaccgtttacgatgctcgctatcgcctaaataaaaacggtgaaataaccaaactcaaacgcaagtcggattaa

SEQ ID NO: 453991 - DNA, 480 bp, Serratia marcescens
atgattattctcgataccaacgtgatctcagaaacgctgcgccctaaaccgcattacaacgtcatcagttggctgaacgaaaaagacaatagcgagctgtacctcagcgccatcgtcgtcgccgaactgtttagcggcgtagcctgcatgccggacgtcaaacgccagcaggcgctaaggctcaggctggcggaggcgattcagattaactttgatgagcagattttgccgtttgacgccctgtgcgccatgcagtacgcggaactgatgggcaggaaccagcaccagggcacgccgatgagcgcgccggacgcgcagatcgccgccacctgtctgcagtacggcgccacgctggccacgcgcaataccaaagattttctccactgcggcatcgaactgattgacccctggcaggtgcctgcggggcaacgcctgcatgaagacgcggccgaatactacgtgatgagccggaaatcctga

SEQ ID NO: 453992 - DNA, 483 bp, Serratia marcescens
atgagtaggccattacccgatgaactcattccgtggctgcagcgcccgggttggcaactgctggcgttgcagtggctgctgctcggcattctgctggcgctgcccggtctggggctgatccgcggagagtggcgccagtcagaacggttaagcgatgaggtccggcagcaggcgcagcgcgtgggtcagttgcagcggcaattggcatcgctgccgccgctggcgacgctggagcaacagattgcgcagcagcgggagcggcagccgaacgagccggaactgtcggcggtgctgcagcaagcaggcgtcaggctgctgcgttggcagcggcaggaacagccgccgcagcagcggcttcagctgcgcagcgattacttcaccgtgctgcaactgctggagagtttgccgggcacggtgcgcatcagccaactgaccctggagatgcggccggaagggttgagtacgcaatggctgctgcaataa

SEQ ID NO: 453993 - DNA, 378 bp, Serratia marcescens
atggctgctgcaataacgcgcggcggctggctgacgctggcgttgataggggtgttgacgcccgtactgtgtgcggcacagccgcgcgatcctttccagccgccggcgctgtcctgccccgacgtcgccgtgtcgcccgagcgctggcggctggcggggattatcggccagccggagcgtcgtctgggctgggtcatcacgccggagaggcgctggctgcggctgcagcttcgccagacggtgctgcacgggcgctggcaggtgacgcatatcggcacccggacgctgacgctgcaggccgtggcaggcgacgcgctctgcccgccggctccgggcgatgtcacgctgatgttgggaaataataaggaagcaacatga

SEQ ID NO: 453994 - DNA, 864 bp, Serratia marcescens
atggatatttccgtgccgttgagcaaagtcgtatcgcatttgaaactatttacgtcattgctggcggcatcaacgctgttggttagcattatcggcattggagtgatgctgctgtatttatgcgtggaaggtatcggtatcagcagcctgagcctgaaagagagcatgacgtttatcatcgtcgccgtcctgttttctttcatcatggtagtcgggctggtctatggcgcttatgcgacggttgcgccaatgacttttctcgcttatttggtgacgaaattttgggggagggagttggttcgccacaaacttgttcagggtaaaattacgctgtttttatcattgatcttattgttgttttttgtggcgatactgtgtttgcccggggacagtcagcggtcatggcccgtcgtctattttctctgtattggcttaatctttaacatgctgttcttattccataacagggagggcgagcacccgctctatcagcgcattggtgcgatgttttttgtctcctgcggtttgatgcttatcgcaccgattcccaaggcgttgtcaaattaccccatgatgatgttgggttaccgctcttggccgagcgacgccatcttgatggatgctgagcaccagaagcgcattcaaggctatgccgctctggtcggcgtcccggtaaaaacctgccgggtgggtgaggatcgttacgtcagcgacgatatcaccctggtgtgggatagcgctcaggacgggaagcagtttattcgcttcaaacaggatgatacgtttttgtttccgctgcagggcgggcagccgttagagaagattaaaaaaggaaaaaggcagttgtgccgcgacgcggtataa

SEQ ID NO: 453995 - DNA, 1038 bp, Serratia marcescens
atgaccttgattaacgtttccggctttcgcgcgcgctacgaaaacagccactggcttaaattcggcatacagtttgttctgtcgatcgtcgcgggcttctatctccaaattgccaccgaaataggctcgcccgatctcgcgactctgcaggcgggtatgacccctgaggaaatcaagaaagacagcgccctcctcctctgttggctaagcctggtgctgcttttccgcggactgctgtacgatcagcgcagcctggcctggggattgctggctgctcttatctgggtgttcatcggcgatacggtcgtcgcgggcgtctgggctgcatccatgtttttcatgctgcatctgttatcgcagcgcagcgagctgggctggatacacctgtggtacctgctgttatggctgctgatgctgctggattacaatacgaggtatgaaggcgttcatcattacggttacctctgcatcttcaccgcgctatttctgctttccgcgtaccttagcctgccgctgtccaaaagggtcgccaaaacgatcaacgctgcgaccaggcccgccccccgtcaaacggccggagtggagcaaaacgcggctgcagcgaacgccggcgacgaagcaaaatcagaagacgatagctggctcagcacaaaaggagagcaaattatcgtcacattggagagctatcccgcgctccccaaaacgatgcaaaccgagctgaacggcatcgtcaaatacgcccgactgatacaacagtgcattctgcaggatcccaatgacgttaaaccgggcagcgagtttcttgagcgctacctgccccacacgcttaagttactggacgaaggctataagctttccagccagctggatattcacggcgcttccggcagcatcaacactcagggcctggaaatcctgcgctcactgcactcggctttcaaacaaaagcacgctcagctgctggaaaacgacacgctggcgtacaaatccgacctcagcctgctagacagcctgctcaaaaccgacgggctcaagtaa

SEQ ID NO: 453996 - DNA, 513 bp, Serratia marcescens
atgactaaactcgccacgcctctgctagccattgctgcttacagcggtaccggcaagaccacgctgctcaagcagctgatcccattgctgcgagaaagacatattcgggtcgggctgatcaaacacacccaccatgatatggatatcgataaaccggggaaagacagctacgaactgcgtaaggccggcgccgaccagaccctggtcgccagcgatcgacgttgggcgctgatgacggaaacgccggaacagcaaccgctaaatcttcactatctggctagccggttcgaccacaataacgtcgatcttattctggtcgagggcttcaaacatgagccggtcagtaaaatcattctctaccgtgccgaaattggccggccgctggaggagatgctggataagcatgtgattgcggttgccagcgatcgcgcgcttgattttgccggcgagcggcttgatatcaacgatccgccaagcattgccgagtttattgtgcgttggctgaataaataa

SEQ ID NO: 453997 - DNA, 594 bp, Serratia marcescens
atgcatacagatattaccggggtgatcctggctggcggcagagctacgcgcatggggggagaagataagggattgatctcgcttggcgggatcccactctatcgccatgtgctagagcgcctgacgccgcaggttaacgccgtaatcatcagcgccaatcgcaatcaggcagtttatcagctgagcgggctgccggttgtcggcgatctgacagcagattttgccgggccgctggcgggcatgctggccggcttacgagcggcacacggcgactgggtagcctttgtcccgtgcgacgtgcctgatttgccgctcacgttggtggagatgctgtggcaaggcaagcagcaggccctggcggcctatgccagcgatggcgagcgcgctcatccaacgctggcgctgctgcacaaaagcctggcaccacagttggctgagtatttggcacggggagaacgtaagctgatgctgttccttaaacaggttgccgccaggcaggtagtattcaacgggcaggcccaagccttcctgaatctgaatactcccgatgattgccggcattggctacaggagaaggggatcgccaatgactaa

SEQ ID NO: 453998 - DNA, 1080 bp, Serratia marcescens
atgaaaaaattcgcttctagcgcatcggcgctgctggccggcgcgatactcagcgccagcctgaccaccggcgcacaggcctgcacccgcgcgtttatgaatatgtaccccggctatatggtcagcgcccgtaatctggatttcttcggcccggtcgatcccgcgttggtgatcaccccgcgcggcgtggcgcataacggcggcgacaatcccaatgccgcacagtggcaaacccgctacggcagcgtagtggtctatgccgacggcgtattcccgatggatggcatgaatgaaaaagggttggcggggcacacgctgttttatatgaacggcagccaggttcaacagaacaatcaggataaaccggttctcgaaagccgcgcctggctcagctacattctggacaattacgcaaccgtcgatcaggcagtaaatgcgatccgtaacgatgtgcgcctggtcgccgcgcgcctgccgatcgattacgcctccgacaccaaacatatcgccattgaagacgttagcggtgattcagcgattatcgagattgataacggcaaagttaatgtttatcacgacaaaaactaccgggtgatgaccaacccgccgtcttacgcacaacagctgaaaaatctggctaaatatcagaatgccaaacgcagcgacattcccggcgggctggaagcggatgagcgcctggtgcgcgccagctacgatctacaaaacctaccgcagccggataacaagaatcaggctcagggatttattttatcggtgattaacaatgtggcttaccccatcggctcgccggcagaacctgacgaacagaaagtgtccgatatgtatgaaaaatacagcaagcgcccggaacaaaataaaggcatcggcacttactggaccgccatttccgacctgagccacggcgaataccatttcaaatcaaccttcgcggcctcgcaggtctgggtatcgctgcacgatatcaactttagccaaggccagccggtacggcaaatcaagcacctgaatgactacgcgcagaaaggctgggagggcaatattctggcgcaggcgaagtaa

SEQ ID NO: 453999 - DNA, 882 bp, Serratia marcescens
gtgggaaagattcgattttctttagctcagatagaggcgttcgccagcgtgtgcgagagcggtaatttaacgcgggcagccaaacgcctgggcaaggaccgcaccaccgtcggcgaactgatcgagtatctggagctggatttaggctatgcgctgttcgaccgccatacgcgaccgctgcggttaacggatgccgggcagcgcctgtatcgtcaggcgcggctattcctgcaggaagcggaaaccttttgccagctggcggagcatattccgcaacaggttcgccagcgcgtggtgctgtgctatgacgcgtttacgccaaggcagtttttgagcgcgctgtcggcggcgctgtatcagcagggtattgcattggacttgcgcatgatggaaagggcagaggcggaagatctgttggccgatggcgcggcgcaccttggcgtctatcaggcgcttaaccgcagcatcagcgatcggtttaaatggcgggcgctaggagcgttggagatggcagtgtatgcccgcacggggttctttccggacgcctgtccgattccgctgattgcgctggctgcgcacactcagcttatcccgttcagcgacctgccggatgccatggccaagcgcttacagatctctgaccgtatccgggtaatcaatgaattgtcgctgctgcaggtggcgctgagcgccgggcagggctgggcatttttaccgacgcattttcaggcccagcaatggccggcggtaagccggctcgataccgagctgggccagagcggcctgacgcacccgatggtcgcgctctggaagccgggcgccgatgatgagttgctgcggttgattgaacaggtgcagcggatataccgcgaggaatcttag

SEQ ID NO: 454000 - DNA, 252 bp, Serratia marcescens
atgaatagtggtcaggaggtggaggccatagtgattgatgcaaagccacatgataaccaaactgcaaatgggcgtctgtttatttcattattaatcgagtttatcattggagatgaaaaaatatccaccaataaagatattaacatttcgtcattttatgctgaagaatataaaccaggtaaattgattactgtaaaataccaaaggagcaatctgcagaatatcattgttgttggcaatgttaataactag

SEQ ID NO: 454001 - DNA, 348 bp, Serratia marcescens
atgaataactcagcgctatgggctacaatttttagtattttgcttattgggtgggttatatatattatatttaaatctggttctgatgataaaaaatatagagctgaaggtataaaggttgaagcaaaaattattaataaaaaaaacatcggggcatctgggactgggaacatgaaattctatatggagttagagtttccaactaataatggcattgttataacccatgctaaacgtttcttcacaccagaagatatggtaaaaatcttgaggaataacacggttgccttgtattacctacctgaagatccaaaaaaagtttatctggttcctggggatatggagtga

SEQ ID NO: 454002 - DNA, 387 bp, Serratia marcescens
atgagcaatacatttattataacaatggtaataatcgcgctggtgttcggcgttttccccatggcacggttcctctatacgaattttatcccatatttaaaggatagtttttctcaggatgcagttttaaaaaatggtatggttacggatgcggaaattgttaatacaattcaaacaagtagttgggatggtaataaacctgtttataaacttacgttccggtttaaaacaaaagaagatgatcttgttgaatcaacaataatgaagcctttaactttcaaagagattgaaacccttaaagaaggctatataactacaataaagtacgatcctgaaaacccgaacaaaatagccttggttgataacccattgattcttgtagattaa

SEQ ID NO: 454003 - DNA, 987 bp, Serratia marcescens
atgacgtcatcgccctatttactcagtgttatcattgcattgtataacactaaggatttcatcattgattgcctggattcattatctcatcaattagacgatgatatagaagtcatcattataaatgatggctccaccgattgttctgaagaaaaggtgctggcttatattgaagaacatagcgataagaatattagagtgctgactcaggaaaatcatggtgtcgcacatgcaaaaaattccgggttagataatgctcggggtaaatacgtcacatttcttgacagcgatgatttagttagctgtcaatatatccaaacactcaaaccaatactgctgtctgataaatatgatttaatcgattttgaatataaaaaattcagcacttctcctcctgaagaccagatgatctcccctacaaaggaaatagtgtatgatattgattcaaaaggattaacgtgtctatcccccatcttcgaaaactcactttggcacctggtaaccagggtctacaaacgcgatttaattgctggggaccggttcgaaaacgggcgacgttatgaagatgttatctttactcctttccaatattttaaaacgcatcgtattgttcatctcgaccatgcgctctatttttaccgtgataatagtcaagggatcacccgcaacattaagcttagcgatatcgaagacatgcagtttgcaatggctaagatgttgaattttgtcacccaacacagcgaaaacatgccattacgtcagttggcggcgcttatgctcgccaactgttttaccgaaataaagtgtatgtcaaaagttgtgtacggctactaccactatgaaccggaaacacggcgtatatttcgccacgctgcggcaatttgtctcagcagtggtaatgtacccatgaaaaaaatctgccaaatgcgttacacatgggtagattgctgtctatcacaactccgcctatggttgaaaaagcgctaa

SEQ ID NO: 454004 - DNA, 1239 bp, Serratia marcescens
atgctgactaataaaactccacatccagcattcagttaccttatttttttagggtgcgccattgcgttttgcagcacaccgtttgactcacatttagggaaagatatattttatatatctagttacatcgcgttactatcgtttattataaacttcaagttctacaccaaagactgtaaaaaattaattctccctgcgctgttcttattagctggcttagcaagtgttctttgggttgcttactttaaacagccgggggattatataaacatttatcgtgcctatacttcttcaggtaagctgcaaattgccactgcattcatactcgccatcgctattaataaccgaataaacatccgggaaaatttagcgattatagtgatacttacagggatagcgatgaatgcttatgctatttaccagggtatatggctaaaagccgaacgtgtagaactcaattttgaccgagctactgcagctgcttatattatcactgctataaatttggtagtgatgtatgccgtgctcacactgaaaaatcgttatcgcttttatatctacgctatagccttcttgttaacatatgcgtcaataatattaacggcaacccgcgcagccatgctggtctatccgatcgccttagggatgtcaatttttataaacaaagactccctgacctttaaaaataaggtaacactgtcattatctttagccgctattttcactctttgcttctttatattcagaagcgaaatcacgcaaagagttgataatttaaaaactgacttacaactttcagaccagccgcaaagagagaattcaataatctcccggctttctatgcaaaaagttggtatgcaagcaggtaacattgccccattaggccaatctgcggagcatcgcgccactgaaattaccacaatggtcaaccaaaacccgctattatccggcgtactaccttatctgactgtccatatgcataatgagctagttgaaacatattcaataaaaggtgcttggggtgtggtaattttactggctctttatatagggcttattcactattctttcagctatggtagaaatccggcgcttttttccgtagcgttaaccctctttgcatacggttgcagcgatgttttatttttcagcagtgaagcaacgattgttttttgtctcgcaataatatttagcatacttatttgcaagaaagtcgataaaacgggtattcagccatga

SEQ ID NO: 454005 - DNA, 399 bp, Serratia marcescens
atgactgatatcaccaaaacgtatcaatcgctggaagaacgtttcccgatggaagaaatgcgccggttgtatctggccaaattcggcgaaaccgttgacggccgcctgcgcctctacggccgctgggagataactaacagaggtgctcttggaaccctggagggcgaagtactgccctttattcttctgaactgttggtttactttcaaagaggggactaaaacctatggggtttcctgtacagtcgaactgaccactttcgatggaacaaaccgaactgaattcaggccattaagccccttcaccgctgagtcaacgaattacagagtggagtacgcctacacacaccgtatgaatcctgccaccatttacgatttctcagagcgccctaacggttaa

SEQ ID NO: 454006 - DNA, 327 bp, Serratia marcescens
atggatcagcttgaacattacacttatcgcattacctggtcggcagaagaccaggaatttgtcgggctgtgcaccgaatttccctccttgtcctggctggcgccgagacgcagcgccgcgttggccggcatcgaacagctggtgcataacgtggtggcggaaatgctcgccaacggggaaacgccgccggaagcgcttgcggaaaagcagtttagcggccgcctggtgctacgcctgccccccgaacaacaccgccgtctggcgatgaacgccatggaggacggcgtcagcctgaaccgttatctgtgctcgcgccttaccggctga

SEQ ID NO: 454007 - DNA, 261 bp, Serratia marcescens
atgaaagagatcacggaagatatcgccgtgctgcagcagcgcatcgccagcatcaaattcaacgagctggtcaggatctgtgatcgctggttcggcaacccccgcatcaacggcggcagtcatcgggtttacgccatgccctggcccggcgaccccagagtgaatattcaacggggccggagcaacacggcaaaagcttatcaggtgaagcaggttattgatgccttgatcagactggagggacaacatggatcagcttga

SEQ ID NO: 454008 - DNA, 357 bp, Serratia marcescens
gtgcggactaacggcatcggcggagcggcccggcgtcagcagggcttcagcctgccggaagtattaattgcggcgctgttattctcagtgtcgctgctcggcctgttacaataccatcaggtattattacaggggctgcagcggcaatggcagtatcggcaggcctggtcgctggcccatcagcagctggagcggctggccgccggcagcgacgtagacgacgccctggcgtccggctggcggcgcgagctgcagcacggcgaggttgacggcgtctgtcggcagctcacggtcacgataacaacgccgctgcgtcaacaggcccggctcagccgctggtattgcggcgacgactaa

SEQ ID NO: 454009 - DNA, 444 bp, Serratia marcescens
gtgaacggagcagattatcaacggggcagcgtgctggcggcggtgatgctggtgttgctgatgggcttgctgctgctgggcgctcagcaaaaacagctcgatagcgcgctgttgctggcggtggaacagcggcgttatctgcaggcgtataatcaggcgtcgtcggcgctgaactgggggctgacgcaatcctggccgcccgcgttgctgaacgccggcgtctggcgctgtcagcggcagttttcggcggggctgcaggcctgtgtcaagcgcgcttcccggccgggcgttatactgctgcgcgggctgggggagatgcccgcggcggaaccgctctggctgtatcagctggccacgccggacgcgcgtgggcggctgcgggcggaaccgggcggctggctggacttttgcccggaaaaggacgcggcggcctgtgcggactaa

SEQ ID NO: 454010 - DNA, 582 bp, Serratia marcescens
atgctgacgccgtcgcgcggctttaccctgccggaggtactgctggccatggcggcgggcagcctgattatgctggcggcgacgaaggcctatcccgcgctgcgtcagcaaagcgcggcatttctcggcgcctatcagctggagctaaggctgcggcaggcggcgttcggcattgaaaaagatctgcgccgcgcggggttctgcgccggaaggtgcgccgggcggccgctgactatcgcccggcatgccggggaggcggccgacagctgcgtcatcgtcgcctatgacctgaaccgcaacggccgctgggaaacggcgggcgacgaggcggagaagttcggctaccgactgcgcgcgggccggcttgagcgccagcgcggcgtcagccaatgcaacggcggcggctgggagaacctgtttgagcgcgatgaagtgcgtattgaaaccttcagcattcgtctgctgccgggtaaccacggccggcgtctgctgcgcctgacgctgagcggccgctcggcgagcgcggcggggcatgcgcgttcagtacgctgggatatcaacgtggaggcgccgtcatcgtga

SEQ ID NO: 454011 - DNA, 504 bp, Serratia marcescens
atgaaaaatatattggggaaaggaaggcgtttgtcattatttgccgcagcggcatcgatattatgcgcctccgcgttgacgcctgccacttcattggcccagagtaagtttaacctgtcaggttttttacagcagaatccggactttaagcccggcgccgccaactggtcagcagaaggtttgatgcctggcatgtcttactacgttaaaacctacaccgacaatggattaatcctggttaaactctcgctggagaagtatagcaagttcggcaatcattctgttttacatcagtgtgaaaggatcggggagaagtatatccgctgcggcttttcttatcagccgtacagcgccggctcccggcctgtcagctatcgagtaacctatatgcggactgaacccagctattatccgaatatattaaggtgttctgtcgatggctactttaattacggctataaggagtgcgtaacgaaaaatgactggcgcggcttattaaattga

SEQ ID NO: 454012 - DNA, 171 bp, Serratia marcescens
atggataagaaaaaaattgaggcggagaagccgtgcgtgcgccgcaataaaacgaaaattccgccgtcgtggcagttgaatgaggcgcagcgtgagtttattgaagatctctggcaggacgatgcgccggaatcgccgacgccccgcccggcacaaaaggatgccccttag

SEQ ID NO: 454013 - DNA, 1944 bp, Serratia marcescens
gtgaatcaggggattaagtatggctttttgtttgctctggcgttgccgtttggcgtcggggcagcggacagcttcagtgatgagcaaacgttacagtcgctggatgccatcacccgcagagttgacgatgcgccggcactcttgctactgacgccttctcaactggaagccattgattcgccaccggaacagaagacggcacaacaagccagaagtagtaaccagttggataagcgagcggcgaagcaaaacgccgcttctttacgagagctgaagtcgcagcaggcgaaaatcaatcagctcaatgccgcgttggctaaacagaacagagagctaaaaaagctgcgcgaggctgcacgggcggatggtgattcacgtgccgaagtagatcgtctgaaaaaatcattgcaggaaagcttacaaaaaacggaaaacatgcagcagcagctgtcggcaatgaatgcgacgaaaagtgacaagcagcaggatagcgccagattacggcaagcgctggagaagagtcagcaacaaagttcagagttacagaaacaggtagctgcattgaccatagcgcaggatgagcggctcaaacagcagaaatctatgcaggcaacgctggatgaaagccaaaagcatgctgaagagttgcaaaagcgattgacggcattaaccgatcagcgcaaacgcaaggataaaggtagcgcggtgttgcagagcgctttggatgaaagcaagaagcacggcacggagttacagaaacagctgacggctctgatatcccaaggcaaggcaaaagaaaaagatgctgctgcattgcagaaggcattggatgaaagcaacaaggagcgcggagagctgcaaaaacagctgacggcgctggctgcgcaaggcaagacaaaagagaaagacgtgaccgcgctgcagagcgcgctggaagagagcaagaaaagtggcgctgagctgcagaaacagctgacggcgctggctgcgcaaggcaagacgaaagataaagacgtcgccacgctgcagagcgcgctggaagagagcaagaaaaatggcgctgagctgcaaaaacagctgacggcgctggctgcgcaaggcaagacaaaagataaagacaccgccgcgctgcaaaacgagctggaggagagcaagaaaggcgtgctggcgctgaaaaagcagctggcgacgctggcggatcaggcaaaaggacaagaaaaagaacatgcagctctacagcaggagctggctgcgctgaaaaaagagcgggccgcccgcaaagatgttgtggctccgccgaaaacggctaacgaaatccgcgactatgctatcggcagttcattaggtaatgacgtgctggcgctgttgcaagagaagatcgctcagggcatcaaaatcaatgagcgaatggcgttttccggcgttcaggatgctttagtcggccaaaacaagctggctcaggacaaaatcgccaaagcgctctatgaaacggaaatggcgctgaacgagaaggagaagaagttaaaagcagaaactgaacgacaaggtttacgctatgttgaacagttcagaaaaaataagagcgtcaagaaatcttccagcggtttttattaccggattgattaccttggtgccgggaagatagataatagtgatacggtcgccgtggttgtgaaggaaagcctgaccaacggtaaagtgattaaggatatggatattgccggcacctcaatttcacagccgcttagcagttatccggctatgttccgtgacgccatcaagcaattgcagaatcatggcacgatgacaatggtggtaccgcctgaactggcatatggcgataaggggctggctccggatatccctccgggatccaccatggtttataacatcagaatccttgatgtattgccagcagacggcgcagctggcaataaaaaatag

SEQ ID NO: 454014 - DNA, 717 bp, Serratia marcescens
atgacggtagagagccaatcaatatcgcgcatcgcactattcgtctcctgtcagttaaccgcttacgggcttgagctgttgttggcacgtaatttgtcaaagaagcgagagttttggcatttaggttctctgtccggcgcttgtcggcggttattacaacatgccgatatgctggttatttctttcagcatgcggcagtcggattggcatgcacgcttactgatgctggaagcgctgcgtaaccttcggccgaaaatgccgattgtagtcatcattgatggctatatcccatttttattgcaacagctgaatgccctgcatattgatgggattgtcagccagcatgactcattaaatgaaattaaagatgtattgacgcaaatttgtgttgagagagaccctgaacaccacggtttgaaaagcacattggcagtccaggtggacgcctgtgcgttatcccagcggctcagcatgtcggaactacaggcgctgcgttatttgcttaacggtcattcattgctgcaaacggccacgaagatgcgacgtaataaaaaggcgatcgtcgcgctgaaaaataaagctatgcgcaagttgggaattagccacagcgctgaactggttgcgatgcgtggcatgttggaaaaccagtaccgtcaacggttgccgctgtccaaattgtgtattgatagccgaacgtcagtcatggcgggtcgctag

SEQ ID NO: 454015 - DNA, 126 bp, Serratia marcescens
atggaattaatcatgctgttctcatttttgctttttttatttatcagcatattttctttttatatgcatgcgagatttatggcaaaaagaacaattcatcccgtcaggatgattattaatagttag

SEQ ID NO: 454016 - DNA, 540 bp, Serratia marcescens
atgaaggaacttaaattgaacgtgatcaaaggtagcattgcggcattgctggccgcgaccttggggatgagtcatggagcactggcgaacacccagttaaatattaccggtaccattaaggcttcaccgtgtatagtggcagatgataacggcagcggcattacggtcgacttgggtaacggcagcgccatccaggcggcaacgctggcagacgcaggtggtaagactgattgggtacctttcaaactgacgctgaaagattgtccgaccaccaccacaacggccacggcaacctttagcggtacgcaatcggatgaaaatcctgatttttataaaaataccggcgatgcaaaaagcgtacagattgaattgaaagatgttgctgaaactaccaaattgggcaacggtggtttcctgaagcaaagcatcgtgaataataccacgacttacgacctgaaggcccgcgccttttccaccgatgggggcgcaacgccaggttctatcgtgggtacggtcatggttgcctttacctacgagtaa

SEQ ID NO: 454017 - DNA, 1080 bp, Serratia marcescens
atgaagcttaaatcaatattcaggaaattatcagttgcctcagttttggccgttgcgggaacttatattccacaggcattggctgcgccaatgcctggagcctgtgagaggagtataggcggagcacaggaatatcctttttcttttagcacatcgtttactgagccggatcagaatacggcaggaaaaattattgaaaatgcggctggaggtgaatgggatagacctgaaagatatacggtgacatgcggttgtacaaatatgcgagaggcatatgttacagctataccactattgaaagagttggattataccggtggtaccgatatagagggtactcctttgtcatattatgttctgaatgattttttgtcggtggccagcatggtatatgttcacggtaaaattaaaaaaagtttagccgtgccattctacagcagagataacgaaaacactggatcgcctattccatgtaatggggcaaaaaacacgtttaagagcggctctcaggggcagattaacctgcgttttcgccggcctttcgttggcgtgaaagttattcctccgacgcgtctgcttgaggtatatctgtcatcaacgtcaggggttagtagcccgaccccggtgtcctatgtcacgatgagcggtacggtgacagtcccacaaaactgtgaaataagtccgcaaccggtggttatcaactttggcgatatcatgtcaacggattttaaacgtaagggggagatgccgaaaaacttcacaccgcatcagcgggatttgacgttagcgtgtcgtaatatctcagatggagtgaaggtcagtctttcattccagggggaggccgatcctagtgatacgtcggcattaaagagtacgaataaagatatcgctgtaaaaattgaagactcgtcatcgaatgctgttatttcgccaaataatgggcgtcttcctgtgatgatgaattatatggatcaaactggaaagacaggaataaatgtatacccgataaacacctcaaatgaaatgccagaggtcggtgtttttaactcgacggcaacgatccgggttgagattgaataa

SEQ ID NO: 454018 - DNA, 795 bp, Serratia marcescens
atgcggtttaactatacgcgtaacgatgcggagcagtgggcggcattttccggtgactacaacccgatacattttgacctgcagtgggcgcgcaagcttggcagtgagcggctgacggtgcacggcatgcgtgcgatgctggatatgaagcaggctctgagcgaggcgttgcggcctgcgtcgtcggatgcgcattttttccgctttagcgcccgattgcggcagccggtacgctgcgatcttgattatcgcctggacgttgccacaacggaacatcaggcaagcggcagactgttggatgagagcaacgatgagtgctgtttcagcgccaaattactccctgcggtggcgtttgacatcgcggatgctgcccctatccagcgtctggagcggcgggatgttgaggtgcttggccggcgttttccgggggacccgctgctgcagtggagctttttggatgcgctgttgttccaacgcatcgtgtcatcggcggcaatcttgtcggcaataaaacaacgattgccggcactgcaggcgcggacgctgattgatgtgtttgcgcaactgtcggtggtgcaaacgcatcatgacgtgcattttaacgccggtttgttgacgcccggcgtactgttttccgttgaagatacgttgtcttacaccatcttgccgccgctggttgttggtgacggcagcagcgggctggtggtgcggatagacgtacagtgctggacgccgcaaggcccgttattggcaagtgcgataacgttaaaaacggcgagttatgcgcaacgataa

SEQ ID NO: 454019 - DNA, 1404 bp, Serratia marcescens
atgagacagagaaaaaccttggcgctgttgggctgtttgatgttgtccggctgcggcgcgctggtgaagagcgaatatcagcagccgcaggtagcggttccggcgcagtggcgtacggaaattaccgggccggcttatttggccggtagtgaacggtggtgggatagcttcaacgatccgcagctttcgcagttaatcacgcgcgtgttaagcagcaataacgatctggcgaaggcggggctgcagttgcagcaggcgcgtctggaagccgggttgaccaataccaatttgacgccggacgtgacgctgagcggcggcgccagcaatagcaagaacgtgcgcggcggcggcggcgcgagcgaagattaccacagctcactgagcctgagttatgagctggatctgtgggggaaactggcgcgcaggcgtgaacaggcgagctggctggtgcaggctaccgagcaggatcggcaaaacgttgcgctgacgctgattggcaatgctgctgattattattggcaaattgccaggcttaatcagcaggttgatgtgcagcaacggatgatggacaacgcgcgggaaacgcttcgtctggtgcaggctcgtcatgccgccggcgccgccagtcaaatagaacttttacagacgcgtcaatccgttatcgatcgggaaaatcagcagcaaaatctgcagcagcagcgtgaagcggcgcgtaacgccctggctattttattcaataattcgccggatatgcgtcagccggagcgtcctgggctggatgctgaacaggaggtgccgatcgccgccagcgtaccgctggcagtcatcggccgcaggccggatgtgcagggggcggaaagacgcctgcgcgccgcactggccggctctgatgccgcacggcttaatttttatccgtcgctctctttgacggcctcgctgagcgccggcagcgccctgtttcagcagtggttcagtcagccggtcagagccttgggcagcagcgtcgccttgccttttgtacagtggaacaccatgaggcttacggcagaaaaagcccagcttgatgtgcagcagcagatcgtggcgtttcgcagcgcggtgtataacgcgctttctgacgtggataacgccatggcgcagcggttgagctatcagcggcagaaacgacgtatgcaggaaaacctgcggctaagccggcagcggctgacgctggccgagagccaataccgctccggtgcggtgtcgttgcagacattgcttgatgcgcaggatgcccgcttgagcagtgaaaacagtttggcggacatgcaatacaactacctgaacgccacgatgaaattatggttggcattggggggcgcagtggataaggacgaaaggacagagggaaatgctcatgaataa

SEQ ID NO: 454020 - DNA, 201 bp, Serratia marcescens
atgaaaaaagtaactctgctggcagcggaagcggtgattggtggcaagtgcaaaaaaaattgcactgacagttttgagcttattggaccagacaaaaacgaggtatgtaccatgatacgtacctgtactgacaagtatggtaaggtacaccaaacttctatgccggcagttgacagtaaccaatgtcgcgacgatggctaa

SEQ ID NO: 454021 - DNA, 528 bp, Serratia marcescens
atgacgacgcccataacgctggcgagggatcagcttgagctactctggcagattgaccgccgtgaagaaattaccacgctgtaccggctgcagaacggacaactgcaggcctacgccgactactacgacgtccgcggctgggatccgcacgatcgtgaagtctacacgccgctgcatgaagagagctttgaccgcggcggcagcttcttcgccctgttcgatcaggagatcatcgtcgcagcggcggcgctggacagcgtgccgcgcgggccggaacaaaatttacgccagctgctgttcttctacgtcagcgccgagcggcgcggtcagggattggggaaaatgctgtttcggcactgcctgcagcagttgcagcagcatggcgccgccgggctgtacgtttcttccatccccaataagcgcaccgtcgatttttatctggcgcagggatgtcgcctgcttgccgaacccgatgccgaactgttcgcccgcgagccggaggatatccatctggtctgcgactgctga

SEQ ID NO: 454022 - DNA, 294 bp, Serratia marcescens
atgttattcgaattgtgcatcatcctgacggtcagagatgcgaccttgttcaagcagcgcctgttcaatggtctgttgcagcatacggatgcgctgttccatattggccgcataatcacgagttttcaagcgttcttgcgcaagttcgtgacaaacattcaacgcggcaatgaaaaccagctgttcagtatttgtgactctagtgcgaactttgagatcttgcaaccgctggttaagatcgtccgccgccatgttcaacgcatcttgttgttctggcgggcaatttacccttaa

SEQ ID NO: 454023 - DNA, 1275 bp, Serratia marcescens
atgtttagattacgtaaattactggcggggctgttctttactgccatttccatcaacagcgcgctggccgcctcctcttggacgctggaaaaagtcgtggaagtcagccgccacggagttcgtcccccaacggcgggcaaccgcagcgccatggaggccgggagcgggcgcgcctggccggtctggtacaaccgggacggcgagctcaccggtcacggctatgccgccgctctgctgaaaggccaggccgaagcggagaactggcgccagcacggcctgttgccggcgggatgccccgctccgggcgatctctatgtctgggccagcccgctgcaacgtacccgcgctaccgccagagcattgaccgacggcgcgttccccggctgcggtgtcgcgattcacggtctgaaaggcgagcacgacccactgttccacgcgctgaaaatgggattggtcacgctggatccgcagcaggccaaggccgcgatcgaccaggcgatgaagggctctcccgagcggttaaaacagcgctatgccggtgatatcgcccgcctgaagcaggcggtctgcgccgcagaccactgtccggtattcgatgagccctggacgccgcaggtcagcgccaacggtaaggtcgcgattcaggggctgaatgtcctgtcgaatatggccgagactattcgcctggcctggagcgaaaatctaccgccggagcaggtcgcttttggacatgcccgcaacgccactgaggtcgccgccctgatgccgctgctcaccctgcggtacagcctgaccaatgatattccgctggtagcccggcgcggcggctcggtgctgctcaaccagatagcgctggcgctacagcccggcaaacgtgacccgaaagggccgcctgaagcgcgctggctgctgattgtggcccatgacaccaatattgcgtttctgcggactctgctgggctttaactggcagcagggaaactaccctcagggcaatattccgccggctggcagcctggtattcgaacgctggcgcgacaacgacagcgggcagcgctatatccgtattctgttccagtcccagagcctggatcagctccgcaatctgacgccgccggggccaaagcatccgctgctgaaaaccgaataccacgccccggggtgccgcaccaccgacgtgggtacgctctgcccgctgtcctccagcctggaacatatgcataaggctatcgattcagacgcgctgccggacatcggctggcactctgagtggtaa

SEQ ID NO: 454024 - DNA, 675 bp, Serratia marcescens
atgaaatatcttatttcgctactgctgtgcttgagcggtgcggtccaccacgcttatgcgctggaactgaagtattaccatgaggttgccgatgtcgataagatccataaggagagcctgggcatcagccatggcttttccggcggcttcggcgccggtctggaatataaacgcgcggcccgggaatcagggagcgccgcatggcgccacggcggccacgatgaattaaaatatcatttgaagcagaaatttcagccgtattcattactggacgtcacgccggagatgggctggagcagaaaagccaactcccgtaaatataagccgcagctgaaattgagctaccgctatacgaaacatcaaaagctgtcgctgatgtatcgctatgaaataaaaagaagcacgggaaaagcacgtaagcagacgcaaatctggcagttaatgaacggcgataaaatagccggggtaacgctgaattacggcgttaaatataagaaaagcaatcagccgctgtatcgcggccaccgggaagacgtggaaggaaaactgcaagtcagctaccggcttacccccagcctggcgccgtttattgagttaaaaaataccgccgtttccagcagcagcgctcatcgccagacgatgttgaaagtgggttttgtctggcggatgctataa

SEQ ID NO: 454025 - DNA, 552 bp, Serratia marcescens
atgaaaaaaacagttgttgcgctatctgcgcttttcctggccgctccggtgtttgccaacacggttacccatgcatccgatgaggccgtagctgaagcgcataaaggtgctaacacggcaaaagagacgttgcatcaggcgcagaataaaggcgaagcgctgagatctgagcatgcagcggaagggaaaagtgacaccatgagccacaaggtgagtgagaaatctcaggaaacctggcacaaggccaaagaaggcacagaaaaggggtggaacagtaccaaagaaggcgccgagaaaggctggaataagacgaaggaaggtaccggcaaggcctgggacaagaccaaagacgtgtctgaaaaaacctgggataaaaccaaagaaggcgctgagaaaggctggaataaaacgaaggaaggtactggcaaggcctgggacagaaccaaagccgggtctgaaaaaacctgggataaaaccaaagaaggcgccgagaaaggttgggataaaaccaagcagggcgctgaagagctgaagaaaaaagtgaccgaataa

SEQ ID NO: 454026 - DNA, 1041 bp, Serratia marcescens
gtgggagaacttaaaggtaagatcaacaagcataaaaagctaattgagagaaccgtcgcggaaaatcaagatggcattaatggatttctgaagtcagctggctacaaatacagcgtggttatcaagtctgaagccgagtcttacaagatgaagctggtacaccaagaccatgacgaacatattgagacagcggcccagcacctaagctatggagaaaggaacgccttcgctcttattctattcatgtatcaggttctgagggaaaagcctgggttggcggtcttggacgatcctgtctcaagctttgataagacgaaaaaattcgccattctgaacgagttgtttagaggcaaggcaagtcttcgtgatacgaccgtccttatgctgacacatgatattgaacctgcaatagatgttatacgcggcgttaagcgattattccaacatcctaagccaacggcatattttctggcgtcgaaagcgggtgtagtgtccgaggtggagattagagaggaaaatattcaaacattcgcgcagatatgtagtgataatattcacgaacttgatgatgaggtcataaagtgcatatatttgcggaggcattttgaaatcatcaatgatctaggtgcggaatataattatttggccaatcttttacacgctagggacgtgccaattctaaaatctgccgtgggcgatatcgctatgaatgctgaacagattatgaacgctgaagctggcatcaagaaattcatcccggcttttgattactcggcggtgattgctgcgattaaagataaagcagagatgaagcgtcgcttcacagaagctaccgttgggtacgacaaaatccagcttttccgcatctttaaggaagtgcatggttccgccaatggggagcaggatagcattcttcagaaatttgtgaacgagtcattccacatcgagaacgaatatgtgatgcagctaaatccccacaagttcgataatgtgccggagtatgtcgttttggaatgtgatagggccattctggcgtcctaa

SEQ ID NO: 454027 - DNA, 396 bp, Serratia marcescens
atgtcagtcatcgaccatcttgagatttcagtgaaaaatgcgccggtatcgctgcgcttctatcagcaggcacttgagccattaggcttcagactggttattactcaggagccagacaaaacacgtaccggcggttttcgttatggacttgggccgcagggctatccccggctgtggctgcatgacaatgaggaaaccggcgcgccgttgcatctggctttttctgctgatgagcgcagcatagtggatgaattctggaaacgggctattcaggcgggtggaaaagataacggagcaccgggagttcgtaagcaatatcattcacaatactatgctgcgtatgtttttgatcctgatggcaacaatctggaagtcgtctgtcagcgaagtacgtaa

SEQ ID NO: 454028 - DNA, 627 bp, Serratia marcescens
atgacacgccagggttataagcatatgagtaaggcacaagataatgtcagaacacgcaggccagcctttgaccgtgaggcgggaattgagattgctcaggccctgtttcatcagcgaggttatgacgcagtaggaatctcggagctgacaaaggcattgaatatcaatccgcccagtctttacgccgcctatggcagcaaagcgggtctgtttggtcgctgccttgcccgctatgttgatgaaggtaatctgcctgctgacagaatccttacccccgggcgccctcttgccaaagcgattgaggaattatttatcacagcagcacggttatatgtgaaatcaacactgcggcgcggctgcctggccgcagagggaatgcgagcgaatgatgaacaggcacggaaactggcaaatcagtacgcaaaaccaggaatgcagtttatagaggattacattcgtcagtcagaacctgaaagagcgaaagaactgggcgatttcgtcgtcacaaccttacgcgggttttcagctgcggctgtaacgggcttatcacgtccccgtttgttgaaagtggcgcgtatgaacgggaaagcttttgctgcattactgaatctgaactctgacacataa

SEQ ID NO: 454029 - DNA, 747 bp, Serratia marcescens
atgaataagctactcaaggataaagtcgctgtggttaccggcggcagtagtggtatcggcctggctatagcaaaacgcctgattaatgacggtgcgaacgtggtaatcaccggcagaaatacagaaaaactgaaccaggcagtgatagcgctgggcgatagcgcaagtggaattatgacggacgtcagctgcagagcgagtcttgatgatctctaccagcagatcaaaacagcaaccgggcatatcgatatcctggtagccaatgccggtggcggtgttcatgcgcctctcggccagataacagaacagcaaatcgatgagcagtttgcgaccaatgtgaaaggtgtggtgctgaccgttcagcaagccctgcctttacttcaaaacggttccagtgtggtcattatcggttctaccgcttcggttgatcccggcccggcaatgagtatctacggtgcaaccaaagccgcagtgcgcaacatggtcaggagctgggtggctgaactgcatggctcgggtattcggctcaatattgtcagtccggggccgaccaacacggcctctttgcggaccgcttttggcgataaggcagaggaagggcttgccttccttactgcaaaaagcccactgggacgtattggcgagcctgaagaaattgcggctgctgtggcattcctggccggtgatgagtcgggatatgtaaacggcattgagctgttcgccgatggtggcgcctcccagacctga

SEQ ID NO: 454030 - DNA, 483 bp, Serratia marcescens
atgcattcgcaaaatgaaacagagctggtccgtatactacaggctgaacgtgacattatccgtctcatcaactcttacccttatttgctcgacagtgggaaattcgagcaagtcgcagaactgttacgttatgccacgctggaagcgcctggtcatcaggtcacgggcagggacgagattaaaaaatttctgacctcaggtattcagcgccaccaggacggcacgcctcgcacctggcatgctgtcagcaatattcttattgaagggtatccgctcagcggtgaggcttcaacgagcagttattttatcgttcatcaggagctgcctggcttccccctgcaaccgatatgcacgggccattacaaagaccgctttgcgctgattgacggtgaatggcagtttgtgcatcgtgccgttgtacctcatctgatcggggatctccgttttcatgtcagcggcacgaatgcagaggcgaacctatga

SEQ ID NO: 454031 - DNA, 741 bp, Serratia marcescens
atgatggtgaacacatcgggtaaccgcacggcgctggtcacaggagcaaataaaggtattggccttgcgatcgcaaaaggtctggcgcaacggggatttcatgtctggatcactgctcgtaatcagctgcgcggtgaagaggctgttaagcaattacaggcggaagggttctccgtacaattgctgatgatggatgtggcagacgacgtgagcgtacagcaggcagcggccgcgttatctgcggccaccgacaggctggatgtactggtcaacaacgcgggcgtgctacttgatgtctcagcgactccgactcagacacgcttatccgagatgaaagcgacgtttgaagttaatctgttcggcccggtacgggtaacccaggcgtttcttccactgcttcgggcggcaaaacaggccagggttgttatgttggggagcggtgtgggatcgctggcgctgattacggatgagtcatcaatctattcaagcgtaaatctgctcagctacagtgcctcgaaagtggcccttagtgcggttacggtgtgttttgctaaggagttagcggcgcagggcattaaggttaatgtggtcgaaccggggcacgtaaaaaccgatctcaatggcaataccggccatcttacgccagaagagggtgcgatgccggcgatcagaatggcgctggctgaagccgatggcccaacgggaaaattctttggcccgcaaggccaacaaccctggtaa

SEQ ID NO: 454032 - DNA, 996 bp, Serratia marcescens
atgaaaaaactcatgatttacggtgcatcaggctataccggggcgatgattacacatcacgcgcaggaagctggcctgcagataatcgttgccggtcgcgatcgggaaaaactggcagagatggctttgaaaatggatgtcgcttttcgggctttcagcctggatgatcctgacacaattgatagtgccctggaggatattgacgtacttataaattgcgccggtccgtttatgtataccgcaaaaccgctaataagtgcggcaatccgccagaaggtccattaccttgatgtggccgctgaactggacagttaccagcttgctgaagtcttcgacaacaccgccgcagcggcaggtgtgatgttgctgcctggctgtggcggaagcgtggcaatgctgggatgtctggcagcccacgctgctgcggagatcaaaaatccggcccatatctcgctggcactgcatgtcacaggaacgatgtcgcgtggctcagcggtaagcgcaagtgagaatttatcaactgtatgtctgctgcgccgtaacggtcagttgatgcagcgtgggtcaactgagttgcaaaactttgattttggcaaagggccgcaagcctgttttcccgtaacgcttcccgatgtcattaccatctggaaagcaacggagatacctgatatcgagactttcgtatatgtttccggagaagggtttccgcagggtgatttggctgatctgcccgatggcccgacagatcaggagcgtgaagccagccgttatcaggccgttgcggaagtcgtgaatgcagacggcgataccctgcgtatgttgctggatacggtgaatggatacagctttaccgcgctggcggcagcggaagccgggcgcagagtgctggcgggagagtgccttccaggcttccagaccccggcggcaatattcggcaaacacttcgccgaaactatcgccgacacacggattacggtagctgacaattcgcattga

SEQ ID NO: 454033 - DNA, 402 bp, Serratia marcescens
atgctggatcatatctttattaccgtaagcgatactgagcgttcaatcgttttttatgagcgtgttctgcctcttctcggcatcaccagtcgtcacgattatgacggcagcaatggcccatcaggccatcctgacctcaagggatttggtgccaatggacgcgtatttttctggctaagatcgggcacgccttctcctcaggccgtacatgtcgggtttgtggcagattccgaaatcatggttaaccaggcttatgctgaggccatcgccgcgggtgccacggagattcactcgccaggggcgcaactgcattatgatccgcgctattacgccgctcaggtcagagacccggatggatacagtctggaatttgtctataaaagttggcagcacgaatgctga

SEQ ID NO: 454034 - DNA, 744 bp, Serratia marcescens
atggagcatgttctgattaccggcggaagccgcggcattggggccagcacggcgattgagtgtgcgcgtcgtggatttggcgttatccttacctggaatagcaagcaggaagccgccagccagatggttgagcgtattcaggccgacggggggcatgcgttaacgttgcagctaaacgtagaagatgccaatagttttagtcagtttcgttcaaatctcgaagacgcaatggaatcacactggggatccagaggacttcacgggctggtcaacaacgcaggatatggtctttataatcccatagagacagtcactgaagcgcagttcgacagcttaatgaacgtccatttgaaagggcctttcttccttacccagacactgctaccacttctacaaccgaatgctgcaattgttaatctcaccagcgccaccacccgcgtggcaaccgccggtgtagcgccgtatgcaacatttaaaggtggccttgaggtattgacgcgctatatggcgaaagagtttggtgaaaggaagatccgggtcaatgccgtgtcacccggtccaattcgtactgagctgggtggcggtttaagtgatgaattcgaagcattgctggccgggcaaacagcccttggccgaattggcgagcctgacgaagttgctcgtgttatcgccggtttactgtctgccgactatggctggattaatgcccagacgatagaagtcgcgggtggttataacatctaa

SEQ ID NO: 454035 - DNA, 909 bp, Serratia marcescens
atgccatgttatttaaacaggatggaaaaaaaattagctgaactgcgcctgttggcttcaaaagccgggaataaaatcaccgaaaccgttataccgcgtgtcgcgatggtacagggggaaattcctgagcaccggcttactgctgtctatgagccgatgattaatctgatactcacgggctccaagagcatgacggtgggagataaaacctggcaatacaatcctgccacttattttgtgatgtcggtggatctgcccgcagccggcaaagtctttgccgatgagcgaaccggggcgccctatcttgcggtgagtctgacaccgaagcctgagattattgctgaattactggatggcatgccgggttcaggtaaaacacatctttataacgccggattttctgtcgccccggttacgtccgaattgctcgatgcctggctgagaatgctgcgactgctcaataagccagaggaaatttctgctttagctcctgcgtatgaacgagagattttattccgggttcttcaggggccgcagggctggatgttgcgtgatattgccacgccggaatcgcatcttgcccgcatctataaggtgattaactggctgaaacaacactatatgcaagccgtgcgggtagaagagctggccgccatggcggcattaagcgtttccgcatttcatcgccactttcaggcgatcaccgcgctcagcccagtccagtaccaaaaacgtcttcgcctgatgcaggcacggttgaagttagccacgactggcgacagcatcacggccatagcacatgctgttggctaccaaagccatacgcaattcagtcgggaatatggacgccatttcggcctctcgccttcatcagatcaaaaaaatataacactgctcagaaacatatag

SEQ ID NO: 454036 - DNA, 390 bp, Serratia marcescens
gtgaagaacctgggacgctacctgaaactgccgccggtgtcggcttcacgactgcgacactatgccggtggtgcggtggtccaccactacctcgatcaccgcaagggaaagcataaacgccagacgctgagtcaggaagagatgatcgggcgctatatcggccatgttccgtcgcggcattttaaaatggtgcgctactacggctttctggccaaccgcaagcggggtacgctgctgccgaaggtctacgaagcgctgtcgatgccggtacgggaaaaaccgaagcagcccgagtttgcggtgctgatgaaaggcttcctgggcacagatccgtaccagtgcatcctctgcaaaggccggctgcgttttgccggcgccgtggagggttaa

SEQ ID NO: 454037 - DNA, 756 bp, Serratia marcescens
atgtcacgcaagcttgagggcaaagtcgcagtcatcaccggtggttcctgtggaatcggccttgcaacagccaaggagtttgttgccgaaggcgcatatgttttcatcacgggccgccgcgaatccgagcttgaaaaggccgtcgatgaaatcgggcggaacgtcacgccggtgcagggtgacgttgcaagcatggaggacctcgaccgcctctatgaggtcgtcgcccaggagaagggcagcattgacatcatctttgccaatgctgccgtcggcggaatggcgccagcgggtgctgcagcctcaccggaacactacgacaaggttttcaacgtcaatgcccgcggtgtgttcttcaccgtgcagaaggggctcaagctgatcaacgacggtggatccatcgtcctgaccgcctcgaacgcacactacttgggtgttccaacgttcgcgccatattccgcgtcgaaagcggcggtccgttccttcgcgcgaacctgggctgccgaactcaaagaacgtggcatccgcgtgaacacgttgagtcccgggccgatcgacactccgatcatggggacatctgctctcagtgccgaagaggtcgataagttcatggcacagatcgtggcaagtgtgccacttggccgcatggggcgccctgaggagatggccaaggcggccctgttcttggcctcgagcgactccagctttgtgacaggcatcgaccttgtcgctgatggcggcatgacgcagatctga

SEQ ID NO: 454038 - DNA, 417 bp, Serratia marcescens
atgcgcaagcgcaaaaagacctacagctgcggccttgaggcagcgctggcggtgactggcggtagatggaagtttctcatcctgtgggtgctgtcgcatcagggcaccaagcgcttcggcgaactgaggcgcgcggtggcgggcatcagtgaaaagatgctgatccaggagctgaaggaactggaacttgatggcgtcatcgcgcgaagggacttcaaagaggtgcctccgcgggtggaatacagcttgaccgcgtttggtatcgaactcggtgaggcaacgcagccgttgtgtgattggggtacgaaaaacatcgaacgcatctcgggccatccgctgcaggtcgatccccttagtgcggcatcgcaacccgatatgacgaagctcactcgagcagttcctgcatcttcctcttga

SEQ ID NO: 454039 - DNA, 888 bp, Serratia marcescens
atggaacttcttaaccacatgtcctgttttgttgaggtcgtcaaggcgcgcagttttcgtggtgccgctgagagcctcggaatgcctaattccacgctgtcgcgtaaaataaaggagcttgaaacgtttatcggcctcaggctgttgcacaggacaacgcgcaaaattgaactgaccgaggccggacaaatatattacgaacgaagccgacgcatcattgatgaagcccgtctggcccatgagcagctcggctctcttctggctcagcctcagggcatgctgcgggtttcgttaccggccgattttgcggtgattattctcgcgccgcatatcagagagttctcggactgctacccggggatcagctttgattttgatttaacgccgagaaatgttgatttggtgtcggagccctacgatctggctgttcgcatgggtagtctccccgattccggccttatcgcgcgaaagcttggggggttgtcccgcagcctctatgcatcccccgattatatactcaggaacggtacgcccggcaatccgcatgagcttgcaaatcatgaatgtattggtaggcgacaggataagccttgtgactggcagttacatcgtggagaaaacaggatgagcatcaggacaagcggacgctttcagatgaacagtattgctatgatgcgtcgttttgccgcgatgggcacaggcattgctattctgcctgacagaatagtcgaagaggacgtcaccgataataaacttacacgcgttttgcctgactggaaggcagatgctgtcacaatttatgctctgacagaaacacgtctggtaccggcgaaaattcaggtattcattgaatttatgcgtgaaaaactgggcgacaaagtggactga

SEQ ID NO: 454040 - DNA, 585 bp, Serratia marcescens
atgagctttgaaaaattcaccgctgacaatgccgccatgctgttgattgaccatcaggtcggcacgatgggctgggccaaatccatgccgtttgacgaactgaaacgtaatgcgctgatgctggccaaatctgctgcaattctgaatataccggtggtcctgacatcgagcatggaagagtatgcgcaggggccgctggttgaagaactgaagaccattctgccggaagcgtttcaggcacgaataaaacgcgtgggcatcgttaacgccatggacgatgagaactttgcagccgcggttaatgcgaccggcaggaagaaactgattattgcgggcgtaaccaacgatgtctgtacggtataccctgcgctgacgctggcagcagccggctttgatgtgcaggtcgttgctgacgccggtgcatctccgacgaaaatggctgacgatattgccctgcgccgcatggataaaaatggcataacgctgaccacaaccaaccagctgattgctgagctggcaggaagctgggcgacacctcagggtgaaaaactggtccaggtattaatggaatccttccagcagtaa

SEQ ID NO: 454041 - DNA, 753 bp, Serratia marcescens
atgcttaaaattgaaaacagcaataaacatcagcatggttctggcggtttcggcatcgatatcctctggccgggcatggtgcagaattcagacgacagcggtattggtgcaattggtcgtattgaccaggcgaacatcaaacccggtacggtaatttccatgcatccccacagggatgatgaaattctcacctacatacgcaaaggcagaatgcttcatctggacacggtcggcaatgaggaagaaatttctgatacccgactgatgctcatgaacgccgggcatactttccggcatgaagaacgcattctgggtgaaaaaggcgaatcagtgcagtgtctgcagattttcattcgcccctctgagaccaacctggcgccagaagttcagtttcacgattttggtacccccttcagcgacaataactggagactgattgccggtcctgaaaacgcgccgttgactttccggtctcagacgtgggtacaggacacacgtgttgccggaggtcacgaactaaagctgccggctgctccggtcagtaacgtggtgcgcctgttatatgcctttgaaggtgcagtccggattggtgatatcgtcctgaaaacgggtgaaagcattattattgaaggcgacgaattacacaccgtcactgcgctggcaagcactgacctggtacttttcaccacggacccgtcggcaaaaattttcaggggtggtatgttcagtggaaatatgcgcccgcggctgtaa

SEQ ID NO: 454042 - DNA, 1059 bp, Serratia marcescens
atgaataaactatttaccccgttcaggctcgggaaactaactctgaacaaccgtctggtgatggcacccatgacacgtagccgtgctgaatatgatggcacaccggctgatcttgcggttaaatactatgcacagcgcgccggggtgggccttatcattgcggaaggtacgcagcccagtgatgacgggcagggatacttaatgacgccgggtatttacaccgacgctcacgtagccggctggaaaaaaataacttcagccgttcacagtaagggcgggcatctgttcatccagcttatgcataccggccgcatgaatcaccctgacaatacgccacaccatcgtccgggcgtggcaccctcagccattgcacccggtgtaccgatgtttacagcaaccggtatgcaggatattccggtgccacgcgagctgacaacggaagaaatccaccgcacggttgctgattttcgtaatgcggctcgtcaggctgttgaggccggtgccgacggcgtggaaatccacggtgccaatgcctatctgatacaccagtttttagcgccgagtgccaaccagcgcactgatgaatatggaggttccattgagaaccgtgcccggtttgcgctggaggtggcggcagccattgcagaagagattggcgcagacaaaaccgcgatccgtctttctccgggtagccagatttggggtattgatgaaggtgaagaaggtccggcgctttatcgcttccttgttactgagctgaataagctcggactgagctacctgcacattatgcatatgggcaatgagaaattgctgagtgaactacgggcattatggacgcaaccgctgatactgaatcgccccggaaaaagcagggacagtatcggtgatgatatccagtccggacttgccgaacttgaatcttacggccagatgattctggcaaacccggatttttcccaccgcgtgaaaacaggagctccactaaacagtgccgatccggcgacctactatggtggtggcgttgaaggatatactgattatcctgaaatacactaa

SEQ ID NO: 454043 - DNA, 1551 bp, Serratia marcescens
atgcacacattaattgccaacaaaatacgttcgcgtattagttttaacgctgttctggttagctttttatatatcatagcatctgtcgtactgatctacgccctgggctatcatggggcaaagggcatcgatattctgctgatgctgctaatattactcactctccccaccataccgttactccgctaccttctggttataccgttttttatcctgtgcgctatctatttcccaattggttatatttacggcaaaccttccgtctcagtcatctccgctttaatgcaaactaataagctagaagcccatgagtttttactttcaatgccagtaacgtgctatctgctgccaattttagttattgctttattaactgccattaatcgatatgcctggcgttcccctccaccggtaaaaagaatgctgccgtattggttattattaatcctcattgtcttgtcttacgctgtaactcacaatctgcataagttaaagcttacggactactttatctcgatatttaccggttatcaggattatcaagagcaaatcgcgcagctggatatggcccacgccagcgcccccgattggcaggtcatcccgccaaaacagcggcaggctaactatgtcattatcatcggggagagtatgcgacgcgactatatgtcgctcttcggctatcccttgccgaccacaccgtttctcgaccaggtaaacggcgacttttacagcaactatatttctacggccgccaatacctttgagtccctgccgcgtacgctggcgctaagccagggggaacaggttgattatgcgaataacgtcgttacgttagccaaggcggcaggtatgaaaacctactggttttccaaccaagggttcgtcggcgattatgatatcccggcctcacgcatcgccgcctacagcgatcgacgctatttcctgaagcatggcgactatcaatcattgaataccgatgattatcagctgctgccgccttttgccgatgcgctgaaagataatcataatgggctgtatattctgcatattatggggtcgcatccagatttctgcgaacgtttgaacggcgccaaaccggcgttcagctttggtaatcaggatctgtcctgctacctctccacttaccgcaagaccgatgactttatccgacaaacctaccgtctactgcagcagacgcagcgccctttcaaactgttttatttctccgatcacggtctggccagacataatatcggcggtaatttctacctgcgccatagcgttgagttcaagcagaattacgaagtcccgctggtgattttgtccgataacgctacgcaacaccgtcagatagctacgccttacagcgcattcaactttatccagctcttcgcccggcaaaccgacattaccatcactcgacccagtatggcagcctacgcgctacagctggaacatcgccgtgtttacgtcgggcaaaacatgctggactttgatggattagcggaggacaaagttgatctgcctgatgaaaaccacctgcacggttaa

SEQ ID NO: 454044 - DNA, 852 bp, Serratia marcescens
atgatcgataaagggcagatgctgagccggcacgatttttcaaaggtcaattggggcattctggcagcggcggcgctgctgttaaccatcggcggcgcgctgttaatgctgccgctgatgagcaatatggaagagcgcggcatcctgaccttgctgcaaaccggcgcggtaaccatcttactggcgtgtatcctgctggcgctgcgtcatttcctgcgccccacgcagacctatcgcctgtatgaacacggcgtcagagtgttcaacagccataatcaccaggaacgctttattccgtttgagaaaatcgtcgatgtctaccgcacccgcggcgtgccgctgctgggcaacctgtgcggcggcctgtgtgaagccatggcgttccgtaccgccgccgatcaaccctggtgcacggtatacagcaacgtgtcccacgcctgggcgctgcgcgacaccatcatcagccagcaaatcctcctgcgcgggccggtcgccctcaatgcgctgtatcagggcgaagaactgccctttcactaccttaccggccggggccgctggctcacctggctgctcggcggcaaaccgcatcgcctgccgggccagacgctgcggctaagcgccaaaacgctggtcacgccgcagggcagcatcgatattgcgcaggttcactcgctggacagccagccacaacacggcgagatccgcctgcgtgacgcgcagggtcagacgctggccacgctgtgctacttttcactgctgagcgccgatctgtttattgcgttgctggagcatatgattaacaaccgcatccccgcctaccgtaacccggcgatgacgcggtcagttatttaa

SEQ ID NO: 454045 - DNA, 780 bp, Serratia marcescens
atgctacgccggttttccagtcaggtgcctatcgtgaacagtcagtcaaaagccagtttcaaaccgcgccgcggcggttttaccttcaagcagttttttgtcgcgcacgatcgctgcgccatgaaagtcggcaccgacggcgtgctgctcggcgcctgggcgccggtgaaggcggtccggcgggcgctggatattggctgcggcagcggactgatcgcgctgatgctggcgcagcgtacggcggatgaagtgcagattgacgccgtcgaactggatgccgccgccgccgcgcaggcgcatgacaatgcggatgcgtcgccgtggccgcagcgtatttgcgtacaccagcaggatattgagccgttttcccgccaacagagcgcagcttacgatctgattgtcagcaatccgccctatttcgccccggcggtagcctgccgtgaccgggcgcgcgatgcggcgcgctataccgaaacgctgacccatgacgtgctgcttgactgcgccgaacggctgttacagcccgacggcacgctgtgcgtggtgctgccgtatgagattggcgaggcctttgccgccgatgcgcagcagcgcggctggcatctggcgcagcgggtgaacgtcagcgaccgggcggatactgcgcgccaccgcatattgctggcgctgacgcgcacgccgcaggcgtgtgtcgagagcgatctggccatcaagcaggctgatggcgactacagcccgccgttccgccgtctgatcgctgatttttacctgttttactaa

SEQ ID NO: 454046 - DNA, 966 bp, Serratia marcescens
atgcgccttaacctctatgcgaaactggtcaaaattcagccgagaaaccgtcggcaaattgacagcttcctttttaatgcacctaatcgatataaggtttacaccatacctaaacgaaatggtggagagaggattatcgcgcatccctcgcgtgaacttaagactttccaatatggtcttataactattttggaaactcatttccgtatccatgaaagtgcagttgcttataaaaaaggcttgggtattaaacaaaacgcaactctacactctaataatccttatattctaaagatggatttttctgattttttcaatagcattactcctgatttactcttcatggcatgtgaatggaatgattatgagttatcttctgcagagaagagagttcttacaaaaggtttattctggaataaagctaaaaatcagtctggtaggctttcattaagcgtcggagcgcccagttctccgcttatttcaaatgtaattatgtatctctttgatgattcattcaccaacttttgtcaacagcgagagatcacctattcacgttatgctgatgatcttacattttcgacccatcataaaaatgctttatttgatttacctaatgaagtcagacattttctcaataaagagtatcagaacagaataacattaaatgaacgaaaaacggtttttacttcgcgagctcataatcggcatataactggcgtaacgctgacaacacaagggtcgctttcaatagggcgagaacgtaaaagattcatttcctccttaattcataaatataaacttggcttacttgatcctgacacctcttattatctacaaggactactatcatttgcaatttatatcgagcctgatttcagagtcagaatgtctaaaaaatactcaaccaataccgttacagaaataataaaattgaggaaagaagatgaagcctatagaaaacaataa

SEQ ID NO: 454047 - DNA, 243 bp, Serratia marcescens
atgcctgttgtattacgttttcgcgggtgccggtttttcttctattcgaacgaaggcaatccgttggagccagcgcatattcatgtcagggatgccgagtgcgaagctaagctgtggcttatgcctgaggtgcggctggcatataacgacggctttagcgacaagatgttgaaagtgctgatggcggtaacgcaagagcatcatgctctgtttctggaggcgtggaatgactatttcggctaa

SEQ ID NO: 454048 - DNA, 249 bp, Serratia marcescens
atgactatttcggctaaaaatgttcgctttgatgatgtttcgatgtgggtggaactcagcgatggcagaacgcttggcgtgccgttggtttggtttcctcgtctgcagcatgcgagttctgctgaacgggaagagtatgaactcagcgccagaggtatccattggccgttactggatgaagatatctcaattgccggattgctcaaggggcggggggatatgacccggcggccccaccatgcagcctga

SEQ ID NO: 454049 - DNA, 123 bp, Serratia marcescens
atgaaaaggagttcgttatttatcctgctcattgtactgggcgcggcgtttggggttgataaaggcggttggtcggtcaacggcaacagcctgacgctgaacgtgatagtccagaacaagtaa

SEQ ID NO: 454050 - DNA, 609 bp, Serratia marcescens
atgatacgtccgcatgacctgctatggacggataacgccgacgcgctgatctttcccggcgccgcgccggcatgggcgacgcagcgccgggaactgccgctggtggtgcggcgcgatttgccgcgcgacggcgccattccggtaggcatccgcggcgcgacgcgcgcccaacgggcggcggcctggctgccgcctgcggcagtgcgccggcgggtaacgccgcaggcgctggtggccgagctgtcggcggcgtcgccctttgccgatttgccgccggtgcgggcgctgctgacgctggcggcgcagccgtggcgctggacgtggggcgtgaccggcagctgcggctatgcgctggcgaccggcctgccggtgatgcatgcggacagcgatctggaccttaccgtgcgctgcccgcagcccgtcgatcgtgcggcgctgcaggcgctggcgcagcggctgcgtacgctgccgtgtcgggtcgatatgcagattgaaacccctcacggcggttttgcgctcaacgagtggctgcgtgacggacgggtactgttaaaaaccaacggcggcccttatctgaccgatgcgccatggtcggcgctgcaggagtga

SEQ ID NO: 454051 - DNA, 933 bp, Serratia marcescens
atgaagattctttttaccttccccggccaggggccgcagacgccgcagatgttgcaccagctgccggatactgccgtcagccgcgaactgctgacgcaggcgcgtcagacgttgggggaggatccgctgtcgctggacggtgcgcaggcgctgcaaaaaacgcgtgcggtgcagctttgcctgttgatcgccggcgtcgcctacgcccgcgagctggagcagcacggcgtgacggccgactttgtcagcggcctgtcgatcggcgcgtttccggcggcggtggtggccggcgccttgagctttgaggatgcgctgcggctggtggcgctgcgcggtgagctgatggagcaagcctatccgcagggctatggtctggcggcgctggtcggtctgccgcaaagccgggtggaggcgttaatcgcgcaggtgaacggcgagcaatcgccgctgtatctggccaatatcaacgccgatgaccagatggtggtggccggcagcgatgaggcgctgagccgggtgatgacgctggcgaagcaggttggcgccgccagggccagccgtctggcggtcagcgtgccgtcccactgcgcgctgctggcgcagccggcggctaggctggcggaggtgatgcaggcggtgacgctgcggcgtccgcgggtggcctatctgagcggcagcagcggacgggtgctgtggcagcctgagcgcatcgccgacgatctggcctataacatggcgcgcaccgtgcgctggcacgaggcgatgagggcggcgtatgagcgcgaggtgcggctggcgattgagatgccgccgggcgcggtgctcagcggcctgacgcgcaaggtgatgaccgcgggggaagcgctgtcccgctgtcagctggggttggcggcggtagtcggcattgtcgaacgctaccgccgtcaggcttag

SEQ ID NO: 454052 - DNA, 498 bp, Serratia marcescens
atgcagtacggcaacggcatgccgtttcgggatgcgttgttagaccaggcgctgaaggcgcatattcttaatgataagactgtaaatagttcattattaaaaataagaagtgctttggatgaaaatatcgatagggttaatggttattttcccaatgataagctctacaggataagggaaattattcttgagggaaggctgcccaagttcgatcggttgcaggataattttaacggtatggggataaccgttcatgatacatgggcaacgcacattactataaagtcgctccatattgagaatggcggctatcgtgtcgcagtgaactacaaagtacaggatcacttcggtttggatacagaggatattttaaagttcaagtttaatcagtttcgtttttttcgcatctggtttgtactgcagcgctataaccagtttggttttaagccgtttatgacaaatatggaagcggatgtagagttgcgggggacgtggtga

SEQ ID NO: 454053 - DNA, 771 bp, Serratia marcescens
atggctgtccggcagaatgccgcggccgtgggtgctggacatcaccgccacgccggcgtccgccagccgctgcaccgccgccgcgcagcccagcgcgccgccgcccagccacagcagcggccgtttggcggtcttcagacgttggtacaaacgctccaccgccgccgcatccgccgccggcagggccggtggcgcaacggccggcgtcagcaccgcgctggagaccaggctgctttggatatcaatcgggatctctaccgccaccgggccgcagggtacggtctgcgcctcctgaatcgcccgctggatcaccgccaccgcctgctcggcgctgttaacccgataggcgcgttttgcacaggcgcgcaggaagcccatctgatctttggtttcgtgaataaaaccggcgtcggcatccagatacgccttttccacctggccggtgatgtgcagcagcggcgtattggcgttcagcgcttcaatcatcgcccccaccgcgttacccgcgccggcgccggtgctggtcagcgccaccccgaggccggaaaaacggccgtgggcgtcggccatcgtcaccgcgcccgcctcgccgcgcgccggcacaaagcggattgccccgcgctgcccgacggcatcggcgatcggcaaattatgaatcgagatgatgccgtacatcgccgacaccgcgtattgctccagagtccgggctatcgcctcaccaaccgttattttatcgctcatcatctgccttcttatcatattaatgcgtag

SEQ ID NO: 454054 - DNA, 1044 bp, Serratia marcescens
atggctctatcacaccggcatggggttgccaaggctgcatatgcctttacatctgctttggcgcttcttttgaaacgtttgggtaagcacaatgtaatggaggagccggatatacagggaataaaacccgatatcacgtatggtcagcaagactctctgactatgatcgaaacaaagttttatcgtcgcagttctccgccgccatcttctatttttaaacgcgctctagagcacacacatgacagaggtagtaggatcggtgctgccagaattgtgctggcaatctcctgccccatggataagcgtttttcgaatgtagcacatatataccccgctgttgagatttgggacgaaacgaagctatttgagatggcagccccatttcctgagatcttgaccctgtttgaagagatattcgaagctgacacacctaagagtgctgaaactctgagccttagttcgtcatcgtccgcgattactggtgctgatgaaccgacatcggaacctaagaaaggtaaggtattggccgaggccttagcagaaatcgagcgtggccgcgatatggctacagatttcgagaatgcctgcattaacgctcttaaatatctctttgaaaaagatctacacggctggcacgtgcagtctcgtaccgtagataccttgcatcgtagggatctggtgtgccggatcttggcaaaggcagccgaggtgtggcgtctgatgctcgaagacctgggaagcagatatgtggtctttgaatttaagaactacagcaagcccattacccagaacgagatcgtcaccactgagcgttatttatacccctcagcccttaggaaggttgcgattgtgatttcacatgaggactgtgcggactctgctaaggccgtaattgccggagcgatgagagaacatgggaagctgatcattcccctatcggtaccagagataatagatttgctgaaaaccaaagacgaaggctcagatcctaatacctatttgtttgaacgcgttgatcagtttcttttagggcttggaaggtag

SEQ ID NO: 454055 - DNA, 1266 bp, Serratia marcescens
atgagaattcgtcgtaaacctatgagtaagactcttaaacaaccaaataaaaaacttcgttatattgacccattaaaagttaaacgcctgatcggtggtttttttccatcagatattttagctaagctaattgatgttgacttggtagctctgaatgacgaagccactattcgcatgggcggcggaggaataaaacctctatatcttagcaaagaatataacagtacagtgattggtgtagttgatgaaatggaaaaatacaatcacaagttagtgtctcatccagaattaatgaaggagcgttcattctattcagctccattcgacctaacaattaggtatggttccagacaagacatgcctcgcttccatgaaagctggagcgaacagacgttgctagaatcaacagttcaggtatataacctcggtgattgcaaatgtagttcttgttatcgaccaccagaacaacatagggctatattgcatatatacaaagagatgttcaaaggtcatatttggcgaatatcacttccgattcaatatctcatgaaaggttttccattgaaaccaaacggtcacatgggttactatcatagccttgttgtccagcacccggattcgtatttgcgtgagtggctcaaggagaatgagactttagaggggctcccggaagaaccacgatacaactacgtaggtattacatcacgtaactggttggtaagaatgagtgaacatatacgtggtattgaatcaggcgaaaacaaaaaattctataatgcttggaggcatttcgttaaaaacgaacgcgtcgatttcatgtctgaactattagttgtcaatcaatcttatgatgacattatggcttgggaagaagcccgagtggatatagaaatggcggagggaagagcattaaatatgattccgggcggattcaaaggtattcgagaattacataaacttagagtcatcaacaaagatcgaccgacgttgaaagagcttagaagcgcaataaaagctgccaaacgagctactccccgaagcggagtacctaaccttcttatttcgggattatggaaagaagacagttacgcagcaaaaatcatttgtggcgctgaaggtcgtctatcagttgaacaagtgcgtaaagctcgtgagctacatcaagttggaatatcagtggaagagattgcagctaaaattagtgcacttaatgtacctcaagtgcgacgacttttggatgggaaaacatattctcgtattcactaa

SEQ ID NO: 454056 - DNA, 669 bp, Serratia marcescens
atgaagcttgaaactcgtatgcgccagtcgattcaacaccgttgtggagttgtactatctcgttctgatttggctccattgggaagcaagacccaagttacacatgcattgagtgtgttagtgaaaaatggtgaacttcttcgcctttctcaaggggtttacgttaaggccaaaagagcggggaatgatgtaaaagcgcagggtagtcttgatgttatcattcgtgaagcagccaacaaattaggcttccagcttctccaaaaagacttgtgcctcgagaaagtaaatgcctcacaaggtgaaattattgttgaagtcgatgcaccaagagttaagcgcaagcttgtcataaatgggaagactatttgctttcgtagttatagccgtaagtctgttactaaaaatacagcattcaaattggcaaagacacctcctactaagggagttgctcgttatgttgtagagcttgctcgctattacaacgtatcttattgctacaacgcgatggatcagtgggctgatgttgtaactcgcttagctggtgatgagatagtacatgataccgtcgaagatcttcttgttgctctaaaacgtgcggggaaaatcaccaagcaagaagttgcgaagttgtcagtcaattacctgcgagaacaaaaacaaagtgtttga

SEQ ID NO: 454057 - DNA, 717 bp, Serratia marcescens
gtgtttgatccgtttaatgattttgagcaagtcggttatttacgtaaccatcatggtgtaaaagacccagagattgttcgccaacttgaacatacaatgtttcgtgctggtttagatgaagctttagtttacttagcgggaagagcggacttgtgttacgaagatttcttggaagttcatcggatattattcgaagaattctatccgtgggcaggtcaagatcgtacaattactgctcctaattgtgcggtatctaaagctggcacgatgttttgccatcctcatgatgcacgattagctattgagcagggtctacgtctcggacagaatgcagagtctatgcgtcagcgtcctggtgaggttatgggcttttttgcatatgggcatccatttcttgatgggaacggacgtactatgttaattgttcataatgagctttgtcatcgagcaggcttttcgattgattggcatagaactaataaaattgattacctaagagccttaagcgctgaaattgaatccccatcaaaagggcttttggataactacctattacagtttataggcggtactcgagatcgaaatctttggggggaatctataaatggtattcgtggtttagacggtcaaggtatagaaaattccgtagatggtgagtacacggacatagcagttgctcaaaagtatcaatcattcgagatgaatagaggtctgtga

SEQ ID NO: 454058 - DNA, 1218 bp, Serratia marcescens
atgccaatcatcatctatattttcacgctcagcgcctttgcgctgggcctggcagaattcgtccctatcggtctgactgccgtcatggcacaaagtttgaacgtcaacatcgaacgcgtcggccacgcagtgacctggtatgccctgggggcgacctttgcagcaccggtgctgaccgctttgacggctagctggtcacgcaagcggaccatgctgatgacgatgctgatcttcaccatcggcagtctgagcgcagcgcttgccaccagcatttcaatgctgctggtggcgcgtttcattgccggactcggacacggtctgttcctcgccgccgcctccagcacggcagcaggcctcgtcggcgccaaaaaagcgggcagcgccgtcgcggtggtattttgcggctttacggtcgctatggcgatcggcgttcccatcagtacctatctgggaggggtaagcgcctggcgaccggtactcggcacgattgccgcattcggggctctgggcttcctgggcctgctgctaggcatgaaggaaccgcctcgaaatggggaacatacaggcaacgagtctgttgcactggctctgaaggccatcttccacccggctctgctgctggccgcattggttaccgtcttgggctatgccggttcgttcacggcctataccttcatcgcgccgctgctgaccgacgtaacgcaggttagtcccgccaccgtcagtctgtttatgctggcctacggtgtattagcggccatcggcaacatcatcggcggcaaggtaaccgaccggatgggcgtcaaccatgcaagcgtgatcgttatctccgccataaccctggtcgtgctgggaatgtggctattcgcctcctctgcggtaaccatgggcatactgattgcactgctgggtctgtttagcttcgcttccgtaccggctctacaggcccgccttatccatatcgccgaacggcatgcgccacacgcccttggcgtcgctgcgggcctgaatatcgcgggtttcaactctggcatcgccctgggttcagtattgggcggcgtaacgatcggaaccatcggcatcggctatacgggcatgaccggcgcgatggtctcggtactgggcctggcactgctgttatccctgatcgcatacgaccgccgcgccgctggctatcggaccatcgcagagacacagagcggaacccgtaacccatag

SEQ ID NO: 454059 - DNA, 1230 bp, Serratia marcescens
atgaagagttctgtttcctcaccgttaccaccggacaacgcgctgactcagccggtgaagatgcccggcagcctggtatggctgttcgccgtcgccagcgggctgagcgtggcgaacgtctattacgcccagccgctgctcgacgcgctggcgctggacttcggcatcggccaggcggccgtcggcggcgtgatcaccgccacccagctcggctgcgccctggccctgctgttgctggtgccgctgggggatcgtagcgatcgccgccgtctgatcgccatacagctgcttgcccttgcggctgcgctggtcgcggtgggtctggcgcgttccgctcccgccctgctggccggcatgctcgccgtgggcctgctgggcaccgcgatgacccagggcctgattgcctatgcggcaagcgcctctgcgccgcatgagcaagggcgcgtggttggcgcggcgcaaagcggcgtgtttatcggcctgttgctggcgcgggtgtttgccggcggcatcagcgatctggcgggctggcgcggcgtctacctgtgcgccgcagtactgatgctggcgatcgcactgccgctctggcagcggctgccccgcctgccggtcgcgccgcacaagatgcgctacctgagcctgctcgcttcaatgttggcgctgctgcggcaggaaaaagtgttgcaggtgcgcggcctgctggcgctgctgatgtttgccgcgttcaatatcttctggagcgcgctggtgctgccgttaagcgccccgccctataacttctcgcacaccgccatcggcacctttggcctggtgggcgtcgtgggggcgctggctgccgcacgggccgggcactgggccgaccggggatatgcccaacgcaccagtgcggcggcgcttgcggcgctgctgctggcctggtggccgctgtcgctgatgccatggtcgctgggcgcattgatgatcggcatcgtactgctcgatttggggggacaggcgctgcacgtcaccaaccaaagcatgattttccatacccgccccgaagcccacagccggctggtcggcctctatatgctgttttacgcgctcggcagcggcctgggggctatcggcaccacggcgacctacgcctgcgccggctggcagggcgtatgcctgctcggcgccgcggtcagcctgctggcgctgctattctggtgggcaacgcggcgttatggggcgaacggcaagtga

SEQ ID NO: 454060 - DNA, 447 bp, Serratia marcescens
atgccatcgcgtaaaccaatgcacgacgaaccctgtccggtagcacgctgcgtcgatctgattggcgatcgctggtcgctgctgatcgttcgcgacgcctttgacggcctgcgccgcttcggcgactttcaacgcagtctggggatggcgcggaatattctctccgaccggctacgcaagctggttgatgccggcgtgcttgccctgcagggcgcctcggacggttcggcgtatcaggagtatgtgctgacggacaagggggaaagcctgtttcccgtagtggtggcgctgcgccagtggggggagcggcatctgttcgaacgcggcgagcggcactcgctgctgattgataagcacaccggcgaaccggttcctttaatgagtccgaccgggcggtatggcggcgtgctggcggctaacgctaccgaggtgcgcaaggtaaagtaa

SEQ ID NO: 454061 - DNA, 435 bp, Serratia marcescens
atgatgatccgagatttttgcacgtctgattcagagtccgtactggacatttggttacgcgcgtcaattcaggcgcatcattttgtcgcccccgagttttggcacagccagcttgacgcgatgcgcgacgtctacctgcccagcgccatcacccgggtgttggaggccgatggtgcggtcatcgggttctgctctgtttatcagcagacgctggcggcgctgtttgtttcccctgagcatcagggaaggggagtcggtgcgcaattgctggccaacgccatgtcagccaaatcgacgctggaactgtcggtgtatgccgcgaatgcttccgccatccgtttctacgaaaagcagggatttgtcaccgtcagagagcggctggacgagcatacgggccaaccggagaaggtgatgtgctggcgagcgttatcgtga

SEQ ID NO: 454062 - DNA, 912 bp, Serratia marcescens
atggggaacgctgacgtgaacattgaagagctgcagacattcgtagaagttgctgatgcgggagggatttcccctgccgcacagcggcttggcgtggccaagtcgatcgtcagccgccggctggcgcggctggaggcggaactgggcgtccagttggtggtgcgcaccacccgcggaacggcgctgaccgaggccggcgccaccttccgagactatgccgccagggcctgcgccgagatcgccgtagccaaagagaccatgttgcccgccggcgagctgcgcggccgcctgcgggtagccgtgccgctctcttttggcccgacccactttgccccggtgctcgcggagatggcgcgccgccacccgctgatgcatattcaggcctgctacagcgatcgcttcgtagaccttatcgccgagggttacgactgcgcgatacgggttggttacctgccggactccaacctgatcgccagacgcatcggcccgatttacggcaggctcgtcgccagcccggcctatatcaagaattacggcgaaccgacgacgcccgagacgctgctcacccatcaggcgctgatgcagggcaccgaaacctggcagctgacggatggcggccgcagcattacggtgcgtccgcaggggcgctttaaggcggacaacggtacggcgctggtcgccgccgcgctggcggggctgggcatcgcctatctgcccgactgcctcacccatgcgcatctggcctccggcgcgctggtgccggtaatgacgcgccacccgccgccgccggcgggcgcctacgtcgtccggccgccgggccagcacccggcgcgcaaaatacgcatcctcacggaattgctgatcgaatatttcgaccagtcgccgtactttgcccggtcgctcaccgcctga

SEQ ID NO: 454063 - DNA, 651 bp, Serratia marcescens
atgacttttcgtaacggccttgattcgcttcttcgtcccgaggattcggtactcgttttgattgaccaccaaccgtaccagctggctaacctgaacagccatgaaccgcagatggtggttaacaacgccgcagcgctggcgaaggccgccagggtgtatggcgtgccgactattttgacgagcgtgattgctgagcgcggcgggctgatctttccgcagattaccgacgttttccccgagcaagaggttatcgaccggacgctcatcaatacctggcaagacccgaaagtggtggatgcggttaaggcgaccggccgtaaacagctgattattgccggcctgtggaccgagatctgcgtggcgatgccggtgattcaggcgctcggcgaagggtgggatgtgacggtgattacggatgcttccggcggtatttcggccgaggcgcatgaggtcgccatccagcgtatgattgcggccggcgcgaatatgatgacctggctggcgctggcggcggagtggcagcgcgactgggcgcggacggagtatgccgtcgggatcacggagatcctcggtcagcatgccgccggcagcggtattgcgtatttttgggagcagcagttgcttaacacgccggtgccggggaacgcataa

SEQ ID NO: 454064 - DNA, 708 bp, Serratia marcescens
atggaaccaattctgctatacggcttcccggcgggaagttctatggggcttgtcgctgcgtttgaatggctgggccgcccgtaccaactgtgccgcgtcgatatgttaggcgaaatgcgcgagccggcctatcagcgccttaacccgcgggtggagacgccggcgctgatcaccgaacggggggacgtgctgacggaaaacctggcgatcgccgcctggctggaggcgcgggacagcgcgcgccgcatcagctttgacccgcagtcgcccagcgccgaccgtatgcaccagctgatggcgtttatcaacaccggcttcaccgccgccttcagcccgctctgggcggcgatggagatgtccccgcccaacccgatgatgaaggatgtgttgcagacatggggccacgagtccgtgatcaagcgtcacgaccagctcgaggcgatgatcggtgagctgccttttctgctcgcggatcgtccgacgctggcggacgcgattctgatcggcgttgcccgctggctcgatattcaccaggtggccgcatcaacgcgctggccgaagctggccgcgctgagaagccgccttgaggccgatcctgcggtgatctatgccaccgcgctggaaagcggcgacatgcagcccggtaacggcgcctgcagcggccatattgcgctgccggaggtgatcgaacgctttggcgccgcatag

SEQ ID NO: 454065 - DNA, 1269 bp, Serratia marcescens
atggaaacgtcactgattttgcagtccgacccgatgatgggggaagccgacagcttgagacagcgattcagcgctgcaaagcggcggcgtgaagcgacgatttcgctgacggcaaacgaaaatgtgctgtcggaaagtgcgcgttgggtagggcaaagccggcattatgaccgttactatttcaacggcctgcttaacgacgactgccgctatgccgcgcactataacggtatgcagtttgaagcgtttcctgaggtggcctggttacaggcggaggccaccgccgcggcgcagcggctgtttgacgctccttacattgagtatcgcgcgctgtcgggcgtacattgtacgctggcgatgatcgccgccctgaccgaaccaggggatggtgtgtggtccctgtcgccggcatgcggcggtcactttgccacggcggcgctggtggagcggttgggccggcgcagcggttttatcaccctgaccgacgacggcgagatcgatctggcggcactggcgtcgatgctgcgtcagccgccggcggctgtcgttctcgaccacggtctgacctgccatggctttgcggttgcgccactgcgccaatggctggatcgccacggcctgacagaggtgctgattttgtatgatgcatcgcatccgttggggcttatcgccggtggcgcgctggctaatccgttggatgacggggccgatatcctacagggcaatacgcataaatcattccccggcccgcatcgcgccattattgctacccgcaacgcttccctggcggcgcgtattcagggggggctggatgccggtctggtgtcttcgcccaacttaccttgtttgctacagctattcgttaccctgcgggaaatggcgtgttttggcgccgactatgcgcggcagatgtgtcgcaatgcctggctattgggggagcggctggcggatctgccgggatggaccgtactgccgacgcagacccatatgttactgctacagggggagcagagcgcagcggcggctgccgcccttaatgaactgggcatccgggtcaataataaaatgcgctttgggcaaccctgtttgcggttggggctgcaggaggtgacccggctgggaataagcgatgagcagttgggggcgctatcggacatcttgcgccaggcgttgctgaatccgacgaacgacaggttgcgcccgcgggtacaggcgctgggcatgcagttacggcaggtgcattatagttttgatactgaggggcgatga

SEQ ID NO: 454066 - DNA, 2403 bp, Serratia marcescens
atgaagggcaatgcgtgtttgattatcggcaatgtgcgcgagggtgaatatgaaggcctgttggcggacggcgttgaggtgctactgctggcggataccaagccgacggcgaaaatcgctgacgccagccatctgcagccggttgcccgccatgatttttctaaggggtacggcgaggagctgcgccaactggtggcggcattgcatacggagtatgcctttaccagcgtgttgaattttcgggaaagctatgtggcggtcagcgagcaaatttgccagggacatccggcgctgcggcatttgcagtgtaatgtctcccgcacgctggataagctgcagcagcgcgcctgtttcaacgccagcgccaatcgcgacttacatgtgacatcccgccgcgtaacgatggaagcgctactgcagcaggctgacgcgctgagctggccctgcgtgctgaagccggccagtctgtacagcagcctgttcgtcaaatgtttacacagcgagcaggatctggcgcgctacgcactggaggagtggccggagctgcaggcgtacgtcgcggggaaaagccgggaaaccagtgaattactgttggaagagtacctgagcggttccaatcactcgattgactgcgcgattacgccggacggtgagataacaacttttccgattgtcgatgtgatcgccggcgtagatattcagcggccggatttccaccattttgcccgctattccccctcaacgctgcaaagtaatgaggagatggtggcgcgttgtcatcggctggcgcgggatgccgtcgcggcgctgggactgcgcggcacttttgcacacgtggaatttatcctcaccgccgccggcccgcgcattctggaggtcggggccaggccggggggcagccgtatctatgtgatacgccaggcctggggtatcgcaatggatgcctgttaccaccgcgcgctttctggcctgccgttacgcttaccggagacgccggcgagcgcttttggcatcgccacgccgttcgcacgccacaatattgtttggcaagggctgcggcatgaagcgcagatacgccggatcgccgggtttcagcagtggtatgcctgggtcgagccgggggcgacgatcggcccggtcggcaacggtttccagaattatgtctacatcgagtttcgtggtgcggataccgcggcgctacgagagtcgctgctgcaggtggcgcagatcgatgtctacggtgagagggagcggccggcggtgattgtggtcggtgggcgagactcatcaataaattggcccggcagcgcagagattgacgtgacgctgattcagacgcccgcgcagttgaccccttatcagcgccagcatgcggaagtgttgctgacggagcgattggacgatttggcgtattggctgccgatattgcaggagcggcatcgacagcgcccttttagcgcgattgtttctttcaatgagctggggttgatgcccgccgcgctggccggcgagcagttgggcatctgccataacccccgccgcagcgtagagcagagccgcgacaagctgttgtttcgacagctgctggccgacgggccttgggcgctgcccgccagccgggttgacgaccgcgcgcaggcgctggcctttgtgcagcgtcacggcgcgtcaattatcaaaccgatcgccggctccgggagccaggggatatacgcagtaaataatgagcaggatttgcgcgatattccgtttgatggcaatcagcagattgaggcgtttgcccgcggtgaagagtttagcgtggagacgctgagcctggatggcgagcaccgcttactgggaatcacgcgcaaatacaccaccggcgctcctcactatgtggagaccgggcatgattttccggcgccgttggcgccagaggatgaacggctaatcgctgaggcggtgctgtggctgttgcaggcgctgggacatcgctgggggccggcccataccgaagtgaaattggacgggcagcgtgtgcaatttatcgaaacccagacgcgttttggcggcgatcaaatttgggaaatggtctggggcgtgaccggtgtacatcaggccgccgccaccattgcggcgatggcaaagaccgcgctgccggcgacgcccgccgcctatcaacggatgtcgatccgctttctgaacgcagcggaaggagccacgccgcaggcgccgctcccggccgggtggttgatccgcaccagccttcagccggagaaattcggcaggccggtgcgttgctcttcagagcgccatggctattggctgtttggctgtcaggcatcggacgaaacggcgtttctcgccgccttggccgatatgaatgttaaccctcaattcagcgagtattccgatgagtga

SEQ ID NO: 454067 - DNA, 894 bp, Serratia marcescens
atgagtgatgttctctaccgtattgaaggcgaaatgcatgaggcgtttcctgttatctccttttcgaccaatgtatatgacaatccggcagatattttcgactctatcgaacgtctggcgcagtacttccaggcggtagagtttgaaattggcgaagccgccgaggaggtattctggcaactggacagcgaacagcgtttggcgctggcggcgcagattaaggcatttaccacgcaacgcggcgtgacctttaccgtccatgcgggctggtggggaaggcagtataacctgtgctcgccggacgccgaggagcaggcgcaggcgatcgagtgtctgggggccgcggtgcgtttttctttggctgcgggggcaaccagcgtgaccttccaccccggctacaaggataagtatgacaacaccacgctgttgaactgcctgattacggccatcaatcgactgcaggagcaggttgactgtcgcggtattgccctgtgcctggaaaatatgggcggagagcggcctaaatacccggtgttcagcgttgaggaacatctgcgttttcatcgtgaaaccgggtgttatatcaccattgacgtgacgcacctgtgctcgctgtatccatacggcgatgcgctgttcgacgccatcgcccgcctggcgccggtgacgcgtcatctgcacattgccgatttacaaggcacgcatcaccagcatctgccgctgggggaaggcaatctgccgctgagcgatgtcttgaaccgttttgcggccggcggctatcgcggcgtggcggtggtggaggagtttatccccaagtacagcacggccttttatcttgagaaggcgcgcgagtatcaacgacggctggagtccatgcggcatgtccctgcatga

SEQ ID NO: 454068 - DNA, 702 bp, Serratia marcescens
atgtccctgcatgaacagcaactgacgcgcagcggcggcaagcatgatgttttacgcgggctggccgacgcgtcgccctttgtgttctcgttgctgctatcgtttaccgtcatcggcctgctggcttaccagcaggggttgagcggcgtgcattcggtgatttttagcggtgcgctgatgtcggcgccgctgcaaatgaccctgctggaagcgccgcaacagtcgctttcgctgctcaccgtgctgctgtccgcactgagtatcaacctgcgttttttggtgtttacactcagcctgcgcagcagcatgcgcgacggcccgctgcgcggctatattcccgcgttattggtgatggctaacgccgcctttacgctgatgtcgctacggcgcgagagcgcgccgctgacgcgggcctactgcaacaccgtcagctttacgctctatgccgccgccttgtgcggcaccctgctgggctatctgtttgcttcgctggccgatcgccatctggtggagcatatgtcggtgatcatcgcaattttcattgcttcatcgctgggcaaactggcgcgcgatcgtcatcaactgctggcgcaggcggtggcgctgctggcctgttttgccagcgtgtggctgtttggcgccatcaatttgctggcgatcctgaccattacgctgttgctgagttatctctatgaccgatag

SEQ ID NO: 454069 - DNA, 327 bp, Serratia marcescens
atgaccgatagccgctatttttggacctttatcctatgctgtgcgttgatctctgcgctatgtcggttactaccgttattaatcaacgtcgagacgctgcctgcgtcgctgcagtcgtttatcacccggttggcgaaatatatttccgtggctctgctggtcaatattctcgtggccgcgctgtggcaactggggcagttgcagggggcgcactaccagtggatcattccggtggcgctggcgtggctgctgggtctgaccccgctgaaatcgggctatgctttcctgatcgctctggcctgctggggcggtctgctgtggtggtga

SEQ ID NO: 454070 - DNA, 1197 bp, Serratia marcescens
atgcagacagagagcacattgccgctcaaggaccaacagcgcaatatcctgcgcctggcaacggctcaggcgctggccggcgcgaactcggtggtgttttacgccaccggcgcgattgtcggcaacgcgattgcgccgaacgcttccctagccaccttccccatcaccatgttcgtgctggggatggcggcctgtatcctgccgtttggcgtgctggcgcgcaaatatggccgcaaggcggcctttatggccggtaccggcgccgggatggtcaccggcctggccgccgcgctggcggtcgttatcggctcattcgccctgttctgcctcgccgcctttttagggggcgcctacgccgcggtggcgctgtcattccgcttcgccgcgacggacggcgtggataaagcgcggcgcgcgcgggcgctgtcgctggtgatgggcggcggcgtcgcggccggcgttatcggcccgatgctggtcaccggcaccatggatctctggccgccccacacctttgccatcacctacgttgcacaagcgctggtcgctgcgctctccgcctgggtgctgacgggcgtcaaaaccaccgagccggttgccgctgccaaaagcggcggccgcccgttgcgggaaattgtgcgccagcccggctttctgcgcacggtattcagcggcgccgtcacctatatgatcatgaatttcctgatgacggccgcaccgctctcaatgcatatgcacggcatctctcagcaggcggccaatctgggcattcaatggcacgtcatcgccatgttcggccccggtttttttaccggccggctgattaaccgcttcggggcgatgcccgtggccgccgcggggctgctgatgaccgggctgtccgtggtcgtcgggctgagcggcaccgagattgcccattactggctttccctgatcctgctgggtatcggctggaacttcggctttaccggcgcgtcgacaaagatcattgattttcaccgcccggaagagaaaacccaggtgcagtcgcttaatgatttcgtggtgttcggcgtgatgatcgtcggctccttctcctccggcgcgctgctgaatctgttcggctggaatgcggtattgtggggatcgctgttccccgtcgcgctggcgctgctcacgttgctccccggcagacagaaagccgtagcgcgtgagtaa

SEQ ID NO: 454071 - DNA, 2148 bp, Serratia marcescens
atggtcgggttaaatcctgcgctgcttggcgcggcggtaaaaggcatcagtcaaagtttgcaccaccagcgccatggcttcgccggcctgtcccaaatggcgggacgcgcgcacgaccagctgctaagcgcgcactctcaggcaatgatgcgacaatttactcagccaagcccgctgcgccatgcattctcagccaaactcagcgacgcaacgcataagttccgccccggtgaactgccggacatgtttctctccgccgtcaaacagggcaataacgcgctgcgcgcattgcaccatacggtaacccacggcctgcaggaggcctacgcccacagcgccaccttccgcgcggcgtttaaccacgcctatcgcgacgaggtcagattcggcggccatgcccctcactggcagatcaatccacaggctgccaccaccacgccggcgcatcagccctccgccaagacgctgggactgaagctgctgcttgaggtgctcaacggcaacccgcccggctacgccagcgaacaggggcaacagccgttgagcaagcgacgcgccctgctccacgcgctgctagaagggctgaccggactgccgcagcatgaaagcctgcatggcaaaccccatccgcgcgggccgctgatcgaactgctgaatattgtggtggatgagatagtgcgtcagctcggcacgcaggaccccgcctgcgtcagccaaccggcgcctgctggcgacgctgagccgcaacggccgacggacgccaaaacaacgccgccgtctgccgatacaacgacggccgctgcgcaggaggacgcttccccgacggcgtccccggccaaaacagcgccagcgtctctaagccgcccgacggcagatgcgccgtcagcacagcgtctgcaatccttttccccccaaccagccgctgccgcagcaaacagcgccgtgtcccacgcctcacggccggcaatcaccgaagataacgagccggtagaagaactggcgcggccggaccaggaagctggcgccgcacgggaagcgtttggccgcaaggtgttcgacgggctgatgcgggaaggcggggtcgcctacccgcacgacgccgccagcgctaccagaatgggccagaccttccagcgcaatatggcgccgctgttcaaacacgtaacggggcaggaaaaaagcgccgcggagctgctgcataaactccatgcggaagacaaaaaaaccgcaaccttccgcttcgacccggcatttccgggcggcctgctggccgccatgcaggaaaaacgcggcgatgccaaagcggcctgccgcttctacctggtcatggcgcaggcggcaggctttaaggcgcagacccacgccttccccgtcgccggcaatctcagcgtgccctcggccggccagcctggcgaacatcatcgtctgaccgaacacgcggtgttaaaaatcagcgatgagcacggcaacagcagctatttcgatccgttgctgggccgcgcggttaacccgtttcgcagcgacagcatggaaaactacctgaacaccgccaccctcaccaacgacgaaaccgcccatattcgcgcgcgccatccgcaggaaaccgccgtgtatggccgcggcattatggatgcgctgatgagggcgggcatcagcaccttccctgaaccggggctggaggccaaacagcaggaggcgggccaacacatccagcgggcgttcgccccgttgttcaaacatacccacggcaaagagagcaccctgagcctgctgcaaaaattagcggacgaaaataaacgcagccaggccgtccgcttcaacccggctgaaagccagcgcgatatttatgatattgctctcgaacagcaggccgacgcggcctccatcagcaaactgtttcagacgctggcaaacagcgccggccaccatcaggttgagctgcataccattgatacgccgctgtccatcgccatgggcgacagcccggacattcccggcgtgaagccaaatgccagattcgaactgcaaaaccataccgtgttaaaactcagcgatccgcagggtaatacgctgtttttcgacccggttctggcgcgccgggtcaaccccgacgatacccgcagcctggcggactatctgcgggtataa

SEQ ID NO: 454072 - DNA, 426 bp, Serratia marcescens
atgcaaatacggccataccaacaatccgatcgtccctttctgcgccgcatatatttggccgcacgtaaaaccgcctttcactggcgggatacccgccattaccaaccgaaagattttgatcgcgccacgctgggggaagagatttgggtggccgaagagaacggtataccgctgggctttgtttccattcaccgggcggaggatttcatccacaacctgtttgtggatccgacccagcaaacgcgaggcgtcggcagcgccctgctcaaacaggcggaatccaccttccgcggcatcggcgcgttaaaatgcctgatccgtaacgagcctgccctgctgttttaccggcggcacggctggcatattgtcagccagggaggagaaggcgacgacgcctattatctgctgcacagcgccgccagctag

SEQ ID NO: 454073 - DNA, 225 bp, Serratia marcescens
atgagagaattatctaacgttgaagtcaatgaagtatcaggtggtatcgccggtctcgacggtatcttcggcggtctcctgggtggtgttgttggttctctcacccagggcgccgaatccatcctcggcagcatcaccaatgcggccagaggcgtaggcaagatcttcaccgacggcgtatttaaccttgtccgtggtttctgggaaggtcgttacaccaagtaa

SEQ ID NO: 454074 - DNA, 201 bp, Serratia marcescens
atgcaaaaattagcgcaaggcaaagcaatgagcgttattggcggcgcttggggatgtaaagtcagccataacgtatcgccatcatcctcagggttggtttgctaccggaccgtaggttgcgttgacaaattcggcaacgtcacctcctccagcaagcccgttgagctgaatgaatgtgcgtctgccattaccaagccgtaa

SEQ ID NO: 454075 - DNA, 561 bp, Serratia marcescens
atgcctgtcgtcacgctgaataccgaacgtttacgtctgcgcgcctggcgcgatgaggatctgcccgccttcgccgcgctgaacgccgacccgcaggtgatgcgctacttccccgcgccgctgtcggcagaggccagcagggcgcaggccgccacgttccgccggtttatgcagcagcacggctggggattatgggccgtcgagcggccgggcatcgccccctttatcggctttgtcggtctggcgcaggtcggcgatgacctgccgctggccccgtgcgtggagatcggctggcgtctggccgccgcccactggggacaaggcttcgccagcgaagccgcgcgcgcggcgctgcatcatgcgtttacccagctgcagctgccggaggtggtgtcgtttaccgccaccgtcaatctcccctcgcgccgggtgatggagcgcatcggcatgcattgcgccgacgagtattttgagcatccgcgcctgccgccgggccaccgcctgcgcaaacacattgtgtaccgcctgagccggcagcagtggcaggcgcagacgggctga

SEQ ID NO: 454076 - DNA, 192 bp, Serratia marcescens
atgcgtaaaagaaccaccggacaaatgaccaaaatcgtgctgctggtaagttttatcattttgataggccggttgctgtataccgccatcgccgccattccccaccatcaggaaaaacagctttccgctcaggaacagcacgtcagtcaaccgcttaattcatcccgggacagcgcctctgacgcgccgtaa

SEQ ID NO: 454077 - DNA, 573 bp, Serratia marcescens
atgcagatatttaacaaatccaagaaaaatcccacagagaagcgcagcagaaaaccggaggacgccagctcttcgcactctgaaatgaaagaaccggccaaggccgatcccgttccgccaccattaccggagctgatggaaagcgccaaaccggtcaaagctatcaaggacacctttgtctcacagggcacccagttgaccggcaccatcgaaggccagggcaatattattgtcgaaggggtgatcgaaggcagcctgacctgctcccaccaggtgcgcatcgaaccgaccggccaggtgaaaggcgaaattcacgcccaacatattatgatcaacggctccgtcgaaggcagctgccacgccgacagcctgaccatccagccgaagggccatatgcgcggcgatatttttaccgacgagttttccattgagaaaggcggcgtatttgtcgggcagtctcagctgatgccgcaaacggccgccggcgccggcaaggtgacggcgctgaaaaccgcgcgccacgcccctgccgaggcgaccccgccgctgccggagccgcagcaggccaagtag

SEQ ID NO: 454078 - DNA, 1062 bp, Serratia marcescens
atgtttggcattagaaaaacaatgggaatcaccgcagtattattcaccggactgtcctgtctgatggcaaatgccacggaattaaccgcctggccgcaagagcaggcgcaggaattgaatacgctgattgccgagcgggcgaataaaggcgacttcgccgtatttgatatggacaacaccacctataaaaacgatctggaagagtcgcttattccgtacctggaaaataaaggcatcctgaaacgggaaaatatcccggactccttggtgttaatcccgttcaatgacagtctgggcgaaaaagaaagtttatacagctattatcaccgcctgtgcgatatggatgatttaatctgctacccttgggcggcgcagatattcgccggctttacgctgcaggaactcagccagcaggttgatgaactgatggccttaaaagaaaaaataccggtcaaatatattaaggacaatgctctgcatcaaaccgtggttgaaccgccgcgcgtgatgaaaggcatgcagcaactgtttgccaggctgcaggaaaacggcattgaggtgtatatcatgagcgcggcgcacgaagaactggtgcgcatggtcgccagcaatcccaaatatggctataacgtcaaaccgcaaaacgtcatcggcgtcaatacgctgctgcgcaatacgcaaaccggcgaactcaccaccgcacgcaagcagatcaaagcgggcgactacgtgccggaaaataaccagcagttgaccattaccccgtatatcgtcaacccgatgacctggtttgaaggcaaagccggcagcattctgggctatatcgaccagtggagaaaaccgattctggtcggcggcgatacgctgtattccgatacctatatgctgctgaacagcaccgatccgcagcacggtaaaaagttatggattggccgtaaagctgaaacccagcaaaaactgcagctgttgcagcagcaggcggtcaaacagcagcaggcgctgggccaaccggcgaccgccgataaaaactggattgtcgttacccagcaagagctgcaataa

SEQ ID NO: 454079 - DNA, 495 bp, Serratia marcescens
atggccggactgtcgcggcgcggattgctcagcggacaatggcgtcgtccctccaacgtacagcgtccgccctgggcgcgtgaggaagccccgtttatcgccggctgcagccgctgccacgcctgtatcgacgcctgtgaaaccggcgtgctgatcgccggcagcggcggctatccggaaatcgatttttcccgtgcggagtgcagtttttgccgccgctgcgtcgacgcctgtgaagcgggcgcgtttgacgccgcggcggagaggccgtggcggctgcagccggtagtttcaacgcgctgtctggcgcagcagggcgtggagtgccgcagctgtcaggacagctgcgatagcggggcgatccgttttcggccgcgcctgggcggcattgcgcagcccgtgctgacggcggcggcctgcagcggctgcggcgcctgcgtcgccccttgtccgaccggcgccatggcgctaacccggagtgaacatcatgaataa

SEQ ID NO: 454080 - DNA, 444 bp, Serratia marcescens
gtgctgaaacagtggctgaaggcagaccatattcaagtgtgcgagcgggcggatgactggcagcaggcggtgacgctgagcgcgcagcccctgctgcagagcggggcgatcagcgccgactacctgacggcgattttccggcagtatcaggcgctgggaccctattttgtgctggcgcccggcatcgccatgccgcatgcgcggccggaagagggggccagggcgcttggcctgtcgctgctgaagctgcaccagggcgtgcgttttcattcacaggacaacgacccggtgcgggtggtggtgatgctgtcagcgccggacggcgaaagccatattgagctgattgcccagctggcggagttatttgccgatgagcaggcgatgaatgcgttattcaacgccgacaacgttcaacagattgaggatattatcgaccgctattaa

SEQ ID NO: 454081 - DNA, 393 bp, Serratia marcescens
atgaacgatttaattaaaaacctcgcaatagcaattctcgccattcaggccataactttttccgtttatgttggcgtgtatattatctatagcaaacattataagcgtctaatcgcatcgttcagggagaagtacgaattcccatttccctattcgtttcattgtcagaccggaattttcggttcggtagcaatttgctatttctttatgatgctcagggcaggaaggaaggcgtttttcttaccgaaaacaagtgacttctatgctttctctaaggaaattccaagcgcgaaaataagttggttgtcgactttgttttatttgtcgctgctgtcttttttctgtctgactttgatcgccttgtttgctgcctatatcaaactctttgcataa

SEQ ID NO: 454082 - DNA, 456 bp, Serratia marcescens
atgacgtatcgttcacaggttttagcatttctcccggccgaagcggcagagaacctggcgtatctggcggcaaaactgcgtttttataccgatgcctgggatgtggcggaggatttacgtcacggcgttgacgccatcgtggtcattgatgcgcgttccgagcagcactatctggcggggcacattcccggcgccgtcagcctgccgcaccggcggatggatgaggccggcacggcggcgctggatcgcgataaagtgtatatcacctactgcgacggtattggctgtaacgcgtcgacgaagggggcctatcagttggcccggctagggtttaaggtcaaggagctgattggcgggctggatttctggctgcgcgacggctatccggtggtcagcggcgcatcgcgcggttcgctggcgggacagccgtcagatgtcgactgcggctgcgcctga

SEQ ID NO: 454083 - DNA, 324 bp, Serratia marcescens
atgcgtaatttattgagcgttgccgttttttcactgctgttatctcccgtcgttctggccgccgagccggcggcgtcccactctgccgccgtgcacgatacggcggttacccacagccaaggcgtgctgaaagcctggaatagtcacaaggtgtcgattgcccacccggcgattgaatccctgggctggccgccgatgaccatgaacttcctgcagccgcagccgccgttggcggagctgcccgccgatacgccgattgagttcagcttccgtcaggtagacggcggctatcagctgatcgccctcagcgccagccagcagtaa

SEQ ID NO: 454084 - DNA, 423 bp, Serratia marcescens
atgtccgttcaggccgctctgtcacagtttatgcaccgtctgcgcttcgtcagcaaacgcggcggtgcatggctgttgctgctggtctggctgctgtttaacgggcagttagcgctggccggccacggttgcgacctgcgtccgctaggcagtgcggttgccgcccagcatatggcgcacctgcagccggatgcgtcggcgatggcgcaccctgcgggcgctgatgcgctgtgtgaaaagcactgcgtgccggacaatgcgcagcaggatcacgccagcctgtcgctggcggccctgccggccagttttggcctatcgctcgccgtaccgcgattcgcaccgcagatttcccgttcccactggcaaacgccgccgatagcagggccgccgacagaggttgtgttctgtcggttccgtgaatag

SEQ ID NO: 454085 - DNA, 384 bp, Serratia marcescens
atggcggcctggttgaacaccaagtctgtggatattgaacgcgtgctggtcagtccttatctgcgcgccgagcagacgctggaaacggtgcgcgacgcgctgacgttgccgaaagaggcagaagtgatggcggcgctgaccccgggcggcgacgccgcgctggtggtcagctatctgcaggtattggcgcagcagggcgtggagtcggtgctgatcgtgtcccacctgccgttggtcggctatctggtggcggaactgtgcccgggcgagtgtccgctgatgttcgccacctcggcgattgcctatgtcgaactggcgcaggacggcagcgccggcaagctggagtggcaggtcagcccgtcacagctgatggcgaaagtctga

SEQ ID NO: 454086 - DNA, 441 bp, Serratia marcescens
atgtctagccactacccggcctactaccactttgatgatgaaaacgactgctggcatatcggctttcgtgatttcccggaatttcaggccgccagctataaacgcgaagacatcgaactggaagcacaagacgcactgctgaccgccatagcgatagagtttgatgaaggccgcgtggtgccaccgccctcgtcatgcgacgcagcagagctgcacgtgccgttgccgctgttggcgcagcttaaaattgcgctgcataacgcactattggcacaacagatgccaaaagcattactggcgcgcaaactgggttttaacgccggccagatgaaccgcctgttggatatcgcctatgcttccaaagccgaagcgctagaacaggcactctttttactgggctacgaaatccgagcctcggttcatctctgcgataaacagtaa

SEQ ID NO: 454087 - DNA, 540 bp, Serratia marcescens
atggaactggttacgcaacgtttgactttgcaacccctgactgaagaagactggccgctgtttttacagctgtatcgcgacccccaggtcatgcgttatatgagcgatccgctggatgacgccgaggtgcgcgcccgcttcgccagccgtctgccggcatgggataaacacagtacgcactggctgtgtctggtactgcgtgagaaggccagcgggaacgcgctggggctgaccggttttcgggccgagtggcagccgtttcaacaggccgaggtagggtttgtcagcctgccggccgggcaggggaaaggttacggcaaagagtcattgcgggcgctgctggcgtttgcctttaacgactgtgggtttcataagctcaacgccacggtgaccgaaggcaacatcgcatcgcggcgcctgttggaaagctgtggtttccagcttgaaggcacgctgcgtgataattatcgcctgggtgggcaatggtgtaacgactggcagctgggcctgctggcggcagagtatcacggcatgcactaa

SEQ ID NO: 454088 - DNA, 288 bp, Serratia marcescens
atgaaaaccaaagcacttttattggcggcgctgatggcgctgccgctggcgagccaggccggaatttttattaacgtcgccccggacagcgcatggcgcgtcggcgaccgcgaccaccggggccactactgggacggccaccgctggcgcgaagcgcgctggtggcgtgagcaccaccgcgagcatcggccgccgcgccactaccgcgagcattttcgcccgccgcaccgggcggatcaccggccgccggcgcgacatcaccatcgccacgacgatcgccgcggttaa

SEQ ID NO: 454089 - DNA, 867 bp, Serratia marcescens
atgcgctattctcccgaagccttgctggcgtttgttgaggccgcggcgctcggctcattttccgccgccgcccgtaagctgaataaaagccagtcgaccatcagcaccgccattgccaatctggaggcggatctcgatttaatcctgttcgaccgtcaggcgcgcctgccgacgctgaccgccgccggccacaaggtgctggggcacgtgcaggagatcctcgccgccagcgagcggctggatgctctgagtatccgcctggcggacaaggtggagccgcggctgaccatcgtgttttccgatacctatcagccgggccaccacgaaagcctgatgctggagtttgagcagcgctatcaggatattgagctggagtgcatggttgacgaaggggaagacgtgctggacctgctgcagagcggccgcgctcacctgggcatgctggcggctcagccgcactacccgcccgatatcgccgcggcgcggctgccggagcgcaccgaaatgggcatcttcgtcgcccgtcagcatccgctggccggcatcccacggccaacgccggagcagctcgccagcagccgacagctgtatctcaacagctatatcgacagccgcaataagccgcaggggcgcgtctggtcggcgcccagctatctgatgctgctggagatggcggaacagggattcggctgggcgattctgccgcactggctggtgaaacagtacggccacggccgcctgagcgaactgcgcccgcgcggctggccgatgctgctctccgtggatgcggtctggtcaaagcttaccccgccggggccggcggggttgtggctgctggaacatctgctggcggggacggcagactag

SEQ ID NO: 454090 - DNA, 315 bp, Serratia marcescens
atgaccatagacgagaaaagtgccaaatcaaaagtcctagcatctcgagtctcacgtgaaataattgaggaaatggagaccgtaaagttagaaggggaatcgacaacacacttcatcgtttcggccatgcgtggtgaaattatccgcagaaaaacagaaggtggccgcgaaaaccccctactatcctccttggacgcactaactcgcgttgaatccattggaacaaaagctgcctctgaaatagagcagctcattgatattgctcgtgaggagcttcaacgccggataagcggtaaggttggaagtgagatgtaa

SEQ ID NO: 454091 - DNA, 411 bp, Serratia marcescens
atgagtgatgcaattagaaacattggtacaataatcgccttcctggggatgctactatttatttttagcattatttattttgctgttataaaaaaaaactataaaaatacaatttcaaaatacatgtcacatggtttgtttatgcggcaattcgatattcttgctgtttccgcagggtattttggcagtatgatcgtcaccatatttttctggcagcttctgacccgtaaacgcatccgattgtctaaaactgagtaccttggagatgaatcttacgatttcatcaataccttacctaaaagtgaaacccgttggattaaacgctatttttacctctttctcatctggtcactttcaatactcttgggaggggcgatgatgtatctgcccgactggctacatatgtcataa

SEQ ID NO: 454092 - DNA, 957 bp, Serratia marcescens
atgctgttcagaaacccaaacagcgaagccgcccgctattacctgcagcttaatgccgatacgccatgggtaaagccgggacatattctgatcgttgccgatccgcacaacccccagcaaggcccagccctgcatcatttacgccaggccaaaaaccaggtgaataaagccatggcgcagctggatgccgagcaggcgacattcctgcagcgtaactacgacaccctcgccaccatacttaatggcagcagcaccggattaggcatcgccagtgattcagggaaacgttactttcaacgaattgatgaaatcctgcagagaatagagatcacataccaaaaccagttccgcactcagggtacgctgattggccagcagttttttgtcgaacgtaatcgcctgtttggtgagctcaaagcaatgctggataaacccgtattcagccggctgacgcgtaaaatcttgaacctgcgtccgtatgaaagcatcaaaagcgccttaaatttatcaagccgctctattgtccatgagtggtctacggctggcgtaggtgcgattaggggctattcgacctatctggatagcaccaacagagccattaagtttatgaagaatgctggatgggtgggtctggcaatatcagcgactagcacgactaatgacgtgtatcatgcctgtacaaccggccgtgagagcgaatgcggtcacgttgccttcaaagaatacggagcctttgttgccggagtcggattaggttcagctggaggcacttggggtgccttggctgggggtggaatttgcgttgccttagggattatcagcgccccgatggccggtagtgctggcgtagcatgtgccatcgtaggcagtggcattggggcatatgctggaaccgcagcaggcgaggctattggtggtggcgtaggaagcggcatggccaatatcttgtttaggtga

SEQ ID NO: 454093 - DNA, 243 bp, Serratia marcescens
atgtttgtagagctgatttttgaccaacggaatgttcaggggctgcccggcgcagccgggatgatcaaggacgaactgacaaggcgggtgcacaagatttttcccgacgccgacgtgagggtcaaacccatgcaggcaaacggcctgaatacggatgccagcaagagcgacaaagaaaaactgaaccgcctgctggaagagatgtttgaagaagccgatatgtggctggttgctgacctgtag

SEQ ID NO: 454094 - DNA, 1068 bp, Serratia marcescens
atgtctcaggtaaaaaatgaaataacctggataaatacgctaaaaggtatttgcattattctcgtcgttctaaaccattcgattatcaccacgttgccctccgcacttgagcaccttactgcaggctacctctctgccgacatatggatcaaattcaatttatttatttcaccactgagaatgccggcatttttctttgtctcaggcttgttggccgcaaacgcaataaacaaaaactggccggaagttttcaccaagcgattcaggaaccttacctatttatactttatctgggctatcattcaatggttttttatttcattgattatttccccgcttatcagcatgaaagtttccgccgtagagaacagcgcctatgcggataatattattgatttctttaagtttatcattaccggaaaaacaagcctatggtatctttatgcacttgccggttattttcttctggccaaactcctgcgcaagcaaaaatatccgttaatcgttacttcaataatcgttagctatgccgcatcattaggtgcactccctggctggggattgacaagcatttgccagaatgttgtttattttgttttaggtgccttctttagtgcagaactaataaatttttgcgaaatgaaaaaatcaaacatgctcttatggggagtattgctcattgcaggaatcattaatataaagctgggaattataaaaaacatctttacttgcctactggcaatcattgccttaataataatctgccgtgagctaaacaaaaaaataaacctgtcatgggttaactggctcggaaaaaacacactgcaaatctatgtcatacatagaatttttattgaagccctcagcggattggtgctgacggcgggtgtgagttacgggctatttgagtctagccggttttccttaatgtgcacacttttttacccaataatagccgtagtcctttgcattattggctcactatttatctggcactgtataaacagaggggttggacgagtatttttcatgcacccttcgctattaattcataaaaaaaccttatga

SEQ ID NO: 454095 - DNA, 366 bp, Serratia marcescens
atgtgcatcatggaggatgtcatcatttacctgttaaatgtgatctaccagggataccgacagtcgttcaatatcaaaggccgcgacagccgcgcattctatattacgctggtggtatttcagcacctgtggtttgtgttctatctggcgctaaaggtggtgatgaattacccgcttttatggatcctggtcatgattttcgtgctgccgctgctggccagcaatatccgccgtctgcacgatggcggctacagcggcacctggtgtttcagctggttttgcctgccgcacctggcgttgatcggcgccatgtttctgccgtcgctcaataacaacaatccctatacccgctacccgcagaactaa

SEQ ID NO: 454096 - DNA, 594 bp, Serratia marcescens
atgatgacgttatcccaacagccggccgccggcgcagttgcgtcgccgggcgcggtgctccgggtgattgtgttcagcgtactgccgtctgcggcgctgctgttattcagccagtacggcggggcgcaaccgctgcccgctttgctgctgccgctcagcctggcgctggcgtttttctgcggcgcggcgctgggccgctggcgtccgctggcgcagcggccgtcgctggtggtagcgcgctatggcctgctgctcggcgctgtcggtctgctgtggatcctgctggcgctgcacggcggtctggtgtggaccatgctgctgccgggggccgggttgaccggcctcgggctgggcgcggcttaccagagccagcgcaccgtcgcaccgccgggacagcacgcggtgagcgcccgtatcgccatggcgctgacctgcggcgcggcgctggcggcgacgcagtggctgcagtggcaggcggcgccggccgggtttaactttgccctggcgctgctggtggatatgacgttgttcggcgcgctgctggcgcgcattgtcgaacgcgaccgggaaaacgacgcctgccgctgcggttaa

SEQ ID NO: 454097 - DNA, 168 bp, Serratia marcescens
atgaagcgtttactggctttttggcggttcggccgcggaacacaggccgaaccgcagcagagggggcaggacggcgacagcgccgctctgctggataccatgctggccaccagccagctgtatggttttgagttccatccttcgctgctgcgccattatggaaaataa

SEQ ID NO: 454098 - DNA, 1218 bp, Serratia marcescens
atgacgaccatcagtcacgcaacgcataaagcggcgccgatgcgcgccggcgccggtaatctgctgcgcgaggaggtctgcctgccggccgccgttatcctggccggcgcgctggacaacaatatccgctggatgcagcgctacgccgacaggcgaggggtttccctcgcgccgcacggcaaaaccaccatgacgccgtggattttccgtcagcagcaggcggccggcgcctgggccatcggcgtcggcagcgcctggcaggcgcaggccgccatggccgcgggcatcgaacgggtgctgatggccaaccagctggtggggaaagccaatatgcaactggtcgcgcaattgaagcggcagtatccgcagtgcgactttctgtgctgcgtcgacagcgtgagcaacgccgccgcgcttgccgccttctttgatgcacaggggcaaacgctggacgtactggtggagctgggcgtgccgggcggccgctgcggatgccgcagcacggcggaggcgctggcgctggcggccgaggtcgccggcctgccggggctgcggctgcgcgggctggagctgtatgaaggcgtgctgcacggcgacgatccgcagccgcagatagaagccctgctccgcgcggcggcggcgctggcctgcgatatggcggcccatgtcgacggggagtttattctgaccggtgcgggcaccgtctggtatgacgtggtatgcaacgtctggctgacggcgcagaagccgccgcgctgccggattgtgattcgtcccggctgctatatcacccatgacaacggcatctatcaacaggcgcaggatgcgctgcgggcgcgcgaccgtatcgcctgcgatctcggcggcgatctcagcgccgcactgcagctggtggcgatggtgcaatcggtgccggaagccgagctggcgattgtgaacttcggcaagcgtgactgcgcctttgacgccgggctgccgcagccggtcgcccattaccgggcgggcaaggcgctgccgttccggcccggcgcctataccagcagcgaggtcatggatcagcactgtatgctgaagctggcgcctgacagcgatgtgcaggtcggtgatatcctgatcttcggcacctcgcacccctgcctgacattcgataaatggaaaacgctgttactggtggatgatgactacaacctgcaggcagagctcgacaccgccttttag

SEQ ID NO: 454099 - DNA, 447 bp, Serratia marcescens
atgcgttggcctcagcacgctttggtaatctgcaccgccgcgatgttatcccttctcacattttccgctcatgcacacggcgataagcgcagcggcgtcgaaactgaaacgctgctggaatcggaacacgcctgggacggtacgcagtattccgcctatccacagggcaccccgcagctgtcggtgctgaagatcaccatcccccccaacagcagtctggcctggcaccagcacccgatcccgaatgccgtctatgtgcagagcggcgtggtgacggtggagaagaaatccaacggagaaacacgacaggtcacagccggtcaggtgctgcccgaaatggtggataccgcccatcgcggctataccggcaacgagggcgcggtgctgattgcgttttacgccggcaagaagggcgtgctgctgtcggagccggcgagggagaggtga

SEQ ID NO: 454100 - DNA, 1983 bp, Serratia marcescens
atgagcaaaaattgttccaaggaagaaagcagagatgatttctttaaagttgcagtaataggttgtggtccccgtggcatatcagtccttgaacgtattggggcaaggttagcatctatatttgactcgccgccggtaaataaaaatatttgcgtatatattattgacgcagatagcgtgggaggcggacgtatatggcgtccggaccagcctaaatggttgctgatgaacactccggcgaaagaaacaaccatattttctggtccagcggacggcggcgaagtacgtccaatggccgggccgtcgttagccgaatggtggcgagaagttgacccggataatgcagaacctgacgggcttgctccgcgctatatatatggtgaatatcttaatttctcatttgagaaaataataaaacatctatctttgtactctgatgttcatgttatgcaagacagcgtaatagacgtcagaaaaacagggggaaagcgaacgattgaacttgcaggccatgcatcgattaaggtcgataaagttgtggttgcaactggacatccggtgccagaacttaattcctcgcaattagagttctttcaatttgcgcagcaacatcctggcttgaggtatgttgaagggaattcagctgccgagatgccgttgtcaaccatcgcaccgggtgaaaatgtgggcgtaattggttgtgggcttgcattttatgacgtcatggcgagccttacggaagggcgtggtggtcgatatgaaatcgggcgtgatggcgactttatttacgttccgagtggtgatgaacccataattcatgctggttcgcgtagcggagttccattccctgctcgagccttaaacgaaaaatcggcggaatatcaatataagccacggttgctcactgagcctagaatgcgtcagcttcgtggcggtcgcttggaaagaaaattagattttcgccaagacgtattcccgtggcttgaaggtgagatgcagttggtctacttcgaatgtatcctcagagaggaacgaggggcgctatttgctgagcagtttgccgataaggcaatgaaaaatatcttggcagcaacggacactttcttacccaaggatattattcggaaggcagcagaatcatttggtatttgtggagatatgggagttgatatagataaatggtcaaaacccttcgaaggaaaatcattctgtaatgccggggaatatttatctgaattggaaaaatggattcgtaacgatattaaaaatgcaagcctgggaaatgtgagggggcctgttaaggctgctacggacgtgttgcgtgatattcgtcccgtattgaagtatgtggtggactatgcgggattaaccccaaattcccatcggcgtgatttcttgggttcttttgtttcggtctattcaatgctttcggctgggccaccaattgttcgtttgaaacaagtattagcgctcatgcgagcgaatattctgacgtttgctggcccgcaggcggaattctcgaccgcagttaaagagaaaacgttctgtgtgtcatcgccatctgtttcagattctgtatttagagtcagtacattaattgatgcgcggattccacctcaaaacgtccgctcagacagttcaccattattccggaatttgctggcagctggcgcagtgaccagtttcagaaattcgttaggtgacgatgtatttgataccggcggtgtagccgtaacgcgcgcaccgttcaacgcgataacccaagaaggacctgacagcgctgtccatgttatcggcatccctgttgagcatactcgatggttgatgcaattcggttcagggagaccgggtgcgtgggggcagtttacgaaagatgctgacgcaatagctgaaagtgttgttaccgctttcttaagcacgtcagttgctgcaaatgaaccagaagtcgctacccatattgaaaggagaaatgcagatgtctga

SEQ ID NO: 454101 - DNA, 723 bp, Serratia marcescens
atgtctgagatagccaagaaaaacaaacagcagagggttcttattgtcggtggtacttcgggaattggcttggcttgcgcacaagcattcgccaaagccggttcgcatgttactgtcatggcgcgaacctccgccagcattgataatgcgctttctatcgtcggtgaaaatgcatccggtgtagaactcgatgtctgtgacgatcagcaggtagcttctacgtttgcatcactggacgctttcgatcatgtggttatcaccactgcggcgactccgttaccgacggggagttccgattcgattcctctggatcaggcgtatggcgccatgaattcaaaattttggggggcttatcgagtcgcgcgcgccgtcaggatcaatagcgaaggatcgctgacctttatatcgggaattcttgctgccagacctaccaagacaaccgcgcttattggcgcgatcaatgcagcactggaaagcctgacgaaagggctggcgctggaaaaagcacctatccgcgtaaacgcggtatccccggggatactgggtaatgcgtcggttcttgcacatttgagtgacgaggaacggtcagctatcggagcccgcctgccgctcaaaaaaattggtcatcctgaccttgtcgctgatgctgtcatcttcttggcgaataacaaccatatcaccggcacaacgttggtcgtcgatggaggtggctcccttgtctga

SEQ ID NO: 454102 - DNA, 1392 bp, Serratia marcescens
ttgtctgacaacaatatcgtcacctccaggatcaagaaggttgcaaccccggaacaagagagcgtcaaatcacgcgcactgctcacggtttgtatcggtttctttatggtcagcttggacgcaaccgtagttaatgttgctctgaacagcctgggctccagcttacatattggtctaagcggattacagtggacggtcgatgcgtacacgcttgcgtttgcggctctgctgctgagtgccggcgcgttgggggatatttttggccccaaacgcgtctttaacctcgggctgatcgttttctcgttggcatctgctttgtgcggcatagcgacgaatctggatgcgctgcttgtatcccgtgttcttcagggagtgggggcggcgcttcttgtcgcaacgtcactatcacttttacagaaaatatttactgagccagcagacagggcacgtgcgttcggcgtctggggcggcgttggcggcgttgctgtggcgacaggtcccgtgctgggcgggtttcttatttcgacgttcggttggccctctatatttctggtcaatgtgccatttggcattttgggcgtgattctttccgcgcgttatttgccgaatgtgtccggggaagcgaggaaaattaactttgctgcgcaactgctttcggctttggcgctggggtcattggcgtttttgttcatcgctgccggtgagaatgggtggtcgagctatgacgtcaaaattgcaataagcgcattcgccattacgacctgtctgttcctgttaatagagcggtcttccgctaatcctatgttgccacgaggtattttcagatcgcggattttctcggctgccacgaccgtcgggatgattattaactttggattctacggacagctctttttgctgagcctctattttcagcaggtctgtaaatattcgacgatggagacgggattggccttactcccgcaggcgatagtctgttcacttaccgctttttattgcgggagagtgaccgcccggactggcccaagtttcccaatgaaggtcggtttattggctggggcggtgggtttcctggggcttatgtttgtcaacggacatagcccctacgtagccgttctgataccgatgctggcagtggggttcggtatgtcattcactgcgccagcgaccgttgctgccggtatgtcaacggcccctgctggcaaaggtggaattatctccggagtgattaacgcagcacgtcaaagtggcagcgtaatgggaattgccgttcttggcggccttataggactgagttccaattttgaatacggtatgcatttagcgtttggcgttgcatttgtcctttttgccgtagcgttggttataacggttttgcttgttcgtaaataa

SEQ ID NO: 454103 - DNA, 1668 bp, Serratia marcescens
atgaatagtttcaaaaatgattggatgaattactgggaagagcggcaggaagattttaatactgaatgcctcgctgaattagaacgattcacacaggcaacgaaatgcccaatcgaaacgcaacagaacgtgctgcgagatgttatttctgttagcaaagagtcgttacattggcaggagcgcggatattctcatgtatccgacgttgatgattatcgcaagacgctgcctattatgcgttatgatgatttcatccctttaatcgagcgtgaaatccgcactaagggaggcgtgctgacctgcagtcccgttcttcgttggttgaaaaccagcgggacgacaggaataccgaagcgtgtgccctatacgcttcattggatgttgaactatcgcatcccggcgatgaaagccatgtggggaacctatattcggctccacccaaatatattatctaatccctatgcaacacttgatacacaaactgtacgcgagaatgcccaggatcacatactcggggttccattccagtcaattagcaatcgccatccgcggatgaataatttggactggaatcccccttggtatgaggctccctggttccgtgaggatgctccgacttcctttgaagacaagatgtactgtcgtattcggcatcttgtcggaaaggatttgtattttatcaacgcgataaacccaagtacgttaatttctctacgagatcatattagcgctaacaaagagaaacttattgccgacgttctgcaaggaactatcgatggccgcccaatatgcgctccagatccccatgaggcagaacggcttgagaagaccctggcgaatccgggtttcaccttgaaggatgtttggccaacgctgggcttatatgcctgctggctctctgcatcggcaggattataccaacaagcgttggaggagctattccctggtgttgcaagactgccgttcatgagttgtggaacggagggggtggtgacaattccggttagtgaagatgtaggcagccagccgctcgcgatcaatcaggcgttttatgaatttgtagaagacgatgtgcctttgggggaattggtcgaacgcggcgagaagccagacacgctattggcgcatcagcttacggcaggtaaaagctatcacgtcatcatgtcacaggccaacgggctgttccgcctgtggacgggtgatatctatcatgttgatcgcgttgtcgatggtacgccgtggattcatttccttcaccgtgatggggtattccattcgtttaccggggagaaactgacggagcatcaagtcacgaccgcattgacacaaggttttgccgcggcagatagaaaaatagggctttatctctgtggcccgcgatgggggcagctaccgagctatgtcgttgtcgcggaagctcgtgaggcgaatgccggtctggctgaaatcttatcgaagaatgttgaaagcgcattgcagcaaatcagcatcgaatacgagtctaaacgggtgtcaaaccgcctgggaccggttgaggtgcatgtagtacctgaaaacagcattcaggctcttgtggagagaaaacgacagaaaggcaacgccaaccagtacaaatataaaccgtttcagaaagatacagatttccttagtgagttagctgaacagtaa

SEQ ID NO: 454104 - DNA, 879 bp, Serratia marcescens
atgcttgaattgaaggcaagcccttccaatgtgcgcagagaaatcaggaaaattcgtcaaggtacggttgagttagctattcatacctggctgcctgagaaccccaaagctgcagttttctattttcatggcttacaaagccatgccggttggatatgggaagccgggcggcagtttgcgaacaacgatgtggctgtatttgtcttggatcgccgagggtgcggcattagtgatggagaaagaggcgatattccgtcagtggaagttatcgtcgaggactatattgttgcgctgaagtgggttcgtaactttattaataaaaaaacgcctttatgtttattcggacattgtctgggtggatcatttatggccgccgtaatgcaccatcctgaatttaatgtccgttatgattcagccatattttgttcaacctggcttgggaaattgcattccagtttgtcggaaaaggaattggcgcagctatacgctgaagatagtatggaactctgggatgcggggttgcattctgcagatttcactgattatccacaatatcgcgattttattgataccgatgatctggctatcaggaaaattacgaaaaggtcacgccgttccttagccgaagttgagcggatgtatgttaatgctcaaggggagttaccgcctgtccctatggcttatgtctccggaaccacggacccgattatcgatctgaagagtgcgcaggctgcttttcttaagatgacagattctcgtggaacgattttaacgctaccgacaaacaagcattacctgttctatacgccagtcaggcgagaactggttgattgggcgtcgtcgtttgttctccttcaggcgcgagaagtctatgcgtga

SEQ ID NO: 454105 - DNA, 1179 bp, Serratia marcescens
atgcgtgaagttcgtatttatcacgtacagctgcccatgcgcgttgaatttgggcatcctgccgcaacacgaagggtttctgacagcgtcgttctggaactggatattgagggagaggttggccttggcgaatgcgcaccgcgcagctatgtcacgggtgagacatgtggcagcgtttgtgaagcgcttaggcagcttccgtttgggcggattattgataggttgttgagcgaatcccctcaggagctctttaactgcatccgtcggcaaggtattgaggcggttttcgattttactgcggcaaataacgtggtgtgtattatcgaactggcggttcttgactggattggaaaaagaactaaatcctcgctgggggaaatgctgggtgaacgactatgtcccgctgataaaggggagccgataaaggtatcgcaggttcttgaccagagtttgacggttgaggatttcttgcgggaccgtgggccgtttcactttgttaaagttaaagcgaatagggatcgtaaaaaagatatagagaccgtgttagcgctcagaaggaatattggtatggatatacctattgtcatggacgctaatatggcctgggggatgactgaagctatcgctcatatgcgagacctccgtaaagccggagtgactatggttgaagaaccgttggccaggcactcctgggatgcattgagagaacttcgcgctcaaacggggatgccggtcatgctcgatgagacgatctcgacattggatgagctgcactatgcggtggccaaggatagctgtgacgcagtgaatgtcagggtgtcgaagtgcggcgggatactaaggtccatgcagatcattgaacataccaggaaagcgggtttacagttccaaattggtgtgcaagttgccgaatgtggctctttgattcaagccggtagagtgcttgccgatctgcaccgggatgccatttcggttgagggggggcaatcggaccgattttttgacgatatggttgtgtcgcctgcaccgcggtttgatagggagaaaaatacggtgcaaccacccttgggattgggttttggcctggcgagcacgacgaatatcgctaaatacttggcattccgttatagccgaacaacaaataaatgggactcaatgcctaacgacagcgaggcttga

SEQ ID NO: 454106 - DNA, 1599 bp, Serratia marcescens
atggcttgtcatgaggaaattgccgtggcaattgcacatggttattacaaagcaagtaacaaccatatggccgtgttcctgcatgcgaatgtcggattgctgcatggctcaatggccatcttcaatgcgtggtgtgacagggtacctctgctgctgattggtggtaatgggccgatcgatgcagccaagcgacggccttggattgactggatacacacgtcacagaatatcgagtctgtggtaaaggatttcgtcaaatggtgtgatcaaccgaccagtcagaaggcgacgatagaatcgctttatcgagcggttaagttgatgaatactgagatgcaggcgccgtgctacattgccgttgattttgatgttcaggaacaggagcttgagagtacagcgaagctgttaccgatgacggcagcggcaccaagccggcttccggcagcagatagccgatttatcgccgatctgacggagaagctgttatcagcgcgcatgcccgttttgatccttgatttcagcggacgagagccggcgacggtagccccgcttatctcactggcggaacgcgtggggatggcggttattgaccgtgggaaccgatttaattttcccaatacccatccattgaatgtctctcatgctccgccagaggctcttaaagaggcggatctgatattagccattgaagtccaggatctggccggggctctgggggcatttctgccggttattgacggaatgcccgccaccgagggcgttacgttgattacgctggggacgaatgacacattgccaagtaaatgggcggctgactaccagcagtttgtaccggtaacccaaagtgttatagccgataccctaacgagcatagaagcattggatgcctctgttgcggaggcgatggaaagctgcccaagtaccgagcgtctggcgcgtattcaccgtctgggagagcatcatcatcgtgcccggacggcgtggagcacggaggcgcagcaattgggaatggaaggcggtgaaatccatgtcgcagcggcggtgtcggaaatcttccaggcagtgaaaaacagggaatgggtgcttacgaatacgggaagcctcaccattgatggttgggtaaagaaaatatgggatatggagcgacctggctcttatcttgggttaaatggcggtggcggattgggctatgggcttggcgcttccattggggccgcgattgcacatcgccacgatgagcggctctgcatagacttacaggcagacggtgattttctttatacgcccagtgccctttggacattaagttcgtacgatgcgccattgctcatcgtaatgatgaacaacaggttatatctcaattcaacacagcacgctgaacgtattgcaaaggcacgggagcgtaccgaggacctttcacatgttgccaccagcttctatgaggcacctgtcgatttcgtaacaatcgcagaggggtttggcatcaaatcataccctcgtattgagaatcttgacgaaattgggaccgttattggcgaggcggtgaattatatcacctctcagcgaaagccagcccttgtcgaaataagaatgaaataa

SEQ ID NO: 454107 - DNA, 882 bp, Serratia marcescens
atgactataaaatttatggaagggcgctttctaggcgagcgttatgtgacatttaaagagtcaggcgcaggggtagcgaccaatctctataaaatatcattggagaaactttgcgaggcgataggtaatacaccggatggcgctatagcaaaagattatctattgcagaatgttccctcagtaaaaatatctgagcaggagatgcaggattttcagccgctaccgccgctcttgcctgaagccgccgataacatcgttgtcagcggatttatgcagactcataacattaagatcgaatctacgcgtgatgcttacggcgagatggccctgccaaactggtttatcaaaggattggggtcgtccgttaagttatccggtcagccgctttttgcatccgaacgggctgtggcgctgtgtgaggaggctgaggttgtcctcgtttatcgcagtgatactgatggccggccccagtactgcggttacacgttcggcaatgacctgacggatattggtcggtttaagcgtaatcaaggacatctctcttacgcaaaactatgcgatgcggcgatttccggctggtttcatatcgcggagccgccggagagtgtttctggcgaagtttcgatcgaacgtgatggcacactggcctggagcgggagctttaagacgggattgaatgctctcggttatcgcttgtccgatatggttgagcatctgttttcctatccgacgctaaattgccccggacggattcactatgtctttatcggtgcagaccgcagcagtttccatgcaggattcagcatggaagatggcgatcagattactttaaactttgttagccatgatgttgttgtttcaaataaagtacaacttgtatag

SEQ ID NO: 454108 - DNA, 549 bp, Serratia marcescens
atgacgactctgcatcccgaacgggccgccaaccgcgccgtcggcctgacggaactgctcgccgcccgcgagcagcggcgcgaccgccagcaggcatggctggcgcgccatccggcgacgctggtggtgctgacgccgctggcacccggcgcgctgaaggacagcccgctgacgcggcgcatctttaacctcggctggcaggcgctgcgcaacgagcaacggcgacagggctggcattgcctgcgcgccgaggcgctgggactgcccgccggcggcgaaggttttatctcgctgcaggccgccgcgccgcaggtgaagcagtgctgcatccggctggaggagacgcatcccgccgggcggctgtgggatatcgacgtgctggacgcgcaggggcgtattttgtcgcgtgatgactgcgggctgcccgcccggcgctgcctgctgtgcgaccagccggcgcgcctctgcgcacggcagcggcgtcacgacgtcgggcagttgctggccgccatggaggagacgctcaatgccgcgatcgctgcccgctag

SEQ ID NO: 454109 - DNA, 897 bp, Serratia marcescens
atgccgcgatcgctgcccgctagctgcgcctgtttgccgccgccatcggcggacgagcggcgttttgccctgcatgcctaccgcgccttgttgagtgaggtcaacctgacgccgaagcccggcctggtggatcgtgacaacaacggcgcgcaccgggatatgcatattggccacttctaccgcagcgcgcgcgccatcggcgtctggctgccgcgctttatccgtcaggggcggcaggacgcggcgctgccggccgatcgcgtgctggcgcggctgcggccgctcggtctggcctgcgaaaaccagatgttccgcgccaccggcggcgtcaacacccacaagggcagcgtatttgcgctggggctgctgtgctgcgcgttcggccgtttgccgccgtcggggcgtacgcccgccgcgctgtgtgcggaagtggcggccatctgccgggggctgacggcgcgtgagctgcggcgcaacaacgccgggcagaccgccggccagcggctgtaccgccggtatggtcttggcggcgcgcgcggcgaggccgaagcgggcttcccgctggtgctgcacggtgcattgccgcgctatctgcggcggctgcggcagggcgatgacgcgcagagcgcgctgcaggactgcctgctgtggctgatggcgcacaacgacgataccaatgtcgccgcgcgcggcggcatggaagggctgcgctggctgcagcagcgggcgtcgcagctgctggcgcagggcggcgccggcggcagcgagggcaacgcgcggctgcgccggtttgacgccgagtgcatcgcccgccatctcagccccggcggcagcgccgatttactgatggtcacctggctgttggcgcagatgccgctggcggcctcacaggaataa

SEQ ID NO: 454110 - DNA, 1464 bp, Serratia marcescens
atgagtccgttgaaacaaaaattcgccaaggcgctggcgccgctggtggtattggcggtgctgctgctgatcccggcgccggacggcatgccgccgcaggcgtggcgctacttcgccatttttgtcgccatgattgtcggcatgatcctggagccgatcccggcgaccgccatcagctttatcgcggtgacggtgggggtgctgggcgcgccctgggtgctgttcagcccgcaggagctggccgagccgggctttaaggccggtaaagaggcgctgaagtgggggctggccggtttttccagcactacggtgtggctggtgttcggcgcgtttatctttgccctcggttacgaggtcacggggctggggcggcgcatcgcgctgtttctggtgaagtttatgggcaagcggacgctgacgctcggctacgcggtggtgattatcgatatcctgctggcaccgttcaccccgtccaacaccgcgcgcaccggcggcaccgtgttcccggtggtgaaaaacctgccgccgctgtttgactcgttccccaacgacccgtcgtcgcggcgcatcggcggctacctgatgtggatgatggtggtcggcaccagcatcagctcgtcgatgtttgtcaccggcgcggcgccgaacgtgctggggattgagtttgtcagcaagatcgccggcgtgcatatcagctggatgcagtggtttatggcgttcctgccggtagggctggtgctgctgattatcgcgccgctgctctcctattacctgtacaagccgggcgtcacccacagcagcgaggtggccggctgggccgacggcgcgctggcggagatgggtaagctgagtcgtcaggagtacaccctgatcggcctggtgctgctcagcctgtgcctgtgggtgttcggcggtaaagtggtgaacgccaccgcggtgtgcctgctggcggtgtcgctgatgctggcgctgcacgtggtgtcatggaaggcgatcacccaatactccagcgcctggaacacgctggtgaatctggcgacgctggtggtgatggccaacggcctgacgcgctccggctttatcgactggttcgccaccaccatgagtacccacctgagcgacttctcgccgacgatgaccgtggtggcgctggtgctggtgttctacttcgcccactacctgttcgccagcctgtcggcccacaccgccaccatgctgccggtgatcctggcggtgggcaaggggctgccgggcgtgccgatggagcagctgtcgattctgctggtgctgtcgatcggcctgatgggcgtgctgacgccgtacgccaccggcccgggggtgattatctacggctgcggctacgtgaagtcgaaggactactggcggctgggggcgatcctcggcgtgctgtatatcgccgccttgctgctgatcggctggccgatcctcagcctgtggtattaa

SEQ ID NO: 454111 - DNA, 627 bp, Serratia marcescens
atgaccgaacgacgttattactacagcgatgaactgcagggacaggcgcagctgttggattgccggccgctggaggacggtaaccatgcgcttgttctggacggcacgctgtttcatccgcagggcggcggccagccggccgacggcggcagcctgaacggcgagccgctgctgcggctggcgccgcacggcgacgatatcctgcacgtggtggcgcggccgcagccgccggggccggttacgctggcggttgacggccggctgcgcgcgctgcatgcgcgctggcactccgccggccatctaattggctatctgggggagacgcagggctggcggccggtgaaggcgcaccactggccgggtgagggacgcattaccctggcgcccggcgacggcgttagggcgctggagcaggcgtggctgcagcaggcgatgaatacgctgatcgccgccgacctgccgcgccgtcagcagcaggaaaacggcgtgcgtcaggtcggcttcggcgatctgccggcctacggctgcggcggcacccacgtgcgctcgctggccgagctgggcgaggtgaccatcagcgcgctgaaaatgaaaaagggtcagctggtggtgtactacacgttgtag

SEQ ID NO: 454112 - DNA, 1626 bp, Serratia marcescens
atggtgaacttttcgggcaagattttagcgcggggaatcgcgctgacgctgggcgccgcggcgctgaatgcgccggcaggggcgacggtgcagggcggcacgctggtgtatctggagcagcaggcgcataccaatctttatccgccgtcgggcggcttttaccccaacggcggcattctcaaccaaatcaccgacaagctgacctaccagaatccggacacgctggcgatcgaaccgtggatcgccgagtcgtggagcagcaacgcggataaaaccgaatataccttcaagctgcggccgggcgtgaccttctccgacggtacgccgctggacgccaacgcggtggcgaaaaacttcgacacctacggcctgggcaatgcggcgctgaagctgccggtttccgaagtgatcaacaactatgcccgcagcgaggtgatcgatccgttgacggtgaagttctatttcaagcggccgtcgccgggctttctgcagggcacggccaccatcggctccgggctggtgtcgctcggcacgctgcagcgcagctatgagcaactgggcgatgcgcgccatatcatcggctccgggccgtttgtggtcagcgatgaaaaactggggcgcgaggtgacgctcagcgcgcgtaaggattaccgctgggggccgccggcgctgaagcagcaggggcgggccaaccttgatcgggtcaaggtgatcgtcgccggtgaagacagcgtgcgcatcggcgcgctgctggccggccaggccgactttatccgtcagatccaggcgtatgacgaacggccgacccgggagcaggggtttacgatttatgccgcgccgacccgcggcgtcaacgacagtctggccttccgcccggataacccgctggtcagcgatctgcgggtgcgccgcgcgctgctgcatgccaccgacagccaacagatcgtcgcgacgctgttctccgccaactatccgccggcaaaatcggtggtggcgtccggcgcgcccggctttgtcgatctctcctcctcgctgacctttgacccggcgctggcgaaccggctgctggacgaggcgggctggcggcgcggcgccgacggcctgcgggagaaggacggcaaagcattacgcctgacggtgtatgagtcgctgccgcagccgcagaacaaggcggtgctgcagctggtttcccagcagtggggcaaggtgggcgcgcggctgacgatcctgccgggcgatgccggcagcaaggtggcggataacctcgacccgcagaaaacgccgctggcggtgatcgaggtgggacgcgccgacccggacgtgattaagagccagttttatccagagaaccgcgacggtctgctgcagcagggcggcgccggtaaaaacagccgcttcagcgatgcgcggctgaatgcgctgctgctggggatcgccagcgaagtcgacgcgccgcagcggctgaagattgccgccgacgcccaacgctacctgctggagcaggcctatgtcatcccgttctttgaagagccgcaggtgtttgccggcgcgccgtatctgcacggcgtcagctttgaggcggtgggacggccgagcttttacggcgcgtggctggataaacgctga

SEQ ID NO: 454113 - DNA, 945 bp, Serratia marcescens
atgagccgatatctgagcggccgcatcggccaggcgctgctggtgctgtgggcggcgtttaccctgtcattcctgctgctgcaggtgctgccgggggatgcggtgctgatccagttccagaatccggagatgggcctcagccctgaacaggtggcgcagctgcgcgccgcttacggcgccgacttgccgctgtggcggcagtatctgcatacgctgggcaattttttacgcggcgatatggggtattccctgcaggccggcgttgcggtcagcgatctgctggcggccaacctgccggcgacgctgcagctggcggcgctggggttgatgctggcgctgctgctggcgctggctatcgcgctgctggccaacctgaccggtttcggctggctgcgcgcggcgctgcaggcgttgccggcgctgtttgtctcggtgccgaccttctggctgggcattgcgctgatccaactgttctccttccgcctgcggctggtgccgattatcaaccccggcgaatggcaggggctgatactgccgctggtcacgctggcgctgccgatttccgcgccgctggcgcagatcctgctgcgcagcatcgaccgggtgcgcacccagccgtttgtcgccgtcgcccgcgccaagggagccggcgcggggcgggtgttgctgcgccatattgcgcgcaacgccatgctgccgacgctgaccatcgcgggcatgctgtttggcgagctgatcgccggcgcgctggtgaccgaaacggtgttcggccgcagcgggctggggcagctgacccgacaggcggtggagaatcaggacgtggcggtgctgcaggcgatcgtagtgatctcggcggcggcgttcgtcgcgatcaacttactggtggatctgctgtatccgctgctggatccgcgtctgaatcactatgcaggagccggagtatga

SEQ ID NO: 454114 - DNA, 855 bp, Serratia marcescens
atgagcacgcttttctttgataaaccggcggacggcgccgggggaccacgccgccgctacctgcggctgccgccgtcgctgctgctggcctgggcggtggtgatcgtggcggcgctgtgggcgctggcgccggggctgtttaccggctatagcgcggtggagggcattgccggcgcgcaccgtctggcgccgggcggcgaacactggctcggcaccgatcagctggggcgcgatctgtatgcgcgcatggtctacggcgccgcccagacgctgagcggcgcgctggtggcggtgacggtggggctgctggcgggcagcgcgctggggatgaccgccggcgcgctgggcggcgcggcggacgcgcttatgatgcgtatcgtcgacgtgctgctggcgatccccgggctgctgctggcgctcagcgtgattatcctgctgggcttcggcacggtgaacgccgccatcgccgtcggcatcacttcggtggctaacttcgcccgtctggcgcgcgtcgaagtggtgcgggtgcgccgcagcgactatgtcgaagcggcctacggcagcggcggcaccttccgcgcggtgctgtggcggcatattctgccgaactcgctgacctcggtgctggcgttttcggcgctgcagttcggcaatgcgatcctggcgatcgccacgctgagcttcctcggctacggcgcgccgccgcccacgccggagtgggggctgctgatcgccgaagggcgcaactatctggcgaccgcctggtggctgaccacctttcccggcctggcggtgatcgccgtggtgctggcggccaaccgcatcggccggacaaacggaggacgcacgctatga

SEQ ID NO: 454115 - DNA, 1668 bp, Serratia marcescens
atgacactgcacagcgcattattacagactgcttccgcgccgctgctggcgctgtcccgggtcgccatcggctatcaggggcgcgacgggcaccgccgggtggttgacgacgtctccttcagcattcagccgggcgaagtagtggcgttggtgggggaatccggctccggcaagaccaccaccgctcaggcgatcatgggactgctggcggaaaacggccggctggagcagggggagatccgttttaacggcgtcgatatcgcgcactggtcgtcgcgacggatggaggcgctgcgcggcgcgcagatcagtctgattccgcaggacccggccagttcgcttaacccggtcaaaaccatcggcgagcaggtggcggaaattattcagatccaccgccggctgccggcgaagcaggtgcgccagcaggtggaggcgctgctcggccgcgtcgggctgtctcatccggcgcagcgcgtgcatcaatacccgcatcagctgtccggcggcatgaagcagcgggtgctgatcgctatcgccattgcgctgcggccggcgctgatcatcgccgatgaggcgaccagcgcgctggacgccacggtgcaaaaacgcattctcgatctgattgacgaactgcggcgcgagtccggcaccgcggtgctgtttgtcacgcacgatctgggcgtggcggccgaacgcgccgatcgcattctggtgttccgccacgggcggatccaggagcagggcgccgccgaggcgctgttgcgccatcccgcccatgactacacccgccggctgtttgccgatgcgccggcgctgagcagccggccggcgccggtaagcgatggccggcgtgagccgacgatcgtggtcagcgggctggtgaaggattttcgcttcgccggacgtcggggcgagccgtttcgcgccctggatcgggtgtcgttcagcgtggagcagggctgcacccatgcgctggtgggcgagtccggctccggcaaaaccacgctggcgcgctgtctgctgggcttcgagcgcccggatgccggccagattagcgtcgacggcgtcgatctgacccggctgcgcggcgaggcgctgcggcagttccgccgccgtatccagctggtctatcaaaatccgtttggttcgctcgacccgcgccagacgctgtatcaggcgatcgaggagccgctgctgaactatgccgcgccgggcaaggcggaacgctatcgccgggtgcgcgagctgttcgaccgcgtggcgctgccggacgagctgctcaaccgccggccgcacgagctttccggcggccagcgtcagcgggtggcgatcgcccgggcgctggtgctgcagccgcgcgtgctggtgctggacgaggcgacctcggcgctggacgtcacggtgcaggcgcaaatcttacgcctgctgcaaacgctgcagcaggagctggggctgacctatctgtttatttctcacgatctggcgacggtgcggcagatctcgcacggcgtttcggtgctgcagcacgggcggcaggtggactatggcgctaccgacgcggtctttgcccggccgggcagcgcgtacacccgccagttgctggatgccattcccggtcgccatttccgccgcgactttcagcctgttaaggatgcctatgagcagtaa

SEQ ID NO: 454116 - DNA, 1047 bp, Serratia marcescens
atgagcagtaaaagacttggttttttcacccgcctgctggaccggggcagcgcgcaggaacgctaccggctggcgctggagcagatcgtgcaggcggagcgcgccggttttgacagcgcctgggtggcgcagcaccacttccatgaggacgaaggcgggctgccggcgccgctggtgtttctgacgcacgccgcggcgcatacccggcgtattcgtctgggcaccggggtgatcacgctgccgatggagtcgccggtgcgggtggcggaagacgccgcggtgctggatctgctgtccggcgggcggctggaggtggggctggcggcgggcggcacgccgtcggcgtttagcgcctttggtctggacgccggccagcgcaatgcggcgttcagcgcgcatctgcacaccctgctgcaggcgtggcgcggtgagccgctgggcgacgaggacaaccggctgtatcccgccgcgccgcagcttgcgcgccgcgtgtggcaggcgaccttttcggtggcgggcggtgagcgcgccggccgggcgggcgacgggctgatgctgtcgcgcacccagccgcgcccggcggacgcgccggatatgccgctggacgcgctgcaaaacccgattatcgacgcctatctggcggcgctgccgccgggcgttgagccgcgcattatgggatcgcgcaccctgtttgtctgtgaggacaacgccagggcgcgggatttcgccgcgcagggactgagccgcggactggagcggctgcgcgcggcggggcaccggccggcggacgagtcgctggacggcctgatccgcgcctttgacgtgcacctgggcacgccggagcgggcgattgcctcgctgcagcaggacagcgcgctggcgcgggtgaccgatctggcgtttcaggtgcattcgatcgatccgccgcaccgcgaaattttacgctccatcgcgctgattgcgcgcgacgtcgcgccggcgctgggctggcggcggtcagaaccgaccgcggccgcaccatctcatcagacagaggaaagggtatga

SEQ ID NO: 454117 - DNA, 1092 bp, Serratia marcescens
atgacggacagtaacgatctgctggcaacgctggcgcaggcggagcgttccgccgaactgacgcaggcgcgcattacgcgccagggggcgagcgacgcgattcaggccagctatcacgccttgtttgacgcggaagaggaggatttcccggcggatgagcgcgcgctgttggcgcaacgcatcagtgaatggcatggcgcgagcgcgctggcggcgcactatgcggcgcggcagcagcggcgtccggctaccacgccgcggctgagcgcggcgctcgaccatgcggagcggctggcgtttaagccggccgaggccgcgccggaacatttacaggcgctgcagcaggcgggctggtcgcctgcggcgatagtcacgctgtcacagctgatcgcctttgtcagtttccagagccgtctgctgtacggctatcggctgctggccggcgatgcgccgccggcggccgagccggtgcctgccgccagctggcgccgtgcgccgctcacccacggcggtcgccccgcgccgccggcgttcacccggcaggagctgggctgggagccgtggatcgccgccaagccgctggcggagttcgacgccgcagggctggcgctgctggcgcgtttcggccataccgattccgactatttccgcctgctggcgcgcaatcatccgctgctggagcagcgcacgctggcggaccgggcgattttctatacttccggcgggctggcgcgtcaggatcgcgaactggcggcgacggtggccagcaaggttaacggctgtatttattgcgcctcggtgcatgcgcgcaaggcggcgcagctgtcgaagcgggaagaagaggtgcagcgcctgctggatgtcgcgcccggcggcgtgctgagcgccggccagcaggaggcgtggagtgcgcagattgagtttgccgccgcgctgtcggccacgccgccgcgggcggatgctgaacagctggcgacgctgcgccgtcagggactgagcgaactggcgctgttggatctggtgcagtcgacggcgttttttgcctgggccaaccggctgatgctgacgctgggcgaaccgtttgagccttag

SEQ ID NO: 454118 - DNA, 981 bp, Serratia marcescens
atgatgagccatcgcggtatgatattgacgacgctgctgctgtgggcaaacggcggtgaggcggcggccgaaccgttgccgtttagtccggaggagctgcgcgcaggcctgcgggagagcgccggcgggctgaaaaatctctatcaggaattatcgattatcggcaccacgcccggcatcagcgccgctaatttccgcccgacccacgactcctccgacccgctggatatcgattcctacaagctggcgccgaagtatgcttttgatatcggcatcgacgggttcagaccgtatatcgaaggtacgttcggctatgtcaacagcgatcagacgctgaatttcggcgattctgacggcatggccaaccggctggatctggatacccggaccctgtcgctgctgggcggcgccggggcggaatttgatatcgccagcggcaccatcctgcggccgatgctgctgctgggctattcacgcacttccaataacaccgcctccagcggccccgtcggggatctgttccatgaggcgggcaaagggttactggtcgattttaagatccatagcctgttgtacggcggcgcgctggagattgagcagaatcaccgctgggacaacgacgtcggcctgacggccaacctgcgctacaactatctggttgacgacagctatcgcgccagcgatcccgagctggaagggcgcaatgacttcagcgtgatgaccgcggcggcggagctgaacggcccgacggatctggcgctgttcggccggcctctgcgctggatcggttttgtcaccggcacctatctgccggagatcaaagacgacatcggttttgactactttgtggagatcggcggcggtatcgaaattgtcgacggcggcgtcattcccggtatcgacggcgtgagcctgcgcggctccggcctggtcggggacggggttaagggctggagcatcgggctggccgccgagttctag

SEQ ID NO: 454119 - DNA, 633 bp, Serratia marcescens
atgactctcagcgaacgggcgaggatttttgcgactcaggcgcatgccgatgcgggccagaagcgaaaattcaccgacgaaccttatattgtgcatccggccgccgtggtcgagctgttgatgtctgcgaatcctagcgaagagatgattgccgcggcctggctgcatgacgttgttgaagataccggggtcacgctggcggccatcggcgcgctgttcggcccccgggttgagcagtacgttgagatgctgaccgacgtccgcacccacagcagcggcggtgagcgtattgagcgtaaaaacgccaacctgcggcacagcgcccaggcccatccgtcagcccagaccatcaagctgtgcgacctgattgataatgcgcgctgcgtggtggagcgggacccgctgtttgcccgcgactatcttctggagatgaaacgcttgttaaccgtgatgaccgccggtgatgcagccctgtatgcgcgggccctgaaggtctgcgatgacggcatcgcccggctgcaccggcagctgggcaatgacgcgtggtttatccagggctgggcgcgctatgagcagcatacgccgcttagtgcggtgacagggtggtcaggaacagaattgtcgggatggtga

SEQ ID NO: 454120 - DNA, 927 bp, Serratia marcescens
atgacgacgatactgctcgccctgactccaatcatctttctgatcgcgctgggttattttctgcgttcacgtaattttattgacgtgcagttttggctgccctgtgaaaagctcaattacttctggttattcccggccctgatgttctcgcaggtggccacggccaaactggaagactttcccatccgccctatcgcctggtcgctgctgggggcggtcgtgatggcggccttcacgctatgggtgtggcgcggattgagtaaacagtccggcccggtgttttcatcggtgatacagggcgcgttacgccccaatacctatattggcgtcgcggcggcggccgcgacctatggcagcaccggcctgacggtcacctcgatcagtattgccgtggctattcctctgctgaacgtcgcctccatcattatattgatgtattacggccggggtgcaaaaccggccgtatcgcagatcatacgggcgctggcgcgtaatccggtgattctttcagtgctggccgggctgctgtttaatgccctgcagatcgccctgccgcagacggtgcgcgacattctgcacattctgggcggcgcctcgctgccattaggattactggccgtgggcgccgggctggatctcagggccgcccgcgcgtcccaaggcgcagtgctgcagtccgcctttgtcaaactgctgttcgttccgcttattacgctgctgattggcgtatggtcgggcatcagcggcccggtgctggccacggtggtgctgtttaatgcgcttccctgtacgccgtctgcctatatcatgtccaaactgctcgggggcgatcaccgcttatcggccggcattatctcggtgcagaccgtgctggcgccgatcaccatcccgacaattctgttcctgaccaccctgtcaccgcactaa

SEQ ID NO: 454121 - DNA, 735 bp, Serratia marcescens
atggagcatgaatacctttttctgatcgctatcctactcttctccgtcattcagtcgctgttcgggatgggcattctggtgttcgggacgccaacgctgctgctgttgggctatgacttttcatccgtactcgggctgctgttgccctcatcagtgctgatttcattcacccagctctatggcggcaacggctgggcgaccgaaagggcggaaaggcgcaatatgctgctctgcggcctggccgttatcattttcctttccgtactggtcaccaccggcctgaaggttaaccttgatctgattattgggccgatcctgatcttttccgcccttgtcaggctcagcgccagcttcagaacgtttatcagcaaccggcttatccagcaacggcgcgcctatttactgctgatgggcgccgtacatggcgtcaccaatatgggcggcgccctgctggccctctatgcatccagcacgcagcgtgagaaaaccgcgatacgtaataccgtctcccgctactacctgatgtttggcgtcatccagctgataacgctgattatgctaaaaccccacgcactgagcattgccggctttctggccgcgccgcttgcctggtttatttactggagcgtcggcagcatcctgttccgccgcaccagctccggcgtctatgaaggcctgctgacggggtttattgcggtctatggcgtggtagtactgaccaaaggatatatctga

SEQ ID NO: 454122 - DNA, 1428 bp, Serratia marcescens
atgacccactctcgcgttatcgccactatcggcccagcctcaaaccaccccgacgtattaattaaattgcgtcatgccggcatgtccgttgcgcgcttaaacggctcgcacaatacgccagaatggcacgctgaaaccgtggccctgctgcgccacaccgttccggacgtgccgattctgctggatattccggggcgcaaaattcgcacgctgcagcttgctcatgagccttcatttaaccgcggcgatacgatcattctgacgacggacacccgccatgacggcacggaaaaagtgccggtcggctatgaacacctgcatgagaaattatccgcgggcaaccagatttttgccgacgacggcacgctgtccttcgtggtggaaaaaattcaggacagggacatctacctgcgggcaaatatggacggcaaattaaaaagccgcaaaggcatcaacgtccccggcattgacctggggcaatccctggtcaccgacaaagaccgcgccatgattgcctttgctaaatccatcggcgttgattatatcggcatcagctttgtcgaaagccgcgagcatatcgaggccattcgcgcgctgatcgcggcgcccgttccacgcattgtggcaaaggttgaaaacggcggcggcatcgctcatcttgccgatattgtggacgccgcggatgtaattatgatcgaccgtggcgatctggccgtagaaacctccattgaccacgtcgccctgtatcagaaacggatcctcagcgaagcgtcccgggcgggtaagccgaccatcgtggcgacagaaatgctgcacagcatgattgacaaccctctccccaccaaggccgaagtcagcgatatcaccaatgcggtgcttgacggggcatcggcggtgatgctttcaggtgaaaccgccgtagggcgctacccggtcgaagccgttgaccgcatcagccgtattgccgcactggccgccgccgggcgcaatcccgcggcgtcgcctgcccgcatcagcagtgaaagcgatctccgccgcactatccgcgtgctttccgaagccttacctttgacgcatctggtggttctctcccggacggggtatgccgtacgcatcgcggcaatgtctgataccggcctgcccgtcctggccgtaggcgcgcacgaacaattaacccgcagctggaatcttctgccaaatgtcaccggtctttaccttaatgacgccagcgagctgtttgcccaggaagaagagcctcttctgcgcgtactgaccgacggcggatacctgcacggcgacgattacgtggtcattattcaggcccggcaggacagccagagcgccgacggcaatgtgatccgtactctcaacgtcaaagcctggctgcataaccaacagaaagtattcaataacgctgaggtggcgtaa

SEQ ID NO: 454123 - DNA, 474 bp, Serratia marcescens
atgaagacacgaatctgttttatggttagcctgatagcgctgttatcgttcccgctgcttccggcccgtgccgccacggcgctgctgcattgtgaagccgaaatgcgggtccgcaaaaacgtgacggaaaacacgcccatttcactgcatgcgaacgcccactacttcttcgagccggcgggaaaaggctacgtggatattgtcggcacgatacaaacccgcgagaaaaccgcacatctggaccgaatgatctactttacctatgcccgcgccgcgcgcgacggcttttacaccgtgaagtttacccacagccggcccaagccgctggataatacgccgcaggcgatgctggcttatttttatgaaatcggcggggaaacgcccggctacccggtggacatctccaaactgaacgagaatctgatcctgttcagccatctctccttccccaccctgctgtgccagaaaatctga

SEQ ID NO: 454124 - DNA, 267 bp, Serratia marcescens
atgaatcacaatttcacccttggcagctgcgaggtgtactcgctggactataaaaacgcctatggaaaaaacgtgcagatcgccatggccaaacaggatattgccgcagaaaagctgggctgccgacacatcaaaaacgtgatcttttataaaaaaatgtgggctgaggataaattcaacgaggtcagctttatgggcgtttgttcggtcaccaccacagaaaaatacgaacgctgctacaccatcaaaaattttgcagggaattag

SEQ ID NO: 454125 - DNA, 612 bp, Serratia marcescens
atgaatcaaactatttctgtttttatcgatgacccgaaccgcttttttgtcgcgggcttaaggctggcgctggagcagcattttagcctccgggggattgcgctgtgctatctatacagcacggcctcgccggccgatctggtgattatcgccgctggcgagggggtagcggggcagttctgccacctgccgcgtccggattattggatgcccacggcatacctgaccctgcgtgagcggccggaagtgccgctgctgacgctgccggcctgccagcgggaaaccggtcgcctgtaccgctgcgatccgctggaaaaaattatgcgccagattgacctcgccctgaaggcctgtgaaatgccccatgcgcgtatgcatcgctgttattggtgcgacaagcatgcattaacgccgcgcgaatatgagattgtgcggcgtttcggccgtggcgaactgccgcaggatattgcggcgcagctgcggctcagtgtcaaaaccgtcagcctgcacaaacgcgcgatgatgcgcaagatgcacctgaggaacaacgcagatttgtatcactggctgcggaatggcggcttaaacaacccgccggtctcatcacgataa

SEQ ID NO: 454126 - DNA, 219 bp, Serratia marcescens
atggcaagtgataaaaaagaaagattatcaatcgggaagcgcatgtttcatagcttcctggagtatgctgtttctttgcttggcggggcgttggtttttttatgtatctactggttcttccactttgaaacatggcatgaacgatttatatacattgccattagtatcgccgctgtataccttattgttaaaattctgcctgaacgccccgatgagtag

SEQ ID NO: 454127 - DNA, 651 bp, Serratia marcescens
atgaaaacttacaaagacatagcgaagcgtatagcgaagattattatttcccccgaaacggccgttggtttcgttaatggcgtattatcggtacctcaagacttaggctatctggcttatagttatctggacactgactccagacatcaccgggatacggaacgcctcagacttattaaagctgttcgatacggcattcttcaaaatgaaaatcttgcaagaacgatagaaaccgtattaaacaaattcaatcaatacatgcccgaaaataaaagagataaaatttacgctaaaattggatcgtccatatttggtcgtgcaatcaccaactccataatatcaaaaaaaatagcaacatcgatagcccagcgcagcactcttatggtcgcactgcgaggcggtattgtcggcaatacgctattggcaggcggcatggcagagcgtagtatttatacctctcgacggcttcaacgcactgaaccagaaatatattacgcgctgcgtcaaagaaaccatgacttcctttattttcttgttgagccggcattgcatccttttattgaagcattaagagtgagaagatcgcagggagaagcagcattcaatcagattctggaccttgtagagaaagaggttagttatggcaagtga

SEQ ID NO: 454128 - DNA, 408 bp, Serratia marcescens
atgaccatcatcaccgccgccggtatgaccatcgtcaccgctaccggtatgaccatcatcaccgccgccggtatggccgtcatcaccaccgccgctatggccgtcgtcaccgccaccggtatggccgtcatcaccgccgccgctatggccgccgtcaccgccgccggtatggccgtcgtcaccgccgccggtgtttttctgccggatggtcagatcgacgttttgatgatcgcgcgtcagcgccgtttccaaaaaggccgagtccagcaccgcttcgctgaacataccgttgacgccgccgccggcggtcagaatgcggtaggtttgtccattttgatagctggtgtgcggatcgagggtattgaccaataccttgacgttcttatcaatgtaggcgccgccctgtga

SEQ ID NO: 454129 - DNA, 504 bp, Serratia marcescens
gtggatctggctatctttaccagccgccacggtgagctggagcgtacccataagatcctgcagcacctgcatcagcaacagccgctatcgccgaccgattttgccatgtcggtgcataataccgccgcaggttggttaaccatcattgctaaaaatacgttacctaccacttcgctggcggctggtgaagacagctttcagcagggaatgattgaagcgcagggggtattagccagcggcgcggcgacacgggttttgttggtggactttgacggcgcgctgcccgaggtctatcagccttttgtcgcgctaaccgcccggccctatgcgctggcgctgctgttggaggcgggggagtcatggcaatgcgcggcggttgccaggcgtccggccgcggaacccttaccgcaaagtttatcctttctgcgcaactggctaagcgggcaacgcgattttatcgtaccaggcccgcgccacgactggcgctggacgcatcatggctaa

SEQ ID NO: 454130 - DNA, 1368 bp, Serratia marcescens
atggatcgcgagacaaaggataaaacgccgctgaccttgccgatgagccgctggctggcgcaggagcaggcgtccgatcgcgtggttgcctggcgtggcgagcagcggataacgctgggccagctgcgtcgcgatgtcgccgggctgtatcacgagctgaatgtgcgcagggaacggcgctgggcgctctgttttgatgactgctaccgttttacggtcgcgttgctagcgtcgttgtactgcgataaagaaccaattatttttggtcatcagcgggaagccattttacaagagcagcgcgcggactttgacgcgttgttgagtgatttgccgctgatgcttggcgtgccgagcctgacggtgacagaaggacgcacagcgcgcgccgcgttgccggactggccggaggacgccggtctggttctctatacctccgggtcgacgggggagccacagaaggtgcataagtcggttgcggcgctggatgatgaatgcgcgctgctggctgcctgctggttgccgcagtttcaggggcgctggatcgccgcctccgtttctcatcagcatttatacggcctgagcttccggctgtttatgccgatggcctgcggcgtgccgttcgacgcgcagctcacgcaataccatgaacagctgattgccaaacgtcaggtgggacaactgctgtttatcagcagcccggcctggctgaaacgcctggatagcgcgctgagcccgctggattgcgcgcaggtgttctccgccggcggaccgctgacgttcgctgaggcgcagcgctcacagcatttgctgggcgcgttgccgttggagatctatggcgcgacggaaaccggggttatcggctggcggcagcagcaacggccagagacgccgtggcgcctgtttgacggcgtcaccctgcaggtggatgcgcaggggctggcgcagatcgattctccgctgctcgatacaccgctggcgctgaatgatattttgcaaccggcggcggatacgcgttattttcagctgctggggcgcagcgatcgcattatcaaaattgaagaaaaacgcctgtcgctcagcgaagttgaacgacggctgctggcgctgccggccatcagcgatgcggcggtattgccgctgcggcgtaaggggcgcaccagcctggccgcggtgatcgttctgtccgcgcagggacgcgccgagcgtcagtcgctgccggaaggtctgttcacccggcgtttacatcaggcgctgcgtccgtggctggagccggtcgcgctgccgcgcagctggcggattgtcacggcgatcccgcgcaatccgcagggtaaacgcgcctatgccgaattacaggaactctttttatga

SEQ ID NO: 454131 - DNA, 804 bp, Serratia marcescens
atgagcattccagcatttggtttgggcactttccgcctgcaggatcaggtggtgaaagattccgtacgcaacgcgcttgaactgggttaccgcgccatcgacaccgcgcagatctatgacaacgaagcggcggtgggcgaggcgattgccgagagcggcgtcgcgcgtgaagcgctgtttatcaccaccaagatttggaccgccaacctggcaaagggaaaactgatccccagcctgcaggagagcctgcaaaagctgaaaaccgactacgtcgacctgacgctgatccactggccgtcgccgaacgatgaggtgccggtggcggagtttatggcggagctgctggaggcgaaacggcaggggctgacgcgtcagatcggtatttccaactttaccgtggcgctgatgcagcaggcgatcgacgcggtgggggcggaggagatcgccaccaaccagatcgaactgtctccgtatctgcagaaccgtcaggtggtggagtttgcccgtcagcacggcatcgctattacttcttacatgacgctggcctacggtaaggcgctgcaggatgaggttatcaacgccatcgccgcccgccataacgccaccgcggcgcaggtgattctggcctgggcgctgcagcaggactatgcggtgattccgtcatccaccaagcgcgacaacctggccagtaacctgctggcgcagcagctgacgctgagcgggcaggatatggccgagatcgccgcgctggagtgcggcggccgtctggtcagcccggaagggctggcgccggcgtgggattaa

SEQ ID NO: 454132 - DNA, 252 bp, Serratia marcescens
gtgccaaatatcattctgagcgataccagcgccagcatcagcgaactgaagaaaaaccccatggggacggtcaacgccggcgaagggtatccggtcgccatcctcaaccgtaatcagcccgcattctattgcgtaccggcagccctgtacgagcaaatgcttgacgtgctggatgagcaggaactggtcaggctggtcaatgagcgtcgcaacgaagcactgattgacgtcgatctggaccagtttacatga

SEQ ID NO: 454133 - DNA, 921 bp, Serratia marcescens
atgccgcttctccgcgccctgcccgcgctgctgctactgctgtgcgccccgctgtataacgccgtcgccgcgtcgcaaccggccattatcgcccaccgcggcggcaccgccgatgcgccggaaaataccgtgccggccatccgcagcgcattggctaacggcgtcgacgtcgtgtggatcacgctgcagctgagtaaagacggggtggtcgttctctatcgccctgccgatctgcaagcgctcactaacgcccgcggcccggtctccgcctacagcgcagcacaactggcgcaaacggatgccggctgggcctacacccgcggcgacggccacccgtaccgtgcccagggcatcggcattccccggctggcaacggtgctgcaaacctttccgcacgccaccttctatctggacatcaagtcgccggacgccgatccggcccgcttcgccggcgcgctgctgacgacgttggaagagcagcacgcgctggcgcgcacccgggtctattccaccgatgcccgctacctgcaggcgctgccaccgcagatcgcgcgctttgtcagccgtgatgaaacccgcagcctgctggctaacgtcgccatggcgcaccgctgccagctgcagccgcacggcgcgacgccccgctggtacgggctggaactgacgcgcgaagtcgaggtggtggagaaatacacgctgggcgaagggcgctccaaggcgcagctcagctgggatgaggaatcgatggcctgtttccgttcgcaggggccggcgcggattgtgttattcggcattaactcgccggaggcttaccggcaggcgcaaacgttgggggctgacgcggtgatggtggattcgcccgaacaggcgcagcagtggcggaagatgaatcagggcgcggccagccgcgccccggaataa

SEQ ID NO: 454134 - DNA, 300 bp, Serratia marcescens
atggatcagtttgattgctttgatatcgtgggtgattcaggaatgaggcacgggcatatcctcaaagaaaacggggagtgggtttaccacagagatagtatgagtcccagtaataggggggaggtagttcaagatgataagtttactcttttccgtaataaccgttaccctgatgatgataagttatatgctggtaaacagatggacggtaccaaagcacaaatcgattgggtaaaacgtgaggtgaaaactgatacagatgtaactctgaagcttgaacctaatgacgtggaatattaa

SEQ ID NO: 454135 - DNA, 258 bp, Serratia marcescens
atgactaaagaagagattttgaaactggaagcagacccgtccggtgacttactgaaaaaatattcctgcgttaatgattatgtggaggctgttcgtagtggtgcactaagcatccaccacttgcaatcatatgtggtgccaagccaaaggattacacctcgcagaaaaacaatcatcagaattgccttggctattctggcagaagagaaggctttagatatgctggagaatgcccttgctgagttgccagatgaatag

SEQ ID NO: 454136 - DNA, 249 bp, Serratia marcescens
ttgaacaatgaaaacaaaaccccaaacactgaagagcagaaaggaatctttgaggggaaagagaaggtcatggttacatggtgggtggacaaagaaacctacatcacagcttggcaattacacaatgaactatattctgagcttttgtcccttgatgatttcatttctgtgcatttagctgtggggttagataagacatttgaagatttaggaattaaacaacaacaagaacaacaggaggattgttaa

SEQ ID NO: 454137 - DNA, 600 bp, Serratia marcescens
atggttatgtttgaccagttcaatagaaagtttgaaatgaacaccccccacatggacattatgagcttctatgatggcgttaaagaaggggaggtgatttggatggaagatttaaaatccctcagaggtgtagagcacaaagatatctgtgaactgctgtggttaggaatcctaaaaagggtgtggtcagttgagcacagagacttccacatcatctacaaagagcctaatgataataccctctatgggtcagataggcctattgtggatgcagccccttaccagattgtctcaggaatcattttggacggggaaccaaaacctgaatcattcactccgtatgaaaaatttgtgtatggagtgttgtggagcaagacccaaagggaaggtggcaataggacatctattcccaataagacattagcattcttaagttctatcagtgcagagaagctgcttaatgaagttctgttcaatctacagagaaaagggctgattgaggtcaactcctatgagaatggttgggtgactgcaacagttgcggacattagctctgttgaggcagttatttacaaatttaaaaactgcactccaagataa

SEQ ID NO: 454138 - DNA, 594 bp, Serratia marcescens
atgaacactatgacccgtactctgatgacccttggcctgctcagcgccgctacgctgggcgtctcccacaccgccagcgcgcacggctatgtggagtcgcccgccagccgcgcctaccaatgcaagcagcagctcaacacccagtgcggcagcgtgcagtatgaaccgcaaagcgtggaaggcctgaagggcttcccacaggccggtccgccggacggtcacatcgccagcgccgacaaagccaccttcttcgagctggatcagcaaacgccaactcgctggaacaagctgaatctgcgcaccggcgaaaacaccttcacctggaacctcaccgcgcgccacagcaccaccagctggcgttactttattaccaagccgggttgggacgcctcacagccgctgagccgcgcctctttcgatctgacgccgttctgtcagtatgatgacggcggcgcgattccggcggccaaggtgtcgcataagtgcaccataccggcggaccgcagcggttcgcacgtgatccttgctgtgtgggacgtagccgataccggcaatgcgttctaccaggcgattgacgtaaacctgagcaattaa

SEQ ID NO: 454139 - DNA, 930 bp, Serratia marcescens
atgaccagattatccctggatgcgattaaaataatcgacaccatcaaagagaccggctcattttctatggcggcggacgtgctgcataaaacgccgtcggccatctcttaccgcgtcgccaatattgaaaataaactgaatgtaaaactgtttcaccgccacggcccggtggtcagcctgacggaggagggtgagtttttattaacggaagggcgctggatcgtcaacgcggtgcaggatctggaaaaccgcgtgcgcaatatccccaaactgacgcacgagattcgcattgtggtcgacacctttttcccacacgcctgcctgacgcaggatatccgtgaatttattggccgctatccccacgccagtatcagcgtacggcgcgagacgttgaacggcgtctgggatgcgttaaaaagcaaccgggcggatctggcgatcgctaccggagcggtgccggataacgtcgcggcgaaaacgctgatgctgggcaagctggattttgcgctctgtatttctccttcacacccgtttgccgcccagcgcaggccggtgagtaaacagcagcggctggacgatattctgatcgccatcggcgacagcagccacgaactgccccgacgacagggtgaagcgctgccgctgcagcggcaactgcagctgtgcgatgtggagagcgcgctgtcgctgctgaaacgcggcgtggggcacgcgtttctgccgccggcgctggtggccgcggagctggagaagggcgaactggtgacggccgacgtcgactgggcgaagggggatgagatgctgtggctggcctggcacccggcctgccggggcgaagcgtttgactggtggcggcagcggctgcgcgacaagagcgcacggttcggctgcgaaggatatgaaatggtgcgcgaggggggatgccgctag

SEQ ID NO: 454140 - DNA, 738 bp, Serratia marcescens
gtgagattcagcggaaaaaatatcgttattaccggcggcaccagcggtatggggttggcgggcgcgctgcgggtggtggccgaaggcgggcgagtggcgctgacgggattgaatccggcgcgtctggcggccgcggccgagcagctgccggccgattctctggttttaagcaacgatgcggcatcggaagcggatatcgaggcgttaggcgctgcgctggcgtcatgggggcgtattgacgggctttggctcaacgccggctatgcgcaggtgggaacgctggagtcggtggatgccgcagcgtttaaccagatgatgaacgccaacgtgcgggggccgatgctgcagcttgcccgcctgtcgccgatgcttaacgccggcgcgtccgttgtggtcacctcgtcatcttcaacctatgagggtgcgccaaccaccagcctgtatgcggctaccaagggcgcggttgtcgcgatggcgcgcagctgggcggcggagatggcggagcgcggcgttcgggttaacgtattaatccccggcccgatcgaaaccaatttccgtcactttatgccggaggcgtctcgccggcagtttgaggactttgtggtggggcaggtgccgttgaaacgggccggcaccgccgacgaagccgccgccgtcgcgcttttcctgctgtctgatgatgcttcctatgtgaccggcagccagtacgcggttgatggcggcctggtccgctattga

SEQ ID NO: 454141 - DNA, 441 bp, Serratia marcescens
atgataaacagcatcatctcccccgttccgctcaaaccggccctgccggcggtcggccatctggtcagcgcgccgggcaaaaccggccagctgctgatggccacgccgctgaataaccacgccgacgccggtaaggcgaagaagagcgacggcaatcagcccgccgcgcccgtagaacagggcgcgtcggcgcgcatcaaggcgctgcagcaacagattgaggatttacagcagcagctgctggcgttaaaagacgcggacggcgatgccaaacagatcgaacagcaaaaacagctgattcaggcgcgcatcgccatgctgcaggcggagatcgcgcgcatccgcaaagaagagttggaaaaacagcaggcagagcagatgaaggtggccaacggcgtcaaccgcccaacgccgcacaacgcgctggacgtctatatctga

SEQ ID NO: 454142 - DNA, 195 bp, Serratia marcescens
atgcttaacactaaacgcccaatcgccgaacgccggatccaaacgatcggcaacctggcccgttcggttcagtcagagcaggggcagccggcaaataacccggtgatcgaagcgtccggccccgcagccggcacgacgacagcaggacaaccgatgcggcaacggtataggcatgccgatgacgcagccggctga

SEQ ID NO: 454143 - DNA, 1311 bp, Serratia marcescens
atggacaccaatcaattgatcgcccggctggcggaacagctgggagagcgccggcagctgctgctggccttcagcggcgggctggattccagcgtgctgctgcacctgctggtgcagctgcgccgtcagcgtcctgaattgcagctgcgcgcgctgcatgtgcatcacggcctcagtgcgtttgccgaccgctgggtggcgcactgccggcagcagtgcgaggcatggcaggtgccgctgacggtgcgccgggtgcagcttgacccgcgcgacggcggcattgaagcggcggcgcgcgatgcccgctaccaggcgctgcggacggcgctgcagccggatgaatgcttgctgaccgcccagcacctggatgaccagtgcgaaaccttgctgctggcgctcaagcgcggcagcggcccggccggactgtcggcgatggccgcctgcggcgcgctgggggagcatacgctgctgcgtccgttgctcggcgtcagccgtcagcagctggagcactatgcccggcggcataccctgagctggattgacgacgacagcaatcaggacgcgcgtttcgaccgcaactttttacgtttgcaggtcctgccgctgttgcagcagcgctggccgcactttgccgaagcgacggcgcgtagcgccagcctgtgcgccgagcaggaacagttgctggacgagctgctggcggaacagttacagacgctgcaggacgatgcgcgttcgctggcgatcgacggcctgagcgtttgctccgccgcgcgccgctttgccctgttgcgccgctggatcgcggggtttgcggtcagcatgccggcgcgggaacagctgcagcgggtgtgggacgaggtggcgctggcgcgccgcgacgccgagccgcagctgcatctgggaggctaccagatccgccgcttccgccagcggctgtacctgctgccgccgctggcggatttgcacgaccagcgcctggcctggacgggggagacgccgctgaccctgccggacggcctgggcgtgctcagccgcgagggcggggcggatcgcgtgtgtgcgccgctgccgcagcagcgcgtcagcgtgcgcttcggcgtcagcggtacgctgcgcatcgtcggacgtgcgcattcgcgtgcggcgaaaaaactgtggcaggagctgggtattccgccctggcagcgtgaacgtatccctttactctattatgatgagcagttgattgccgcgcccggtgtgtttatcaccgaggcggggcggccgcagccggaacgggcgttttggtcgctgcggtggcagaaaacttaa

SEQ ID NO: 454144 - DNA, 840 bp, Serratia marcescens
atgacatcactcactcccctgctcgctttattgcccatcgttttgctgacgggctgcaccatgaatattgcactgtctgaacgagagaagttcacccctctgcggccggtcaacattcagtttcaagccatcagttccgcgccgcgtgacaacttccaggaaatcgatccggcggccctgcaagcgggcgatctgctgttttcctcaaccatcggcctgaactcactgggcatccgcctgttcagcgcctcttctgtcagccatgtcgccatctatattggccaaggccaggttgctgaagccgtcggcaatggcgtgcaaattgtcagcctggagaatgcactcgctcagagcgataagttgttcgcgctgcgtctgccgggcttaagccatgagcaagccgctcagattgccgcgttcgccaggcaaaaggtcggaagccgctataactaccgggggattatcaagatgatgccctttatgatgaccaaacagctgtgttcgctaaatcctttctcacaggattttcgccagcaatgcgtgcagggattggctacggcgcagctcagctcgccaacgggtgatgaaaccagctacttctgctcacagttcgtcctcgcggcctatcaacaggcaggacatcctctgacccaggctgagccaggctggataagccccggagacctgttgcatatgcgggaaggagatattgctactctgccgccaagccagtcgctggcctatatcggccatatcaagccaggcatatatttacgcgcaaaatcgcaggccaataatcgcgccgtatcggcagcagacaagcccgccggtgcattctga

SEQ ID NO: 454145 - DNA, 339 bp, Serratia marcescens
atgataaatatccgcagcctgcggaagaagggtgtggcgatatttatcaggaaaaaactgacctgcattcaggctattttttcgtgcagactggcggcgcggtgggtaaatttccgctcggcggaaataataaaaaacccggcggatggccgggtgaaattcatcagtattcaacaacagacgtcgacatcgaggggatatcgccggggcagtgtaaccggcgactgtgacagcctgatgtcaggttacgccttgcggtacaaacgtctgggatggccgatattgccgtacaccatctcaacccggacgaactgcgtactgacgcagtactccagatag

SEQ ID NO: 454146 - DNA, 927 bp, Serratia marcescens
atgccgttgttttaccgtcgtttttatcgagtttttctggtgttgctgctgggcctgtgtgcgacggcgcccgcagccgccaggccggatttggatcgccggattggcgctacggtggcggacagcgggacgcctgactatgccttcagcgactttcgtctggcgtcggcggatggtgaacgccattaccgcattcgcatcgccaagcccaaacaggccgcgccggcctccggctatccggcgatctatttcctggatggcaacgccgtcttaatgcagctgaacgccggactgctgaagcggctggcgcaggcggagcatccgccgctgctggtgatgctgtcgtacgataacgatctgcgtatcgatgcggcggggcgcgcctatgattatacgccggcgctgcccgccgggctgcgcggccacccggagcagatgcgccactggcgcagcggcggcgccgatgcgtttgcgaccttgcttgagcagcgcatcaagccgcaggtggcggcgcgcgtcgccgtggatccgcagcggcaaacgctgtgggggcactcatacggcgcgctgtttgtgctgcatacgctgttccagcgcccgcagtcgttccagcactacattgccgtagagccttcgctatggtggggaaagggggagattcttcaggaggcgcaggaatttatgcgccggccgccggcgttgcacgcccgtctgcagctgtgggtggggcagcaggctccgcagacgcagccacacccggatgcgcgctcatcgcagccggccgatgccgcgcgtcagctggcgcagcgcctgaatgcgctgccgggcctgcaggctgattatcggcagtggccggagcaaagtcatggcgcgatgctcaataccgccatccttccggcactggaagcggtggcaaccggtcgataa

SEQ ID NO: 454147 - DNA, 2634 bp, Serratia marcescens
atggcttccgtattaccatcacagcaacaagctgcgtctatttactattcgattctggggactgccaccacgaccaacgacgcgtttaactactacgccaaccagttggaaagcggagcaaaaacggtcgccgcgttagcctcagacttcctgaactcagcgaaaggacaacagctgtacgcaggccaaagtagcgaacagatcatctcgcaggtgtatgcccgtgcttatggcgaaacgccatcagccgctcaggtcacccaactgctgggaaccggctccaccgctcaggcgctggccacgctggtcgataacctgctgacttatgacggttttgacagcgctaccctagccaaacaggcgaccttcgaaaacagcattgataaactgctgtatcgcgatgcctccaccatgccatccctgaattaccaggaagacgccgtttctctggcgctgggcattgccgaccgcggcgtattctcactgtcgctggaagcctggagtaaagcgctggccaaaggtaccagcgtcaactacctgaccaaaacgctgctggactaccctgagtttcagcgtaccgttggtcagctcgacggtaccgaattagcccagcacgtgtacaccatcgtacacggcgtggcggcaaccgccgaacagctggccgcttacggttcactgccaaacaagcagaccatcattgaatccatcatcagcgacctgcgcgactccacctcaaccaacgataccaccatcactcagcagcacgccttcgaagcacgcatcggcgaaaacctgctgtataaaaccgcagccagcctgaacgtcagcgaaggcggcggcaacgcgaccggcacggtcaacacaggcagcagccaccagttgaccaatgcggaaaccgcaatcctgaaacaggtacagctcaacgcggataaagccggcagcgttaacctgaaattcgccgataacctgagcgcactgaccatcaacggcagcgccgctgcaacggtcaatctgtccgataacggcgccaacagcggcgtcaacatcgcgctgaacaacgccaatgtcattctgaacggcggttccggcaacgataccgtcaacgtatccgccagcgccaacatcgccaatggttccggcacctttaatctgggcaaaggcaatgactcactgatctgggccggcaacgccaccaccggcggcaacagcgtatccagcaaaatcagcgccaacggcggtgacggcacggacaccatttccgccaacttcatcaccaaatccgttgccaccaccagcaacgtgctgggcatccgcagcagcaccatcaccagcaacgccgacaagttcagcaatttcgaaaaaatcgatctggcgggctacgtcggtaaatcaggcggtacgctgaacggcaaagcggttgcaaccggcgatcacacctttgactttggcctgctgaacggcaccgccaccgtggaaggcaccagcggcggcagcgtcacccagggggcaaaagccaccaacctgggctcacaaggttttgaactgtccggcaaagcagacaacgtcaaagtgattaacgccggtggcggcactgccgctgcgctgagcgttaccggcaacgccggcgctgacagcaacctgagcatcggtctgcgtcaaaacgccaccaacaaattcgacatcaacttcaacgccaccagcagcaaagacatcgacgccggctccctgagcctgtcgagcagcagcagcgcgctgggcggcacctcgctgaccaacgtcaatatctcctccggcggtaagggcgacttcagcaacatcctggatctggtgggcaccaactctcaggtacaaaccctgaaagtgaccggcgaccacaacctggatctgacgctgggcagcggttacagcaacgtgcgcaccattgacgcctccagcaacaccggcggcatcaacctggattccgcgcacggcggtaccggcgacggcatcctggtccaactgctgaacattctgccgctgagctccgtcaccaccgcgctgctgaccccgctgctgaacacgctgggcctgaacggttaccagatgaaagtgaccggcaccggcgctgacgacaccttcagcgtagccgccaacaccaccgtaaccggcggcgctggccacaacacctatgagctgaagagcagcaccaccaaagccggtatcaccattaccgacttcaacagcactaaagacagcatcgttgacaccacctccggcgtacacctctccggcgcggccggcagctcggtggcggattacggtctgcgctccgctgacgtgatggacggcctgctgggctcgctggttggtggcctgaccaacggcgtcgtcggcctgctgggcggcattctgggtctgggcaacagcaactcgctgacctcgaaagtcggtatcgcctcggtggcattcgacggcggcaaagacgccagctatgtcatcatcgataacaacgacaacggtacgctcgataattccgacagcgtgatctacctgactaaccagaaccaccagtctctggttaacagcctgcattacaccgatgtcagcgttaacggcgtagccagcgccgcaccggccgacctgaccgtcgcctaa

SEQ ID NO: 454148 - DNA, 2631 bp, Serratia marcescens
atggcttctttaccatcacagcaacaagctgcttccatttactactcaatcctggggtcaaatacgctggcgcatgatgccttcaatagctatgccatccagttggaaagcggcgctaaaaccgcagaaagtctggccgccgagttcatcaactcagccgcaggacaaaagctgtacgcaggccaaaccaatgagcagatcgtctctcaggtatatgagcgggtgcacggtgaagcaccaacggcggaacagctcacccagctgctgcgtggcggcacggtagagcaggcgctgaccagcctcattgatgacctgctgaattatcagggctttgatgatgccacgctggcgaaacagcaagactttgaaagcggcgtaaaccatctgctgtaccgcgatgccgataacctggcctcgctggaactccgggaacaagccgtctctctggccttgagcattgccgaccgtggtatttactccctgtctctggaagcctggagcaaagcgctggataacggcaccagcattaactacctgaccaaaacgctgctgaattaccctgaattccaacgtaccgtcggtcagctggaaggcagcgaactgatcacccaggtgttcaccacgctgcacggcaccgcccccacggcggaacagctggccacctacggcgccctggcagacaagcaaagtattattgaagccattatcaacgatctgcgcacctctaccgccacagacgatgccagcctgacccagcaacacgcgtttgaagcgctgatcggggaaaatctgctgtataaaaccgcagccaaactgagcgtcaccgatggcggcggcaacgcgaccggcacggtgaatacgcagaccagccaccaactgagcaatgccgaaaccgccgtactgaaaaccgtacagctggaagccaacgcggccggcacggtagacctgacgtttgccgataaactcagcgatctgaccatcaacggcagcgcggcagccaccgtgaacctgtctgacaacggcgctcgcggcgacaccgccatcgccgtccacaatgccaatatcacgctgaacgccggctctggcaatgagaccattaatctctcttccagcgctaacgtagccagcggcaccggcacctttaacctgggcaaaggcaacgatgcgctgatctgggccggcaacgccaccaccggcgccaacagcgtttccagcaatttcaccgccaacggcggtgacggcacggatacgctgtccgccaacttcatcaccaaatccgttgccactaccagcaacgtgctgggtatccgcagcagcaccgttaccagcaacgccaacaacttcagcaactttgaaaagatcgatctggcgggctatatcggtaaatccaccggcacgctgaacggtcaggcggtcaccaccggctcgaatacctttgacttcggtattctgaacggcaccgctaccgtagaaggcaccaacggcggcaccatcactcaggcggctcagggcaccaacctcggctcacaaggtttcgccctgtccggcaaggcggataacgtcaaagtgatcaacgccgccggcggtacggccgcagccctgagcgtgaccggcaacgccggcgccgacagcaacctggaaatcgctttccgccaaaacgccaccaacaagttcgatatcagctttgatgccgtcggcacgcagaatatcgatgccggctccctgagcctgatcagcagcagcagcacccttggcggcaccgcgctcggtacggtgaatatcgcttcgggcggtcagggcgacttcagcaatattctgaagctgatcggcaccaactctcaggtgcagacgctgaacgtttccggcgatcatcaactggatctgacgctgggcagcggttacagcaacgtgcggactatcgatgcctccagcaacaccgccggtattgatttagactctgcgcacggcggcaccggcgacggtattctggtgcagttgctgaacattctgccgctgagcgccatcaccaccggtttgctgaccccgctgctgaacacgctgggcctgaacggctatcagttgaaagtgaccggcaccgccgccgacgacaccttcaacattgccgccaacacgacggttaccggcggcgccggcagcaatacctatgagctgaaaggcagcaccagccaggccggggtgaccatcaccgacttcaacagcgccaaagacagcatcatcgacagcgcctccggcgtcaccctctccggcgcggccggcagttcggtggcggactatggcatccgctctgccgatatcatggacggcctgctgggatccctgattggcggcctgaccaacggcgtggtcggtctgctgggcggcatcctgggcctgggcagcagcaactcactgacctcgaaggtcggcgttgcttcggtggcattcgacggtggtaaagacgccagctatatcattatcgataacaacgacaacggcacgctcgacaactctgacagcgtgatctacctgaccaatcaggaccaccagtcgctgctcgatagcctgcattacacggaagtaagcgttaacggcatcgctaatgcaccagcggccgatctggccattgcctaa

SEQ ID NO: 454149 - DNA, 147 bp, Serratia marcescens
atgacaaaaccagcatcaaccaccaaaaaaccacgcaagcaacactcgcctgaattccgcgacgaagccctgaaactggctgaacgcattggtgtggccgcagccgcccgcgaactcagcctttatgagtcgcaaatttacacctga

SEQ ID NO: 454150 - DNA, 852 bp, Serratia marcescens
atgaagtatttcttcatcaaaaagcatcaggctgagttcagtatcaaagccatgtgccgggtactacaagtcgcccgcagtggctggtatgcctggcgtcagcgtcgtcaccagataaaccgacgtcaacagttccggcttgtctgcgatgatgcggttcgacagacctttgccaaggcaaagcagctttatggcgcgcctcgtcttgctgatgaactgccggagtacaacatcactatcgtcgccagtctgcgtcgtcaggggctgcgggcgaaagcctcgcgccggttcagcccggtcagttaccgtgagcatggtctgccagtctcggagaatctgctgaagcaggacttttatgtcagcggcccgaatcagaaatgggcgggagacatcacgtatctgcgcaccggtgaaggctggctgtatctggcggtggtgattgacctgtggtcgcgctcagtcattggctggtcgatgtcctcacagatgacggcacagcttgtctgcgatgcactgcagatggcgttatggcgtcgtaaacgcccggaaaatgtcatcgtgcacacagaccgaggtggtcagtactgttcaacggattaccagagtttactgaaacggcataatctgcggggcagtatgagcgccaaaggctgttgttacgacaatgcctgtgcggaaagcttctttcactcactgaaggtggaatgcatccacggggaggactttgccagccgggaaataatgcgaacggcagtgtttaattatctcgagtgcgattacaatcgctggcgtcgtcacagtgcctgtggcggtcttagcccggagcagtttgaaaaccaaaacctcgcttag

SEQ ID NO: 454151 - DNA, 1356 bp, Serratia marcescens
atgcttgaagagctgcaggtgcttgcggggaatgtggaatcggaaacgaaaatccagaccttgcttcatgtgttggaaaccacgtttcttaatcgcaccgtcgtattctttactgaatataaagcgacacaggctctgctaattaatactctgaatgctcgctttggctatggttgcgtcagctttatcaatggcgaaggacgcctggaagggatttacaataaacagggcgtcaaaacgtcatggagtatggatcgctaccatgccgcggagcaatttaaaagcgggcatgtacgctttattgtttgtactgaagccggtggtgaaggtattgatttgcaggacaaatgttattccatgattcatgttgatctgccgtggaatccgatgcgtcttcaccagcgtgtagggcgactcaaccgctatggccaaaaacatcaggttgaagttattactttacgcaaccccgatactgtagagtccagaatttgggatctattaaacagcaaaataaccacagtcatgcgttctttgggcgacgcgatggaggaaccggaagatctgttgcagcttattcttgggatgagtgataaaggttttttcaattcactttttgctgatggcctgacacaaaaaacagaaactctaaatacgtggttcgattccagagcagggaccttcggaggtcagtcggcggtcagcgtagttaaggggctcgttggtcatgctgataaattcgagtatcagaatttacaggaagtccctaagttggatctaaataacatgtatagttttttagaaaacatgctcaaattgaatggtcatcgtcttgagaatgagggggggacactttctttcgttacaccgaaagagtggataacccagtttgggattaagaaaaaatataataacatgacgtttgacagaatatctgaagacaaggcacttgaagtgcttggcgttgggcacgttattttaaataatgcgatcgctcaggcagaaaaattcaatgcgtcaacggcggtagctcggggaattactgcacctttgctcatttatattcttcgcgatcaaattactggcgacagtaatgtacattcattcaccgttgtaggtgtattaatgaatgacgaaccgaaaattctggtgaacgacgaccttgtccatcaattatctgttatttatgaagccatgcctaagggatcaccagttgtaaaacttgatagtacctatcaaattgattctgccagtgaccttaaaattgccgagttatcgttagaacaggcaattccttcgttaaatttgccttacgaaaaagtcagttggaaccacacagccacatttatacctcaataa

SEQ ID NO: 454152 - DNA, 738 bp, Serratia marcescens
atgcccttaaatgcgcgtcaggtcgagactgcaacgcccagagacaaagcctataaactcgctgacggcggagggctctatcttatggtcaatactaatggttcaaagtactggcgtatgaagtatcgatttgccgggaaagagaaaaagctctcattcggaacctacccagatatctcacttgcagaagctcgcactaagcgtgatgaagcaagaaaaacactggcgaatgacaaagatcccggtgaagttaaaaaagccgaactgcttgcccaaaagctctcagtgacaaacacttttgaagcgatagccctcgagtggtacaacgcgaaagtctcaggctggtcaaaaaactacgcagactatgttaatcgtggtttcaaaaacaatgttttcccttttataggctcccgacctgttaatgaaatcaagccattagagcttctatccgtccttcagcgcatggaaaaacgcggggctccggagttagccagtaaagtccgccaacgctgcagtgaagtctttcgatacgctatagtcacaggtcgagctgaatacaatccagccgcagatcttgccagtgcattgcaaggatatgaaaaacatcattatccttttttgagcgcatctgaattgccggaatttttacagaaattatcaaattattcaggtagtttaataactctgctcgcgactcgtttgttgatgctaactggattaagaacagtagagttgtga

SEQ ID NO: 454153 - DNA, 141 bp, Serratia marcescens
atgactaaacgtattgtcgccctggccggcgtcgtcctgctcaccaccctgctgagcgcctgctgcttcggcccgcatggcggcgatggaccgcacgacggaggccacggcggcccgcgtggggactatcgccaccgctaa

SEQ ID NO: 454154 - DNA, 435 bp, Serratia marcescens
atgaataaaatgctgttgctgatgtgtttactgctgccggtggcggcgcaggcggacgtgtctattgatatcaatgtgcccggcgtgtcgctgcatttgggcgatcgggatggtagaggctactactgggacggctatgactggcgtccgccgcagtggtggcatgcgcatcaggggcgtggcattggcgaacgcaacgcgcgcggtgattactgggacggcggccgctggcggccttcggcgccgcatggggaaggacgccgcggcgacaatccgttccacggtgatgcgcatcatgccgacggcgaacgcggccggcacggtgcgccagaacggcagacgtcgtcgcacgagcgccgcgatggtcatgatggcggccgcggcgcgcaacacgacgctcggccgtatccggcgcgaggcgatgaacagcgctga

SEQ ID NO: 454155 - DNA, 384 bp, Serratia marcescens
atgagcaagggctacgtttggggcatcgccagcgtgctgctggtcagcgttgcgcagctgctgatgaagtggggcatgatgcaattgccgccgctgtcgctgagcatgacgctgccgacggcggagagcctgacgccgctgctggcggtggccgccggcgtcgccggctacgggctgtcgatgctgtgctggctgatggcgctgcgcaccctggcgctgagccgcgcctatccgctgctgagcatcagctacgcgctggtgtatctggcggcggtggcgctgccgtgctttaacgaatccgccagcctgccaaaaagcctggggacgctgctgattctgctgggggtatggctgattacgcggcggaaggcgcggcagcgctaa

SEQ ID NO: 454156 - DNA, 753 bp, Serratia marcescens
atgaaaatccaatttgaaaccgactttatcattcgccacgtatttcagcctgtctatactctaggaggtcgactgctggcggtagacattcaaagccgtttcaatagccaggacggcgctctggcgatgccgacggagattggcgttaatttattgcctgccgcgcagaaggccgcgttattttatgagcagctggcgctgatcgaggcctgggcagactggtttattatgcatcaggtgttattaacgattaacgttgacgaggcgctggcgacattactgctgcaggataatgaactgcgtcagcgcctgcggcggcagccgtttattgtgattgaaatcagcgaaagctttccccggctgtcggacgggaaaaacaatgagactatccgccggctcagcgagaatttcacgctgtggctggatgatttcggctccggacaggctacgctgacgccgctgtacgatggcctgttcagctatgtaaaaatagacaaacgcttttactggcggctgttttcccaccctggttccgatacggtgctggattcgctgttaagaaatatcaatttattgtgtaagggcattatcgtcagcggtatagaaaataaaacctattttaaccatctggatcgcgccggtgttttcggcctgcagggtttcttatggccggccgtcgatgcagaacggttggatacgctgcgtataataccgacagaatttattaccgccggtgcgccggataatgaatag

SEQ ID NO: 454157 - DNA, 453 bp, Serratia marcescens
atgtcaactaataatattgtacatcctaatgaactgctggatagggttttcgttctagaggatagattgattgagtataatgaggaatggaagtatttagtgagggctctagagaggttcacaaataaagttaataatgattacgatgggttgtattttaataatgacattgacattgaaaatataaaaaacaaaatctcactatctatcctagatacattccatttctctatagagaaaacggagaggctgaaatcattttcagttacgctctatgaggtagcagaggatgaagagggaaagagaaaagtaaagagtaaaatcgctgattatagatatgagatcggtaatggttggaacaatgaggttgggaagttttcagagcgaccttctaaagctacgggaatcatccccgagttactttctaaactccttgatcacgttggcgactag

SEQ ID NO: 454158 - DNA, 567 bp, Serratia marcescens
atggcgacttattctagcaacgatttccgtccgggtcttaaaatcatgatcgagggcgaaccttacgctgtggaatccagcgagttcgtgaaaccaggtaaaggccaggctttcgcacgcgttaaaatgcgtcgtctgctgaccggcacccgcgtagagaaaaccttcaaatccaccgactcggccgaaggcgcggacgtgatggatatgaacctgacttacctgtacaacgacggtgagttctaccacttcatgaacaacgaaaccttcgagcagctggctgcggatcagaaagccatcggcgacaacgccaagtggctgctggatcaggcagagtgcatcgtgaccctgtgggacggccgtcctatcgccgttaccccgccgaacttcgttgagctggaaatcgttgataccgatccaggcctgaaaggcgataccgcaggcaccggcggcaaacctgccacgctgtctaccggcgccgtggttaaagtgccgttgttcgtacagattggcgaagtgatcaaagttgacactcgctctggcgaatacgtatcacgcgttaagtaa

SEQ ID NO: 454159 - DNA, 1176 bp, Serratia marcescens
atgagagtgataatatgcgccctggggtcctctggcgatgtttacccatgcatcgaaattggcgcgatattaaaagaaagaaaccatgatgtgcatatacttaccaatgaatacttcaaagattacgttgagtctcgcaatctttccttttcagcagtaggcagtaaagaggacttcatccgttcagtacgtgacagccagctatgggagaagaaaacctcattaataaaaatatctgcatacatggctaattatcaggttggtatgtttcattcaatcgagaggttggtaaatgataattgtgtaattattcattctctttgggtattttcagccaaggtggttagcgaaaaatattcgttaaaacgattcccgataagccttaccaacgccaaccttaaactctgcccggggaaatttattagctggttggaaagaaagctcggcacctcattgaacctgaaggctgaactctttaaacgccgcctggtttctccgctgttacaggaggtcatcgcctcgataagaaaatcagagaacctcccagccgataaaaacatctataccgacctggtagataggcgcttgaagcctattattttgtatgagccttggttctacgaaaaaaaaccgcagcacggattttatatggggttcctgttaaataaaaaccggacattagaccacgctccgataatcaaccgctttgtggacaaaaaaacggtggttttcttcaccagttgggcattgtctgatgaagcaggcataaatcatgtcttaagcagtctgaaagatgaaggtttgaaatgtgtactggtcacccccaccctcgacagcatccacgttgaagaaaatgtcatcagaacaccttatcttaatatggatagcatcaaaggatgtctgtttgccattcaccacggcggcatcggcaccagtgcccaactgcttaaaaacggcatacctcagttaatctacccaaaagcctttgatcagttcgaaaacgcaagctctctcgaaagaataggctgtggcgttaaaggcggcgatataaatgcgttgaggcatatgattaaaaagtcggttaccaatgataataactgtgctttttacgcctcgcggctaagtgaagagaacaaagaacgaaacgatgcgctggaacgtttactcatgggttaa

SEQ ID NO: 454160 - DNA, 204 bp, Serratia marcescens
atgaaagaaaatgtgttagcgacgcagaagatgttgggcgtgatggcgacaatgattgctctgtttctggcggtggtcgatggtgccactgtcagcacggtgctgccggctatccgtgataaacttgaccagtcggctctctactcatggatgatgtccgcgtttcagttaccggtagcctcatcggcgggttgtgctgaatag

SEQ ID NO: 454161 - DNA, 489 bp, Serratia marcescens
atgaaatctgttaccgcaatgagtctgttggtcttgatgagcggagtgaacagctatgcaggcgagttaacccactccccggacgggaaaaccctcaactcgacgtttggcgagccgacatttaaacaggtgcttcactatcgtaaaatgtacgataagaaaccgttccctgacgccgaaatctattactacaacaacggcatgtataaaatcatttctcaaggtgaaaaccattacggcgtctatgtcatgcaagggaagttcagcgaccagacctacaccgttaaatttatttctttaccctcctctgactggggaaataaaacggcctatcaccagttaaccttcatccagggcgaaaaagagaacgtatttatccaaaatgccattgtcgataccggcgaggcgattgcccaacaaaacggtacctatacgttgggaaaaaacaccgtggtcaaccccgtcagcactacatgggataaccgctga

SEQ ID NO: 454162 - DNA, 924 bp, Serratia marcescens
atgaatgattggtgcattgacgttcacaaactgaataaacactttggcgccaatcacgcggtgaaggatttttctttacgcattggcaaaggagagatttatggctttctggggccgaacggcagcggcaaaaccacctcgatacgtatgatgtgcggtttgctcacgccggattccggcagcggttcctgcctggggatggacatttttacccagcgcgaagcgattaagcggcgcatcggttatatgacccagcatttttcgatgtggggcagtttaaccatccgggaaaatttattgttcattgcgcgcctgcataatcttgaccggcgtaagcagcgtattgagcgtgtgctgacggagatggggttggcgtcccgccagcatcagctggcgaaggtgctgtccggcggctggaagcaaaggatggcgctggccgcctgtatgctgcacgaacccgaactgctgtttctggatgagccgacggcgggtgtcgatcccaaggcgcgacgtgagttctggcaaacgctgcatcggctgtccgatgccggcatctctattttggtcagcacgcactatatggatgaagcggagcgctgccataaagtggcctacctttcctacggctccctgctggccagcggcgccattgacgagattatccaggcgcaaaatctcaccacgatccaggtgcgcggcagggggctgacggagctggaaagccagctgcaaaccctgcccgagatcgagcagacggtcattttcggcaatgcgctgtatgtgaccgcctgcaacggcgagcggctgcacggtttactgacggcgcggttgcctgcggggtatgagctgtgccgggtgccgacccagcttgaggatgcctttacctacctgatgaagactcgcgatgaaaaaaccaatgattaa

SEQ ID NO: 454163 - DNA, 1692 bp, Serratia marcescens
atggatacaatcggcagggttattgaggagttttttccggggcgggatatttctcctcgccggcgtcagttaattaagtgggtgtttggtgaggagaagattgcccccgtattgcaaaaagccaaaggaaagcaagggcttgattgggttgattcggtggttgatgccttacagttgcgctttgaggcacacagtggcgattacgataacatccccagtcaggggccgctgattgtcattgccaaccatcctacggttatcgatggtttggcattaatgagcacaatttcacgcgtgcgtaaagatgtgaagataattgctaaccatgtattaactttcctgtttccagcaataaaagatatttctatcggcatcagaaatatgcacggcaagatgagtcaccggcaatttaaagagatgagcgaccacctggaaaaagggggcgttttgcttatttgtccggcaggccgattggccggcctgtcgctgagcgggctgcgggaatcggcatggcatccgggttttattcacctggcgcggcgcacccaagcgacgttgttgccggtgcatattcgcggtattaacagcgtgtggtactacatggcagcgcttgcctggcgccctctgtctaatctaatgattttccgagaaatagcccggcaccagggcagcgtgctgcgcatgaaaatctgccggccgatcgccatttcagccctcaaggtggataaggcgctggaggcattggctgccgactgccgggcccatcttttgaacgtcggcacgggtaaaccgggtttggtgtctacgctgccggcgcttgcggttccggagcagcgaagcctgctggctaacgcagtgagtcgctgtgaagtgttgaaaacgctgggtgatggtaagcaggtctatctttaccgccatcagggcgaggcgtattcgcctattttgcaggaactggggcggctgcgtgaagcctcattccgtgctatggagatgggctccggtgaaaagcgtgataatgacgcttacgatctcgactattaccatgtgattctctgggatccgcaggcattggaaattgccggcgcctaccgcattgttcctgcaggtgagcagatcgccagacgcggtgtggaaggtctgtatagctattccctgttccactatacccctcccttaacggacgacgttgccgaaagttttgaggtcggccgcggatttattcagcagcaatatcaaaaaaccaatgcgctggatgccttatggaaaggcattttctgtttttctcaacgctaccccgattataaaaacctgctgggggtattaacgatcccgaaaagttattctgtttcggcacgacgattgattattaatttttaccaatgctatttctccgcgtcgcatccggatagcttaatgatggcagataggctcttcctggatagagaatccgactccccgttttccggtaatgactttcgcgccgactggaagcggttaaatacgctgctggatgaggctgggcatcaactgccgtggccatttaaacagatggcgcgctggttttatcttggcggttcaatgctggttggcttcagagacgaccaacgctttaattctattgctgggttgagtatttgcaaactggcgtcgctaaagaaaagttatcaatcccattatattaaaacggcgtga

SEQ ID NO: 454164 - DNA, 1317 bp, Serratia marcescens
atgagaagtgtgaaaatcagccttgcttggcaaatcttgattgcgttgtttttaggggttgcagttggtgcgatcctgcataaccaaacggaatcccgcgaatggtttgttaataatattcttagccccgccgggaatatttttatcagcctgattaaaatgattgtcgtgccaattgttatttcgacgttggtcgtcggcattgccggcgtcggcgatgcgaagaaactgggccgcatcgggttaaaaaccattctctattttgaggtgattaccaccatcgcaattgtggtcgggctgacgctggcgaatgtgttccaacctggtcacggtatcgatatgtcgacgttgaccactgtggatatttcccagtatgaaaaaaccactgagcaggtgcagagtggctctcacagcctggtgagcaccattttgtcgctgatcccgtccaacgtattcgcatcgatggcgaaaggcgacatgctgccgattatcttcttctcggtgctgttcggtctgggcctctcttctctgccgaaggaaacgaaagagccgctgctgaacgtctttaaagcggtgtctgaaaccatgttcaaagtgacgcatatgattatgcgctatgcgccggtcggggtctttggcctgattgcggtgaccgtcgcgaactttggttttgcctcgttgctgccgctcgccaagctggtgctgctggtgtacgtggctatcgtcttctttgcgctggtggtgctcggaacggtggcgcggatgtgcaaactgcgtatttggacgcttatccgcatcctgaaagacgagcttattctggcctattccaccgccagctcggaaacggtgctgccgcgcattattgaaaaaatggaagcctacggcgcgccgaagtcgatcaccagctttgtggtgccgaccggttactcgtttaacctggatggctctacgctgtaccagagcattgccgccatctttattgcgcagctctacggcattgagttgtcaattggtcaggaaatcgtgctggtgctgacgttgatggtaacgtcaaaaggcattgccggtgtgccgggcgtctccttcgtggtactgctggcgacgctgggcagcgtagggatcccgctggaaggcctggcctttatcgccggcgtcgaccgtattctggatatggcgcgtacggcgctgaacgttgtcggtaatgcgttggccgtgttggtggttgccaagtgggagcgccagttcgaccgcagtaaagcgctggcctatgagaaagaattcctctctggcaaagttaaaacagcaagacaatcttaa

SEQ ID NO: 454165 - DNA, 1419 bp, Serratia marcescens
atgattaactggaagaattcagactctttttacaataatgagcatcaaggatcaggaaagccggttctgttgtttattcacagtgaccaacttagttgctgcaatgaattagattcactcctcgaaaatattaacaaccaggatagtatccttgaaaactatttccctatcagggtatcttcatttaacccttcagagaatgataaaaaactcattaacaatcatatatttgtagcatctcctgttctgcaagtgttaaatcatgatggtagccgtagtcatgagtttagttatgtgcctagacaaacaagacattcaaaaggatattcttatacgcataacgagaatgacggggtatttaaccaagatttagttcgctcgcaattggaaataggtcttgcaaaatatcactttctcaataaaaaccaagataaagcatctgatatggcggaaaaaatcattacgaagaataataatgaccccaacgcctataatcaagccaagattatcatcgataaaaaagaaaatgatggatactcaagctttctagactcgaagataaattatagcgaattgtcaaatgccactgtccgcctgttaaataacctgcgaaatatagaagacagattagtgatgaaagagtggccttacaccgatggcgacggtgattggaaatggtatacagattgtgtacgtgaactctcattccaaatataccaagagttgataacaactgctaataatattgaacttgctgttggaccgcgcaggaaaaataaaaaaacccatctaattttatcaaattggcacaagaactacaggaaattacaatcagatttcattggcgttcctgatgagatgttagatattattgctcttaagcatgagcgtagtttacgagaaaacatcgtccattgcatcctttgtgaaggaagcgcacatggattacagatcctaaatacagttaatgaaaaaaacaaccctgagtgcatcattgattttgaaacccatcaagcacaagtaggtgaagtaactgcagatattggtccatcagcagatcttttcacacactatgaaagcgtccatacaaaaatgatgaaccagctcaagtatattaaggatagcgagctagatattaagtcaaaatggtgggagcccgaagcagttacgcttaagtttaggcttgaccgtcttggatggcatctgcaagaccatatttgcactcacagaaaattattatcagagatgaattttaaacctaaccttgtagatacattctcacaagttatctttgaaggaatggcacaggttgaatgcagctctttaggatttgaaaagcaatgtaaggatgaattttcaagcctaattgccatgataaataagagagcggtcgaattcttagagttctcaaaaaaataa

SEQ ID NO: 454166 - DNA, 1170 bp, Serratia marcescens
atgcaggattggattattcaattttttgatgtgcatgtttcacgtctcggtacccattcgagtaaatgggatcggcctaatcaagataatgtactgccattttcagtagctgacatggatttttattctccccccgcggttataaattctctttctaataacattcgacacggagtatttggttatcattatgtaccagaagactactttaactctatcattgagtggttttctcgaaggcataattacaatattttacgcgaatggcttgtttgtgcttcaggtgtggatgtatctatatctacaataataaagagtatctcatcacaaggtgatgaaataattatccaagagcctgtatacaatatgttcgcctcttgtattgagagttctggaagaaccgccatgattaacaatcttatttatcgtgataataagtattatattgactttgaagaacttgaaattatggcggcgagggaatcatgtaaggcgatgttattctgtagtccacataaccctataggaagagtctggtcagaggatgaaatatctcagttaggtaatatttgtgctaggcatggagtcattgttatctctgatgaaagtcattgtgatataatttgggggagtaataaacatatcccattttcaaaacctacaggaaatatactatgcagttctgtagtctgtttttcacctagcaagtcttttaatatttccggtgttaaacaaggagtgatgataatcagtaatgctcacctcagagaaaaaataaaggattcacttgaaagtgattttgctaacgatataagtatcttcgccatttcatctctaatcgcagcttataatgactcggaatggtggttggaaagtgttaaggattatatttatcgaaactataagttattccgtaaatatatttcccgatacttaccaaagtgtaaagtagtggagctacaaggaacatatctagtttgggtggatattagtaatacgggatttaacagcaatcaaatcctagagctgctgagcaataaggttgggataatcgtaaatagtggttctatttacggtaagtctggggagagttttattagagttaatcttgcatgtaaatacagcatgctcaaagaagccataagaagattgaaatacatggatttttag

SEQ ID NO: 454167 - DNA, 1041 bp, Serratia marcescens
gtgaccggagatatcattgctccagatatccagaccgcagtggacgtcatcacacacccgctcggttggtttgccccggtcgagcaccgcgccgacaccgggcaggttggcgacaaactggccggaaccataagcaacgccttgttcatccggcacgcggaactcttgcggaatatcctgctcggtatagaacatccccggcccgttgatcgccttgccgaggttaatcatcccccagccgtacagcgcatcaatccccggatcgcccatatcggtggcggtagtcttcagcaccgacgccacctgcgcgccggtcatatacgggaagcgctccatcagcaccgcaatgctgccggcaacgtgcggcgcagccatcgaagtaccgctgtacttggcgtagccggtggtcagattgtccggcgtggtgccttcaatcaccgaactgtagaccttcgagcccggcgccgagacgcagaagctggcggtgtagccgcagcgggaagagaaggtgctgatagagtaatcaccggtgccttgcggatcctgcaggctggcgaccgacagccagttcggcgcgatatccggcacaaagtaggccagcccggccatggcatcggggttattcaggttatcgtcattaccggcggcaaagatggtgacgatgccgctgcgcgccgcatcaatcgctccctgataggcgccgcccggcttagtgcccagaatctgtttgatctgttcgaactgtttacgcgcgtcgtcgacggtaaagtgaggataggccgggtcagaaccgccctcggcgaacttatcggtaatgccgatcccccagctgttgttgataattcttgcgccgctggcgatcaacgcatcccagccggccttgtataccgccccgtcgttgccaagaataatgccgtcttccgggcctgggtcaccgttctccgcgctgatgatttgcgcattgaaggccacaccgtgcatttctccgccgtcacggttgccggcggcaataccaccgacgtgcgtaccatgcgaacctaa

SEQ ID NO: 454168 - DNA, 738 bp, Serratia marcescens
ttgtatagcaaagagatgctagaatatatcttgggcaaatacccaatgatttccttaagggaagtgaatgactttagcgaaactattttattagacatccctattaatagattatcaccagcagcaaaaaatggcttcataacgaagcgacaagtgtcaaatattacaaaaaaaattgaatctgaattatcggttaaagtactcgtttcttattcaacatcgcagagtaaattagatatagaagcaggtttaaaagctcttgcaaaagctaatttcaaaggaaagaagattatcgatttagacgtctcatttgaagatattaaaaatgccagcgtatatatattttctatgaatatgtctgatgaggaaaaggaaaaatggggattactagcgggagattattttagcagtctaaatataaagttaaatgcattaatgtatgagcagaagaacaatccagaacctacattaatgatcatgttgagaacaatgaaaatattatatccatgcgatttacccacaatgaaaaaggcattggaagataagggatatcatatagagtcgtcagactggctaaataaaaaactagattcattgagaaagaaaaatctaattataagagatcgtgaaggcacctacagaatgacatatctaggtctagaattagttccggttacaagatctaaacaaagttccgatgtcgatagaattctgtatcttgcaaagaaacacttataa

SEQ ID NO: 454169 - DNA, 525 bp, Serratia marcescens
atgacagcactctatgaggtcgcagaacatctgacgaagctggctaaagctagtcatagaaaaggtgcgcaaacgatagttcttgctgatgcttttgcccgctcagcatttaaccgatactattatgcgtgttttttgtgcataagaacctttgtcagcagtatagaggccaaatggtccaatgttgcacacctcgatgttcctaacttactcagaaacaatgtcaaacaaaaaattgatgcagagttaaagaaaggggaaaaaatcggcattcttacacctggtggatatcagtcaaaaaaaagtatggttcttacatcccttgagatcatggcatctacaatgtcgttagcttatattgtgaggggtatagttgattatgaacctgagataaaaataatgtttaatgaaggtgcattttcaattaatgccacatcagtggctgaagctaaaggatggttaattactataaaaactgaagaagcaaagataaaaagaatcttacaggaggtggggattgtatag

SEQ ID NO: 454170 - DNA, 1860 bp, Serratia marcescens
gtgattttaaataagcttaccgcttcactgtcgccgatagtgaacgtgatgctggcgctgctcgcttttatgcaacagcaacaactgatactggcgttattagcggggctgacgatgccgttttttgcgtcgatgaaaagcgatgaacggcagaatgccccgttctggaaaaggctgattatcgctttttccctgctgtgttttctctctggcacactggctccgataattatcggatcctttcagtggctgtataagaccagactcatcagtgataatacggtactggcgtggtcagtacggattgctttcactgtagcgggttttatttttcatattctgctgcgcagggtattcacgccggagctggacaaaataaagaaaagccttgttaaaaagaccacccttgaacgggaattgcgcactgacgtccgcaccgtaaaatccctgctgccggaaactctgcattataacccgctggattatatcgacctgaataaaggcatcttcactggcatggacagggagaatgaaccgatgtatctcccgttaaaagactggcagaaacaacatgcggatattatcggcaccaccggagccggtaaaggagttgccgctggcattttgctttatcaaagcattctggcgggtgaaggtgtgtttgttatggaccccaaggatgatgaatgggcaccgcatctttaccgcaaagcatgcgaggatgcaggcaaaccctttgccttaattgacctgcgaaaacagcaataccagctaaacctgattgaagatattacgccagatgaactggaagaattgttcgttgccggtttcagcctggcagaaaaagggcaggaatcggacttctatcgtattgatgaccgaaaagccgcccgtatggccgcgcaatttgtcagtgataacccatcggcaactctccgtgatatttataacggtgattacgttcagggtattgccgaaaaaatcaaagcgttctttgggaagattgaggaactggcattactcaatgccattaactcaccagaaggcttttcgcttaagcacatatttgatgagggcggctgctgctatgtagtcggctccatgcgaaacagcaaaattattaccgcccagcgcatgctgctggttcgcctttaccagttagcagaaaggcgcgaccgtgtaacagacgtaccccgccccattgctgtttatctttccgaactgaaataccatttatccaggccagcgctggaaggtttaggcgcggcgcgggataaaggcgtacacatgattatggaccaccagtccatcgccgatttaaaagactgcccggcagatttgaaaggggacgccgttgtcggtgcggtcgttgaaaatgccaaattcaaactggtttaccgggttatggatccggatacggcggaatgggtggcaagaatgtcaggcacgattctggtggatgacgaactccgcaaggctaagacggataatatgctgacagaaaccatcgacagtgagcgcacaatccgccaggccgaacgtttctttattgacagcaatatgatcctgaacctgcccgattttgtcagctttatctttacgacaaaaacgctaccttctgcctcactgatttcgccgataaaggtcagaaagcgtcagctaaaaatcttttcggtttcccctgatattgccgcaacggcagtcccggtgaagatcatgcttgattttagcgacgatgataaaccttccgcaccggaggtgacgacatcgcacccggatcttttcttcggtgaaagcgaagtaaaaccagtaaagccgaaacatgatgatgaagaacacctgtccccgctggatttttaa

SEQ ID NO: 454171 - DNA, 294 bp, Serratia marcescens
atgaaaaaagaaaataatcgcactgacattaaatactcgatgactgagtggttaactatacctgaagccatacaactggctcaacacgaattgaagtttagattaacaaaaagtgatatctacaagaatgcgctgagaggaaacatcatcctttccatttattttcagtcacctattacattaagaaaaattcaaaaagtaaaaaataaattaaaatttagacctatagaaaactcattaatctcccgcctttgcgccctcgaaaaaaaagctttatcgaagaaaacaatctga

SEQ ID NO: 454172 - DNA, 135 bp, Serratia marcescens
atgatgagaaatgccattgccaaggcgattgaagaaaaggacatgaaagacaactttgtttatagcatgtacaacaccatacgatatatttttcttcgcaaggatcgccacctctgcgccaggtatgttgagtaa

SEQ ID NO: 454173 - DNA, 168 bp, Serratia marcescens; identical to SEQ ID NO: 267071

SEQ ID NO: 454174 - DNA, 894 bp, Serratia marcescens
atgctggataaacttaccggaatgcgggccttcgttgttgtggttcagacaggctcttttgttgcggccgcagaccggctcgatatgtcgcctcagatggtggcccgccatatcgccacacttgagaagcagcttgaaacgcgcctgcttaaccgaacgacgcgtaggcaaagcctgacgccggcaggctcgctgtactacaggcgttgtgaaacaattttacaagccatcaacagtgcagaacgggaagcaagcagttcgagtgcgattcttgcaggtacgctacggctgaatgcgccggtaacattcggccgttatgtcttagtggattttttgagcatatttcttgagcgttatccgcaaatgcgtattgaacttattctttctgatgacgttattaatcctgcttcagaagattttgacctggtgatacgcatcggcgagcttgataagaaactcagacttgcggcaaaaccgttgcctgcgtaccgatttattgcatgcgctgctcctcaatacctggcaaagtacggtcatccagaacaaccttctgatctgaaacatcatgagtgtctggtttttgcaccttggtctgcgggattaagccattactggcctttttccagcagtgagggatatgcggaagtgatggtaaactctcgcttggctattaacgactggggagcaatccttgaggcggcattaagaggtactggcttgctatttggttatgaaaagggacttgaacgatttattaaaatgggaaaactcgttcctgttctggaagattttaatattccccctcgggaaatgcatttattgtatgacccttctcgggctaacgaaaaccggtataaagtttttattgacgaattgtatgaacatcttagctaa

SEQ ID NO: 454175 - DNA, 330 bp, Serratia marcescens
atgcacatttatattgtcagaatggaccatccggacggcaccgggtggaatacctttgtgcgcgagcatgtgatttatctgaaggggctgatagaacagggcaaactgttagcgtccggtccactcaaaaacacgccgctgcgggcgggatttcttattttcagggctgagacgcgcgatgaagtccagtccatgattggtgcggacccttttgcacgtgaaggccttattgcccaccttgatatccagcaatgggaccctctgttcgggcagttcagcagttactcaagccataatgcaaccggggatttgaaggatttaattgattaa

SEQ ID NO: 454176 - DNA, 558 bp, Serratia marcescens
atgcatgacagcctgcctgcggaaaaagcgtaccgtattcttgaagctggtcccgttattctggtgtccaccagggggacagatggccggacgaatctgatgaccgcaggtttccacatgatgatgcagcatgccccaccgctggtcggtgtgattatcggtccctgggattacagctatcaggcgctgtcagatagcggggaatgtgttctggctgtaccgccagccgggatggcaaaggccgttgtggacatcggtaattgctcgggagaaacagacgacaaatttgcgcgtttcggcctgacgcccattgccgcgcaatcggtcagtgcgcctctggtagatgaatgcctggctaacctggagtgcagagtggtggatgaccgacaggtgcggcgctataacctgtgggtgctggaagttcagcggatttggcttgacagcgcatggcaggaactgcgtctgctccaccatcagggcgatggccgtttcagtgtcgacggagagacgcttgacctcagtgacaggatggtaaaatggcgcgacctgatggattga

SEQ ID NO: 454177 - DNA, 858 bp, Serratia marcescens
atgcaacaacaaacctcccctgcaaaagtctggtttatcaccggcgctgctcgtggtattggcctttcgctggcacgccagttactggcgcaaggcgatgtcgtagccgcaacctcccgcaccctgaccagtctgcgtcaggcattcggcgacgataacgcgcgactgctggcgctggaggtggacctggtgaacgaagccagcgttcaaaaagccatcgacagcaccattgccgccttcgggcgcattgactgtgtggtcaacaacgcaggctacggccagcagggcaccattgaagcattaaccgacagcgaattgcgtcgcaatttcgatgttaacgtgtttgctcccctgcatgtactgcgccatgccctgccgcatatgcgtacgcggcgcagtggccatatcttcaacgtggcgtcgatcgtgggctttcagggcggttacgcgggctggggcagctatgtcgccagcaaattcgcactggctggtctgaccgaaaccctggcggccgaactggccgagctgaacatcagagccacagtggtttatcctggaccggtgcgcaccgggttcctgtcgaaagagacgctggtcgtggcccagcgcacaatcgctgactataccgaagctcaggcctcgctggacctccatctgaacggtctggacggcaaacaggctggcaatcctgataaagtcgcttctctgatactgcaggcggcctttgctgacgcccctcccgtgcatctttttgctggtaagattgccaacaccctcgctgaacaaaaaatgcatgcagtgagtcaggaccttgatgtctggcgaagcgcgtcagacgccacggattttgaagagtaa

SEQ ID NO: 454178 - DNA, 768 bp, Serratia marcescens
atgtcagagtcaggatctttttccagggctatgccctttgcaggccgtgttgcgatcgtcaccggtgccgccagcggtatcggcctggcgaccgtcgaactgttgcaccgccagggcgcacgtatcgtcgcagttggccggggggataatgtcaatgcgcttgtacgtgaaggtattgtgcccgttgtcgccgacgtgactcaggaagccagtgcggaactggccgtgcggactgcaacagaacagttcggtcgcctcgacgtcttaatcaacaacgctggcatcatcatcaaccagccggtggcagaaatgaccctcagtgaatggaaccaggtcatggctgttaatgccacgggggcatttcttttctcaagggaagccatgcgcccaatgatggcggcaaaatcgggtgcaatcgttaatattggttcttacgcctgttatcagtcttttcccggtatcgccgcctatgcagcctccaagggggcgcttgcacagttaacccgtacactcgcgctggaagctatcactcacggtattcgtgttaatgcagtcggctccggagatgcggtgacaaacatcacgaatacaatccagcccgacgggcaggcatatctggcagagcatggtcgtaaagcgccggttggccgtgcagcccaccccgatgaaatcgcagaagtcgccgcctttctggcgtcagaccgggccagttacattgtcggcgcagtggttatggccgacggtggcatgagtgtcgccattcagtga

SEQ ID NO: 454179 - DNA, 744 bp, Serratia marcescens
atgaaagcagtggtatcagaaacgtctaaagtggtcattcttaccggggccagtagtggtataggtgaggccacagcccgtcatctttccaggaaagggcatcatttgtttatcggtgccaggcgtatggaaaagctgaccgcactggcgacagagttgcgggcaaaggggggtaatgttgatgccatggcaattgacgtcacgcgaccagaagatttgcaacgcatcgctgccagggcgctggagaagcacggacgcattgacgttctcataaataacgctggcgttatgccactctcaccgctggcagcgttgaaggtcgaagaatggaaccgcatgctggatgtcaatgtacggggcgttctgcacggaatagccgccgtcctgccgatcatgcaggagcagggtgatggtcacatcattaatattgcctccacaggcgcgtatacggtctcgtccacagccgctgtctattgcgccagcaagtttgccgtgcgcgctatttctgacggactgcgacaggagaccgacgcgatccgggtgacgctggtcagcccgggggtggtcgagtcagaacttgccgatcatattacggacgaaacagcccgggctgccatgcgcgaattccggcgcatcgccttacctccggagcccgtggcgcaggcaatcgcctatgccattgaacaacccgctggcgttgatatcagcgaactcatcgtccgccctgtggccagtcctcattaa

SEQ ID NO: 454180 - DNA, 945 bp, Serratia marcescens
atgccagaaagattgccctccatatctcaacagtccgaaatggcggctatgatttgccagctcgccccacatgaaggtcacacccgtacgttgctggatggcgtgcgtctgatgcgtgctgacggcgcactggggcgtacccccgtgttgtacgaaccaggcattgttattgtctgtcaggggcacaaaagaggttacctggctgacagggtttaccactacgacccgttgcactacctggtgctgtcagtacctctgccattttcaagcgagacagatgccagtccggcagagcctttgcttgctgtgtctattcgtctggatatgacagcggtggcagacctggttatggctgtcgatcaccatgccactgcatcaggttcacccgttggcattgtctccacaccacttgacgacacgctggcagatacgacagttcgtcttctgaaggtattattttcaccacttgaagcgcgggttctggggccggggattgtgcgagagctgatttttcgtgttctgctgggtgaacagggcggagccattcgtgctgcgctggcctgtcatggcaactttggacgtattgcgcgtacgttacggcgtatccacctcgattacgcccggccactggatgtggcttcacttgcgcacgaagctggcctgagcgtaccggcttttcatgcgcatttcaaagccgttgcggcgacttctcccatccagtacatcaagtcagtgcgtcttcatcaggcgcgactgatgatgatacgggacaacgttactgcagcaggggcagcagcgcgggtcggctacgaaagtgcgtcgcagttcaatcgggagttcaaaagactgtttggtcgcagccccggagaggagacgcgcaaaatgcgcacagcattcgcactgatggaacctgcgcaactcgaagcagcgacgtcgacacactaa

SEQ ID NO: 454181 - DNA, 375 bp, Serratia marcescens
atgtcattcgataatgtgtcagaacagttatgggtctgcctcgtcattgcactgatgtccagttgcatttcaatcaccgtcacgcagcaggaaatgtttcgcccgttgcgtgaatggatggtcaaaaaaaatgccatggcaggctacctgttcagttgtttttattgttttagtcactgggtggtttttgccggtgttgcaatttacaggcccgttcttgttcattcaggattcttgttaattgaccttgcggttacggcattctttaccatcggtttaacggccatgttcagcgggatcattctgaaagtgatgagaaacgctattgccaaggcgattgaagaaaaagaaatgaaagacaagctgggtttgtaa

SEQ ID NO: 454182 - DNA, 420 bp, Serratia marcescens
atgagaaaagaccaccggctgtcccgtgcattacacgtgctgatacatatggataaaatccgcgatcccgttacctcggaagatatagcattgatgatcaatacgaatccggtcgtggtcagacgccttttccaggggctcaaacaggcgggtatcattcattctgaaaaagggcatggaggtggctggacactccagaaacctctcggagacatcactctccttcaggttttccacgctattggcagcactgaacttttttcaataggctgggcgactgagcatgacaaatgccagatagaggatgcagttaacaatgaaataagtgatacgcttgaagaggcgagacgtctgattacaaaccgctttgctgaacttacccttgataagcttgtgccggaagtccttaaacataaataa

SEQ ID NO: 454183 - DNA, 1545 bp, Serratia marcescens
atggtgatttatggcattctgctggcaattacgctgttactgggcaggtctgtacctggggggtttatccctgctcaggataaagaataccttatcagttttgtgcagcttcccgctggcgcatcattgtccagaacagaccgggtactggaaaaaatgaatgaaatagcacgaagtgagccaggggtatcttccacatcttcttatgctggattgtctgtaaacggcaccaccacaagccctagttccggtctgacatttgtcctcctcaagccttttgagcaacggcctggcatcagcgcagatgatgttgccgcctctctgaatgccagatatcagtcacttcctggcgcagattttgcggctgttttcccggtaccacccgttatgggactgggctctctggggggattcaaattgcagcttgaagacagaggaaatatcggttatgacggaatggccgaagcacttcgacgctttcaggcagaagcagctaaatcacctgtgctgacgccacttttttcaacataccagaataattttccacaaattaatgtcgatattgaccgtaatcgcgccaaacaacttggggtgaacatcagtgatatcaccgagacattacaatcctatcttggctcatattatataaatgatttcaatataataggtcgtgtatatcaggtaagaatgcaggccgacgcagagttcagggcgaccccggaggatatactgaaacttcagacccgaaatgccgatggcaatatggtaccgctgtctgccatagcccgtattgagccgacacacggtcctgagctggttacccgttataacggttttacagcggtcgatcttagtggcgctcctgctccaggctattcttcaagtcaggcgatggaagagattgaacgtatagcgatgaaaacacttccacccggcgtagagtatgagtggacagacctgacctaccagcaaattcttgcaggcaacagtgccgtctggatttttccactctgtgtattcctggtattcctggtactggctgcccagtatgaaagccttacgctccctttggctgtcattatgattgtcccaatgagtatcctttctgcacttaccggggtgtggctgactcatggggacaataatatctttacgcaaattggatttatcgtcctggtcgggctcgcatctaaaaatgccattcttatcgttgaatttgcccgtgaacttgagctttcaggtaagtctgcctgtaacgcagtgaaggaagcatgccgtctcaggctgcgtcctattctgatgacctcactggctttcatcatgggtgtaatccccctgatggtatcgcatggagcaggcgctgagatgcgtcaggctatcgggatatcggtattctctggaatgcttggcgtcaccctttttggcttgtttatgacccccgtgttctacctgttagcccgacaaatatcagggaaaccactgcactcggccactttaccggacgcgcctgaggaacggccggtaacagaacaggcttcagactaa

SEQ ID NO: 454184 - DNA, 831 bp, Serratia marcescens
atgaaaattaaatcttgttttttctgtaagagatcctcaccggaaataaaactaacgaaagaacacatcctcccgaagtggatggaaagaaaaataaagcatgaaaaagaaatctatttcctaggtaaccaccgggaaagaccacttggaaaactagaagatgaaaccgtaagaaatatgtcaggtttagggccattctcactaactgtaagtgatgtttgcggcgattgtaacaatggttggcttagtacattggaaagtgaagccaaaccgattctagattacctaataaacgggaggaattattcattaacgagaaaggatacgtgtataatttcacgatgggcaataaaaacatctatggttagatcattaactgacaagggaataaatacaatcccaccaagtcatatagaagcaatagtcaatggattgatacctgataacacaatggtatatattggttgttacacaaataaaaatcgatacttcacaagacatcaaagatttatgtcagctgataacgatagaatttacataacgacactctgtattaactcattatttatacaggtaattggtgcggagacggataaattacacaacacttatgaccacaattacttagagagtttggagatatcacacgggaagattcaccctctacatccattaaagcatggtggcataaaatggccattcaaagaaaaattaaaaacaggaccaaatgaaacaagtggtctaattgggaacaaatatttcaacgccccattattatatgaagacacctacaagatagatgatgggttatatgggatagactttcgataa

SEQ ID NO: 454185 - DNA, 288 bp, Serratia marcescens
atggctaatttacgcaaagaggcccgcggccgggattgtcagatccgtatccccggcgtttgcaacttcaacccagaaacgactgtgctggcgcattaccgcatggccggtaccagcggcacggcaatcaagccagacgatgcgcagggcgcctggagctgcagcttatgccacgacgcgatcgacggcagaacgaaaacagaatacacgcgcgatgacctgcggctgatgcatgccgagggggtattccgcacgcaggcaattttaagaggtgagggaaaattatga

SEQ ID NO: 454186 - DNA, 243 bp, Serratia marcescens
atgaataaaattaccgtcaaagattgtgagataattcttaatggtagtgacaataaacggaatagttacatgaagttattttttgtttggttattaatttgcagcccattgctgctgctagggaatatcctcggcttggcgtcagtagcgctctggctcgctaacacagcaatcatgacgttgatcgcgcggtatgtgatgacacgtaaacgtggtgacgaggacagttgggacgggtactga

SEQ ID NO: 454187 - DNA, 384 bp, Serratia marcescens
atgattttcacaaatcagcgtctgcgcgaaatagcagaagatggatttcttgcacatggtgaaggaaagtcgcttgcacaagctttgttatctgccgatttgttagctattaaccgcgataaacgcatcgcggagctggagcgcgccaacgcatcgcaggacgaccacatcaatcagcagcaggacagaatggcattgctggaaaagaaagtcgtggatttgagaggaacattgcgagcggcactaaagcgcctggctacgccggtgcggttgccggctggcgattatcccgatggtgatatcgactgtccgctggtaatcagtgttgatgaggcaatggccgctatccgcgcagcagggttcaatgtcgagggggaagcatga

SEQ ID NO: 454188 - DNA, 246 bp, Serratia marcescens
gtgagcagacaaacaaaaattgagaaatgctatcgcaaaattaacgacgctttcagccgaaagttgggcgacgacttcagggcaaaatttcagcgggagatagaaacgaggttttctattttctccatgtcactggtttcaagtcccactgacggtaaagacttcacccccgaacagcatgcgtgggttgatgcgtattcaagcggatatctggcggcaatgcgtcaggttacggaggaattatga

SEQ ID NO: 454189 - DNA, 246 bp, Serratia marcescens
atggccgggcaatcggattacttaccgcccggcctgccattcaatcgaggagcctggacgcaggaacaacgcgacttggagcagtacgacctgcgcgcctgcggcctgatccgtgacctgtacgcacggaaaatcacccgcacaaaagtgctggtagcgattgaagaagcaccggagcaataccgcgaacatttcagagcgcgcctgaattactggcgtgagcgtaaagacgggataaagacatga

SEQ ID NO: 454190 - DNA, 483 bp, Serratia marcescens
atgacgactacagatttgttctacgcaaaatcctcggcagttatcgatgatggctgcgaccacacttcgcttatcatttggcgtatgaatgccggtgcccgggcgcgtacccgttctgcgttcgttctgccgccggtaccggtgcaggtaatcaaaccacgccacgaaaaagccaagccagccaaaaaagatcggacggttcgcgccaaggtgaaaccggtaaaaacgggctttccagcgcgaaatcttgccgctgtcatgctcggtaaaaccctcacgtttaacggcgtgatgatggcccttgataaacattacccggggcatggactgacgaaacggaacctgcagacgcgcctaacgcagatgctcaactccccgcacgtcgatatcgttcggcacgaaaaaccaacccctgaatacacgctgaaaaaagtagacgggtgctattacgccaattctgagaagtcatcagggagcgtctga

SEQ ID NO: 454191 - DNA, 1374 bp, Serratia marcescens
atgacacagcaggaaatggaagccgtggtgctgagcggcctgctgatcggtggcgccacgccggacgcgatggacgtgatcgcgaccatgcctgaagaggctttcagtgtcaggtttcaccgtgacacataccgggaaatcaaaaagcaggcgctgaccgatggcgtgatcgacgtcgtgctgatcagcgaaaagttgggtggcagcagcctgtcgtcgctggttgagatcagccgtgcacctggcgcactggccaacctgaaaggctttgccaacctggccgtcaaaggctggcgtagcagggtgatggccgaactgctgcaggaaggggctgacgctatccgcggcgcccggaaccaagagcaacgcgacgaggctgtgcaggcatcagtcgcgaagctgatcgagatgactgctgacgctggtggtgtggtgccggtacaccttggcgagctgctgggtggttacatggatctgctggataagcgcatgaccggtgatgcggaaacccggaacctgctgagcggcatcgaggagcttgacgcgataaccggtggtttcaacccgcaggatctcgttgtgattgccggccgcccgggcatgggtaaaacagaatttgcgctgaaagttgtcgagggagcgacccggagcggcggtggcgcactgattttcagcatggagatggccgccctgcaaatggttgaacgttccgtcgccggtgccgggaaccttcctgtttcaaagctgcgtaatccgctcgagatgtgcgacgaagactggggccgtatcagcagcgcgctggaaacgctgaacgagcgcgatatctggatcgtcgatgccacggatctgaccgttgaccagatacaggcaatcgcggaaacgcacaaacgtcggcacccgcacttgtccatggtcatggtcgattacctcgggctgatcaaaaagcccaaggcggagcgtaacgacctggccgtcgggcacatatcacgcagcctgaaaacgatggcgatgcgcacccgcacgccgtgtttcgcactcagccagctgtcacgcaaagtcgatgaacgtccggcaggaaaccggcggccgattatgtccgacctgcgtgattccggctctattgagcaggacgcagacagtatcctcatgctgtaccgggagggcgtttacaaccccgacagcccggcagcacgcttcgcagaagtcatcgtcggcaaaaaccgttttggcgagaacggcaccgtttaccaagagttcaaaaacggccacttcctgccggttgatcaagtcagtgcacaggaggttaccagaatggctcaggaggctcaaaacccacaacccaagcaaagaccttactcaagcaagaaattttaa

SEQ ID NO: 454192 - DNA, 720 bp, Serratia marcescens
atgagcatggaaatgatggttcgggcgatgaaaatcaaagtgggaaacccgctgcgcaagctggtgctgctaaagctggctgataacgccaacgatcagggggagtgctggccagcagttcagtacatcgccgaacagtgtgagatctccaaacgctccgcccaaaatcacattcagcaactggtgaaagatggcttattgcgcatcgaagagcgcaaagcagagaacggccttaatcgctcaaatatctatcacttagtgctgggggagtatggtgcaaatgctgcaccctatggtgcaaatcctgcacccatgggtgcatctgctgcaggggggagggtgcaggagctgcacccagaaccagtcagtttagaaccagtcaatgaacctataccccctaacccccagggggacgacgctgacgcgccggctgagccgccaaaaattaaataccaggacgtggctgacgcctacaacgaaatcctcggtgagcgactgccgaaggttcaggagctgaacgacaagcgcaagcggcaaatcaagcgcctgctgggcgaactgcatgaaccgacactcgaggtcgtacgggcgtactttgagacgttccgggattctgcggggccgttttattttggcgacaacaaccgcgcctggcgcgccgggtttgattacctgttgcgttctgacgtgctgacaaaaacccgtgagggtgcgttatga

SEQ ID NO: 454193 - DNA, 207 bp, Serratia marcescens
atgaccgatcacatcacataccggaacggctggcgcctgaacggggcgccggcagacatcgcggatattcgtccgatcttcgaagagagaaaggcgagcatctgggagcagtacgagcagcacaaggcagagctgcgtgacgaaaatctatcgccggagcagtaccaggatgcgtgccgccagcttgcggattcactggggatctga

SEQ ID NO: 454194 - DNA, 279 bp, Serratia marcescens
atggatatcgaaacccacaacctgcgcgccgagctggcgctctacgaacaacacgacaccgccgcgcagcgcgaccagttcgaggctgcggcaacgcacggatactccgacgaggcgatcgaggtgtttacgtacatcgacggcgaagatgcggacacccgtgaccggcttctgatggcggtaatgatggcaacgcccgacaccctgccgcagcgccagcgtgagttatacagctggtattgcgacaacgtgaaagccgtattacgcgataaattttaa

SEQ ID NO: 454195 - DNA, 2154 bp, Serratia marcescens
atgccaacttatatctcactttttgaaccaaagaaaaaagccctggcggccggcgccgtgccgcttgttattgcactggatgcaccgagcaagcgtgcggctgaaagcatcgcgctcggtaagctgttcgaagcgtacccggaaggaggcgacagcttcctctccccaaaaaccgtagaggatcaacctggttcccctcgcccagccattggccagttcgatgaacagtttgcggccgagaacgagttcgacggtaaggcgtggtcaccgaaagcgcccgaaccggagccagaagcgcagaccggtgcggtagatttgatgtctcaaccggcgaacgttcggatcgccgcggtagtgatgtatggcgacggtgaaatcgataacagccagctgtcgcttgtagtcgatatgctcaatgatgacgaaacgcctgatgatacgggtatgcgagctgtaatcgatggcctggcatcggtgacgcaagtcggtgccatgtacccatctgcggtgtataagctggtttccgcgctgttccagcaggctggcgaatccatgccgtcacaggaggatgtggcagcgttcgcgcactcctgggtaaccaaccctttcgatcgtgaaaacctgaagctgtccggcaccggcgctgctacaaacgcagctgccgaaaacgatgcaccagcagaatccgtgcacgatgatgaacgagggtatccgcacacgttagacagcctcgattacgaaatctctgcagccctgctgccgatggacttcgatatctttaacattccagtcgcgatccatcgccgagcaaaagaggttgttgccaagaaggaaagcccatggaaagaatggtcggcaatgctgcgtaaaaccactggagttttggagtttagccgcgcgcaaatcttcgacctgattcgttcggctaatcctgacctgcaccagttcccgacaagccacagggaatacatcaacgccaatctcggccgccagtcagcccccaagggcaaagccaaagaaccgcaggtcgcttctctgggagatgggaaatttaccattgacggcctgaccggtgagcagccggaaaccgcctcaaatcaagtcgaaaaaacggaagtggatcagcagcaggaagttaacgacgccacggcggagcaggccaagcagcagctggatcagatgggctatggcgtttacgccagcgcgccagaggataaatccccggctctgcagcaggctgaagaaaacgcagagcgcgcagaggaactggcaaagcagctaaaggccgacgatttccagcagcgcgctgcacaggttgagcaagtgatcgccgagcagccagcagaagcccagcagaatctcgacatctggaaacgcgtcatgcgcacagatcctcgatacacgaagccgatcgagggggccggttatgtcggtaccagcatcaacagcgaatacatgtttatgcgcgcaaccgaaattttcggccctatcggcacgggctggggatttgacattgtcgaagagaagatgatcgccggcgcaccaatgagcgaggcggtattcgaaggcgggaaaattattggtaaccgcattttgcgcgacgccgacggctctatcttgttcgagcagaaccatagcctgcaggtcgaattttggtatgtcctgaacggaaccaaaggccgcgttacagcttatggcgccacgccgtacatgtacaaaacgaggcgcggttttatggctgacagtgaagtgatgaaaaagagcctcaccgatgcgatcaaaaagtcactttccatgctgggcttctctgccgatgtattcctcggctggcatgacctgcctgaatatcgggaagagaacgcaacggagttcgctatcaagaacgccagcgacaaagccgaagacgtcacgcggctgcgcgaagagctggacgagaaactgtctgcagtggccgacaccattagcacggccgttaccgtcaatgaagccagcaaagtttatagctcgatcgctcgcgaagtggaaacacaccgcaaagcagccgaggccaaaggcgatacagaacacgctaaatacctggccagccgtctgcgccgccttaccgttctgaaagaagagcgcatcgccacactgtcagaggagaaagcatcatga

SEQ ID NO: 454196 - DNA, 501 bp, Serratia marcescens
atgagcgtcaacgccattgcattagcatccgattacgccaaattacaggcgctggttgaaacctctgacgagctgacgccggagatgatcgctgacaccctcgagggcatcgagggtgcactgagcgacaagctggacgccgcctttatccacgtgcgcaatatcgaagggcaagccaccatattggcagaggaaataaaacgcctggccgaacgtaagaagtcattcgagaaccgtgcaaaatcgatccgcaagtacgtgctgacgtgcctgctagccagcggccagggcaccataaaaaccacggccaatacgttcactgcgcgcaaaggctccgccaatgtggtagtcgacaatgccgacctgctaccggatgagctggtgacggtgcaaacggtagtggcgccagacaagaaagccatcaaagaagcgatcgagaacggcgtggaagttaaaggcgcgcatatcgaaatcggcgaaccgtctctgcaggttcggtaa

SEQ ID NO: 454197 - DNA, 177 bp, Serratia marcescens
atgctgagaatgtatctggccaagggtgacgccgtgcacgtgacattccccgacggctcaaccggaattattgaagtagaaagccgcagcgaattggcgtttcactttccccagaaagtgcgcctggcgcgggaaaagcaggcgttcaaaaagttgattaacgataatcagaaataa

SEQ ID NO: 454198 - DNA, 201 bp, Serratia marcescens
atgcagcggtggcaaccaggaattatcctgctttctgatttcgatctaaaaattggccgtctctcgtccagcgtgcgcaaaacaacgctgaccgatgcagacattaaacgggcttgtcgtgtgaccgacgacagcatagccaagatgataaaaccgaggaaagaccatgcccaacaacccgatcccaagggggtggaataa

SEQ ID NO: 454199 - DNA, 333 bp, Serratia marcescens
atgcccaacaacccgatcccaagggggtggaataatcaccgccccgctgactgtggcaaagaaaaactgctcactttgaaagagtggtgcgacggcacgtacgagagctacaaaccgaatatccagacactctggcgctgggcgcgcaacggcaatttctacccaccagcggagaagcacggcagtcgttacatgctgaagcccggcacgatctacatcaagccaaacgatccgtcgttgggcaagaaaattaaggaagcgcagagcgccgcgccagcgcgcgaggcgtttatggagaaagtgatcaatgacacggcgaaaaggaaggtatga

SEQ ID NO: 454200 - DNA, 1056 bp, Serratia marcescens
atgcaattgcctaaaaatctgacttatcgccaaaaaagcaagtcattctactggcggaatccgatcaccaagaaagagatttcaatgggggcgatatcccgccgcgatgcaatcgcacaggcgatcgaagccaaccactacatcgatcagaactactcaccaacactgctgctggagaagattaaaggcacccacgaatacacgctaaacaactggttggagcggtactacattctattcgaacgtaggaatctatcagctaaaacgtgcagattccgccgtcagcagtttgccgtcatcagcgaaaaaatgggcagcatgatcctgtcaaaaatcaccactcggcatatcgcagagtttcttgaaatatgggtaaggcaggagaaaaagacaatggcggcagcgatgaggacagtgctatctgacatcttccgagaagctatcgttgaaggccatatcgaaagcaacccggtcactccaacgagatcggccaaaccggttataaagagggaaaggctggagctaaagcaatacattccaatacgtgaagcagccgacaccctgccggcatggctctcattggcaatggatctcgcacttgtcaccggccagcgacgtgcagacatcgcaaaaatgaggtttgatcatgtcgtgaatggccgtttgctgatcgagcaagacaaaacaggggcaatgatcgcccttcccctgaaccttgagctgcaggccgttggcttacaattgggagcagtgattgaccgttgccgccagatcagcaagacagattacatgattagcgccggcatccgcaaaaacagccctgacggggcgataagcctaaatagcctgactggtaaatttgctatagcacggaaattgacgggaatagagtttgaagccagccctccaccattccacgagatccgcagcttgtctggccggctttatgagaaggaaaaagggaaggattttgcacagaaattgctggggcataaatcgggggttatgacagaaaaataccttgatgcgcgtcggaaagaatacgttatgctttaa

SEQ ID NO: 454201 - DNA, 600 bp, Serratia marcescens
atgggatttctgggatttatcagccaacgggcctgtcggcgctggcaagacgcgtcgccgtttctgccggcgttcagcttttatgaaagacaccaatcggcgccgatcgacgccacgccgcaggccattattcacgcggtgcagacgctggacatgatggaggatccgccgatccggcgcctgatttcgctgcgccagctgccggagcggctgcgccggcgcgcggcgcccgtgcgccccttcggctttgacagctttaccccgctgcatcaggacagtcacgagctatcgctcgggctggtcggccgtttctggcggccgaccatggcactgccgaggccggaggacgccagacaatttcttcagtttgccgaccctgccgctgccaagctggtgctgcgctttaaggtgattaacgacccgtccggccaaacgcgtctgcgtaccgaaacctttatctactgccccacgccgcaggtgaaagcgcgtctggcctgctactggctgctgatccgcccggccagcggctggatccgacgccgcaccctaagcgcggtccggcgtaagctggcggcaaacgcctcatcgttccagccgtag

SEQ ID NO: 454202 - DNA, 1512 bp, Serratia marcescens
atggctaggctcgcaccatacatcccccttgtgcaggctggctccatgacagtagaagcctttaagctcagggttaagggattgcgtgaccttacgcgccgtgaccttgatactttcctgctccgccacttggagggggatatctctgaagctgagcgcattcctcagattgccaaggcgatgagagacatcccaacagttagccaagaagaagaaatcagcgccatagaatcagagattgaatcacgccaaaaacgcttgtttgatggtgatattttcagtgagcagctgatcaaagagtctctacaggctcagggttttgatgtctccgctatggagcatgaaattagccttgccgggacagactacgatatgaggcagttgcttctaaagcaggcttataaggctttttatacaggtgatattgttggctatagggggctattgactgagataaaaaaacctctcaagcaaggctctagcaagcttaaatctgacattcctaagcctcctaagctctcagccgctgatagcaacgatgattcagacttccctaccatcactgaggcttggaatctatacagaaaggagaaaggtttaaaatggcgagcgcctgttgagagagagaatcagaaagctatagaccttcttttgcatattgtgggggatgtcccagtcaatcaggtaaccaaacagaacatcagggacgctttgcagattgttgagaaccttcctcgaagaaccatagccccatacatcaacatgacgctagaggaatgcatcgccgccgatatcccagaagaggatttaatctcaagcgagaacgctaaaaaatacctcaagatatggcgcagcctcttcaaggtttatctggttgataaaaaagacattctggagaagtccccaacagatggcatcactttcaccgtcaagcaaaatcgtggtgggtcatattctcaaaaagagattgagcgcattaagagccttcttctcgccttccctgatggtgattggcgtcgtgattattttctaacgcttatttatacaggcgcacggcgtggagagattgccaacatctgcaaggagcacatccggaaggatgatgagacaggccgctattacatctttgtagagggtggcaaaacagagcacgcacagcggcagataccaatatctaagcatatagagggaatactccgcctacgtgcagacaaaacaccagcaggagccgcaatctttggagacctccccacccatgagactattctcaagatgtggttggaaataatgaaacaggccgatactcctagttatgacgagttcggactcaagcgccgcatccatagcctgcgccatacatttataagcacagctatcgcagcgacaggcaacactaccttagtgcaattcgtagtaggtcatagccgtacccagtcattaggaataaccgccagatatacccacagacccccgcttaaggagttgctgtgtgtggtggactgcctgccatga

SEQ ID NO: 454203 - DNA, 180 bp, Serratia marcescens
atggcaatcataaaaatcatcgacagcggtgataacgttttgacgctccccttggatgcgttgaatataaaacgaatcgctgagcatcttggtgttaaggttccgaccttccatagttgggttaagagcctaggtctgacaggagctatcctgaaagccaagcagcagaaagctgattga

SEQ ID NO: 454204 - DNA, 1023 bp, Serratia marcescens
atggctaaagaatataccattcataacgtaaaaccattcgaacgtctgggcgcaggacgcaacctaatcactgcgcttggcttctttgcacctgaggcatctgcggactttcgtatctctcttgaccatattgtctgcgatgaagctgacccacaaaacgtaaacgagcgtttcaactacgcggactataacgtcaaggcagctcagaagttctctaacttctccttctccttgccgcacgttgtagaaaaaggcggggttaccggtgccgatgtgttgggtgttcgtcgttttggtggccgtgaagatgagcaggctgtcattggtgacctcatcgccaccaaacagatcgagcagtaccagcgccaccaacgaactgtagaactccagcaggctcgctccctgtttagtaacaccgtagatttgggtgttgagggtgtgctgggtgtgctggatgtggctgcggagctgggcatcgctcaaggcacctcaaccgcttgggacttgaccagcctagagagcattaaccaccccatgaagcaacttatgtccaagcgaaatgcccttatcaaatcattgggcgctctgtcaaacaaagtaacaggtatgttctgtttccttggcgatgatgccttcaatgcactgaaatataacgatttagtgagggaagatcataaatatgatcctgacagctcacctctgttgcgctactcctcggagctggaaatttttgagagcatggttctcaacaacattcagtttatcaatgtaggcatggattcggatattactgagatggttggcacctccggcttcctcgtgccgcgatttgatgccgatgccggtgtgatgacccgctactatggcccagcgacccgcatgactaaaatcaggggtgtggctccatattattcctatagcattgaggacgattatggcaacgtttcagtagaaagtgagttcagctccttgcctgtcaacaagctgccgtcagctgctgttaagttcgacgtgactatctaa

SEQ ID NO: 454205 - DNA, 327 bp, Serratia marcescens
atgtcttacacttctgaactcactttctctgatgtggtggctaatttttcagacatcacctttgcaatggatggttattctaccgccccactaactaccaattttaaagtgggtgatattatcgacgcggccactggtgcagcagcgaccgctgctaccacttctttcattatcctgctgaccgatgccaaggctgggcagactgaagtcaccggcgttgatcgcaacgtggttattatcgaagcctcattgaatgcatcgcaggctgtcattgacgccgccaaggcatatttcaccgcccgtgacgctggcgttcgctttaagtaa

SEQ ID NO: 454206 - DNA, 810 bp, Serratia marcescens
atggcgatcacactatctcaggcgatgaatgcggcaaaagcaggaaaaggggtagattggccttctcttaaaagaaggttgattcgagcgggtgccgaggcgtccctcatctcaaaatcggttcaagtcgtaagatatgctgaaaaagtctatcaggtgacgatcgtcaatcatgaagcctttgcagaattatgccagtttgcttcacccatcgataaaagtagccgtagtgcagcaagtttaaatggcaatagccatgccaccaatgtagatggtgcactgttagttgcttatgattcaacttctgcagagccatacaattacgtactacggcgttcgtcccccataccctgcccgccgaaaaaacatgccatgattattgaaaatttggagtgctttcttgatttcagagcggtctatcaatttgcggttcagcattgtggggttgagtacccggaagaggatattgaatttatctgggcggctggcaatggtatatctaatcgtctgattattccttatcttcaactattctcaggcagtgtgttgtgtattctagatgttgatcctggtgggataacaatttatgccaatctgctgtccggcggcttggccgcacaaaaaacgcattatctgacaccagatgacttgggagaaaggttgcaccgctcaaggagaaaaatatccactgaagacctagatgcattgtcaagactccatgggctttctcctcaggtggacaaaattatcagtgtattacgacactaccgtactacggtagaacaggagagttatcgtgcccatggataa

SEQ ID NO: 454207 - DNA, 870 bp, Serratia marcescens
atgcaacctaccgacccacagctaactgccagattccaattcattgattttttgctgttgtttaaaggacgtttaacccgtgccgagctagtctctcggtttggaataggagaggccactgctagcagagctatagccgcctatatcgaaacttacccaaacgccatgatttttcatggctccagaaatggctacgaagcggctgcaggattcatcccggcaatcattcatagtgcagaaaatgggcttaggtatattgcctcgggaaaaattgatgaaagttacccggtagaaacatttgggcctgaaaccgtagacctgagaccagatctcaatacctctcttgcggcgacgatcactcgggctattgtcaaccagcatcaggtcaacattgaatacctgtccacaacctcagggacaaaacccaggatcatactgccgcacagcctgtttgaagccagtagcgcgtggtatttcagggcttatgactattcagtttccgactatcgcacgttcaaatttactcgagtgttatctgccatctcactgggcactcctgcacatctatcatttaccagaaataaagatgctgcctggcagcgaattcgatacatacaactcatagcccaccctaaaagtagccatccagacagccactggctcgacttgggaatgccggctacaggcatcaaagaactggctgtgtcagaagcctgcctgggatttgtcttgacagacttgcgagtagattgctccagaacgggtaagttgaatgccagagaatatcctttcaagctggtcaacctggctgagcttgaagatgttgaatcaataaccattgcgcctgggtttcagcatagtaaagaatag

SEQ ID NO: 454208 - DNA, 645 bp, Serratia marcescens
atgaagattctaattgctgagcagttcaataagtctatgaagcaacttagcaaagaagaacagaacgaggtcgtgtccatgttcacacttgtttcgaacatcgaacgtgagtcactaatgagttcccctatgctcataaagctgcaatcgaattcctcgctttacaccctgagaactcaatacacccgaattttctgctcattcgtgggggacgacctagtttttcttgacgtgaattctgcgaacaaaggggctttgggagcatccgcatatactcaagaaagtaggacgggcgagaccacactcttcggtttccttggggatccccaagcctatatcgcatctgatgcaatctacagctttgaggggcgccctcttgcttacttggacaggaccagcatttatggttttaatggccgacatcttggttggttcgaacaaggagtgatttgggatcataaaggtcatcgagttggcttcactaaaagtacttgtccggttttcactcaatttgagcccttcaaaggcttcaagcagttcaagccattcaaggcctttaaacagttcgcccccctcaagccatttctaagtaatgcaagcgcagtagttcctctgttgaaatttctagaacagggaagagcctaa

SEQ ID NO: 454209 - DNA, 390 bp, Serratia marcescens
atgaaccatgataccgcattggattacgttgagcgggcgttgaatcttgcccagaaacgccatgcacatatcctgcgggttcaggggggcgaaacactcgaacccatgtacaagtccatcgttcagcaactactttatctgcgtaaaatcatcaccggcgaagagaaagacaaaagcaagatccataagatgaccatgagtatgtatgcggctaaagaattcgacggaaacgatcctgtatttcaggatagaatttttagtgccagctacattgccaagcaaatcggtggggggctaaaagtccgtttaccacatgaagaaaacccagccagctaccagcaactccagcaaaaactccgggccgaattccctgacgattttgaagactga

SEQ ID NO: 454210 - DNA, 1818 bp, Serratia marcescens
atgtccgaaactcagcgttatcaggttaaacccaccaacagagcgataaggatcgatgctttgcgtgatttccagaagccgatggtggcctggtggtactgtggatttaccccaccggacaaagattcacatcagcccaaagttaaagttgaatttcgcgagctcaacgatgactacacagtcaagcccagatacacgcacaaagacattctcgtcagtctactccgtcacgttactctgggatcaatatggcagcagggattctgctcgcgggaaatccagtttcagagccgcacctgcacgatcccgttcccggttggtggctggcagaccatcagaagcgctgacgtcacgggcgggttgtttccccccggcctgcacagaaactaccctggcgaccttaactggctactttcactacagacggtccaaggtaaccagctttacatcccagcagaggaatacttcacctggtgctatggagcatcacaggaagtcagacgcgtgctgactacttacaacttcgcagaagttgttcatgagcggctctatgcacctccagaccctgagcaggaaaaggagtgtggcccgggaatatggccgatcaggctgcggcagaagatgacgaaagcagatgccgtcatgctggcttatgccaagttcactgatcacgggtataaaacactggcttcagtgcacaaccagctgcgccatcagttcaccaacatgactcgtaaggcaataccagcctttattaaaatcattccctggcatcaggagaacttccgtctcaccgtcaccggccttccgttcaatgacaggcaatcatttctggcactgcggattacgggttcatcatcaccgagatgtatgggcaatattattgaacgcagtatggacaccggaaatgattatgagcttccggcagatgcagacagcaagacagctttcgacggcgcactcatcagcacacacattatccctccagatatcgtcaacgtcaccgacgaccagaaccccgacaccaatatacagaaagttattattgatacccccagcctcacacttattggcgatcccagcccagtcagggataaagtaaataggcaggccgagtatcagtctggcaaaaagcgaaagggtgaaaacgccggagggttctcttcaggccacccagaaaagaacgatagtgatgtgggtgaattcacatcagagaccccactcatcattgatacacagggaatactcagagacatgctcgccgcctgccgcgagcttatgcgcgtctgcccccaccagttcaaggctgttgagtggttcaccttcgagaatggtttttcatccgacgaggagcccggttttatctcgttgatcccactcgacgacgaatcaaaagaggcaaaatggtgctacgttggcagcggccatgacaggcggctgaggtatgccctgattatccgtctgcagactatctggggggacgtctacattgctgaaattgagcgcgacctggtgcgagtaaaagatgcccagggagatgatgtccgtagagagaaaaacgggcgtggtatggtcttttcattcaagcagggaggttcacccagcgcaatgattaaagcttacctttcccagatccgctatgcttgcggcatcgtcaaccaggctataccacacctcagatcccattacacaccggaaattgagccgtttaaccatccctctccaaagggtacgctctttcccgccctgcctgccgtgctgaatgcgctccgtaaaaatggcatagagcccgatacgaaaagaatcaaggtatggtga

SEQ ID NO: 454211 - DNA, 1416 bp, Serratia marcescens
atggctcgctgtgatgcatgcggacaggatacgccccgattcagccgacgataccgagaggaatttttttgcagcagttgctatgcgcagctgttcaggccaaaaatttgcccgggatgcggcagactggcccgtatatacattgccgatcgcagtgcggtgtgtcggttctgtgaagcgtctgcaccgtgtattcgttgcgggcgaatcggcaaaccagcaggcagacttacccggactggcccgctttgttcggtatgcgcacgggcaacccgggaacctgaaatctgtgcaggatgcgggcgtgtggcgcggtgtgtgtgccgctcggatatccctgataagcccggctatctctgttcccggtgcgccaggacacagcatgaaacttgtcagatgtgcagtcggcatcggcccattctgatccagcctgatgggcgcaggctttgccgaaaatgtgccgaactgggcactatctcctgcccgcaatgtggtggaaaaatgcccgcaggatttggttcgaggtgtcaggcgtgttattggtccgttcgtttcagtatgcgtcttgagcagcaggtaccgacattgccggatgataatgcacgtaccgcttaccgtcgtttctgtcagtggctcagtaaccgatcaggaaaccgcgtggctttcatccgcatggcccgctatgttgaggcattccggaaaatcagactggccgacgctcccggcataagcttcacgtcactgattatcgacaccgggcctgccgctctgcggcgctatccgctgctggaagaatggctcactggacgagaacatagactggaggtaaaacgactgaaaaaaacggaagcggagcagcggcgcattcaccggatggttaatgacgtcaggtgtgaactggcgcagcaggtgtatgtatcgtatcttactgttatgcaagcccggtatgatgcgggatatatcacaattggctcactgcgttatgcgatgggggctgcgtccagactgcttgcccttgctgctcgtcgtgggcatgtgctgccggaacagtccgatcttaacagttatctcagaacctctccgggcatgcgtgcccagctgtccggcattacgatctttttaaaccataactttgccacttcgcttattcttccggtaaaacgaagcagggctgcgatgcagcggcaccggatggaaaaatacatcagaaaaatgcggcatatgatggtatctggacgtgtccccgagatgagaacctggcttcggctggggcttgcatgctttcaccatatgacgctgaatgctgcaaaggccctgctatctgatgcagtaatcagccgcacggcgagtggttatgtcgtcagagctgcgggggaagaatataccattccatttttcagactcaccataccttga

SEQ ID NO: 454212 - DNA, 1107 bp, Serratia marcescens
atgagcatctcaccgttgacgcatatgcccatgaagtaccccaattttgttcgctcagagccaggagaggtgctttcatcttggcttgttcggtcggcattgtactatggtatggatccgctttctttgaccggtcttatctggccggaatggcgggcattgctctgcgatattgatcgcggtttgtcaccagaagccatttcccttctggaatggttcactggtgctgaaccggcccacataaattcgctgatgctcagtggaagttactcagcgctgttcactgacgagccttcttcatcctcagtgttgccttgggtcgtttccagagggatccggggaagagtatgcctgatgggaatgccgtactgtccgcaatgtctggctgaggactccgtcccctattttcgccgggtgtggcgcatggctttcactattgcctgtatccgtcaccggtgccagcttcgctccagctgctggcactgcggatgcgcagttcagtattcgcttttaagcgcggaaaatgttcatcttgactgttgctggcgttgcggagcgaacttgagcgaggcaagccgggaaccctgcaatcctgttgcgctggcattccagcgggtagctgtaaacgttctctccaggaacgccggttactatggtgatcacctgctgtcagctacccagtggttcaccgttaatcgctatatggtttcgctggtaaaggccgcaggctggcgcagacactcatccttactgagagcgcttttaacacttcccggctgctccggcatgaccttgcccgtaaccggttgtctgccatttgagtcctgtactccttcggtgcgtgctgctcttctggccgccgccaggatgttttttatggcgggaccactgcgtctgtcgaatgcaatgtgttccttgggcgtaacgcaaagtctgcttaatgaaataggtatacatatgcctgacgtgctgctcccgtatttttcctgcctgaaagccggaaactatccagccggtacgatgcgtcagtctcattgtggtccatcgtcgcctcagtcagtggctcgttgctggaagcggatccggcgcaagctgggtgccggataa

SEQ ID NO: 454213 - DNA, 2604 bp, Serratia marcescens
atggcgaagaaccctctgttgatatttaccccgcctaaatcagttttaaagagggatggtctgacccccgatcgctcctcgctaaattttcccaatattgatattcaggcaacccgcgtcttccccaaagttgagagcctccaaaagcagtttgccgaatatattgagcttgcggaaactgctgacggtttccttcctgaaaaagtgcttgtgcttgaagtcgtcggtgaaatacataacctcgctaacgcactggcgaaagtccagggctttgaatatctctcttctgcacttctcgaaaaatccttcgacagcgaagattattacaggctgagcaacggctcacgcaaaactgtttccagaaacgcctacctgaccatgagcaaccaggctggactcagccgcctgttagccttatggcgtaaatatcagaagacccaggaaatcgcatatggttatggtccactcagggctgtgtttgatcgcttgacggatattcggttctggaatacagaggacaggcttaaagcaacattcgtgcttgaaaactggcaggatcgtgtaaatgatgccgcagccggatatgacgaccccgtaccgtttgaaatcgaactctggtaccgtgcttcccggggggagcaggcgaaagcagaagcccgtatccggagccttattgcccgtgccggcggcacgatatcgggtcagtgccttcatgatggcatcagttatcatgcgctaattggcaatctgcccgtcagtaaggtacaggaagtgctggaacaggggggagacatactggaactgatgcgttgcgatgacgttatgtttttcagaccgctgggccagtgtgctattacggttgcgggtgaagataccgttacaggtggggacactcatcgacagactgaacagtttatgcctgatccttacgccagcccgactgtcgcgctgctcgacggattaccgcttgagaaccaccaggcactgagtggcagacttgacattgatgatccggatgactttgagactgattacacatcaccagcctatcagagtcacggaacgtcaatggcttcgctaattgtgcatggcgacctgtcagatcctgctgagctgccgttatcacgccgaattcacgtcaggccaattatgaagcccggcccccctgactttaacgggaacgctagggaacaaattcccaccgatcatcttcctgccgatcttatccatcgggctgtcgtcaggatgaaaaagggtgaggccggacagccacccaccgcgcctgacgtgactatcatcaacctgtccgttggtgatccctgccgcatgtttgatgcgcagatgagcccctgggcccgaatgctcgattggctttccgtggagtatcaggtactgtttgttgtgagtgctggtaattccggcatgcctttggttcttgacaatgtagcgggtgatgatttcagcgatttgcaaccggaggaagtggaggaacacgcactcagagccattgctgtgcaacgtcccctgcgtcgacttctgtcacccgcagagtccattaacgcgttgactgtcggtgcttcacatcacgatggttaccgaggggagctccccccacgacagatcgatatcttttccactcaggggatgttttcccctattaatactatcgccttgggcagaagcaaatcggtcaaaccggagatccacatgccgggtggccggcaaacctacgttaaccgtactgttcgggcccgcgagcccgtcaggttggatatctcacagacgttccgtttcggtccgggcctacagtcagcgatgccaggcgtagaaggtgcactgaaccagtttgggttcacgtcgggtaccagcaatgcagcggcactcgcaacgcgacgactcgccatgctccatgagacacttcaggagatgaaggagcttggctatcgggatgccctttcaaacgcaccggacgctctgattctgaaagctatgatgatccatggtgcagagcagaatactcagtccagaaacatcataacgcgccacctggacatgaacggcagcaaaaccttcaaatctgacctgaaccagtatcttggcttcggcagggttaacgaaggccgcatccatttctgtgcggataaccaggccaccttgctatacacaaatgttattgaagccgaaggggcacatgattacttcttacccctcccgccaagccttgcagctaaaaccattaatcggcgtttgatcgtcaccgtggcctggttctctccggtcaattacggacaccgtgattatcgtggagcccagctctgggcaagaccggctcacggtaatattgacgtggatgagatcgattattatccctcatatctcaaaaatgggacggccttccatgaaatacgtaaaggccatcgtgcctccgctttcacgcagggagacaagctagcaatccggatcaactgttatggccgtgcgggcatcaaaaaactcagggtaccctacgttgtcattgccacgctggatacgccgggaacgttgatccctgtttacagtgaggttaaagaggaactgcgtattgccgcagagcagaaaacctga

SEQ ID NO: 454214 - DNA, 972 bp, Serratia marcescens
atggccagagccgacttagtgctgaatttagttgaaacgggaatgaagggagacctgtctcgtttcaagatcactgcagaagcaatcgctgcggaggccacggcacgccatcaataccagctcgcagataagctaaagaatatactgaccagtactggcgctggtgagacgcgacgctatacctatgataacgaccttcaaaatgcgttttatgaaattcagccacgcaaaattctgggcgacttaattatccccgagtccgtgatcatacagtttatggagctgattgaagaacacgcgcgtcgcgacctcctccgctcctacaatctcgaaccccgccacaagctgctgttatcaggacctcccggcaatggtaaaacgtcaattgcagaagcgctggctaatcatctgtctctgcctttctttacggttaaatatgaaggcattattaaccgttatcttggcgagacggcacagcagattgacaaattatttgagtttgtgaaaacacagcgttgcgtacttttctttgatgaatttgacgccatcggaaaagagcgcgaagatgctaatgacaacggtgaaatgaagcgtgtggtgaactcactgctgaagcaaattgatctgttgccaagtcatgtagtagtcgtgggggccactaaccatgagtccatgctcgataaggccatatggcgcagattccagttgcagataactgttcctgctcctacgcagcgtatggcaacgaggtggtttgaagaatttgaaaagcgtgtcggccattctctggggctggcgccatcaacccttgccagaaaactgtcaggactgagttttgccgagctcgaagagtttgctctcgacgtgcagcgtaaatacgtgctcggcctccccgcaagtaaaaataagctgaaggatatttccgctcattgccttaaacactggacggagagataccgacaggatatttaa

SEQ ID NO: 454215 - DNA, 891 bp, Serratia marcescens
atgactggtttagcataccttcataaagacttcaggcatgttgctgagttgcccgataaggagcgactccatttcattgatgagcctcgatggattggatatccgcgagcgcaccacattctggacacgcttcaggaattgatgcagaggccgcgacgaccacggatgacgaatctgctgctggttggcgattctaataacggcaagacaaccatagcgcaccgtttttatcactcaaaccagcctgttctgagtgatgatctgagtgagtctacgaatccacttgtcctggccgaggccccgccagtcgctgacgagaaagggctttatatctccattctggagcggctttatacgccataccgaacaagtgatccggtaaccaaacttcgctatcaggtgattcatgtcctgcggacctgcaagacccggatgctgatgattgatgagttccactcattgcttacaggtacagcgctgaaacagcgtgaagtgatgaacgccatcaagttcatgtgcaatgaactgacgatccctattgtggggatcggtactcgggaagctgtcagggtgcttcacacggatccgcagcatgcgagccggtttgatgtaataacactgcctagctgggaattgaacgctgagtttcagcgccttctggcagggtttgaggcagtgatgcccctcaaaaaggcatctcgtttgcatgaaccggaaaaagccatgttgctgcatgcgatctgcggcgggaatattggggatcttcatcggttactgatggagtgcagccgggaagccatactgagcggccaggaatacatagacaagtccatcattgaaagtaaatcgtggtgccgaccaacgaaagggatccgtgaagtcacattttga

SEQ ID NO: 454216 - DNA, 1986 bp, Serratia marcescens
atgaatagtcagcaaaagaataatgctatgaatatccagcaggagcattacgatggcgaagcctttgagcccagacgcgccttgctgtctattgaaatcggtgcgctcgtcagtcatctgaacgaatcgtataaaatcattgaaattattgactttcaggccgtggttggcgttaacctattgaccggcaggcacgcctctctcagaatcaatgagttaagggctttggaaggaactcagactgtttctgacgctttaagcatcgatctggatgagatcaccgatgaggattggaaaaccgctcagaagcgctttgaggcaatcagaccgctgattgagcatactccagtcagtaaggcgctgatggaagtcagagcacaggagtatggcgtcacgccgatgaccctgtaccgctggatgaaacggtacaacagcgctggcagcgtcagtgccctagtacctatgaagcgaggctgggcttcgggaaaaagcaggctctcccccgaagtagagaacatcatcgttgagattatcgatagcttctttttaaaaccgcagcggccatctgcgcgtaaaacggtgctggaagttgaaaaccgctgtaagcagcttggcatcaagcctcccaatcacaccagtgtacgtaggcgcatcgccagtctttctgaaaaaacagtgctcagagggcgcggacgcgctgagaaagcacgcaacaagtttaccccaaagccgggttcgttcccaaatgctgattacccacttgctgtcgtgcagattgaccatacggaagctgatgtcattctcgttgatgatatatatcgcaagcccattggtcggccctggctgactctcgccattgatgtatgcactaggatgatcaccggttattacatctcctttgatgccccgtcacaaacgtcggttgctatgtgtgtggcgcattcaatcctgccgaaagaagaatggatgatgctgcacgatgtggaagccgactggcctgtctggggcaagccatcaaccatccatgttgataatggtccggattttcgctccgaaaatttccgtcattcgtgtgccgaatacggtattaatcttgagttccgacctgtcaaacgcccgcactatggtgcacatattgagcgtctgatggggaccgtaatgggggaagtacacaacctgccaggcaccacgttttcatccatagtcgaacgtatggaatatgattcggataaaaatgccgttctcaccatgtctgagtttgaacagtggctggtaacgtacatcactaaggtttatcaccagcggctgcatatgggcatcggcttatcccccattaaaatgtgggagcgcggcatatttggaaatgcaacggaatttggcattggcttaccagctaaacctgcggacaggcttaccacgcagctggactttatgccttcattccggcgcactgttcagactttcggcgtaacgcatgaaagcctcaaatattatggtgaaccgcttcggccatggattaacgtcaaagaccgtgatacaggacaggcatggcagcatgttttcaggtatgacccacgtgatatcagtacggtatggttcttcgatcctgagctgaaaatgtacttccgtatcccgtttgccaatcagtcccttccttccatgagcttgtgggaacaccgacaggtcatgcagaaactgaaggcagagggggtcaaaagtgtcaatgaatccctgcttctgaccggtttgactgaaatgcgacagattgtggatgaagccagcagtaggtctcgtaaggcacgacgccagcagcagcggcgtaaggtacatcagtccgggatcacgccagcgactcccggggcggtttcagaaaaggttacttcttcaccaactccgttgtgtgagcaggaggataccagacgttcactcccgttcgccgatgatctcatcactggagacatcgagttacccggagatatagcatga

SEQ ID NO: 454217 - DNA, 696 bp, Serratia marcescens
atgtacagaaataactgttatgaagatgtgcctgagcagcagcgaaggatcaaacctacccgcagaagtgtttcgggagtgttctccttcagaggacacacgccagttgcttttgaatccactctcgaacgtgatttcctcatcctgactgagttcaatctaaatgttctcgacatcatcccacaaccggctgtaatccctttccggacacctgatggccgcaacgtaacctacacccctgatttccttgtatgttattccctggttgatgggagtcataaaaaatatccccgcccccgacttgtagaggtcaaacctgaagaacagtggcgtactcactggcgggactggctacctaagtggaaagctgcgtggcggtatgctcaggagcagggatgggcgtttcacatccatgatgaatcccgtatccgcaatgatgccctgcaaaatatccgccagcttgcacggtacaaaaatacctggttcgaaccggcagattcagagcgcgttctgaacgttttacgtgaggttggttctgcctcagtcgattatcttctctcacgcatgttcctgggtatgtatcgcgctgaggggattgctcatatctggcacttgctggcgacgcggaagcttaattgtgatatcagccaaccgctgacgatgagcactgaactatgggtggttgaaaatgaatag

SEQ ID NO: 454218 - DNA, 648 bp, Serratia marcescens
atggcgcacaacggcgtgctgttccttgatgaactccccgaatttgaacggcgcacgctggacgccctgcgcgagcctttggaatccggggaaattgtcatttcgcgcgccagtgccaaagtctgcttcccggcgcgaattcagctgatcgccgccatgaatcccagcccgaccggccactatcagggcatgcataaccgaaccccgccacagcaggttctgcgctatctgggccggctttccgggccgtttctcgaccggttcgatttatcgattgaagtccccttgctgccgcccggtacgctcagcaaacagcaagagccgggagaaagcagccagcaggtgcgtcagcgcgtaatcgcggcgcgggaacggcaattgcagcgcgccggaaaaattaatgccatcctcggcaaacgcgaagtggatcgagattgcccattgtgcgatgccgacgcccactatctagaaacaaccttgcttaagctgggattatccgtacgcgcctggcatcgcatcctcaaggtagcacgcacgctggcggatttagcgggagaaaaacatattgcccgccaccatctcagcgaagcattaggctaccgtcggatggaacgcctgctgatccagctacatcgcagcctggaataa

SEQ ID NO: 454219 - DNA, 288 bp, Serratia marcescens
atgacgaagtccggcctgccggtgctgtattatgaaggtttactgacccgcagcagcagctggcatgaggcccagcagctgctgaaggcgtggttgataaccctgccgaagggaaccggggtcatcgtagtcactgatgcccgcgcgcgttatttattacaggtttgcgaacatagcaatattgttgtgccggaagttttatccataattggaattgataatgaggagctgacccgctatttatcaaaaatttcattcccgttatcactcagtttgcccatgatttag

SEQ ID NO: 454220 - DNA, 663 bp, Serratia marcescens
atggcgaataaaagcgacggacagagttcatcacaaaatgacggtgaatattataagatgaaggatgcctggcttctgaccggtatcatcaataataaactctctcgtgacggattcactgaatatagtatgcaggtcgctaacaactccttcgccagtagtttcgctaaaatctatgatgcatcatctaactttggtaccggacgttattactatggcgaccataccaatggtattgcctggcgtttcggtgaacagggcgaattttatcctgccgataatgttatcgttgcgcatacattattattttccggtggtaatgacgtatacagttatgaaaccggtgcacataccgatttcaaaagtgttcgagcggtagttcgccccgcgtacattttcaataagtacaaccaaacaggtatcgagttaggctattttaaccaaaaaaacaataataatggtttaaaaacccacgagtcaggggttaaaaccaccctttaccacacattaaaattaggaaccagtgcgtttaactcgaagtttgaaatacgattctacggcacttggttaaaagtactggataacggtattgattattttaccttcaccgacgaaaagaaagatcaatttagcgtgggcgtacagacagaactgttctggtaa

SEQ ID NO: 454221 - DNA, 834 bp, Serratia marcescens
  misc_feature (809)..(818): n is a, c, g, or t
atgtctaactggcaaacgaggattatattattaccttttattttgatgtgttccgaaccggtatgggcgcaatcattatccgtggaacaacgactgagcctgcttgaacaaaatgcaaaaaatacggaggataagttacaaactaccgaagataaactccaaaaggcattacacgaactcgccatttataaaaagaaagagaagaacgtaaaccgcgttgctgcggtaaatccggcgctactaaacccggccgtggatacccatgcgcagatatctcgtccaattgataagattcagcagcaggaagcagaagaaaaaccaacgaccaaaagcagcacccggcgaccagcagatatgaatatcaaagagctgtcgaaagccatcgaagacgaaattggtttttcattccatggctatttccgatccggttggggaaccgccagcaatggcagcccgcagagctgggccattggttctctggggcgctttggcaacgaacacggtagttggtatgatttactgtttagtcagaaattatatgaccaggatgggcgaacagcaaaagccattgtgttgatggatggtaacgtcggcgaaacttatgtcaaagaacccttcgattccaccagtgaaaacatgatgcagttttcagatatttatgtgacaacaaaagggtttatcagcgctattcccgatgcaactttatgggtaggacgccacaagttgcgcgctaaggaatttaagatgctggacttctcttaccacaaaggcgcaatcgcttctggtgtagggatcgaggatattccacnnnnnnnnnnatattccactgggtaa

SEQ ID NO: 454222 - DNA, 1473 bp, Serratia marcescens
  misc_feature (709)..(718): n is a, c, g, or t
gtgaaaacaggatttgatgtagattttttatttggtggcgctatttcagctgcacaagccgatgggggttatgcgcaggatggtaaagggttagatacgcagaacattcgctattttaaccccaactggaatcgtgcggaacgtgatcacaatcgtaatattaatatgacatccgaacgtttcaatgccgctttacacaacattgaagcggtcaactatccgttcacacggggtattgatttttataatcgctattctgatgaccttgcattgatggaagagatgggaatgaagattttccgcacttctattgactggtcacgcatttttcctaatggagatgatgaacacccaaatccacagggaattaagttctatatcgatctgtttgatgaatgtcacaaacgggggatgaaagtcttcgccaccatgctccattacaatattccggtaaatctggtgacagaatatggtggctggaaaaaccgcaaactggtcgatttctacctgcgctatgccagggttttattcgaaaaactgggtaatcgggtagatttttggttaccgttcaatgagatcaatgcgggaaaattcaatccttataatggtgtctgtgtcatcaaagagcaggaagatcattatgaatccgcgatcttccagtgtttacaccatcagtttattgctaacgcgctcaccattaaactggctnnnnnnnnnngggaaattctgccgcaagcgcggatcggcgggatgatcgcccgctttaccacttatccggcaacctgtaagcctgaagatgtattggaaacaatgcacaaagaacaatacgcaaactatttctacaccgatattatggtccgtggagaatatccggcgtatatgcagcgctacttcaacgacaacggaatcaggatccacaaagaatcgggtgatgatgaaattctccgcaacaacactgtcgatttcctgagtttttcttactatatgtcgatggtagccacaacagacaaaacatgggaaaccacgggcgggaatctggttagtggtaataaaaatccgtatctgaaagccagtgactggggatggcaaattgatcccattgggttacgtattacgctaaaccaattttacgatcgttaccgcatcccactgtttatcgctgagaacggtattggtgccactgatattctcgaaagtgatcatcgcattcacgacccttaccgcatcgaatacttgcgtcagcatgttttgcaaatgaaagaagccgtcattgatggtgtagaacttcttggctacaccatgtgggggatcatagatattgtctcctgtggtacgattgaaatgtctaaacgttatggtgttatttatgttgatcttgatgatgagggtaaaggaagttatcagcgttacaaaaaagattctttctattggtatcaaaagtgcattgcatcacacggtgaagatttaatttaa

SEQ ID NO: 454223 - DNA, 627 bp, Serratia marcescens
atggtgccactcgggttgaccattattgcgccctttggtgactttgtcggcaaaggtattggcgtcggcataacttatgttaatgaccattgcatctggctgttgccctttattatggcgatcttctcacccatttttatcatgaccggaatgcattatgccgtgaccatgccgatcaccttccagtcgcttgccaccaatggctttgacatgatcggcgcaggcttcctggtgtcaaatattgctcagggggcggcggcactggcggcggcaagattcagcaaggacgcggattttcgtgctctggcgagtggtgccggatttaccgccctgctgggtatcactgaaccagccctttatggcgtgaatctgaagctgaaaaaacctttctacgcggtgctggttgccggtgctgtcggtggattatttgttgggattatgggggtcaaacgcatgactctggccccaacaggattaaccacccttcccgtgtttatcgaccccaataattcaatgaatattgtttttgcgataagcggggcggcgataagtttctgcgtagcttatttgctgaccgtggtcttgctacgcattgagtcaggtaataaaacaggagatgttaagtga

SEQ ID NO: 454224 - DNA, 831 bp, Serratia marcescens
  misc_feature (693)..(702): n is a, c, g, or t
atgaattatcagcagctcgcaaaagatatcattgaaagaatcggtggtctaaataatgtcaaagatgtcacgcattgtgctacgcgtttacggtttacactcaatacaatggatccggtagataaaggaacggtttcagctctgcccggtgtattgggggcagtagaaagtagcggtcaatttcaggtgatattaggacaacaggtaggccatgttttctccgctattacgcttttaaaaaataacaagagtaacgccacacccgctgaagtaaggcaagatactacggacgtgcagaagaagaaaaaagagaatgttgtctcacaagctcttggcatcatttcggggatatttaccccgatcctgcctgcgatcagcggcgcagcaatgctgaaaacgctgttgattatcctgaccatgaccggtctgatggaaaaaacctcccagacatgggtcgttcttaattttgcagcggatacaaccttctactttttaccgatcatgctggcgtacacctccgccatgaagtttggtatgaacccgtttgtcgccatgacacttggcggaatgttattgcaccccaccttcacagcaatggttgccactcatagcccgcttagtttccttaatgttccggtttcactggttcattatggttccacggttatcccggtcattctgatggtatggatnnnnnnnnnngatcgcttcatgggcggaacgcttgtcagagagattgtcgccgcgcgctattttgttctttatgaaaccctttctgactctgctgatcatggtgccactcgggttgaccattattgcgccctttggtga

SEQ ID NO: 454225 - DNA, 999 bp, Serratia marcescens
atgcataaccaggatctcgacactcagctgcggcagatcacagaaagtgagcgattctatctcaacaatcccggcgcgatcagtcctaagtataagaatataaataagaaaaatgttaacgggcaacaggtgtaccgtttcgaacacccacgtgtcagtcagacggagattgagataagtaaggattctcgcttcacttctgtgccgctacatacccataccaatgtcaatatgaactatatctattctggatcatgcacctatgtggttgatggtaaggaaattacgttaaatcagaatgatgtttgtatttttgatactgatgtcattcgcagtaaaaagaccattggtgagaatgatattgtgataaatattagtcttagcaacagttttttctccaactattttctcagtcgcctgacccagcaaagtattctgaccggctttatactgactgccatttctgcaaccaggcagcatgacaactacctcatctttaacactcaaaacagtcaaaaaatccgggagctatttatctttaccatggaggagtacggcagtaataatgtctattcacgcgaactgattgactcatatctgtcaattattttcattgagttgttacgtatctttcatgccaataaaaacaaacaaactattcagctgtcaactgataaaacgggtgagataatcggcatcatcagttatatagagaagaactatctgacatgtaatctgactactctggcagaaaaatttaactatcatcctaaatatctctctcacctgattaaagaaaaaaccgggaagtcattcaaagagattcagttactgcaaagaatgaaggtggcggctacctacctgaacaactcagcttatccaatacatgagattgcagaaaaagtcggtttttataataaaaactccttctatgaaaagttccgggaacactttggaatgacaccgaagcagtatcgtgacagcaaccatcatgggtag

SEQ ID NO: 454226 - DNA, 474 bp, Serratia marcescens
atggccccttccaatgtggaacatcacacgactgatagtcatgaaagccgcttttatcgtgaggactttccatttttctggatcgtgaatgttcacgcaaaatatacccagttaatggacattgaattgaagaaagtggcgatggatgtgtcacgtttccgtgtgttgatgttgatccaccaataccgtaaagccagtatctcgcaaatatcccaatattccgtcagtaaaatgccgacagtcaccaaaattgtgggcaggctgcgcgacgacgggttggttgaaaccaaggtcagtgaacaggatgggcgagtcaccgaagcaatactgactgaagcgggtactcgcaaggctttagctgtgatggagataagccagcgtattttcaccaaagcgtttaaaggtatctctccggcgcaggcgcgcaagatgaaccaaattctgtccggcatactcgacaatctggatgattaa

SEQ ID NO: 454227 - DNA, 1119 bp, Serratia marcescens
atgatgagcaatagtgtaggttttttatcaaaattcacccgaggaatgggcgatctttccttcgcagtgaaagacaccattgatgtgtctgattatcccacccaggcaggcagtcgggttttcatgcatgcaccacccgcagcccataacgcccgcatcgttcagcagtttctcgatgagggctgtcagttattgggtaaaacgatgctgcatgaattggcgttcggcgtgactgggatcaaccactggggtgggacaccggttaattactctttcccggatattatccctggcggatcatcaagcggctcagcaacggtagttgcggcaggttgtgttgattttgccatcggtactgataccggcggttcggtgcgcatgcctgcggcctgttgtggtgttatcggcctaaaaccgacatggggcatgataagccgtgacggcgtcataccgaaacacagttcacttgattgtgttggattttttactcagacgtgcggaaccctgttgcaggtgatggagaaagcacagggaaaagtggcagaccgctcaatctccctgcctgctattggagtgatgaaaggccatgccactgaagcgatagatgctctgttggcacagcgactgcagcctctcagtgcagcagccacaacagtggatttgacttatttcactgaagctcaccaggctggattgaccctaatcagccatgagaactggcaggcttacgcttccatcattgacgcagagggcatttcgccagatgttgttacgcgtattcgggcagggtctgccgtcaccgctgcggaactggcaaatgcggaagccgtgcgggaaaaattttctgaagctctggaccaccaattagccgaaacgccgctgataattttaccgacattgccagaattgcctcctacgttaagtgaagcttccgatccattaaatgtggtgaatctgactcgattaatcagaccttttaaccttagcgggcacccggctatgagtttacccattggcgtaattgatggccgtccggtcgctatgcagcttatcacgcataaaaaccatgatttgaatttatgtgtttatgcaaagaagctggttgaatcttttacctga

SEQ ID NO: 454228 - DNA, 1155 bp, Serratia marcescens
atgttacagacacgattagctatgaatgctgaaaatacccactgcgatatgagtattttactgcaggaattaaaatccagaggggaggagtttgaaaatcagaaatatattacccatgacataattgagaagttcaaagaactcggtgtttatcgagcattagtacccaaaaaatatggcggtacagaaatgacaccggcgcaattctgtcagctgattgaaactatttcaatcgctgatgggtcggctggctgggttgcaagttttggtatgaatcctttttatctcggaggattaccgctctcaacgctggatgaaatttatcgcaatggcccggatgtggtctttgcgggcggaatttttcctcctcaaaaagccatggtgacagacaaaggttttgttgtttctggccgttggggttttgccagtggatgtatgggggcgagcttgattggcgtgggtattgtgccggaaaacggtgaggaaaaatcgttgccacgtattgccgtattgccaaaagagcagaccaccattgatcccgtatggaataccgtggggctggcaggcacaggtagccatgatgtggttgtggacaacatcgttgtacccgaagaatggacgtttatccggggtggagaactcaatcttcagggcgatctctaccgttatccggtgttgtcactggcgactcaggtactggcggtggtcagcgccggagtggcacgtgcggcactgaatgaaatatacaccattgccggtcagcagcgttcggtaacaggggcgccgcggctggcggatcggcagtttgcacaacgggatgtggcgcattgcgaggcagaacttaattcggctcgaagctggttttatgacgctatcgaccaggtgtggcaaatcctttgtcgtggcgatgcaccccaggatgaggacgtcaatctgctgcgcctctcagcaacccatctgacacgcgttgccgcaaaagtcacttcaaaagcgctgatgttggccgggatgccgggcatctccatgcgcagtccattacaacgttacgcccgcgattccatggtcatcactcaacacgccttcatgggtgagctgacctacatcaacgccggcaatatgttttttgggcagtcacctttgcccggttatttataa

SEQ ID NO: 454229 - DNA, 357 bp, Serratia marcescens
atgagccagacagattcaattcgggtgctgttttgtattggtgtgaaccagaatttttttgatgctacgccggaagtagcaaaacaggtttgggcagcctttggcgaaatgatgaaagggattgaaaacatgccaggcatcaccgtgctgggcaatatggacgatgacaaagtgatggtgggaccttccgcaggttggccatggaccacgtatgtcctcgctgatgtacaggattttgcaaccgtcagcgctgcctgcaacttattccgcactgtcatcgtgggtgaaggaccgtatcgactgtggaaattttgcaaagtcgaagcacgcaccggacgtgagttaattatccaatag

SEQ ID NO: 454230 - DNA, 531 bp, Serratia marcescens
atgcagatgtctgagcaacaacaccttttatcaagactggatacgctggagtctgaggcggaaattcgcagagttatcagtcagtatatgcatttatgtgatgacctgcgttctgaagatagcgtcacacaaattgggcaactttttacctgcaatgccgaatgggcaggcattggtgaactctatgccgaacggctggggaattataaagggcgctcggctatagaagcgatgatgagaaagtatgtcactcatccggcccattttagaatcaacacgcactatttaagttctgagtttatttatctaaatgagataaatgaagccactggccgctggaagatgttgcaattgtcaactttcaataatggccagtcacatttaaacggtgccgaattaattattgaatttcgccgtgaaaacaacatctggttaatgaatcatttcactacgcgaaacctatttagtcgcccgatcgattattggcattcccccagtggattgcccgtaccggaaaccaaacgggcctga

SEQ ID NO: 454231 - DNA, 1305 bp, Serratia marcescens
atgcaagatatcccggttaaaaatattgattgtacgcccagttcacaggagctggcggcgctggtgaagtcggaccgtgttcatacctctctctatacttcagctgaaatttttgatgtagagatcgataaaattttttccaatacctggatctgggtagctcacgaaagtgagataccggatgccggtagtttcaaatcctcatttgtcggtactcagccggtcattgttgtacgtgacagaaaaggcaatatcaatgtgttattgaaccgctgtcgtcaccgtgcagcaacagtttgcgaacaccagagtggcaaaaccaataacttcgtttgtccttatcacggttggggttacgggctggatggtgcgttgcgtggagtacctcatccagaaagctatgcagatacgctggataaagccaaccttggcatgattcgtctacgtactgaaagttatgccggtatggtctttgccacttttaaggacgatatcgagtcgctggtcgatttccttggacccgcgaaaaaatggatggatttatttatgaagcaaggtggcggctacccgatccaggccacgacagctcaccgtttccgtttcccagggaactggaaaatccagctggaaaacaccaccgacggttatcactttccaatcgttcataaatcattccttagctcagtggataaacagaccgaagaaatgctgaattttgtcgatggcagcggctttgttgaagatctggggaacggccatagcgtgatggtaatgattcctgagttgattgatcttgaagagaatcttgatgcgccgatccccgatcgttttgtcgatctggctcaggtattacgtgacgaaggccacccagaactggaggttcgtcgcatagtccgcgccgtaggcggtagcggttttaacctcaatctgttcccgaatgtggcctgttcgatggcttttttccgtgtactccagccgatttcagtgaaagaaactgaaatccaccatgtagtgatcaccatgaaaggcggaccggaagcagccaaccaggcacgtctgcgtatgcacgaacatttccagggaccgatgggttttggtacgccggatgattccgaagcctgggaacgtgtccagcgcgggtcatctgccggggatgatctgtggatcatgctaaaccgagggttgccgggggaagtgaccaccgaagatggattacgcagtgacgtcagcgcggaaaccgggatgcgtgctgcctatcaaaaatggaaagagtacatgacagcagaaacacgggggcagcaatga

SEQ ID NO: 454232 - DNA, 480 bp, Serratia marcescens
atgaccgagcaacaggctttattttccgccatcagttttatcaattatgaagccgatgtgctggatcaggaagagttcaaccactggctgacgctgtggaaaccggaagggttgtatgtcatccctatcgatcagaaaacggaagatttcgctaacacgctgaactatgcctacgacaaccagcatatgcgggaaaaaagggttgaccggctttacagcggggaatcgatatccactacgccacgcgccagaaccattcgcatgctggcacgttaccgcctgctgcatgccagcgaggaacgagtagaaatccgctgtgcgcaatcgttgtgggaataccgcaagggtaatgccctgcattatgtcgccgatgtcacctatacattggtgccagagggcgaaagctttctgatcctgaagaaagtgattcgggtgatcaatggacaggatttcctgcgcagcattggctacatcatgtga

SEQ ID NO: 454233 - DNA, 741 bp, Serratia marcescens
atgaaaaatgttgccctggtgacaggtgctgcttccgggcttggggcggtgataagtcgctatttgtggtctcaggggtacgcggttgtgctggcggatatttcactatcaagtgcacaacaaatggcccgtgagatcgatgttaaaggtcagcgcacggtaggtgtacagctggatatccgtgacagtgatacattttcccatgctattgaccgctgcgtggcgcactttggcggcctgcatgtgctggttaacaatgcagcgctgacacttgctacgccggtcatgtcaatcacggtggaagagtttgatcaggtgatgaccacgaatttgcgcggcacttttcttggttgtcagctggccgggcgttatttcgccacacagcaatatggtcgcattatcaatctggcctcactggccgggcagaatggcggtacggcctctggcgcacattatgcggcttccaaagggggaattctgacactcaccaaagtgtttgcacgggcgctaagtcacgacggcgttacggtgaatgccattgcaccggggccaatggatctcccttcggttcatgcaatggtcccggacgataagatgcaggcgctgcttcaaatgatcccggttgagaaattaggggagccagaatttgtcgcgcaggcggttgccctgttggcctctcccgctgcgggctttgttaccggagcgacctgggacattaatggcggaatttacatgcgctaa

SEQ ID NO: 454234 - DNA, 975 bp, Serratia marcescens
atgtcagaaatattaagagtacgcgtcagcgaacgtgatgtgcagggagtcgaggtggtcgtgctgtcgcttcaggcgattgatgggactgatttaccggcttttaacgcaggtgcccatatcgatttgcatcttgccgacggacttattcgtcagtattcactgtgcagcagcccgcaggaacgtcattattatcgtctcggtatcctgaaagatccggcttcgcgcggtggctcgctggctgcacacctattacaggttggtgatgaagtaaccatcggtgcgccacgcaacctttttgctctggacatgagtgctgaacataccctgttgtttggcggtggtattggggtgacaccgatgctggctatggcagatgaactgtaccgggctgggaagtcattcgaattgcactattgtggccgtgcgcgcgagcgtctggccttcctcagtgaacttgccacctgttgctgggcgcaggcagtgcatatccatgcggatgacgaaggtgaagaacaaaagttgaatctcagcgccgtattgccccgtcatcatattgatgggcaagtgtatgtttgtggcccggaaggttttatggattgggtcatcacctcggcacagcgagcaggttatgccgatgagcgtattcacagggaatatttcaatcgcgaactcgccatcagtggtaaagcctttgaagtggaagtgcctgagctggatctcactgtcaccgtcactgaggaagagtcaattgtcgctgcattggcgcgagcaggtatcaaagtaaaggtttcctgcgaacagggggtatgtgggacttgtctggccaatgtcgccagtggcatcccggaacatcgggatgaatatctcaccgaagaagaacgtctggataacgatcagatcctgctgtgctgttcacgttcgaagagtgagcgtctggtaatcgaaaattttgaattcgtgaaacttaaatag

SEQ ID NO: 454235 - DNA, 489 bp, Serratia marcescens
atgactcttatgaccgacttccgtaatgcgatggcgcagctgggaagtgccatcacgattattaccaccgatggtcctgctggaaagtatggctttactgcttctgctgtttgcagtgtaacggatgagccaccaacattattaatttgtatgaaccgttcatcctttgccaacagcaaatttaaagagaatggtgtactgtgtgtcaatattctttcggcacaccatcgtgaattgtctgcggtgtttgccaatggcaaattgcgttcggatgagcgttttcttcatgataactggcaaactctgaccactggcgcaccggttctgacatcggcaatcgccagcttcgattgtacgattggtgactgtcacgaggtcggcagccacagtattttttattgcccggtacaggaaatcggttttggtcagggtgagcaggggttagtttattttaatcgtcagtatcatacgctggctgccagcctataa

SEQ ID NO: 454236 - DNA, 1299 bp, Serratia marcescens
atgagcaatgacgttaccaacggtgatttcagccaaaaaaatatgcgaaagttaattattggttctttccttggaaactcactggagtggtatgattttttcctttatggtaccgccgctgcattagtttttgggccattgttctttccggttcaggacgacccgcttatcggcacattgctggcattttctggttttgccgtaggttttattgccagacccttaggtggcatattattcggtcatgtcggtgataaatatagccggaaaacaaccctgattattaccctgaccctgatgggggctgccacatttctcattggattactgccgacctggcaccaggtgggcgtgctggcgccgatggccctgattagcctgcgctttttgcagggcgttgcttccggcggcgaatggggaggaggggtgttgatgttgagtgagaacgcgccggaagagaaaaaaggctactataccgcatggagccaggtgggtgtttcgggtggttttgtcctctcggcgttggctttctggctggttcagctgctaccggaaaacgcgttcatgacgtggggctggcggatcccatttctgatgagtgtgttcatttttctggttggtatttatattcgaaaaaacatacgtgagaataaagaatttacgcagctgaaacaggccagtgatacagaaccgaaagcaaacgtacctgtaattgagatttttaaaaaatatccgaaacaacttctccaggccattggtctgcgtttgccggaaaacggcgcagtttatatatttttcaccttttcagttgtgttctgtaagcacgctggcatcgccagcgacaaaattatcgccattgtgacattggcaatgacgctggagattttctctattctgttctggggatggttatccgataaaatcgggcgcaaaactatttattatattggtgtcatcggacttcttttaaccgccttccctttcttttcattactggccagcgggaacttttcattgatgatgctggcaatgatactcggtttaccactgtgccatggtgcgatgatcgcagcacaaccctgcatcatgagtgagctgtttccggtggaagttcgttataccggtctggctctgggacacgaaatcggcgcggtaatttctggcggtataagcccaatggtcgccgtggcattgttattaaaatatgaccattggtggccaatttcggtaatgctgctgggttttgcgctggtagcccttatcgcattgctaagtattaaagtggtacctcgtgcctaa

SEQ ID NO: 454237 - DNA, 630 bp, Serratia marcescens
atgaacatcattgatatagcaacaaaaataatcatacctgcaataggtatagtagtagctgcaattgggcaaaaagataagtggataataacaacagatcgcctttttgaaaaatacgcaaaattaagcaagttcacatttaagctttccaatcaattgaacgacagcaaactaaaagatatttcaggtgaatatggctatgctgcaataataagaaagaaagggctaacaaaagatgaaaggtacactttacttaacatgctcaatcctgttgagggcatagaggattatcatacttgctcagattatctaaaaattagcgtcatagacagaaggtttgtctggaaaaacaaacactacaataacatcatttacaagagaacaattttaacaataacatcaatactttactacattagttcaattatgttgttcatcccgatattttaccaaccatttcgtgatacatttatcggcgttctatttagaaatctaacgaccaacatgcagataggcataagtctttatattatgatctttggcctatttttcttcgtcatgactttaaataaactatctaaactatatcgagcagaaaagctaattaaaaattctactcctacacattga

SEQ ID NO: 454238 - DNA, 1041 bp, Serratia marcescens
atgaatatgcaaatcaaaaccaccatgaaagccgcagtggtgaaatccttcggggaaccgctggtgattgagcaggtgccggtgccgtccgtcgggccggggcagattctggtgaaaatcgccgcgaccggcgtgtgccacaccgatctgcacgctgccgaaggcgactggccaatcaagcccaatccgccgtttattccgggccatgaaggcgtcggcgaggtggtggccatcggcgaaggggtgaagcacctgaaaatgggcgaccgcgtcggcgtgccgtggctctactcggcgtgcggccactgcgagcactgcctcgacagctgggagacgctgtgtctgtcgcagcagaacgccggttattcggtcaacggcagctttgccgagtattgcctggccgatgccaactacgtcggcatcattccggataacgtggcgtttaatgaagtggcgccgatcctgtgcgccggggtgacggtctataaaggcctgaagatgaccgataccaaaccgggcgactgggtggtgatttccggcatcggcggcctggggcacatggcgattcagtatgcggtggcgatggggctcaacgtggcggcggtggatatcgacgacgacaagctggcgtttgccaagcggctcggcgccagcgtggtggccaatgcaaaacaggtcgatccggctcaggtgttccaggagagctttggcggagcgcacggcgtgctggtgacggcggtgtcgccgaaagcgtttgaacaggccattggcacgctgcgccgcggcggcaccatggtgctcaacggcctgccgccgggcaagttcgatctgtcgattttcgacatggtgctggatggcatcacggtgcgcggctcgattgttggcacgcgtaaggatctgcaggaagcgctggattttgccggtcgccataaggtgaaagccaacgtcgcggtggagccgctgaccaatatcaacgatatctttgcgcgcatgcacgccggcaagattgaagggcgtattgtggtggatatgtcgctgtaa

SEQ ID NO: 454239 - DNA, 1521 bp, Serratia marcescens
atgcgttatgcacatcccggtacgcccgacgcgctggtgactttccaggcggcctacggcaactacatcgccggcaacttcaccgagccgctcagcggccagtactttatgaatacctcgccagtggacggcagcgatatcgctcagttcccgcgctccgacgcgcgtgacattgagctggcgctggacgcggctcaccaggccgctgacgcctggggtaaaaccagcgtacagcagcgcgcgaatctgctgttgcaggtggcggatcgtatggaagctaacctggagaagctggcggtggcggagagttgggataacggtaaaccgattcgcgagacgctcaacgccgatttgccactggcgatcgaccacttccgctacttcgccggctgcctacgcgcgcaggagggcagcaccgccgagatcgacgaaaccacggtagcctatcacttccacgagccgctcggcgtggtggggcagatcattccgtggaacttcccgctgatgatggcggcgtggaagctggcgccggcgctggcggccggtaactgcgtggtgctgaaaccggcggaacagacgccgctcggcattacgctgctgatggagctgattggcgatctgttcccgccgggcgtgctgaacgtggtgcagggctttggccgcgaagccggtgaagcgctggcaaccagcaagcgcatcgccaaaattgccttcaccggttcaacgccggtcgggcggcacatcatggcctgcgcggcggaaaatatcattccctgcaccgtcgagctggggggcaaatctcccaatatttacttcgcggatgtgatgacgggcgaagaggatttcattgataaagcggtggaaggcctggtgctcggcttctttaatcagggcgaagtgtgcacctgcccctcacgcgcgctgattcatgaatcaatctatcagccctttatggagcgggtgttggcgaagatcgccaccattcgccgcggcgatccgctcgataccgacaccatgatcggcgcccaggcttcacgccagcaatttgacaaaatcctctcctatatcgacatcgcccgccgcgaaggcggtcagattttagccggaggggagcgggcgcttatcgccgccgagctggataacggattctacatccagcccacgctgatcaagggcaacaaccaaatgcgttgtttccaggaggagatttttgggccggtgattggcgtcaccaccttcagcgatgaggcagaggcgctcgccatcgccaatgaaacgcagtttgggttgggggcgggcgtgtggacgcgcgataccaatctggcgtatcgcatggggcgcggcattaaagccggccgcgtctggaccaactgttatcacatctatcccgcacacgcggcgttcggcggttacaagcagtctggcgtcgggcgtgaaacccacaaaatggcgcttagcgcctatcaacaaaccaaaaatctgctggtcagctatgacacagcgccgttgggcctgttctga

SEQ ID NO: 454240 - DNA, 1767 bp, Serratia marcescens
atgcagggaaattccgccgcgtctgacgtgcacgccaacccactgttaagcgactcctggtttcgcagccagctgtatgggctggaacgcaacgccgacgatttcccgcgcgtacgccagggcgaactggccgatgtattagccaacaacgccggcctgcaacagtttgcccagccggtaattcgacagctggcgcagcagatggcggagacgcagtcggtggtgattttatccgacgccagcgggctggtgcttaatacctttggcgacacgcaggcgctggagaaagcccagcgctttgccctggcgcccggtaatctgtggagcgaatgcggacgcggcaccaacgcgattggcacggcgctggcgattgacgatggctgcgaaattcacggccggcagcattttctgacgcacaatcagggcctgtactgcgctgcgatgccgctgcagatgccaaacggtcaggttgccggtgtgattgatgtctccggcccggcgcactttcctcatccgcagaccttcagacgggtagccgcggcggcaaaacagattgaatatctctgggttaagcagagcctgcatccacagcagtggctgctcagcctgcatccgctgcagcagggcatcgacaccagcgatgagctgctgctggtgttctctgacaatgttctggtggcggccaaccggctggccatgcgcgaactggcgctgagcgccgatcgctttgccagcctaacgtttcagcagctgtttccacagctgtcgcagcaggccaacacgatccccgccgccgtcgacatcggtacgcagcgttactggttccgcctgcgcgcaccgcagcgcagccacttcagcgtgccggacagtgccgcatacgacctaccctgcgcgctgcggcgtgacggcgcaaaaatggtgcggctgctcgatgccggcgtttcactgtgcatttatggcgaaaccggcagcggcaaggagtacgtcagccgcgcgctgcatcagcagagtcgctggcgcaccggcaagtttgtcgccatcaactgtgcggcgatcccggaagcgctgatcgaatccgaactgtttggctaccagcccggcgcgtttaccggcgccagtaaaaacggctacatcggcaaaattcgtgaggcggatggcggtgtgctgttcctcgatgaaatcggtgatatgccgctggcgctgcagacccgtttgctgcgcgtgctacaggaaaaagaggtggcgccgctcggctccagccgcagctggccggttaattttgccgtgatctgcgccacacaccgcgatctgacgcagcgcgtggccgacggtgagtttcgtgaagatttgttctatcgcctgcaggagtttgccctgaccattccgccactgcgcgactggccggacgttgcgggctttattgacgatgtgtggcaggagctgggcgccgcacagcgcggcgtccggctgtcaccggctctgctgacgacgctggcgcagcagccgtggccgggcaacgtgcgccagttacgcagcctgctgcgcgtgctgctggcgctggccgatgagggcgaagagctgagcgaaagacatttgccggcggagtatcgtcacacgccagcgctgccgctgcgcgaacgtcacgatgaacggctgatcagtgaaacgctgcagcgctatgacggcaatatcagtaaagcggcgcaggcgctgggcgtcgcgcgcagcacgctgtatcgccgtgcggcacgcgataagggagattaa

SEQ ID NO: 454241 - DNA, 540 bp, Serratia marcescens
gtggccaattccatttctattgctgcttatcaccaggcggttatcaatgcattactggcgctgccatgggtagaaaatgcggatgattatccggagaagattacacagctgaccacgccggccgtgtttttttctatcatggggtgggaaaactcacccagcagtgatgggcagttaaacgtagagtttgaatgcgatttattcatcgttattgatgaggccagtgaaaccatcgataagccgcaaatatttgcccgctcgtcagcagcagacatcagccagtggatcaacggacatacttttggattggacggtctacaacccgctgagttcgtcagtgctggtccggataatttcgaccctgaaatggccggatatgttgtctggcgtatcacttacactcaggccgcagcaataggggcagacccatttgcttcaacaggttctctattgcaaaaggtatggctgggcgctgcccctgaaattggtgccgcgcatatcaatgattaccggcttatctacgaacgcaaggaggaatga

SEQ ID NO: 454242 - DNA, 672 bp, Serratia marcescens
atggccagacaaaaccaactgcgtcgtgatcttcctattgatatcgataccatggcgctacgtgatattgcgctggctgtcggggcaacgcacaaacaatacatgagcgcatattcccgtgcgttgaagcgaacctctgccacaatgcgtaaacgggctatggcggatatcaagaatgggctggcgccgcgcagcatggcgatggtgagaaagcgcctgctttcctttcgtgtttctcgcggctcgttgttggatgaggggcgcttgtggttcggtctgaatgcgatcaaggttaaggaccttaaggggcgtatcaacggccgtatgcgtccgcatcatacccgccgtgacccgaaaaccggacgctatgccccgtcgcgccggcgggcaaactctgcaggctttgaaccgcgcggtagcctgttatcagccagaacgtttgaaaatggcgaggttggacggagcaaacgcgaagggcgacgaacggtgctggtccgtgatcctgcgacgcgacgtacccgcgaagctgaagtcgatatttatgcaccgatgctggattacatcgaagacaatgccttcgcagatgttgttgaaatatttctgcaccattttgaaaccgatatccggggcagagtgaaggcacgcattaatgtaaacagtaggagaaaataa

SEQ ID NO: 454243 - DNA, 372 bp, Serratia marcescens
atggacgggttcgacaacatttttgatgaagcgttgtttaacgctgacaaccacattattgatgtgatggggcgaaatattgaggtgctgattaacgatgtgcttacccctgtccgtgctgttttcgatgatccggtggcagacagcaccttgccgaaaaatacaggcatgattcaggatgtggcaccaacgttatttgtcaaaacggcgctcatcacggggctaaaaaagaaggatcgtgtgacgattggtgcagagaatttctgggtattgaaagttgggccggatgataccggcgtatcggttgtgacgctggtgcgtggtgaacctgggcggacagtgtcagcgatagactcgtggagtcctaaataa

SEQ ID NO: 454244 - DNA, 396 bp, Serratia marcescens
atggctagcaaagatgagctgatcgccagcctgaaagagctgggtgaaaaactggggcgtgaactggataccaccggtacgccagcggaactgcaattgcgtgttcgggaggctcttgaagagttcgaggcgctttcagaagaaagcgatgacacagaacagcccaaacccgctgataaaccggacgtagctactgacacgtcggctaaagacaaggccaaagctgaaaccaagaacgcattagtgaaactgcgggtactttccactgtgcatatcaacgccctgcatgagacgcgcaacgaagtgataaacattgcgtattccggtgatgtggtccgtgtctctgctgacgttgctgatgacctgctggacagtggttataccgaaaacctttaa

SEQ ID NO: 454245 - DNA, 1032 bp, Serratia marcescens
atgtctatgtactccacgaccaaactgatcgccgtcactgagacgaagttcaagtttgacccgctgtttctgcgccttttctaccgggaaagctatgagttcgatacggaaactgtcgatctggcaaagcttccgggtgaagtggaaatggcggtttatatctcaccgaccgttgaagggaaggttttgcgaactcgcggcggtctgaccacgcagttcaaaccggggtatttaaagcccaagcacgaagtcaacccgcagatgttactgcgccgtttgcctgatgaagacccggaaatgctgaaggacccggcatatcgtcgtcaacgtattatccttcaaaacctgaaggatgaagagttggcgattgcccaaatcgaagagaaacaggctgttgatggtgtgatcagcggcaaatacatcatgaccggcgatcagttcgagcccgtcgaagtagacctgcagcgcagccctgaaaataacattgtgcaggcaggggacgggcgctggtcaacgcaggataaagaaacctatgacccgaccggtgatctggaagcctatgcacaaaatgcatccggcatcgttaacctaatcgtcatggacccgaaagcctgggcacagttccagtcgttcaaggcggtccagaaaaaactcgatacccgtcgtggctccgttgcataccttgaaacggcgcttcaagacctgggtaaggccgtgtctgtaaagggcatgtacggtgatgttgccattatcgtttatgtcggccagtacatcgatccgcagaccaaacagaaaaccaactacatgccagccaatacactggtgttgggcaacaacgaagcccggggcattcgtacctatggcgctatccaggatatcgaagcgattaatgaaggtatcaccaaagcgcgacgctatccgaaaaactgggtacaacgtggtgatccggcccgggaatacaccatgacgcagactgcaccgctgatggttctggctgatgctgatgagttcgttgtcgtgaccatcgcataa

SEQ ID NO: 454246 - DNA, 333 bp, Serratia marcescens
atgattaacaaagaagtgttcacgcatatgcaaccgcagggcggtagcgatccggcacatactgccgttggggttggcggcattgatacggctaccccggcttttacgccattaatgattgatgcgaccagcaaaaagctggtggtttgggatggcgctaatgctggccaggccgtgggggttttggctttggatattgccgccaaccagccacgcatcacgtattacaaaagtggcacgttccgcgtcgaagacgttaaatggccggagtctgttaaaacggacgaaatgaagttcaatgcctttgctggtacgtcggtcagcgtcatttaa

SEQ ID NO: 454247 - DNA, 1299 bp, Serratia marcescens
gtggatcaaacacgtaatctgccccatatcgccagtatggcgtttaacgagccgttgttattggaacccgcctatgcgcgggttttcttttgcgcgttaggcaaagagctgggggttgggcgggtcattgatagcgcaaccaatacggtatttgaccagccgcagatggcagaagtggctgcagcctatggcggaagcagaacgtcggtgactgaccatggttacgacatacaggaccggatcgccatcgttccggtttccgggactctggtgagcaagtctgcgtcattgcgaccttattccggtatgaccgggtataacggcattgttactcgcctccaactggcggttaacaatcctgatgtagacggcattttactggatatggacacgccgggtgggatggttgctggcggctttgatgcggcagacatggttgcccggttaagggaacaaaagcctatctgggcattagcgaacgacatgtcatgcagtgccggtcagttgcttgcgagtgcatgctcccgccgcctggtcacgcagacggcgaaaaccggctctatcggggtacttatggcccatagcaactatgccgggaatatggagcaactgggtgttgacgtcacgctcattttcagtggcacccataaagtggatggcaatccttggggggcgctgccagaggacgtccggaagtcattccagaaaaaaatggacgcgatgcgtcaaatgtttgcagaaaaggtatcggcgtatagcggcctttctgttcgggcggtactcgatacagaggccgccgtttatacgggccaggaatcggtagacgttggtctgtcagatgagctggtcgttaatactgatgcgttgcaagtcatgcgagaagcactgagccgctcaacaacgatccggtcgataggaggccaaatgtcagcaaaaaatgaaaatcaacctgtagaaaatgtgtccactgtatcttctgatgttgccgtttcaccaccgacggcgagcgctgccgatatcgacgcggcggtcagtgcggcggttgctgcagaaaatacccgtattatggggattttgggatgtgatgaagcaaaaggtcgtgaagcttcagcccaggcactggcgtcaacgccagggatgacggttgaaaatgcccagcgcattcttgccagcatgccggaaagcgctcaggtccgttctgaaaccagccttgatcgtctgatggcggcgtcaccagaagctctggggcctggtaacagcaatgacaacgacaatgatttaatgaacattccggtttaa

SEQ ID NO: 454248 - DNA, 1608 bp, Serratia marcescens
atgaataaaaaccatcaaactttattagcgccggatggcgctacgccgctgcgtgaatatgccgggttcgcgggtagcggtgccggattcggcgggcaaatttccgagtggttacctgcggctcaaagtgtggacgccgccttgttgccgcagtttgagcgcggcaacgcgcgcgctgatgatttggttcgcaataacggttttgctgctaatggcgttcagctccatcaggatcatattgtcggctcttttttccgcctgagtcatcgccctaactggcgctatctcggcattcctgaaaaagagtcccgtgctttttcggacgaagtcgaagccgcctggcgtgaatatgccgaagacccgcattgctgtcaggatgtggaacggaagcggacattcaccatgatgatacgcgagggtgtcgccactcacgccttcaatggtgaggtatttgttcaacccgcgtgggatagcagtccgggtcgcttgttccgcacacagtttaaaatggtcagtcccaagcgtgtcggcaacccgccgggcgtgctggatagcaatacacagcgagctggggtgaagatgaataagcagggggcggccatcggctacaacgttgctgatgacagttatccgagctggagcgtcaggaaatgggcttatgtgccgagagaactggcgaatggccgtcccagcatgatccacatctttgagccgacggaggacggacagacacggggggcgaaccgtttttacagcgtgatggaacaaatgaagatgcttgatacgctgcaaaatacgcagctgcaaagcgcgatagtcaaggcgatgtatgccgcaacgattgagtctgagcttgattccgaaaaggcgtttgaatacatccttggcagcggtgacagccaggggcaagaaagcccgctgaacaagatgcttaagcagtatctgatctattaccagaatgcacaggtcaagtttggcggcgcgaaagtgcctcatctgtttcctggtgatgagctgaagttgcagacggcgcaagataccgataacggcttttccgtcttcgaacaatcattactgcgttacatcgccgctggtttgggcgtgtcatacgagcagttgtctcgcgattactcgcaggtcagttattccagcgctcgggcatcggctaacgagtcttggcgttatttcctggggcgccgtaaattcattgcggcacgccaggccagtctgatgttctcttgctggcttgaagaagctctgatacgcggcgtggttaagatgccagcccgtgcccgtttcagtattcaggaggcacgctgtgcctggagtaattcggaatggatcggtgccggccgcatggctattgatggcctgaaagaagtacaggagtccgtcatgttgatagaagccggactgagcaccttcgaaaaagagtgcggtaagttaggtgaggactaccaggaaatcttccgccagcaggttcaggaagcggaagaacgtcgcaacgccggattaacgcctccggcatggattgcttcagcgtttaacgcgcagctgcaaaactcaacaaaccacaatgagggaggtcaacgtggatcaaacacgtaa

SEQ ID NO: 454249 - DNA, 1926 bp, Serratia marcescens
atgaatatctcgaacagacagattaaccggctgggccactggatagcctccggtttgcgttcgctgttccgcccggttcctcttaccgccgtagaatgggcgaacgaatattactatctgccgaaagagtcttcctatcaggagggccgctgggaaaccatgccgtttcaggtcgcgatcatgaacgcgatgggcagtgatgacattcgtgaagttaacctgatcaagtcggcccgcgtcggctattcgaaaatgttgttgggcgttgtggcgtactttcttcaacacaagcaacgcaatggtctgctttggcaacctactgacggcgatgctgaaaactttatgaaatcgcatgtcgagccgacgattcgagatgtgccgagcttactggcgatggcgccctggtacgggaagaaaaaccgcgacaacacgttatcgatgaaacgtttttcaaacgggcgtggtttctggtgtctcggaggcaaagccgcaaaaaactaccgtgaaaaatcagtggacttcgtcggctatgacgaactggccgcgtttgatgaagatattgaaaaagaaggttcgccgactttcctgggggacaagcgtatagagggttctgtctggcctaaatccatccgtggttcaacgccaaaaatcaggggtatctgccagatagagcgtgcggccaaagagtccggtcacctgatgcggttccatgttaaatgcccgcattgtggtgaagagcagtatttaaaattcggtgatcgggatacgccttacggtttcaaatgggagtcagggaagccgaagacggttttttatctctgtgagcatcacggatgtgtgatcaggcagcaggaacttgattttagcgacgcgcgttatatctgcgaatacacgggtatttatacgcgggacggcttgcggtggtttgaatcgacaggcaaagaaattgatccgcctgaatcggtatctttccatatttggaccgcgtatagcccgttcacgacctgggtgcagatcgtcaaggactttcggaaaacgaagggagaccccggaaagctaaaaacgtttacgaataccacgctcggggaaacctgggtggaggaagtcggtgaacggccattacctgaaacactgatagagttggccgaacattaccgtgccgatgtgccagaacgcgcggtctatcttactgccggcatagactcacagcttgatcgctatgagatgcgtgtctgggggtgggggccgggtgaggaggctttcctgattgaccgtgtgttaatcatggggcggcacgatgaagaggacacgcttcttcgtgtcgataacgcaatcaataaacagtacaaattggctgatggtacggtaatgacaattggcagggtctgctgggacaccggtggtattgacccgatgattgtttatcgtcgttctaagaagctggggctgttccgcgtcatcccaataaaaggtgcgagtgtttacggcaagcctgtggcgaatatgccgcgcaaacgcaataacgccggtgtgtatttaaccgaggtaggcaccgatgttgccaaagaggttatttacagccgctacaaactggtaaaacctgaagacggctcgcctttacctggcctgatccactatccgaataatcccgatgtttttgacctcaccgaagccgagcaactgacggccgaggagctgattgaaaaatatgaaaaagggaagataaagctgctgtgggatagcaagggccgtcgaaatgaggcactggactgcttcgtttacgccctggctgcgttgcgcattagcgtatctcgctggcagttggatttggagctgttattggaaagtcgccaatcaagccggggtgtaatggcgggtggggataacgaagagttggccgcattggcggaaaaactgggaggataa

SEQ ID NO: 454250 - DNA, 555 bp, Serratia marcescens
atggacgtgacaaaagcacagcttgctgaactctttggtgtctcagtaagaacggttactacctggcaatcgcaggggatgcctgttttgtccggtgatgcaaatggcggacgaggtggggaaaatcgttattcttcggccgccgtgatcaaatggtactccgagcgcgaagcatcattagaaaatgaggtgctgagaaaggaactggatgcgttgaaggaaagtcaggagtcagagctgatacctggcaccattgactatgaacgttatcgtctcacccgagcacaagcagatgcgcaggaactgaaaaatgccaaggagacggcggaggtagtggaaaccgcgttctgcatgtttgtgctttctcgcattgccggtgagattgccgggatcattgatggcattccactttctatgcagcggcgctttcctgagctggaaaatcggcatatcgaatttttaaaacgggatgtggttaaagccatgaataaagcggctgcgctggatgaaattattccggggttgctgaatgaatatctcgaacagacagattaa

SEQ ID NO: 454251 - DNA, 1533 bp, Serratia marcescens
atgcttaccattgaaccacgcgaaaaacaggttgttgcactgaatatgctgcgcgcggcatggaagcagcatgcctcgttcatgatgtatgccccggttgggttcggtaaaaccgcgattgctgcactgattgctgacggctttctgagtcgtggcatgcgtgtaatgtttgtggctccgtataccgtgctgctcgaccagaccgccagccgctttatcgaatatggcttacctgccgaggaaattgggtatatctggcgtgaccacccggcctatgaccctagccgcctgatccagattgcctctgccgatacgcttatccgccgtgagttgccggacaacatcgacctgctgatcatcgacgaggctcacctcaagcgcaaaaaaattctgcagtttatcgaccatctgacaaagaacaccgcagtgaaggtgctgggtctttctggcaccccgttcgctaagttcttgggcaactactacgagaagctgatcaagccaacgacgatgaaagagctgatcagcatcggcgccctgagcaagtacgagttttatgcaccgtcatatccagacctgtcaaaagtgaaaacctctgagcatgccgtttacggccgtgactacaacgaaggccagctcggggaggtcatgagcgaagctacgctggtgggggatattgcgcagaactggctggaacatggcgaagaccgcccaactatctgtttttgcgtcaacgtggcccacgcaaattttgtcgctatcgaattcaaccgcgttggtgtggctgctgaggtcatgacggcatcaacaccacacgacgaacgccaacttattattcgccgctttgagcagggcataacgaagatcatcgtgaacgttggcgttctggttgctgggttcgacagcgacgtgcgttgcatcatctatgcccgcccgacgaaatcagaaatccgctggttacaaaccttgggccgtggcctgcgctctgcaccagggaaagaccactgcctgatcttcgatcacagcggctcggttcacaagttgggttatcccgacgacatcgaatacgactacctgccgtccagctcaacgggcatggaagacgcagcgaagcgcaatgaaaaaaccgatgaacaggagcgcctgccgaaagagtgcccgagctgccattacgttaagcctgccggaatttatatctgtccaaaatgcggctttaagcccctggccggcgaagatgtggaaacggacaagtctcgcggcctgaaaaaaatcaaaaaggccaaagtgacggtaacgccagaaatgaaacagagctggtggtcacaaatcctctattaccagcgtacccgcagcctgcaggggaaacccgttagcgacggttggtgcgcccatacctacaagcagaagtttggcgtttggccgcgtgggttgcacagaaccccaaaggagatgacgccagaagtgagcaatttcattaagtccaaaaacatcgcatttgccaaagcgaagcagaaagaacaaaggaacgcagcatga

SEQ ID NO: 454252 - DNA, 969 bp, Serratia marcescens
atgaacaccagacaagccgccattgggcgttggcccgagattttcaagttttacggcttacctccggtgacgggtaagaaccacttcaaaggtgagtgcccgctgtgcgggagaaaggggaagttccgctgtgatgataagaacggcgccggatcgtatatctgcgtgtgcagtgccggtgacggctgggcgctactgagcggcgccaccgggaaagagtttaaagttctggccccggaaatcgaccagctgatcggcaacgagtatacgccggacggcaactatatgcgccctatgagcactgttgacgctacccgcaacaaagtcagcaggaagtttgcaacgttgctgccgcttcgcggaactggcgccaacaaatacctgcagaaccgaggcatcagcagtttgccacatgaccatatccgctactgcgatcatcagcgtgccgctggtggggtttaccaggcgatttactctctggcgacggatgacaaaggcgagctgtgttacctacacagaaccctcctggacggggataaaaaagcggtcgctggtggcgcacagaagaagctgagcaagctgcaggaagatacgtatttagagcatgccaactctgtcgctatccgcatgtttcctgtggcttcgacgcttggcatagcggagggcatcgagacggcgctatcgtgccaccagatcactaactgcaacacctgggcgacgctcaacacgacatttatgcgcaagttccgcgtcccatcgggcgttaaacggctaattattttcgcagatgcggacagtaacggggcagggcatgcagcggcctttgagtgcgcaagtgcgaatctgcataagaaaaacgacctggaagaggtctgcgtacgctggccgagccgtggcgattttaacgacctgctgcaaaacggcgcagaggtctatgagtgggtattccgccgggagggcgtcaagtga

SEQ ID NO: 454253 - DNA, 651 bp, Serratia marcescens
atgacccccaatcagaaaagacagttaaaaaataacgcgtggtcagcagctgccgcagcgccgcgtaagtcatatctcggcaagctgaaacgcctgaacgaagtccagtccggctggattaaatcgctgcttagtgtctggggtgagtgcgtcggtggtaacacggcggggcaccttactggcggcggtggcagtttttggggctgcatcattcacgaagaatggaacgacgaccaggcgcagaagataacgcgtgttctgaacgaactgcgcaaggctggctataagggcgaagaactgatcgcgatggctaaaactatcatctggccgaaggaaagcctggcagacatgatcgctaacgcgaaagaagcggatgacgcaacgtttgtggagtccgtgattctgaaggcgttcaagaaggatagcccggtttacatccttggcctggactactacacgacaaccaaaacggttacggacatggggcgctatatgcggcactaccacgcaccacacctgacgcgcatccagtcagaggaccgtgtgcgctggtgcattgagttatttaattatgctgctttcgttgctattcgtgcggctatttgtgccgaaaatgcagaaaaaagtgaaaaaatacttgaaaacggataa

SEQ ID NO: 454254 - DNA, 1293 bp, Serratia marcescens
atgaaaaacttatttttggaagatacgcgatatgggtctttgtatataaaaaacatatacgagttttttgaagagcctcgttttttttccgtgtctaacgaagttggtggtttgttcattgtctattggattggtgatgatgatgattgcgataaatggtttataatacctatatctaaagaacggctcgaacatcttgagagaaaaagaattgatatccatgctgctcttactcgtcaggagcagagggcatattatcaggttaatataccgtatgataatgcagaggaaccagaattcttcaagttagcatctgaaggtattgcggaaaccataaggctgccaaaaccggggctttatatcagtggtgtcacacctgtcttagatacagggaagcttggtgatgaggttaagttctcaacgcatgagattcatatagagaaaagcagtaagggaaaggctccattggtccttagtggggtgtcgagggtatttgagaaatttaacgatttatataattcaatactcgaatctgttgatctgaaagacgcgatgactcctatttctgggcgtccaggttcttttgctttgtcttttcaggctgaaaaattagagtcctttgaaccattgttgaatggcttgagtgacctgattcgcaataagatggacataataccatacattaagggtaatggtgttgatgttcagatggttacggcattgttccagagtgttattgatactggcacaacaatggaattaaaaagtaacacgacagatgatgttgtgttccttctaaggaaatcagatgctgaactatatataggtggtttggcaaaacttgccagcgagtatgttgggggttatcaagttcctcaggcaaatatcattagcaaggtgttcgaaattgttcagttgaagtatgaagataaatatttggatataactacaactggcttggatgaacgtcatgttcgatattatgttcatgcagctaaaatattaggttttctcagcgatagtggttctgtaaccgctttaggacaacagttatccgaagcgtcagatgagaccaagctaaagatagctgcaaggtgttttgaagccagtcattgtggatgggcatgggtcatgtggagtaatgttaagaaccttggtggtttaactgctagtactgctgaggaatttcttcaagacaaatgcttatctttaagtgcagaaacgattaaaagaagagcctcaactttacgacaatggtgtgaagcactacagtctagctatcaagaattttaa

SEQ ID NO: 454255 - DNA, 219 bp, Serratia marcescens
atgaatctggatgaccttactgatgaacagagacagcagcttgatagcattaagagcattgttggccattgtgttgttatgttgcttgctcaaagaaagactattaacacaacaaacctattatcacacatagctggggaaatggaaaaaattccagaacgttcagaatttaacaagtatagagctacgttagagtttgtaggaaccgtttcgcaataa

SEQ ID NO: 454256 - DNA, 630 bp, Serratia marcescens
atgagagagatacgaaaaggctctgagccgcgcttactcactgaatatcgttccagagggggagaatatgatggacctaattttacacctgtaaaaaatgccatcagatcatctttgttgacagagcagggatacctctgcgcctattgtatgactcgcataacggccgaaacaatgaaagtggaacattgggcatgccaatcaaacaacccgcgactccagcttgattattcaaatctgttaggttgctgtatgggatccgaaggagaaaaattcactagtcaaacttgtgatacaaaaaaaggtgataaaccattaaaatataaccccagcaaacaacaagatcaaattaataacatcataaaatataatgggcaaggaaagatattttcaacagatatagagttctcggcacaaattaatactgtactcaaccttaacaaggtcaggctagtacaaaacagatcatatatacttacatctgtacgccaaaaactttccagtaaaacgggtaagcgcagcagaacagaaatcaggcgttttttagatgattacctgactctcaatcaagatgggcaattgagagagtattgcgggcttgttgaatactacctcttatcaaaaatatga

SEQ ID NO: 454257 - DNA, 168 bp, Serratia marcescens
atgcgtaaagcccattttactgagcatcagatcatcgccgtgattaagtcggttgaagccggacgaactgttaaggatgtctgccgcgaggtcggtatctctgaagcgacctactacaattggaaatctaaatacggtgatatggaagctctgatattaaaaagataa

SEQ ID NO: 454258 - DNA, 279 bp, Serratia marcescens
gtgatctttggcaccaaaggcggacgaccgcgcataacgcaggtgattgaccgggaagccgttcgccagactgtgaaagaggcgctgaacattgctgggaagcgtggcgggcatctgatcgacaaaccggatctgaaatccgcgatggactactggcacaaccatctccgcgatgccgggctgacgggcgaatactctccccactctctgcgctatgcctgggcgcaggacgcgctccagcattaccaagagcagggtctgagccacaaagaggcgtag

SEQ ID NO: 454259 - DNA, 747 bp, Serratia marcescens
ttgttatctcttgctaaactaaaagcaaatgatattttagatattcctatagatattatcaattcctataaatctcttaattttaaaatacaacgaaaagtatttgattacgttagcgtatctcctgtaaacaaaaaactcccatcgctcgactatgcaaatattttgtcggtattggagttgttttatgatctttatagatggggtgaaacagaaactaaatatgtaaagtcaaaagaacaattgacttattttgctactttaatgaatcagtggaccaatgattattcaataaacagaattataaacgaaaatattgatataaaaagaaccattgtcattgaacggggacaacaaccaataccttttgacaagaatgatattaatcatgttaataaagtgatcgacgacattctttataacatagaaaggattttatcgttcttttttgaaaaatacttcaatcattactataaatgtctggctgcaattttaggggagggcaatgcgggacataattgggctacatttcttgagtatggttctaagaatccgttatgtattagcttacaaacattaggtatttcaaggcatgctgcaaatataattgcctcttccaaagaactcaggagatatttaaagttcaatgaggattcatatgagataattagtgttgataagcaagggctgttgaattctttgcaaaaagattctgttgaatatggagaggttaaaatatttctttga

SEQ ID NO: 454260 - DNA, 963 bp, Serratia marcescens
  misc_feature (945)..(954): n is a, c, g, or t
atgtctttattaattaaatcactggtttcagacagggagagtaatctggtaaatctcgttgatgggttcaaattatttgctgacaagggtgtgcttgataccgcagtttcccgagccgaggtggcagcagaaaaagcagaaaccattggggataatgaatatacgtttaaaacggtagacgaaggacttgcctcaacgtctattgggcaatacttccgcgtcccgggtggtccaaatgataacgtggcattttattactacctgaacgataacggccaagccgtacaggtttctcaaattgtcggggcttcggcggttgagaatgccattaatacggcaaatcgcattgacgcaagaacggcggggctaaactcgatttacacccaggatggtaaatggatagttggtgatccccgtgggcggcaatccatcctggtcgataagaacggggacaagactctattcggaaaaaccaaggcgtatctgattaacattaccgatcggttgctattcggggaaacggcgaaaatgtccaccgccggatctggatacaagtgggggctgatggggagtaattttcgtgttgcgcttggcatgcggaatgataacaggacggtagaactgcacggtatcccattaaccactcagcgcggcgcgttgccgaacgattttgtggtgactggcgactcaatatctcagtttggtctggctgcatcacaaccgaatgcgaaagggaaaatttacgatccgctggttaatgcacaatgttgggcagcgtgggcgatgctctttaccaatggacagtttcgatacgcggggacgtacgcgactggcggctatacagcggcgcagatcctcgcaaaacatatcccgcgcgtcattgaagcaaaacccacgttctgcatcgtgctggcaggccatgctttgccgcgtacgaccggacannnnnnnnnnccgcaatga

SEQ ID NO: 454261 - DNA, 552 bp, Serratia marcescens
atgggcaaggcagtggcggaaacgatgaaagaatggatcgcccccacaaccccgcgaaaagcggtctccgtaacgacgccggaaaacagtgacaatcttctggccaacccgttattcatcgagcataccgacggcgtccctgatgggtgggttatcgattcatccgggacgtttggcgctaccgatgatccggatgtactgggtaatgcctttgtcatgacagggcgcgccggatcggttgccatgtgtcaccgtacactttcggttaccgccggccggcgctatgggtttggcattgatgtcaaaatcactgccagcctgtcgagctgggtatcgtgttatgtcgttgccggcagttcgacggaggatactgcagaaactgtttacctggcaggtctacggaactggaaagagtcaatagacggctatggctatttctactatgaattcgccgtacctgacgacgcgacagagatcaccattattgccaaagcacaggacggtacgcttagtgttgcccagggcggcgtgttcaacatcacagagatttag

SEQ ID NO: 454262 - DNA, 345 bp, Serratia marcescens
gtgctggtagctacggggaaaactgcaccgtctaacacgacgttaagcctgggcggtgccaccggggcctggacgatgtttgcagtatcgctgtctgaaacggaaattgtcgggatgcgagctaacggcaacccgctagtgaaagccctcgccgacggccgtgcggtgagtagtaaccatctggtgttcaacggcgcaccggaaggcagtcaactgaccgatggcgttgatgggattggcggcggcttggctgtttatgacagcgtgttatccagcgatgaaatgttggaagcgctaaatgatatgcgtgacgctatggcagcgaaggggatacccattccttaa

SEQ ID NO: 454263 - DNA, 159 bp, Serratia marcescens
atgaataccttcataaaagcactcgttcgactcggtgccgccatatcggggctttcccttatctcagggttcacccgctggcccgaggccatgttcatctataactttgtgatgttagccatctgggtgcatgccgagtgggactggcgcagaaagtag

SEQ ID NO: 454264 - DNA, 1431 bp, Serratia marcescens
atggtttccgatggaaaacgatcattgaaatcaattggtgagactccaatcaacgctggtgattatttcatcgtcgagtttccacatcatgtaacaggatttttaacttttcatatggactgggttggtagaggaaatgatgcacctaccagattaagattgatttttggcgaagtcccaagcgatgtaatggaaccactgtatccgtataatggaactttgagtgcctcatggcttcctgatgaaatcataaatatagaccatcttccggctgatgtcactatttcgaggcgtcatgcatataaatatgtaaaaattgaggttatgtctggctctaaaaattatggtgtaatgtttagtaacattcatactgttgcagttagttccgctggtgaagacaaacaagcaaataccccaggcctctcagcaaaatgggaaagaatagaagaaataagcctgagaacattgcatgagtgtatgcagaccacatttgaagatgggccacggcgcgatcaacgtttatggttaggtgatttaaggttgcaagcactgacaaactatctcagtttcaaaaataacaaccttgttaaacggtgtttatatctttttgccgggctaacaaatagtgatggttttgttacggcatgtgtttacgaaaagcctactcccacggccggggaaggtgtcatgctggactacgctgcactatttggtccaacacttgcagactattattctgcaacaaatgatcgccaaacacttgaacatttattacccgttgcattgaagcaaattacattaataacggaacgatatgtaaataatgacggggttattcaaattcctgatagaccattcacttttatcgactggcaggatggattggataaacaagcatcaatgcaggggttaatgatttattgttgccgacgagttaagagtttgacggaacttgttggagataatgcctcaagtgcaaagctggaaagtttgattcaacatatgacgaatgccgcaatgcgttatttatggaaatcagattccaaactattcgtcagtggaccaaatgcacaaatatcctgggcgtcacaaatatggatggtgctagctggtattgttgacaaccagacgggaaaggatttattgcagagggttatgaaaatgccacaggtaataactccacttactccatacctttatcatcatcttgtatcggcatttgtaacagtaggggacaaaaaaagtgcgcatgatgttgtgcttggatattggggaatcatggcagagcacggggttgataccttctgggaagccttcgatccacataatttgaaagcatctccttatggcgcgatgcaaatcaatagttattgtcatgcatggagctgtacacctgcttactttatccgttcatttttcaccagaccttaa

SEQ ID NO: 454265 - DNA, 162 bp, Serratia marcescens
atgaccgacacagaacaattcgcttgcgtcgtcgggccgctgccacctgtttccatagcggtgtatccttcatatctgcaagcttgcgactatgatggatttcgcatggaacacctgatgtgtatctttaccaacatcaacgccaataaagacctggactga

SEQ ID NO: 454266 - DNA, 2271 bp, Serratia marcescens
atggttagcaggttaaagcaaaaggtgttcagtgaccccatcggtgtcgataaggaaatgaaaatatcggagcttccttcggctgagaattcgttaattgatgaccttcttgttatttctcaaagcgacggtgatggtttattgcgaaccaaaaaaatattaatgtcattactcattaagtcgctggtttctgatcgctccggtaatctcgtcagtcttgtggacggttttaaactttttgccgacaagtctgttttggacggattgacggaaagggctgaggatgccgcagggcgggcggagaatactgctgacgccaacacgtattacattacccctgatgatcctgatggaacaattgccggccttgttggcactcctttcgggaaaagcttccgcgtcggccagggggatggtaagggattcaaatattatattaatgaaaatggtgctgctgtggagattgctgggacgcccggcgcaggtgatgtcgatagcataaagaaaataattggagaagaagagggagcgaaagcgtactatagttttgaagacactgatgggtttgaaattggcgaaatagttaaagatactgattctcaattacctgcttttcgccttggtggtttcaaactatcacgtagcttaagtgatattttcaatgttgaagactttgacggatttggtgtgtctattttagatattctgaaccgcatgcgccacgttgaaaaaaatgcactcattaaaaatggcttaatatcacgtagcgaacgagatgtttttgccgttggtgatgctgacgggttcggtatatccctcgatgacatgctgaaaagattgcgcgaacttgaatctcggccagcgcctgtcccgccagtaaaatctgatgttgtagcagagatgcaggcgctgagtaatgcatatactgcgtcgctttctgaacgagtgtcggcgccagtagcgaccctgaaaaaaggtgtaaacattttcattgggtatggtcaatctctggcgatcggtgatgaagcgttttctgttgtgacgcgcgagccgtccaaattaggcaataagatgctcggtcaggctgtgcgaggagcgacatacagcaggacaacagaagggttatttaaccctatcggtggtgaaaacgtttattacgatcttgaggaaaaaaggcagcagggtgcaaacattattactgacccggcagtcaagacgaacatgggcgaaacgtttatgtctggttttctggagactctgaaaactctgcataacagaggcaaaaacgttgttaacgatgacgatgttgtgcttgcaggctctgtaacggggtgcgttggtactgggctatccacgttgctaaaaggtgcgtctacaaattattaccagcgtcttttgacttgcattacggggcatgtagaggcggcgaagaaagcgggttacaccgacatccaggttgcgggtatcttgttcttgcagggcgaaaatgactacggtacgaatacgagttatgacgcgtatttatcaatgctgaacacgctgattgatagcatacaaaaagacgtgaaagagctaacggggcagagtgacgccgttggtttttatacataccagactggagggcattacaccaactctgttatcggacggttaccgatcggcatggcgcagattgatattacagaacggactgattcttttatggctgcgccgatgcacccatacccgcaagctacagccgttaaaacacataaagccgctaattcataccggtggtggggatgcgcggcggctcacactgtctggaaaatttataacgatgttaatcaccagccatttaaaatgattaaatcggtttatgatggcgatgatatttatattgcgttccatacaccgtgcccaccgttgaaaatagctccgttttatgtcgtcggtgagcctacggttttagaagatattggatttaacatcatcgacgatgtagggcagttgatgggagaagatttgaaagtttcaattcatctacccagcgtggtcaagataacgccatctagaaagcttgaaggcgatgcacgtattaatcttggtgacgctaagcattacggctctcataatgtttctgactcaagcccgcagatatcaatatttaattgggactattacggggataataatcagtctgagtttgaaaacattccttcacttaatggtaagccgctgcctgtttacaactatgcagttgcacaaacaatagatgttgaggttatttaa

SEQ ID NO: 454267 - DNA, 816 bp, Serratia marcescens
atgaacgcccagcgccagcctggtgacgtgctgaaccagaaaagccgcagctgggacgacgtgaacctgggcgacattgtgaagactgtcgccagtgacaacgggttgatccccaaagtggccggcgcactggcagacatcgctgtcgggcacctcgatcaggtcaatgaatcggatgcagcgttaatgacccgactggccagtcgttttaatgcgatcagcaaaccgtccggcggctattggctttttcttcagcaaggtgagtcgttaagcgtcggcgggaagccactggccagcgtaacgattttaaaggatgaggtatcggaatggagttatagcgatggccagcagcgcggcgcaacgactggccccggtaaaaaaggtgagggtgggaagaagggaaaaatcagtgtcgcgtactttgacccggaagatgggcgaacgaaaacgcagtcactcgaacatgatggcccgtcacaatcccacccattcacccagccgaccaagaccgtcgccaaccacagcgcgcaatccagaaaaacgcaggtaagccgcaatgagcgccgcatgacgctcagcgggccgtgccggccggcacatattccactgacggcagagagtcgggttattacccagggcttcggcacggtggaggatcggagctggttaatcgaatcgttggtgttttctctcacctcccagggaatgtcgttcgcgttcaatttggcgacggatatcaagccgccaaaagggaagggcgggaaaaaatcggggaaaaagaaagatgatggtattggctattttgataaaacataa

SEQ ID NO: 454268 - DNA, 366 bp, Serratia marcescens
atgaccatcatcaccgccgccggtatgaccatcgtcaccgccgccggtatggccatcgtcaccgccgccgctatgaccaccgtcaccgccgccggtatggccatcgtcaccgccgccgctatgaccgtcatcaccgccgccggtctctttctgccggatggtcagatccacagttttccggtcgcgcgtcagcgacgcttccaaaaaggccgaatccagcaccgcttcgctgaacatgccgttgacgccgccgccggcggtcagaatgcggtaggtttgtccattttgatagctggtgtgcggatcgagggtattgaccaataccttgacgttcttatcaatgtaggcgctgtcccgcattcctag

SEQ ID NO: 454269 - DNA, 678 bp, Serratia marcescens
atggcaggtcagagcctgccccgttacagcgggtcggataagcgccgctggcagctggtaccgctggtgcaggcacgggatggggcattttttgttgattcgcagaaaggggtgggctatgacctgcagagcgacagcggactctacctcgaacatacgcttggctatgatctgggacgctcagaacggaattcgaactggcgggacggcagcgacaggctgaacggcatgggaaatattaaagcgacggtcaacaccgctgtcgcgattggctggtcagtcaccccctggctaacattggaaggcaaagcaaccctgccactgagcgacagccagggcgtgaattaccaaacttccgccacattgatccctctgcaaacaagcaccgatacggtggcattcagcacggcggcattattcggcgacagtcggtatatgaacacgttatatggtgtcagtgccgcgcaaagccgccgcacaggctacacggaatatcaggcgcccggtggtttttatggtgcggataccagcctgacctggagccatcagttcaccccgcactggggagcgctggtcagtgccgactacatctggctggataagcatgctaaagagagtccgattgtattccggcgtaatgaagcggcactcactctcggcgtgctgtatacgttctga

SEQ ID NO: 454270 - DNA, 930 bp, Serratia marcescens
atgaccattgagaacggtgaaggtggatttatcaaatccaaacctgagtctctcgatgaagaattattatcattagaaaaaagagaaaaatccattagcgatctaattattaacctgactcatgaacataggattttgctggatgacaaaattcaacttgaagctgatctgaacaaagtcagtggaatgatagatacagaatcaaaacagtttgttactccatttctcactcaacgtgattctttattaaaagaaataacatctgtaagtaaaaaaagagagactttagtatcaagcttgaaagttagaaaccgtcaagaggaacttttaactaagcaaaaaagacttgcagataatatagaaactcttatagaaaaacttaacgatttaagagttaatgctcctagcatagatggtatattatcttctttaggggatgatttgatgacattcttaaccggcgtgaaaataaagaacagaactgggataagcataagtaaaaaacatttctcgcccattgtaagagatagagactactttaatatcacatctggaggtttaagaactataatttctataggatatatgtcatcaatattaaagagttccattgactcagacataaatcatccccgttttttgatgcttgatactataggtaagtatctcggaaaaaacttgaagccgaaatatgcatccgagactaatgtaaaagatgatattgatgaaggaatttctgatccagaaaaatatgaaataaccaattatgcgcagaaaaaaagaagcccatgtcagataattgttgtagacaatgatgtccctgataagctttctgacagattaaaagctataactgttgctcactatagtgcaagtaaggaaaacgggttacctgtcggactaattgatgatgtcatttacaaacattaa

SEQ ID NO: 454271 - DNA, 543 bp, Serratia marcescens
atgacagtgagatatatttttttactactcgtatttattactggcatttcgaatgcgtgttataatgatggagtgaaaaaattagtcggaaatgatcgtgggaaggtaattcaagtttttaattctgaccgtatttcatcaggaagttctattttattttattatctaaatgcagatgatgaacatcctgacctgaaggtatcatacgtgcctgatagatgccaccccaagattaatcttgtgtttgattcgttttcatataatggcgaaactgcaaatatagaatctgttttttgggggaagggaaagtacaaagaaaatttatttataattgttagctgggtttataatttggacggtataagtactgttggcaagtattacagtgtattttcctacgattataataaaattagtatggttagaaataataaactgacggaccttttcggaagcggacaagatggatttgttgatggaaggattgttaaatataaatttaaaactgctggagatgtttggagttatctaagaaaccgatag

SEQ ID NO: 454272 - DNA, 960 bp, Serratia marcescens
atgaaactatttaataatatgtggtgggggattttatttctgtgttcattttatacgcatgcgaaaagtgaattaggtgttgtagattgcactataaaagaaaatgtatcttgtgatgtttctttgaatataaaacgaaatgttgatgatgtatcttatagggttgaattaatagatgttaaaactgaggaaaaaatattcccttatcctgaagaaaatgaaacgcttgaaagtgtatctttacaaaagtatggggtgctatatgttttttcaaagcagtatcttgatagtactaaagctatagagttcattacatttaaatatgataataaaataccatcatctgtaatttattattacattgagagttccattgatttcaatgctggtatgaaaacatggtctggtaaaaaatgtgaaacatcagcaggaataattattgaaaaaaatgacgtttcgctattgcaggcagcctcagagttatgtggcaatcgaataaaacttaccgatagccttaatgaatataatggtaatgatgttatttttcatctattacatattgaaaatggcttgaaaaaaaatgaaatccctgtgataggtcttgaccgcaaagataccgacgctataaatttgaacgatattggttgcttaaataactgtgatatagattcttatgtggttaactatacagggaagttaaatgaaagaactagaataggattgcacttggagtataatggagataatgtttctggtttttatttctatgataaggtgaaaaaaaagataaatgtaattggacgtcgggaaggggatagattgatactttcagcaacagtcccagagggaatggagtcttttgagggtttattagaaggcggtcagtttaaagggatatggtcaaatgctatgaaaaataaaaaataccctttttgtttttatcttaacctaatccaataa

SEQ ID NO: 454273 - DNA, 738 bp, Serratia marcescens
atgcatccggtagtgtttttggattcaattaaaaactcacctaagtggtttgatatcgaagaatttattgagaaatataaagaaaaacactcttcagtctttgggttctatgatcgagggagaaaaataaccatccccgcattgactaacgactctgaagaagcattgcgagaaattttgcatgaaatgaagaatcaatattatagttattttgataattttaatgagaagtttgtttcttacatgcttgcaacaataagaatagaatcttatgcgtacaggcagaagttattctttaaaccaataagtgagaatatctcatacgataaggccgaggttgattatggctcaggtccaacggcatctaaccgacaaagagctatattgaaccacaataaaaatattggcgatgggtataaatatcgtggacgtggtttagtccagttaacatggaagattaactatgaaaaattcaaaggtataacagggatagatatagttacaaacccagatctttgccttgaagtcagcagtgctgtttctattatgatgaaaggtatgaaagatggtggtttcagaaaggggcatacattggatctttatttgggtgaaggtaaaaaggattattttaatgcaaggttaattattaatggttatcgacatggcattcctgataaagccgatgagtttaaagattatgctgaattgtttgaggtgataataaatgaaactatttaa

SEQ ID NO: 454274 - DNA, 315 bp, Serratia marcescens
atgaataaaaaaaccgatattctacttaaggttaaaaatgaactcaagcaaatggttaatacacaggaaaatacagaaatatcgaaacaagctgagtcagacccggagcatctttatctggtcactgttaatcacaatgatcatattgatgatgtggtgaaggagtggatcgctccgctatcagtagcaattcccattccccataccgccggggagttatttcacgttgaagaatctcagcgcctagctgtgctgagaagcctgccaaatgacggctctgtcaccctgattaaaaaatataaaagggagaaataa

SEQ ID NO: 454275 - DNA, 150 bp, Serratia marcescens
atgaatattcagccgccattaaaaaaatccgaaacattggccgtgaatgggctaaggcaagcggcaaaatcagaccggttagggttgattctggccttggaagggctaatgcagcagcaaggcagcaacttgaacttcaacggaaaatga

SEQ ID NO: 454276 - DNA, 609 bp, Serratia marcescens
atgcttaacgtttccaataccaccagcgcggcgcgtaacgccgcgctgtccgccactgccgccgccggcgcacaatttaccgaggtcgccgccttagggcagaagatcggcgaaggcagccaaaaggatgtgttccactcgctgcaaaacgccaatcactgtgtttgtttgttccgtcccggcaccacaggtgtacagtccgccgaacaggtcgcgcaaaacgagcaggctgccacccataagctgaaagaattggggttcccggtggtggacgtgcatggattggtttcccataacgggcagtttggcctgagtaaagagtttattcgtcaggccattgatgctgctgatatcacccagggtaaacaggaattgcccgaggagaaaggtttcaataaaaacgtggaacaggactgcaacgatattattaagcagttaaaaagccacaatttgcatatcgatgatttgcagtttctgatcgatgaaaacggcagggtgcggattaacgacccgcgcaagatagagtcttcatcgccggagaaaagtattgcgaaggtaaaagagttgaaagggtttgcggtgaataatctcttgagcgacagcgaataa

SEQ ID NO: 454277 - DNA, 729 bp, Serratia marcescens
atgaaagtgattattagtgcatttgttctatttttttcttcgtatgcggctgctagcatccagatatacgaaaatgatactagtgttctggggctggagaaaacagagggaaaaacagaggttacttcgacgttatatggagggagtaatgactcaggcgcagcatctccagctgattgtgtggttaaatattcacttaaaattgacgggggtaattacagaggtatcttgataccgttttctactgaatatatgtcttattctaatgaaaaaaatgaggcatcatttgaacctaatggaagtgtgattacatatctctctaatgcttttttggatatttgtccaatggggacggacttcaccggtgattataatttggttgacgtaagaaatcctgattacaagaataattttgatgctttaattaaattaaaccacaccaatgctcttaacttattcaattctgaagatgtttatcgtgccatagaacttcttgaaccttatatacgtgaatctataagtaataattattattactctaatatatttaatgactatggttttttattgcagcaggctggaagaaattcagatgcgctaagtattttaaatcttgtgataaaaaaaaaccaaaacgtacagttgtttatcttaatattgctgatgcatattggggggtgggggataaatttaatgccgcgaaaaactataagaagtacatatcattaa

SEQ ID NO: 454278 - DNA, 732 bp, Serratia marcescens
atgcatccggtggtattcttatccgtaatttctgacaaaaatcagcacaaacggcgtgattatgatcttggtactctatcttctaagtatgaaacaggagggcgaggttctcagactgtttcgggaggtgcaggagatgctggtggagcctcctacggggcttatcaaatgactagcaaaacgactaaaagggtacatggtcagctgcgctcttttgttggtggaacagttaaaatatttatctctgatacatcatttaaatggaaaaatgaatttgctgggttaatccccggttcatctgagttcacgtcaaagtggaagaacgttgtgaaaaaaaatcctgatgaattcaagaaagtagagcacgaatttatcaaaaaaacacattttgacaaattggttgaacacacattatcagaagcgggaatagatattcgttatcattctcatattcttaatgatgtcgtatggtctacagctgttcaacatggaccatctaataatattatcattaaggcgattaaaacaattggtggtaatgttgaaaaatctaaagaatatgataaagcgttgattaaggctatctatgatgaacgtggtaagaaaaatgaaaaaggtaatttgatttatttttcaaaaaactcaatgaaggtacaagaaggtgtcagtgcacgttttgtgagtgagaaaaaagaagcgttaaagaggttgagtaatgaaagtgattattag

SEQ ID NO: 454279 - DNA, 846 bp, Serratia marcescens
gtgcaggatatccggcgtcgcgattggccctatctctttacgcacccagttgcgtacttcggtatagagctctggcgtcggttcttcgccgtgattcagcgtaatgtaagcgtaaatcgcctggcctttaatattatgtggaataccgaccactgcggcttcggcgattttcgggtgggcaaccagcgccgattcgatctccgccgttcccagacggtggccggacacattcagcacatcatcgacgcggccggtgatccagtagtagccgtcttcgtcgcgtcgtgctccgtcaccgctgaagtacatacccttaaaggtcgagaaataggtctgttcaaagcgcgcgtggtcgccaaacagcgtacgcgcctgaccgggccaggagtcgaccatcaccaggttgccttcgcaggcgccttcctgcggcgtaccggcgttgtcgaccagcgccggctgtacgccgaagaacggcttcgtggcggaaccggccttcagttcggtggcgccgggcagcggggtgatcataaagccgccggtttcggtctgccaccaggtgtccatgattgggcattggccgttgccgatcttttcgtagtaccactcccaggcttccgggttaatcggttcgcccaccgagcccataatgcgcagcgagtcgcgttgggtaccttcaatcgccttgtcgccttccgccatcagcgcacggatcgccgttggcgcggtatacagaatattgacctgatgcttgtcgataacctgcgacaggcggttaacgccagggtaattcggcacgccttcaaacatcagggtaatggcgccgcaggccagcgggccatacagtaa

SEQ ID NO: 454280 - DNA, 231 bp, Serratia marcescens
atgctggaatttatcaagccaggcaaacagacaaaaaacgtatttatcgaacagtttaaccgaatgtaccggacagaaatattggatttttatctgctcagaacacagaatgaagcacaggaaataacagaacgcaggatggcagaatataacagcgagcggcctcatgaatacctgaataacctgacgtcggaagaataccggttgatgactgagaagacggaaatctaa

SEQ ID NO: 454281 - DNA, 396 bp, Serratia marcescens
atgataaattcagcgaaagaattcattactctgagaaagagtgaaaaccctgatgattaccacagagctatacatgaagatctacatatagatgtgtgggatgatgtgattgataaccaccccgacatgaaaccctggattatcgccaataaaaatgtccctcttagaatattaaaaagattagttaacgaccaggacaaagatattcgatttagtatcgcaatgaaaaggaaattagattttgagctattcgaaaaactatccagcgatgaggattattccgtaaggctatgtatcgcaagaaataaaaaggctcccactgaaattttaaaaaagttatctaacgatcatgaggaaataataagagaagtggcaaacaaaaaacttggaatttaa

SEQ ID NO: 454282 - DNA, 1029 bp, Serratia marcescens
atggaagagataccgccagagtggttgcttgagcttaagctgcgtccaggtgcatttccggcagactggcactggagcaataatgacattgcctctctcctgcagggacggttgctgactaatagcgacagaacaagggcatgggagcgcgagattcgcgagacaccggaagaatacgaaccgttggtgacgcctgctgaggcgatgcaaaaaatacaccgctggtgggaagagaaccagcaggaggagttggcgaaatacaatacccgactctatccggaaggttggtttgactgggaagctttaagaaatgactctgacgatcagagttcgcgactggcgttattgaaactgctttatcttggctcatgccagaccattggccggactcaggaagaacaacaccgtgccgcgattgagcattttgaggacaaaggctggtgggatacgtttgttaatcctgatgctgcgcagcagtggctggatgtgatggatgaatatctaaacgagtcttttgacggtgataggtatcgtatctggttgcagatattaccgttgtatcgtttttccagacacttagatacctatcgcgaactgctggatatgtcggaagcgttccttgaggatattggggatttactgcgaccggcatccagttccaggctttcgggaaccgggataggtgtcgttccggaattacgtgcaactctgggaaccggggtgaacttcattttccgtgaactcgtgcgtaataacgtgttcaccgacgccagcattcatcgatattgtttctctgcgccggagcgcgtcaggcgtctgttactggcgatggagttcgatgaaatggatgttaagcaatccactgccagtgactcgcttctgctgtggacgtttttccgtgaacacctcggtgaggaaaatgcgacctttaatcattgtttcgacataccgctgcgcattttaaccagcgacggaaaacgcacgcttcgtattgagatatttggacaggatcccctggattacgtatga

SEQ ID NO: 454283 - DNA, 267 bp, Serratia marcescens
atgaatgaaacaaccacaacaatcggaaataaaaacagcaagcgaaattgtgttcaggattatttagactgcctcgccagcggtgaactgagcctgtcaaaacttaaaaatcaatcaaacaacaaggcgctgactcccggccgccggggcattatgaagcttgccattgccctgtgggaatataaaagcctgaaacaggacattgcaacgctcaaggagcagcttcctgacgcattaactgagctgagtggtgatgagtatgagtaa

SEQ ID NO: 454284 - DNA, 174 bp, Serratia marcescens
atgagtatgagtaaggtaaacgtacttatcagccttgattctgatttatatgccgcgataagcaatctccgagcctccattggtgggagcaaacttgatgaggaaagtattattaactacctgctggcgctggggttagagaaggctctagagcaggcagaaatcactgagtaa

SEQ ID NO: 454285 - DNA, 153 bp, Serratia marcescens
atgaaggtacgacttgatcccatttcattccagattgtcctagcatacgctaaacagaactctatgaccgtcccgcagattttaagcaaacttgctgatctatttgttgatgagcttgatgcaggaagggatcctttaaaaactttaaaataa

SEQ ID NO: 454286 - DNA, 609 bp, Serratia marcescens
atggaagataagaaaaataataaccagttccttcgtattgattttagcattctaaaaataaatgagattattgtcagtggtaagaaagaaaagtttagtgcatcagctaaacagctttattgctacttattaaactggcctgaagcctttccaagccataataagattgctgaagtttttgggataacccggaaagcagcagagaaacagattaaaaaactgattgaacttggcttgattgaaagggtgtcacgccccggaagcagcaacttatatagggttctgccaataacagaggaaatgagaacagggcgttcatactctgagaataaaggcaccaagtttgagcagctccctgttgatatctgcgaggcaatgccagagttaccacccggcagcaatgaacaaccagacaacgaggaaaacgcagatatggatttagattttgatgagctattagcgccacagggcaaggggatggataagggttataagaaggagcaggaggatagggagctaggggattatagggttactcgaacacccgtacctatccctgatgggatagatcctgacgacattaacacttatccagaatgcccgttttaa

SEQ ID NO: 454287 - DNA, 933 bp, Serratia marcescens
atgagtatgttaatctggaagaaaaaaaataatgctaaacacttaatcttgtttatacacggcttaaaaggtggaagtgatacgtgggcagttgataagatcacatccttcccacagcttatatgtgaggatgaagatttttgtgatgcctttgatatagcttgttttgagtatttcactaatttcacgaatacctacggtaaaagtagaaatctactcgccagattgttcacatcactaacaaaaaaagaagtcaatcttcctgttgatgaattatcagagttacttgttggtgaatgtcaaataaatttatccgattatagtaatataatatttgttgcccacagcatgggaggcttaatagcaaaatcatgcattattaaaatgcatgaaagagatctttctcacaatataactggatttatttcacttgctgtacctcattctgggtcagaaactgcttcatgggctagtatggtttcatcaaatgtccagcttggtgatttaagtgtatttagtaaagaaacagattcgctaaatcgcagatgggtaaaattgcccaaactccctgagttaaagtttttgtatggaagctacgatagtattgtagttaaagccagtgcaattcctgttcaagtttctgctaaagagtctatagctgttcaggaggatcatttgacaatttgcaaaccaaaggatagggattctaatgtttatcttatcgttaagaaactagctcttgaaatacataacaaaacggaactaatttcatcttcaccagaatttaaagatgataagcaatatgacaaagaattttttgtattgaaaatgatagtagctgatgtacatagtgacatatcaaaacatgctaaggagtattattataatgcagaattggccagaaatattttcactaacgatcgagatagataa

SEQ ID NO: 454288 - DNA, 318 bp, Serratia marcescens
  misc_feature (306)..(315): n is a, c, g, or t
atgaaagaagatttacctattgatttaaataccctgaaattaacatacaaagcaaagaatagatttaaactaaacgaggatgacagaaagaaaattttgaggctcctcctgaataaagtcagcctaacaatgatcaaaaagctgttccctcatgttccctttgcaactatctggaaattagcaaccaagccagaaaactgccctgcattaacatactcacacaagaaatacataacaggtcagaagagaaaagcagcaatgattgcactcattaataaaggtgaagacttagagaagattgcagannnnnnnnnntaa

SEQ ID NO: 454289 - DNA, 627 bp, Serratia marcescens
atgacacaaatcgaatttcaacgggcggctggtattagcgccggcttagctgcgcgctggtatccacacctgatcacaacgtttactgaatttggcattcagtctgcggctgaacaagcgatgtttattgctcaggtgggccatgagtcaggcgggtttaaagctacagtcgaatcattcaactacaaagttgatgctctaatgcgcacgtttggaccgttctcccgctctaagcggctcagccaccaacaatgcacggcactaggccgcacaattcagcaaccagcgcagcaagaagccattgccaatctggtttacggtggccgcatgggtaaccgcgcggcaggtgatggctggaaataccgtggccgtgggttaatccagattaccggtctgaataactaccgggcatgcggtgcggcgttgaaacttgatttggttgccgcccctgaactgttggaagacgatttaaacgctatacgctcggcaggatggttttggaatgccaacaactgtggtcgcttttctgatgacgttgaacgatgcacgctggtggttaatggcggcagaaatgggctggctgagcggcgggagctttatgaacgagccatgagggcgctggcatga

SEQ ID NO: 454290 - DNA, 426 bp, Serratia marcescens
  misc_feature (401)..(410): n is a, c, g, or t
atgtctgctgaatttgtcgtgttacaggaagcagattcaaatgccacttttaattttgaaagggagtccgaacaattcagacagttaaacgaaaaatttaagcaggccaaaaaacgggagcaagatttatccaggcctaaagcaattgctgataaattgcgagataacctggaaaatcttgcctaccgttctcaggatgtcctgcaactgaaccgtttccagaccatgactcaggatgaagcagcattatatgatccggcttcaatacgttttgctctgacctcaattgcagccagtctgaatgaagcacacacagtacgtgacaatgtagtgatgcatctcaaaggcctgctggagaaaaaaattatcgagtctaccccggaagacaggcataagataannnnnnnnnnacaaaatgttttatga

SEQ ID NO: 454291 - DNA, 777 bp, Serratia marcescens
ttgtctagaaaattggtaatatttggtaatgggctaggaatgtcattaaatcccgctcatttcgctctaacttctgcattggaagatatatgggtacgtgagggattcttgaatttggagcaacaacaattaatagaacgttgccttggacgtataggtccacctcaaagggaagacgaactagatttacttcatcaagcagtaacacactgtaagacattgaattacgatagacttttgtataactctttcatcgataatggtatagttaatggttataacggtagtcttattgatggaatgcttaatcgtggtttctctgccgatgccttagagcgtaaatttgataatgattttggttattatttacacctgcatggctcacctttatttattgaaagtgaaggtagtattttaaaattacctagagaccaacttgatttagatcgagatattccgagtaagcacatagtactaactcatgtaaaacataagccttcagttatagctgcatctcatgcactttctacatattgggattatctacaatttgctttatctgaagcagaagaaataattctttttggctactcggggtttgatgaacatttgaacatattattaaaaccttacttaaagaacatccctttgcgtgttgttgaatggtcaggtgcaggggagcaagatgagcgagaagcttattgggagcgttgtttaggtcgagccatagtcgtcgaacgtctagaaaacatttctgattttgtagcttggcaataa

SEQ ID NO: 454292 - DNA, 564 bp, Serratia marcescens
atgtcagaaaaaatagctaatttgactattaatatattatcacctactaaagataaattatctgctcttaataaatattggcctaaacagaagttaggcccagttaaatccagtggagaatatggatatgattataagacttcattgcgagagttttatgagcaaattgataattttacagaggacgatagtgttgtcaatggagctagtatagcattaagtattgaatggaaagaaaggcgattcctgcttctttccgatgctcatcctacaattgtcgcagcaagtataaaatatttatacggcgtagagaaaacaacatttgatatagtcaaaatgtcccatcatgggagtgcgaaaaatatcaataacgatttgctctctttgatcagttgtcgtgattttgtagtttcagctgacgcaaataaacggcattttcatccggataaagaagcgttaagtcgtgtgttatttagtaatggtatagaaaacactatatttcattttacttacgacaaggaagagttaagaaatatatttttatcggagccagatagcagataa

SEQ ID NO: 454293 - DNA, 234 bp, Serratia marcescens
atgaggatcgaactggtccagaagcgtattaccactgtccagatgggtaatgctgtccttgagcttttcaatttcagctttaatattagtgttttgctgaatcagggtttgcatctgttgttgggcaaccgattgatcactgagatactgaatctcctgtttgattccgtggacttggcctttcattacctgcacaattgcggcatcacttgcatcatcgatagggaaaagtga

SEQ ID NO: 454294 - DNA, 234 bp, Serratia marcescens
atgaccgaagagcgtgcaaagcagatcgtcaacctcattggccagatagtgttggggttagtcaaagatggcagagaaatcaccaaggataacatcctgatgcagcttgaatggcgccgaagcgtgtttgatgatgcaatatatcgggagatttacacgcaggccatccaggcgatcaatgctgacgtactggtgcaggtgtaccccgacctctattgctttacaaagcattag

SEQ ID NO: 454295 - DNA, 177 bp, Serratia marcescens
atggctaatattaaaatttctgagggtggaactgacgttctcaccattcctgaaggggcaatcaataaatcagctgtagctgaaatgttgggtgtgtctattcagacattccacaaatgggtgaaggcatacggtttatgccaagccatcagaatggctcagaagaacaagccataa

SEQ ID NO: 454296 - DNA, 690 bp, Serratia marcescens; identical to SEQ ID NO: 444795

SEQ ID NO: 454297 - DNA, 1008 bp, Serratia marcescens; identical to SEQ ID NO: 444794

SEQ ID NO: 454298 - DNA, 681 bp, Serratia marcescens
atgaaaaaaattgtaccggaagaatactttacgggccaacagctggttttggccaaggccattgaggcgggtgacctggagagggtaaaacaactggcgccggaaacggatctgaatactccgggcgagcagagattaaccccgctgtttttcgccatcaacgaggcgatgtataacgataatccggccaaccgcttggcaattattacggcgctggtcagtgctggtgcggatcctttaccgcagggtaaaaatagtccagctctgtggatggttagggccgataaggacatctggctgaaggcaatgctggacggtggtttatctacaaacgccagagataaggacaatgacgagcccataatccatgaaactatgtatgccaagactaccgatacgttagcattattagttatgcgcggggctgatgttgatgcgcgagattctttaggtgaaaccccattaatggcagctttttacagtaatagctttgagcacgccaattatttgttggaccacggtgctgatcctaatccggtaaataagaaggggtgggtatttgcttcactagtgcaaaagcgccttaataaaagccagccagatactgaataccaccagaagtgtctgcagctgcgcgacaagatgatcgcgcggggggtgaagtggccgtcgaaggcataa

SEQ ID NO: 454299 - DNA, 804 bp, Serratia marcescens
atgcggcacttctttgccggtcagaatcttggtcagctgcttggcgccgccggaagggtatttggtcgggatcacccgcagaccaatgcccggatgcgcgcgcagcgcttctttaagggcggcgatggcctccggtttattgtcttcgatgccgatcagcgtggttttaggctgcagcagatgacgcaggatatcggtgccctgcagaatttcttccgcgcactcgcgcatcaggcggtcgtcggcggtgatataaggctcgcactcggcggcgttgaggatcagcgtttcgacgccgtgggcgccaccctgcagtttgctggcggtcgggaaaccggcgccgcccaggccggcaataccggcctgatggatgcgccggagcagctcgtcggcgtccaactggcgatagtcggccgccggctgacgttcacaccagcggtcttcgccgtcaggacggataatcacgcacagttcggccagcccggacgggtgggcggtgatatgcggtttgatggcgatcaccgtgccggaggtgggggcatgtaccggcagggtacggccgcggcccatggtcagcggctggcctttcagtacgctgtcgccggcctgcaccagcagttcgccttccggccccaggtgctgctgcagcgggatgataaaggtgtcgggcagcggtgccgtgcgcagcggcgcgccgctggactgcgtcttcatttcaggtggatggatcccgccgtcgaaatcccaaatgcgatcttttttaaaggcggtgaacagattaaacatgttgctccacgtgaatga

SEQ ID NO: 454300 - DNA, 402 bp, Serratia marcescens
atgaaaaggttttttgttttgtattctgtttttctcatctctggttgtccggggcctggcgatcgtatgccggaaacggtatacgcggatgttaagctaaaggataattcaccgtgtgtcttataccctgctaagttaggcgatcgtattacctcgattcaaatttataatgaaatggatgagccatttaggaaattatttgatgattcaccatttcatcctgcgtatggtcagtgtttacctatgtttggttatcattttaatccaggtaaatcgtatgtgatttattatggtttagataatgacagcgcagagcggcaaaaattgattcaagctgattttgctattgataatgaaagcaaggttatcaataaagaacatggtgataaaaatattccgtag

SEQ ID NO: 454301 - DNA, 1233 bp, Serratia marcescens
  misc_feature (17)..(26): n is a, c, g, or t
  misc_feature (1184)..(1193): n is a, c, g, or t
ttggtgcagagcctttnnnnnnnnnngatcatggctggtgctaaagcggacaatttgccaaaggttccgaacaagattttacattttttgagcgcattaccacctaaggcccattccattgtgctaacctggtttcgtactcacgtacaatttccagaacaaggtgatccccaaaaaatcattcatgagattctgctcgcagaaaataacgataaagatatctcatcaccaaaaccgctatggcgcgcaatccttgggttctacgtcactcagccttgccctgacatcgtcgcacaatttcttcgcggtgaagaaattacactactccataatgatgatcctcatgagtccagcgatagattacctgagcagtcaacgattagtgttactgatgaagatatcgagcagtgtctattcgtaagtcagggacgtgacatatctccttcagatcgaataattccggcgttcgttgctgggcttgttgctacgttgaagggggaaacggaagttgcaggtcagtgggtgtcacagttatccaatcactcactgcctctggggcaaaaatttggtaggctcatctcaacgtttggcatcgttcgtcctcaggaagaggctgacaacggaatagtattattggcagagcctgttgcgccagacgatatcaatggcgatatcgatggagtgtcctttgtcggtaaagtgacgaaagtgcttccctctggcgcattctttgtttcgcccgttggcctgtttattggcgatgaactgcgggatctttcagatgctcacagccatatgctctatcccgatcgtggcgaagttataggatttttaaatcattttacaaataatgtgacccatggggaattaggcatatggcaagcgagacacaagccatccgataaaacggcccagtgtgcattgactgagtaccagtctcgcgtatattccgttgtcaaaatcccctatgattctggcgaaccggatgcgattcgtgaatggctattaacctgttaccaacctcaagataaatctcctactatcttcttcttaaccgatggtctggcgctaagattacccggagacattcttgatcctaaaaaatatgattttgacgtacctctggattcttatcgggaattaagttgtgtggaactgcgctctcagtcaatcactatagtgcnnnnnnnnnnctatagtgcctcaactccccggattgagcgaaaaatatga

SEQ ID NO: 454302 - DNA, 1593 bp, Serratia marcescens; identical to SEQ ID NO: 444289

SEQ ID NO: 454303 - DNA, 1605 bp, Serratia marcescens
atgattatcagcccaccattattgaaaagcaaaacagaaccagagacagacaatgcctggattgcgagagtcatgaaggaagacggcgggagagaatttccggttaacgcggccggttcctggcatggtggcatacatattcgtcatacggatgatggaaccgggagagccgagagcatcagggcgatagctgatggcatcgtggtttcgtttcgtaaggcgtctggggatataaagagggattcggccccattgaatatgaatgccgataaggcgaaaagcaaaggcagtgatgatggctatatactgctaaaacacgagacagagattggtagcggcgacagcagcaaggttgctttttactctttgtatatgcatctgaagtcactgacatcgaaagtcaaaggtggtgaaaagatttatcgtaaagatgcgctgggtacatccggtatggtcgatggcgtgaacgccttccactttcagatattctgcgatgatgacaatatggccaagctggttggccgtaccacacgggagttggatatcacaagggatggccgaacggatgcggtatacggggatatccatttttatctgcctgctgggacgaagttctaccgtaatgcgcccgtgaacaatacgtcatcgacgacgggtctggcagaggtacacacttcctgcatgccgctgtatgtcagtatgacgctggagaagggaaactgcacgatggtcactcgtcagcaggagcctggcgcagagggggtattcacagccgttggcgcaccgctgattaacgccgatggcaaggattacgaatataacctttataaaacagccatgagactctatacacagagccccagcgccggttttgaactgctgcgttttggtcggattatcaatacggaacatgagactctggtgccggaggatgctccgctttggcgaacggttaattttccgggtggaaagggcatggtcaacctggcggtgccggagattaaaaagttcagcgatgcggattttccacactggacggggtggcaagccgtcgatgacgatcaggacagcaacagccagtgcaactcagctcgcattaaaaaatggcaggaagcgggtgtgtatgatgcactgaagaaccgtttgatctgccattttccgctggaatgggaaaaaagcacgatagatacacgtttttcctggctgagaacgaatgccgacgctccgatgagcgaagaggattatactaagtttaagttacatgcagaggcattgtgttttaacaccggtgacttagggaaaaagagagtgtggcattttaaccctatggaatttatagaacactttaggaaatgtggttggatagatcgtgaaaaaatcgagaaaattatgactttcgatatacggagttctgtaaaggtaaacaaaataaagtcagctgcgagagagtattattcttatttaaatataataatgaggaagtacaatatttccacacctaatagaattagtcattttttcgggcaaggggccgttgagtctggttatttaatttcaatgcaagaagtaagtcagcgtcagatagttaaagatggaaaaaaatag

SEQ ID NO: 454304 - DNA, 678 bp, Serratia marcescens
atgaaaaaaaatatttttgttttttctgtattattttttttcttttctgcaaatgcaaaaattcaacctgatatagtaactccaatggggtttgatgaaaataaattctctttaaaaatgataggtgaatattcgtactttccttataatacggtggaaaacagtggttgtagcaatgtgctatacaaagattacccacttgatgttcatgatgggaatataaattcacctatggttctgtcgattaagagactcgtctgtgtgttcagtaatggcgtgtatgaagatgggtatgatcggaagagtatggcggagcgtgttgtttattctaagtcgagagagttatggattaaaataaaacaaaaaaaatcaaaactatccaatggttataagtcaatcccatataaagaaattgaactgtataatattgaatcaagaaattccagaggatttgctgttgtcaatgaaaacattacagatagcgatagggatagttacaaaaaacaggaattaaaaaaagtagttagcttttgtttgattaaaggtcaggatgcgttatgtggttcaggggacttaattgtaaaagtagaaggtaaagatgtcgatctgacatcttatatactgaaatcattggaaagtatggagatcggtgtggataatccattgaatgcgaattaa

SEQ ID NO: 454305 - DNA, 2238 bp, Serratia marcescens
atgattatcagcccaccattattgaaaagcaaaacagaaccagagacagacaacgcctggattgcgagagtcatgaaggaagacggcgggagagaatttccggttaacgcggccggttcctggcatggtggcatacatatccgtcatacggatgatggaaccgggagagccgagagcatcagggcgatagctgatggcatcgtggtttcgtttcgtaaggcgtctggggatataaagagggattcggccccattgaatatgaatgccgataaggcgaaaagcaaaggcagtgatgatggctatatactgctaaaacacgagacagagattggtagcggcgacagcagcaaggttgctttttactctttgtatatgcatctgaagtcactgacatcgaaagtcaaaggtggtgaaaagatttatcgtaaagatgcgctgggtacatccggtatggtcgatggcgtgaacgccttccactttcagatattctgcgatgatgacaatatggccaagctggttggccgtaccacacgggagttggatatcacaagggatggccgaacggatgcggtatacggggatatccatttttatctgcctgctgggacgaagttctaccgtaatgcgcccgtgaacaatacgtcatcgacgacgggtctggcagaggtacacacttcctgcatgccgctgtatgtcagtatgacgctggagaagggaaactgcacgatggtcactcgtcagcaggagcctggcgcagagggggtattcacagccgttggcgcaccgctgattaacgccgatggcaaggattacgaatataacctttataaaacagccatgagactctatacacagagccccagcgccggttttgaactgctgcgttttggtcggattatcaatacggaacatgagactctggtgccggaggatgctccgctttggcgaacggttaattttccgggtggaaagggcatggtcaacctggcggtgccggagattaaaaagttcagcgatgcggattttccacactggacggggtggcaagccgtcgatgacgatcaggacagcaacagccagtgcaactcagctcgcattaaaaaatggcaggaagcgggtgtgtatgatgcactgaagaaccgtttgatctgccattttccgctggaatgggaaaaaagcacgatagatacacgtttttcctggctgagaacgaatgccgacgctccgatgagcgaagaggattatactaagtttaagttacatgcagaggcattgtgttttaacaccggtgacttagggaaaaagagagtgtggcattttaaccctacggagtttatagggtactttaggaaatgtggttggttaagttctaacgagctcaagcagattattcctcgttatattattcggccttctgggagtcgtaattactgggagccagtatcactcaaagagaattcagcatctgtttttaaagtgcatcatcagatgattaataaagcaacgcgtaagtattgtattaatacaccattgcggttggcaagttttttggggaatgcagttcaggaaacaacatggttgagtgtgacaagagaggggtatgtttattctgataaggatgagaacgggaagagatacacatataatatttggtattacccttggtatggaagaggttttttgcaattaaccaaccctgataatttttataattatttcacatatcgagggaggcgatttaataattctgtgagacgcggattggttaatgcttatcgtagactacaaagagataaatcattaagactcaaggaaagaaagataactaacagaatactatatgataatcaacaccccggtttgacagatgaggtcattgcctggcggaatgaggttgagtcggggcgttatgcgccagcggacagcgccggtttttactggtcgttcacagatatggcaagatatgctgatagtgctcatatcattgaacgacagtctgtgatgacaaatcgtggctctaagacctattatagaagcccggcattttggcaagcgagtgcaacggtgaacttaccgggagctattgggagggatgactatcgaggaattaatggttttgttgaaaggtgctgtgtctatagtagtgcgatttccgtcttaacagaaatgaaatatccagatggtcgaggtgatttcatcttggattcacctgagggtatggagttgaggaggttataa

SEQ ID NO: 454306 - DNA, 378 bp, Serratia marcescens
gtggactattctgattatatttctttgtctatgtttgttattgttttactatatgtatacttctcttttaaaggaataaagatcaataaaaaagaaagtagtgaaataaaggactggagcagtagagatttatggaaaggtagtgtcaccactgccagactcatctcatggaaacagctgcaggcgacacacaatattgattacttctactcgtttactgttgaaagcgagttggacggtagcttaaagcagtacagcgctgcaggagtggttaaagcctcagaggctggaaagttgcggaaagggctagtcgtgacgataaagcatcaaggggttccgcctaagaaaatggccgttattggtatagactttgactga

SEQ ID NO: 454307 - DNA, 1428 bp, Serratia marcescens
  misc_feature (1405)..(1414): n is a, c, g, or t
atgcctgaagataattggggcgttgttaaccatgagcagattgatgcatcgtatcatgaaacgtttggcttaaatgacgaaggtatcactcattgcttggcgggtatagatatcattttgccaaagaaatgggatgtcggtgccgctggtagtaaaaacaattatcatcactataaagtctctaattatttgcacatagaagattacgatgcagcattagaagttttggcggatatttaccctgagtacaaatcagcagcggataaatttaacaactctacagatggttactatacgaatatgttcgtcatgcgcaaggatatattcgagaactactctacctggttgtttaatattttagataaactggaagggaaaatttgttttaagaattataatgcgcaggaacagcgtgttgttggtcatatttccgaaaggttgttgaatatctatatcaattaccaactggaacagaaagagcttaagataaaggaactgcagcgtacctttgtgcaaacggagactttcaacgccaagttgaaacctgcttttccaaacaataatgttcctgtggtaatttgtttcgatgacaactatgcgatcagcggtgccgcattaattaactctatcatcgagaatgtaagtcctgagttgaattatgacttggtggtgcttgaaaatggcatttccttgaagaataaaagacgctttatctcgttggctgatgggtttgaaaacattagtatcagatttttcgacgttaatacattttcagaaatcaaatctgtatttacacgcgcgcattttagtgcgaccacctatgcacgtttgtttatccctaagcttttttcagagtttgaaaaagtcatatttatcgattccgataccgtggtcgaaagtgatcttgcggagttaatgactgtatcattggggaacaatctggtcgcggcggtaaaagatatcgtcatggaggggtttgttctgtttggcgccatgtcgcaatccagtgacggagtgatgccagcgaaagagtatctgtccggaagcctaggcatgaaagatcctgatgggtattttcaggcggggattttagtattcaatattgcacagatgcgtcaggaaaatactttcgaagcactgatgctggcaatgagagaaaaagaatattggttcctagaccaagatatcatgaataaggtatttcatgggcgtgtacactacctgccatttgaatggaatgtctatcatggtaacggcaatacggatgaattcttccccaacttgccatttgctacctatatgcgctttctggaagctagaaaaaatcccaagatgattcactttgcaggtgaaaataagccatggaatacgcgacatgtagatttctttgataattatcataagnnnnnnnnnnggatggaaatttag

SEQ ID NO: 454308 - DNA, 1041 bp, Serratia marcescens
atgtctgcattaacccccgccagcgaagtgatgctgcgccacagtgatgaatttaccgaacgccgcgtactgtttgccggcgatctgcaagatagcctgcccgcccagttcgaggccgcagacgtacgggtgcatacccagcaatatcatcattggcagttattaaaccgggcgatgggcgacaacgtgcagttcggcctgacggtcgacgccgggtttgtggccgactgcgatacgctggtttattactggccgaagagcaaacaggaagcgcagttccagctgtgcaacctgctggcgctgctgccggtgggcgcggaagtgtttgtggtcggtgaaaaccgcagcggcgtgcgcagcgcggagcaaaccgtcgccgatcacgtgcagctggtaaaaatcgacagcgcgcgccgctgcggtctgtaccacggccgtatcgacagccggccggcctttaacctcgacgactggtggcagagctacgcgctgcacgatctggaagtgaaaacgctgccgggcgtattcagccgcgacggtctggacgtcggcagttcgctgctgctgtccacgctggagccgcatatgaaaggtaaggtgctggatatcggctgcggcgccggcgtactcgccagcgtgatgtcgaagatgtcaccgaaggtgaaactgacgctgagcgacgtcaacgcggcggcggtcgccgccagccgggcgacgctggcggccaacggcatcgagggcgaggtgctggtcagcaacgtctactccgatatcagcggccgtttcgatatgatcatctccaacccgccgttccacgacgggctggccaccagcctcaccgcggcggaaacgctgatccgcggcgcggtgaagcacctgccgatcggcggtaagctgcgcattgtcgccaacgccttcctgccgtatccggacattctcgacgccgtcttcggcagccacgaagtgctggcgcaaaacggccgcttcaaggtgtatcaggctaccgtcggtcgtccgccgcgcgcgccgaagaagaaataa

SEQ ID NO: 454309 - DNA, 582 bp, Serratia marcescens
atggccgtcatcaccgccgccggtatggccgtcgtcaccgccgccgctatggccgtcatcaccaccgccggtatcgccgtcatcaccaccgccggtatcgccgtcatcaccaccgccggtatcgccgtcatcaccgccgccggtgtctttctgccggatggtcagatcgacagacttgccattgtttgtcagcgacgcatccaaaaaggcggagtccaacaccgcttcactgaatgttcccttaagcaccttggtgatagccaatatccgatagctttgctcgttttgataactggtatgcgggtcgagcgtattaaccaggactttaacatcgttaccgatctgcgcattgccagatactgtcaggctatcgctgcggccgtttgccgcaacgtccacatcataaaacgcgccgtcttcaaaaatcagagcaccggcgatactatccttgtcgccttcgatctgaattttgccaatgccgccgtcaccgggggaaatatgaccgcctcgctccacggtcgttttgccaatcgtcgcgtcgccagccagtacgccgcccgatttaacaacagcccacgatga

SEQ ID NO: 454310 - DNA, 987 bp, Serratia marcescens
atgtttcctttttctgtcacacagcggccaaggctaaaatcgcaacagcaagcggttgcagcaatccatgaaggtagcggttatgagctgatctcatttgatgccgagaagctgaacgtgttcgccgcggaggtttactactgtgaaccgcactggcactcggcacctgagcttatctgcattctgtcgggagaattctccgtgactctgggtcacgccacttcgctcgcagcggcaggcagcatgctctatatcaatccggatgaaatccactcgttagaggctcgcgcgccgaatagccaactactgacgatccagttcgctccaaatctgtttgatgaactccatccggccccgcagctggattacgccctgtttcatcagcaggagtcaggtgaagacctacagatccgcagcagcgtgctcgccctgctcgaacatctggtgcacgcccaaccttcgtttacccgtattgctctggtgtatcaactattgagctcactggcgacggcaggagaaaaacgggccgatcggcaacagatgacgttcagaaaaaaagaccaacagctagttaaatacggcatcgaatttatcaatcagcattttgatgacgagcttaatttgtccaccgttgccgataacgccggtgtcagttaccaccatttctcacgcacattcaaaaagatcagcggctacaattttaaagaatatctgaccatggtcaggattaataaggctaaactgttgctgaaagacaccaatatcccgatcaccgacatcagctacacctgtggtttcagcggtcataaacaactgatttttgctttcaacaagtattgtcgcatgacgccaacagaatttagaaaaagctacctgaccgcaatcaactctgctgcggaaacgcaaatcatgacaaacttctgttgtctgccgctggatccgcagattgtcgcgcgcctgcggcacttaacccccaccagctactaa

SEQ ID NO: 454311 - DNA, 2355 bp, Serratia marcescens
atgaaaaaagagtttcaggccatcattgcggccatgaccgccgaagaaaaagtggcgctactcagcggcagcggcctgtggcgtaccgcccgccttccgcagcatgggattgaagacatcgtcatgacggatggcacctatggcgttcgttacagcaccagccagattgaacaaggagaaaactggaacattaccgatttcctcgctgtgattggccaaagcgcaggcaacgttgaacaggaagaacagaaaggaggatctgaagcgctgttcagtaaatccaaacccgccacctgcttccccaacggctctacgttagcctgcagttgggatagcgatctggtgtacaaaatgggtgaggcattagcaaaagagtgtcaggagatgggggtaggtattttactcggcccggggatcaacatccgccgcacgccattggctggccgtggttatgaatattactcggaagatcctgttgtcagcggagacattgctgccgcattgatcaacggcctgcaagacggtggcgtgggagccagcctgaagcatttcgccgccaataactcggagtttcgacgcaccgaaatggattcggtgattgaagaacgggcgctacgcgagatttatctcagtggttttaaacgcgctatcgataaatccaacccctggacagtgatgtcatcctataaccggctcaatggcgtgcaaacctcgcaggacccctggttactgaccgaagtgttacgtaacgagtggcaatatgacggactggtgatgtccgattggtatggcatcaaagatcgccctgcctccttactggcgggtaacgatctagctatgccggaaacacagcgcgataagcaagaactgctgcaagcgatcgaacagggagaaataccagcagaagtgctggatactgcctgcctgcgcatgctgacgctgatagacaaagtgcaacaacaccgcaaaccggggacccaggccgactatcagcgacatcatcagttggcgcagcagcttgccgccgaatcccttgttctgctgaaaaatgaagataacatcctgccgctacagccaaacaaacagcgcaccgtcgccgtgttgggtaaaccggcgcaagaaccggtgatccagggctctggctgcgccactaccgtaccttacatgctcgatcggcctcttgatgagatttttgacgtggctggcagcgatttcaatatcgactatgccatcggtacccctgaagataacgttattgatgaacaagcgttggcactggccgttgataccgcgaaaaatgccgatgttgccgtggttttcgtcagtaccgccattggtgaagacggtgaaaatggggatcgcaaggatttgaatattctgcctagccatgaggcgctgatccgagccgtcgccagacaacagcccaatttggtggtcgtacttgccaacagcgatgctgtagtaatgccctggctgtccgattgcaaggccgtgctggaaactttctttgccggacaaggtatgggccgggccgtggccgatattatatttggccgggccaacccttgtggcaaattgaccgtgactgtgcccaatacgctggaagagacaccagcctggctcagttatccaggtgaagacctacgccatcattacagtgaaggactgtttgtggggtatcgctattacgatcgtcgtaaactggtgccgcaattcccgtttggtttcggcctaagctataccaccttcagctacgccaatctgacaacctcggcggcacagattgaggaaggccagtcgctgaccgtcaacgtagaggtaactaatagcggtaaagtggcgggtaaagaggtggtgcaactctatctttccgcaccatcaggggaactgttgcgtgaagagcgggccttgaaagcctttgccaaagttcatcttgaaccgggtgaaaccaagaccgtgagcatggtgctcaactggcaagattttgcctgtttccatcctggtatggccgactgggtagtgaatgcgggtgaatatcagttgcacgcggctcgttcttcacgggatattgcgattagtacgacggtcaacatactggcgcaacccttttatctgtcgttaaaaacggataactcattgcagcagttgatcaacaatccgccggcttttgatcgggtggtcaagttgttggttagcaaaaacaacctgccggaagcgcttgtgagggaaaaactgattgcggttgcccccgatctgttctgcggtctgtttattgccttgacagagttcctggccattgatattacccggcaggagttggcgtccgccttgcagggcagtaaggcagagggttaa

SEQ ID NO: 454312 - DNA, 1362 bp, Serratia marcescens
atgaaaatcacagaaattgcctctgacagttacgtaaaggtcagcgttagggaaaagataggatatgggtttggcgatctggcctccaacctgtcgtttggatttgtctctctattcttgctgtttttctataccaatatttatggcattaccgccgttcaggcgagtttaatctttgtgatcgctcgtatcctggatgcgatatttaacattttcgtcggttactttattgataaaacccatacccgctatggcaagctacggccttacctgctgtttggggccgtgccattgggcattttgacggtgttgtgtttcagcaccttcgacagcgaattcaagttttattacgcactgatttcctacaccatctactgtctggcctacaccgcggtcaatacgccctattccgccatgaccaatatgttgactcagcatgaaggttcgcgggcctcattgtcggtctatcgctttgtgttggcgattgtcggttatctgattgtctctaccagcgcagatttactgatttcgcaatttaccgaccagaagatggggtatgtgtttgctgtcagcagtttcagcctgttggcgactttcttcttcctggcctgctttggcatgaccaaagaacgggtgattagcctgccggatcaaaagccccccacgttaaaagaaatgatcaccgcagtctctggcaacttaccgttaatcaacctttctctgttcaccgtgttcttctatatcgcctatacggtgtggatggccattgcgatttacttcatcaaatacaccctgggcgatgaaacctttaccgccaagttctttgccattcaatccgctgcctacgtggcaggcaccatcgtgtcagaaaaactcatcaacatcatgggtaaaaagaaaatggtgcaattggggctgctgatcgggattgccggggtgatgttccagtatttcctggcaggtgataacagctacctgattatgaccggcgtgtgcctgttcagcattacgctcgggatgggttttgtcgcgatgtggtcgatgattgccgacactgttgaatttgctgaatggaagcatggcatacgcaccgaaggggctatttacggcttctttaacttcatcaccaaaattgccatggcgattggcggaggctgtgccgggttgatgctcgactactttgactactcttccgagcatatcagtgccaatgcgttaaacggcattaatttgatgatgaccctgtttccaggtctgatgtttgccctggggatggtatttatctttttctatgccctggatgagaacacctaccggaatatcattaaagacattgaatcgcgcaagcttaacgcgctgtaa

SEQ ID NO: 454313 - DNA, 5637 bp, Serratia marcescens
  misc_feature (5620)..(5629): n is a, c, g, or t
atgtcaggttttattcgagaccctctgagtgatatacagctcatcgccgataacttacgagaccgttacaaaagcggtttccccgtactgaaagagatcgttcagaatgcggatgatgccagagcggagtcgctattactcggctggcatgaggggcttgaaggtgcagagcaccctttattacgtgacccggcaattttctttgtcaatgatgccaaactgagtgatgcggatgctaagggaattcgttcaataggcttaggtagcaaagccggtaatcagcatgcagtaggcaagtttggcctgggaatgaaaagccttttccatcttggggaggtctatttctatgtcggtagcgactggcagggacatcaaggaccgtacgctaaagcggatgtgctaaacccctggggcgacgaacggccagactgggagcatttcagcgaaaacgataaacgtctgctgcaaagtacaataggtttaatggattccggccttgcctctaaagcctacacatttattgtctggatcccactacgctcggactccattgccgcagagcggggcgaaaagtacaattacatcatcaatagccccgattttaagcgcaccgcaccttcctttattatcgatccctacctccctgtacagctggggcatttattgcccatgttgaaaacactcaaatctatcaccgggtacacggtgacatcaggtactacaaaacggctttttgctgtgcagttgcaggatggctctggcagatgcactttcccggacactggacaagatcaaaactggcaggggaagatctttttgcaatccgggcaggaaaaagaactgtctccccttagttacgttggcgttgagactatgctggagtcagagcctttcgcgcgactgaaagcccatcaattttggccaatcagctacgggcgaaattctgcaggtgctgaacagaaaattgaggacaaaacaaagcctcacgcggcggcggtgttgattgccagaagggcgggggatgagcaagcaacgttaaccattcgctgggcggtattcctaccgctgggcgatcaggatgtctctcaatcgaagcaagcgtttgtgacccacatcacaggcgatacctgttttgaactatttctccatggctacttctttattgacgcaggacgcgttggaatccacggtcgacaaagcattggtgggaatgtctcccttgagcccagttctgaagagaatgtcacacatgaatggaaccgcttgttggcaaatgagggaacgctgtcactgattttggcctcggtcagccaggtgactgcccggttttctttgacggctgaacagacgatagcgctgagtgaaggattacgaagatattttagtaacgaagggagccgttaccagaatcacgctaccgcgaaatatcagtggattttccagatgttgccgggagaacgaagccattggtcgctcattgcaggacatcaaccaacgcgaccgctcccgaccccggcatctaatgactatcaccgtgtctgggatacgttaccagggctgaaaacactggctgaagattatgcattgtttgaactgcgtaaacccaatatcctggcactgcagaattcttgctggcagagggaagaggttagcacgcttctgaagtcagtctccccacgcgtgtttgagtctcaaatccaacttggttatcttaacgaattcctcgagagccttcagaataatgaacgttgcctgaatgccttaatacgcttagctagatgcgttatggcggaaattagattaccggcgttatctgcacataaatcggcggtctggcggttcctctgttttatcccggagacttatcgctgggtatttgggattgaaagggatgagcagctattgtgggatacgcttccgctgagtgaaacagatcgattgatcgtgcctgcttgtgtcattcctgagggagagtgtcgcacaagtatgcttaatgtagatgatgcagataaatgcctaatcgcgattgcccagagtaccattcaggatgagcgaaaagagaaagcttcacttgagtttctctctgcgctgatcccattcgataaagatgaaatacttaaaaaacgcgatacgattaagctattcagggcttatcgtcctgggcattccaggccgtttctggagtcccgacggacgctccaggaacttttccagcagcgccgcttattccgacgtggtgaggtcggaaactaccagcttggtgagtttctcgaaggcgctttagaggatcgtcaggttgtcttcatcaataaagatgttaacgacaaactgtttaacggcaaagtgaccgtatgcgacacgcaggccgtgctgcatttactggaaaaaaggccgaggctggcggttgcagaactgcgcgctgaactggtctcgaagctccagattgataacgcgttaagcgttgaaaaacaacttgccgtgcggtatttacttcatgcctgcaagcgggatatcgacccgtcctgtaagctctggtccgttgttgagggaaatccggtttggtccttactgcataaagagacgctggccagcgataacaactggcatatcattccttatgctctttctcgcactcttaagtttagctaccaagaaaaagagcgtattaatcttaaagagatgaatgcgcgcaatgtgctggaggcgcttggtgaggatatcctggccgtagatttttcttcgctggtgcaaacgcaggaatatgcggaagagattctgcgttacattgaagatgacatcatctggcggcagcttcctctacataaaacggttaacggtgaatttatagccattacagaccgttgcgcgctgcatagtgactacccgcttccgaaaatgctggcgcaatcggtgatctggatggaacgtgccttgtcgcgagaggttcagaaacagcaggataacgttttgccggggattgacgcggataaggcgattgccctcgctctcggccagcaaacgccatcacagtacaatcgattcattattgaacaaatcaaccagtcaggtagattaccagagctgatcgaactcaaaacaaagccttggctactggccaatggccacccagtcgcaccagcttacgtaattgctgggcaacctgaaaacaggcgcgcgtgttatctgctgggcaaagagagcaaccagattttcttcgccggacagatagataacaccagtacacatgatcttgccctgattacgccacttttgctaaatagtgcggatgagatcgctgccgctgcgctgaaaatagcggcaaacacgccgggttatcagattggccaatgccgactgacaacggaagtgctgaaacaggcggcgaattatgctgaagtctttagccctctcaaaggctggaagctgatcattgagtgttttaacttttccagtgaaggcgttatttcgccagccagcgcggaaatactaataggaaacctggttgataccgaccacctggtggaagcacatgagcgtctggtctctctgggcatcccggctgaagatattgcgcagcttcggggagcgctgctcaccgccatatgcgccacctctgcggcacgcaatctgttgccaacattaacattacgtacccaagcgaacggttacgcgagcgcaacgcagctctgttacggtgttattggtgcggctgggaaagcgctgctccatgaacaggactggcaaatcatcaaatcagtgctgccagagagtgtgcaacaggcgtcaaaaatggaatccctcactggtctggccgataatacggcgtttttgggcacggccggtatcctggaatcctatttctctcactggcaaagtcaggtcaccaacgggttagcgatcgcggccaatatgctgttgatgtccggcactcctgatgtcgaagaggtatgcctccaatatcttgggcagcatactgccgatgagcttatcgacaaaattgggcaaaactggaaggtactcacatcttctccggataatccggtgctattcccggggaaatcactccgccaggccgtctcctccatgcagttttctcttaccccgtttgaaggggagagggcgacagttcactctattttgaattacccgatagaaattgaactggaatccaacgcacggaccttgttcatctgggaaaggcatcgttttgcgagctcgacaaaaatagggctattgctgcgcaagctgccggtaatggaaatggaggaagtgcatctgcttgaaattctaaagcagagtgccgagctgctgttagaaaaagtctacggtcaacgactctcactagaccatatctggggtaatttcacgggggccgaacagctagatattctgacggctaaaataaccatgctcgacagcatcgtgtatcagttggaagagctccgtctgagcgatgcaccactggcagagctgatagcgggatattatcaggcacgcgatccagaaaaagggcgcttcaatgaagttgagcgggcccgggcgcttgagaaaattagcgccgaaattgagagtcgtaacgacctgcagacggcaattctgcaggctgtgcgccataagatcactcaagcacagtatcatccgcagagcattcccttcgaattattccagaatgcggatgatgcggtaatcgaactcgcaaaattgggcgtcggagcggatgaaattaatgttcgcagcgtattcaaagtgcgctctggtcatggtgaactgcaattttttaactggggacgtgaggttaaccagttccgggcagcgggcagcgcgattgatggcacagaattcagatttaagaccgatctagagaaaatgattgcccggaatcgatcgaataaagatgagaaaactaccgggaaatttggcctgggctttaaaagctgtctgcttgttaccgacaagccgcatatcgtttcagggcgtctggctgttcagattgagggcggtattttacctaaagtcagtgatgaacatgatgccttattcagactggtacgtgaggagcgtctcgagggaggctacaaacctacgttggtgtcattaccgctgcaggaagagttctctcctgatatcgtgctgcagtctttcaaccgacacgtagcactactgccggtttttgccagacagattcatactattcagctcaacggcgagtcgtatcactggaagccgaaatccagtgaactcattgaaggcttgagttttggaacagtacgggtttcatcatcaaagcgtaagagtgatatgactattgcggccttgaaaaccgaggcggggagctttgttttccgccggggaccgaagggaccaattccattggggaataattacagtatcccgcgcctctggaatctcgcgccgcttctgggggatatcaaactcggatttgctatcaatgcgaatttcgatgtggatattggccgtaatcagttggcgatcacttctgctcataaccggcggctattcaccgcacttggcggtaagcttgcgtatttcctgtcacagctatttcaacgcagccagcaaaactggcgggcgataaaatcggagtgggaactggatgatnnnnnnnnnnctggatga

SEQ ID NO: 454314 - DNA, 1353 bp, Serratia marcescens
  misc_feature (6)..(15): n is a, c, g, or t
  misc_feature (1181)..(1190): n is a, c, g, or t
atgatnnnnnnnnnnctggatgatgagaccgacttcgccacgttttggggaaacctgtggcaggtgctgcaaaagagcattcctggcgtaaaaagtcaggcggagagtaacagcggtgctgattcttacgctgatttgattttgcaaatgttcagcgcagagaccggcgggatcttgtcgttctatcacttacataaagcactgcctaccggtatgagcgatgcatcagcctctcttatctcgatgacgacagtaacccaccaggcaagtgaattactgagtaatatctcttctcatgtctcgggactttcagccttacagcgctatttccaggaagagcggttagtgagctttgcggtagggcgctcgcttatcgatttaggcctgctagttcctgtactggaactagagacattgctagatgaagagctggatgacttgctaaacaaagagaaagcgactcaggaacagatagaacggttcaaagaacgattggctaaagtgaccgtgttgatggaaaaccactcccaccgttcggttaaagaagcgttgttgcgtcagacgcaaaatcccaccggggatgaaaatttagtgattgattttgctccacaatctttcattctgtcgtctcagtatagtgaaaatgatattcgatttatcgacaggtgccggcgtgctacccgaccatatcatgcagaaacactggataagtgggcgaagtcaccggacgttggatctgacccccgcaaacaaaaagcgttgtgctggtatcttgttaccgggttgtatggtgaggcgctcgctgatggcttcaaagcagctcgggctcctcactggctgtttactatcgatgttcagcatctgcaaaaatggggttggcagcgaaaatacatagatatattccgcaatgttcgcatgataacggaccatgaacgtaacaagcgaattcatgaacaactcagcaaggagggccgatcttcactgggcttaactgaggcattggagcgtatctatgattggtgggagaaagaggccccagaacgcaccgattatgacagcgaactttatccggatggtcagtttgattggttggcgataaaagaagatgaccgtcccgaacattttaacaaggcgtggctccaactgctgtttttaggctcctgccagaccttggggcgtannnnnnnnnnaagttcttcaaccagcagaaatggtgggatgttttcgttcgtacggataatgcagacgattggtttgaggttatggatcgttatctggcaaagtccatcaccggtgaggcatatcgggtatggttgcagatattgccgctgtaccgtttctccagtaacctga

SEQ ID NO: 454315 - DNA, 2658 bp, Serratia marcescens
  misc_feature (780)..(789): n is a, c, g, or t
gtgcaactggtccgtaatggaactgcgctggtcaggtttgaaagcggttttcaagagcgtccggttaacgagcttgagccagttaaaagctccattgatgccatcgccgagggtcagtttgataatcttcgggaagtcattgcccgctgtcaggcattatccatccgctcaatcaatgatagctggggcgttttctcgacttcacgtatcaacttgctgccgcatcagctatgggtatgccacaacgttctacggaaatggcccgtgcagaagttaattgcagatgatgttggcctgggaaaaaccattgaagccggtttaatcttatggccgctaattgcgaaaaagcgtgtgcggcgtttgctagtgctaacaccagcttcgctggtatcacagtggcaggaacgacttcggctgatgtttgatatcaggctgacgctgtattccccggatattgatacggaacgttctgattactggaatacgcacgatcaggtagtggcatcgctgcccacattacgcaaagacagccatggtcgccatgatcggatgctcaatgccgaaaattgggatctgttgatcgttgatgaagcccatcatctcaacaatcaggaagataccggcgcaacattgggctatcgttttatccagaacttaatagagcataataagtttgagtcacggctgtttttcaccgccactccccatcgcggcaaagactacggctttttcgcattactgcacctgctgcggcccgatctgtttgaaccaaataaagcnnnnnnnnnnaataaagcggccgacgcgcagcttcaaggggttaaacaggtcgtcatcagaaataacaagcagcaggtcaccgacatggaagggaataagctgtttaaacccgtccgagtgggctccagaacgtatatgttctctgccgctgaacaagcattctatgacaaattaaccacatttattctaaccggccaagcctatgcatcctctctgacgaaggtggatcaacgcaccgttcaacttgtgctgattgcgatgcaaaagcttgctgccagctcggtagccgcaatttatgcggcgatcagcggccgtattcgtcgacttggagaaggtaagcttcgattacaggatattggacaggcgttgttgctcctttctgaagagcttgaggcccccgaactggatgaccattacgtcgaactggaagaagaatatgccagcgtatcggtacaggtggctctaatggagaatgagctgccaatgcttgaagagttgcagattctggcctcggaggttcaacaggaaacaaagatccaaacgctaatcaatatactggaaaatgagtttaaggatcgaacggttgtcttcttcacggaatataaggctacccaggcacttatcgccaatactttacatcaacgctatggttttggttcagtcggttttatcaatggcgaagggcgtctagatggtatttttgatgagtctggagggcgctttacctggacgatgaatcgctatgatgctgcggggaaatttaaagatggaagcatcagatttattatttgtaccgaagccggtggggaagggatagacctgcaggataattgctattccatgattcatgttgaccttccatggaatcctatgcgcctgcatcaacgtgtaggccgacttaatcgctatggccagcgccaacaggtagacgtcattgctttacgcaatccggacaccgtagagtcaaagatctgggatttgttaaataccaaaattgaaaccgtcatgcgctctttgggagcggctatggaagaaccggaagatctcttacagctaattcttggcatgacagataaaggcttttttaatgcgcttttctctgagggattaactgaagaccctgagagtttaaaaaaatggtttgactccagaacgggaacgtttggtgggcagtctgccgtgagtgtggtcaaaaatctgattggccacgcagaaaagtttgaataccagaacctcgatgaggtccctaaactcgatctcattaatatgcagggattttttgacaacatgcttaagttgaacgggcatcgccttgagataagtgacgagggtctgatgagttttaaaacgcctaaaatctggagtaatcagtttggaatcaggcgccgctacgatgcgctctcatttgaccgttcagtgaaggataagaaaatcgaaatccttggaataggccatccaattttcgataaagctataaaccaggcagagcaatttgatgcaacggcggctattgcaaaaggcatagaggctcctctattagtgtatttactccgagatcaagttaccggtgataacggtaaccagtcatttactatcgtaggtttgagcgcagccccagaattcaagctgcttatcaatgaagaacttatgcttgaactttccagactttacgaaaaggtccccagaaatgtcagggatgttttctggaatacggagtacctgtttgactacacgtcgtgccttgccgagatggaaaagaagcttgaagaaaggttaccaataatgggtctaccatatgaacatgttacttattcgttgatagcgacttttttgccgcacgttgataataacgaggcaaacgctggtcatcccggctaa

SEQ ID NO: 454316 - DNA, 933 bp, Serratia marcescens
atgcgtggggacagctttgtcagcgaggtggatgaacgccagctgcgttatctgtatgaagtggccaactacggcggcgtgcgggccgccgccgataaactgggcgttaacgcctccgccgtcagccgccagttggcccagttggaacacaaactcgatatggtgttgctggagcgccaggggcgcggcgtcacgctgacggaaatcggcctgcatctggtggatttctaccgcgagcggctgcagcgccagcaggaactgaccatgcagctgcaggagtttcgccagttaaaacgcggccatatcgcgatcggcgtcggcgaagggtttatcgaccggctgctcggtcgcgcgctgcgcgatttcagcgagcactacccggatatcgtggtcgatgtgcgctgcggctctaccgccgagattatcgccatggtgcgcgaaggccaggtagatatggggctgtgcaccggtgtcgatgactttgacccgctgctgaaagtgcgttcattccgcggtgcgcccttttccgccgtggtcagcgtcagccatcctttggccaaacagcgcagcgtaacggtgcgtgaactgcagagccagcggctgatttttatgcccgatcactttggcgtgcagcgctatttacacgcgctggcgcaggccgagcagatccacttcgccccgtcctaccgctgcaatatgtttaccgccgcacaggcgattgccgccgccgggctgggcgtggcctttatgtccagcgacgccacccgccatccggtcgacgagcggcgcgtcacggcgatcccgatcgatcatccgatcgcccgcgcctttcccagccagttgatctgccgcgtcggacgacgtatgacgccggcggtcagctacctgtggaaacagctggagcacgggatgatgcggacgggcgtgaagtag

SEQ ID NO: 454317 - DNA, 336 bp, Serratia marcescens
atgcgatttcatggagatttcagcgaattaaaccatttgattaacctctactttggccaggactacgacctgtttaccgatgctgaaacggtagagggggtgattgatggctttctagaacaaaacggctatcaggtgatcggtgatatccttgaggaggtgagagagttccaagccacctatgccgggcgtctgagcgaggagatggctatacaattttctgccgattttgtcccggagagttggggaaccacggcgcaggaattcttcacgctggtacagcaaaaagctgagaaaaagttagcggcccttaagtgctcagagcgatcgcaatga

SEQ ID NO: 454318 - DNA, 132 bp, Serratia marcescens
atgcctgatttgtttgattcctacacgcttaaagatattaccctgcgcaacaggattatcgcctcacgcatcccgacggccttgcttccgtcgctatgcaccatgccggcgccgagtggcgcgggagtttaa

SEQ ID NO: 454319 - DNA, 3060 bp, Serratia marcescens
atgagcattcttaccttacagcaagacgtggcgctactctattacgccgctttaggaaaacacgcagacgaaagtgcactgttctattttgccaaacagctgagtaacggccactataacaccagccagttggtcagcgcgctgatcaactccgcggatggcgccaaacgctacgacggcctgagcaccgagcgaaaagtgcagtatatttatcagaacatcaccggtgcccagcccgacagcgccacattggacagcctggtaaagcaacaacttgccggcaaaacgttaggcaccctgaccaaccagattatcgacagcgtcaaaagcgccgacggtgaacacacgcaccagcagcatattcaggaagtcgtcaatagcaccctgtatccttcatcgctggttgaggacggccaaatcgccgccgcgtccgacgtccaggggatctactacctgctgggcagcatgaccaatgccagggccgtcaactactggggtaaccagcttgcgtccggtcaaaaaagtgcggtagagattgccaacctctttgtcgaggaaagaagttatatcaatcaactgagtaatgaggccttcgttaagaccctgtatgccaatgcgttcggcacggcgatcagcgatggcgatctgcaaaaatacttgggcgggcttgacgacggaacgcaaactcacggtgacgtcatcatgcagatgatggccgacattcgtaacgataccggccatgacaccgccaaagaaaattttgccgcagccactcatgtttacgcgccgggtgaaatgcccgacgccaaatacgtcgaaaccgtaatgagcctgtacgtggccgttgccggttcgggcaccaatgccaccgcacttgataccttcagccgtctgcttgccagcggtacctcaaatcaggatctgctaaaaaccctcgccaattcgcagcagttcagcggcgccggcgattaccagaaaatctattcgacactctacggcagcgagatgtccagcagcgtttcccaggcgttaatgctcaagaccgggaatgataaaatcgccgccagctcattaattatcgatgcatttcgtaacggcgagtatccgctgggaggaacgcattggtcaatagatcaacagctgagtgattttaaccagcaactagccgatatttttggctaccagaagagtttcaacggcacctttaccctgtcagacgacggcaaactgatggcggaaaccaacagctacggcaaccatgcccttagcaatatcgaattggttgcgctctctgggatgacctccttgtcgatcaatgctgacaaggatctcgcgattacgcttgataaggcgttgaaaaatgtcacacacgtagtgcttaccggtaagtatgccgccagcgaagcggtgagcaaatcattcggggggcgttatgtcgaactacacctggatgatgccgccctcgctcatgccgatgcctcaaacacactgtcttacgctaaggtgttggtacagaacggtaccgacctgactcaggccaacatcaaactgtcgacgaacagcttgctctggcaaggcaatagcgtcgacggcggtgccaaccacgtgagcaagacctttatcgctaaaggcggaagcgactcgagtatatcagcaaactttatcaccaaatccgtttatctgaccaccgatgaaaacggtgagctgcacggccaaatagtcagcaatctcgaccagtaccagcgcttctccaccatcgatctgacccactacgtcggcaccggtgaaatttacctagatggtaaactggtcgcgaccgaagggcgtaacgtctttgattttggtctgtttgagaaaaacgcgacgatctttcatcctgactacgcgaataccgcctcgctggagcaggatccaaacacaaacacagatcactggtccggcttcatttacgacggcggcggtatgctttcagcctattccggcgatttgacgctgcttaacgtccgcaatcatttttatattgatggcgaattgacaaaagacagccacgtctctatccatacctcggcccgccccgacgatacctcattttcactgaacttcacggaaaaagccagcctgatccctgtgttcgatatggggagcttcagctttaactccgatcatttgcaaacgctgtcagtcaatatgggaggtaacgagacaacggcgcaaacccgtaccctgaagctggatagcggcgacaactctatctccgaattgatgctgtcaggctggacaacgtccctgctcaaaccgctgtacctcaacctgacggtaggcgccggctttagcgataacctgcaaaccatcacgggaagtgattattatgaccgtgattattttagcaatgtgagactgaatcttaatatggaaatgggcggcaccggcggcggcagtttctataccaccctgaacggactggctaacaaagagcagttcgccggtatcattgacgagcttgccggtcatcagttatcggtgaaaaacaccggtctgaccattatggacgcacatgttcagggcaatacgaccatcagttccgccaaaaatctgagctttgagcacagcagtattgacaatctggtcacctttacgggtcctatttccaccaatatcaaggtaggcgatagcgctaatccatggctcttctcttccaccggcgacaaaacggccacactgtacggcagcgccaccaccgacagcgaactgaaggcggtattcagcgacctcaacgccagcaataacgcacaagacctgtttgcgcaggtgttggataaaatgtctaacggcgccagcaagagtaatcttgcggaagtcagcatggtgaaattggacaaggcggtgtatgtgattgtcgataacaaccacaaccaaagcttcgatgccgatgatattgttttctcgctcggcgatcgtgacccgtacctgagcgcagtaagcctgcactatcaggcgccaacgatcgaggccaacggcgtcgcaaccgccagccacaccggcgaagtcatcgctgcctga

SEQ ID NO: 454320 - DNA, 375 bp, Serratia marcescens
atgaatgtgatgagttatgatgaaataaggagcagctttgcctattcaagctatgcctattgtaggaatattcttaatttgctgaattctggtggtaatcattcgatttgtgatacctctgatcaggcatttgcgtatgaatcattagaaggatcgtttgttgaaccaatagagtgcctcatgctcgagctagttactcttatctttatggctggtagatgtagtgatataacagaaaaatttcacaaggatataattttaaaaattttatccaaaaatgacttatacgaaatgcttaagaatgtaactgaagacgataaaaaagaaattgtaaacgatcttcggttacttgggttgatcgataaacctaaatga

SEQ ID NO: 454321 - DNA, 1671 bp, Serratia marcescens
ttgcttattaacaaaggatgttggtttctggtctcttggattgggttgatcgctacggctcaggctactcctgtcattaaccccgccgaccaggacgttatagaacgtcaacaaaaagccctgcttgagcaggcgcagcaacagcgcgacgacctgaaaagtaccaccgccctgatgcctttgccgcggcccaacccaggctctaatgataaaacctgccataacgtcaatcgcattgcgtttttgggggcggagcatctgtcctggtcggtgaaacaaaaactggtttcctcttatcaaggccgctgcctgacgctatcccacatcaataatctggtgcgggagaccaccaacgcctatttgcagcgcggttacgtgacctctcaagcctggttgccggcacaggatatcgccggcggcaaactgaccgtggccgtcagtgaggggcgtattgacgctattagccttaatggggaagaaacaccggcattgaaaatggtgtttcctggtctgattggcagcgtactcaacctgcgtgatattgagcaaggtatggagcaattcaatcgattaccttcacagcaggtcactatcgatatacagcctggcaaacgaccagggtattcctcggtggtgttgcgccggacgttggcacgtttacctgtttcagtatttttgggcgccgacaacggcggccagaaaagcaccggaaccgggcaattgaacgccagcgtgatactggataacccgctacggctggctgaccagtggtcactgtcagcatcaagagacagcgggtttagtcataaccgtcgcagtcgtagtctcaatgggggtgtcaccctcccttatggttactggttgttcagcgtccaggcggcctggaatgacttttatcagcacattccgatacaggatgcacgctatcgctatcagggcaatgcagtgattcagcgcctgggtgccaaccgaacgctgttgcgtgatggccaacagaagctggcactggacatggggttatcgcgccggcgtactgagaatcggctggctgggcagcgtctctccaacagcagtgtgacggtggcgagcctgtccgccggcctcaactacagccgctcgctgggcggtggctatctgacactcaacccgacggcctcgcacggcctgcgggggatgggggcgacgcctgatgagccggcagcgccctatgccgcacgcagcgagtttcgtaagttcagccttagctccagctacttttacccactgacccctaacctctattacctgacctctgcttacgggcaaatcagcgctgacaacctgtatgccggggagcgtctttccgttggtggacagtattcggtgcgtggctttaaagaacagtacctcaccggcaacagcggtacctactggcgaaacgaactcaactggcaactcggcaccgtgccggctatcggcgacgtgtcgctgaccggtgcgctggatggtggctggctgcgcagcgaggcgcaccaggtggacggtggcagcgtggtcggtgctgccctggggctgacgatgaacataaaaatgttcaaccaatcgttcaacgtaggcaaacccctggcgtatcccacgaacctgcggccggaccgctgggtggcttactggcaagctaccgtcactctataa

SEQ ID NO: 454322 - DNA, 255 bp, Serratia marcescens
atgaaagtgcgtaatcgtccaatctttttctctgacgaccacgtgcagtttataacgtgtacgtacatattgaatctggtcgcccaccttgcgtttaaccagtctgttcatttctgcacggtaaacaaactgtcctgtcactccatgagggtcgggacgtctaacaccatatcggatagctttctcctggatttgcaatggtacaaaacgcccagggtctctcatttgtcgagcaacggtttccgtaacctttag

SEQ ID NO: 454323 - DNA, 1017 bp, Serratia marcescens
atgagagaaagctgggtggattatgccaagggcatcggtattattttagttgtattcgggcatgtaaatcgtgggttatatagcgctggtattcatgtctcagaggaattttatcaacagttggatagcatcatctacagttttcatatgccgttgttctttttcctatcaggactatttttcacctcttctcttgctcaccgtggaaaaagaaagtttattcttaataagatagatactattgtctatccctacataatatggtcactgttgcagggtaccatagaagtattcttatcccgctatacaaacaacccagccagcttttccgatattttttcgctgttcgcacacccacgagcgcaattctggttcctgtatgcgttgttcatggtgttcgtcgttgccgcattgctgtatcacaaacagcatttttcgctgacattgcctattttactactcatatctatcggtttgtacctttatcaaaacgctatcggtcatgtgtttcacgttgattacattacccgctttatggtctttttccttctgggtgcgctggcgatccgctattcaagcctcatagcctcactcactttccccgtaaccgccctgctggccgtattatttgtcatagcggagtgggtgtttcactgctatttagatcttgactacacccaagtcggaatcctgtcgttactactggccgtcgtcgcaatcgccttcatcaccagtctttcagtacagttaagtcatcttaactgccgttggctgcagcggctcggcgaactgagtatggtgatctatctgatgcatatcctggcagggagtggcttacgcattatccttagtaaaggattacacattgatagctggctgatacaggccgttgccggcacgctgtttggtttgattgcaccgatcgtcgcctactcaatcattcaacgcctgaatctgaatttcttgctggaacgcccacgaacacgctcatcttcgcgtacagcacctcgccactag

SEQ ID NO: 454324 - DNA, 264 bp, Serratia marcescens
atgacggtcacgcgctttaactatggcctgaccacgttggaatgggctgaacgccactttcaggttgcggcgggtgtaaaacgcaataaaacggcggaaggctcgccttttcgggtaatcagctttcgcaatggcgatgaccttgtgtacttccccgagaagcatctgcatgtctttttttatgccggcagcactaaccccgtggtctgcaaagacatagacacctttacgacacatgccatcaagcttccgcgttatcactaa

SEQ ID NO: 454325 - DNA, 186 bp, Serratia marcescens
ttgagaatcctgatcgctctgctgggctttgccggcgggctgtgtatgtcggcgattaagcgcgatcgcggcgtcaaggatttcggcgcgatgatagaaggcctcggcggcatgatggaccgcatcgactccctgtgctttgccgcgccggtatttttccacctcgtcagattttacttcacctga

SEQ ID NO: 454326 - DNA, 3411 bp, Serratia marcescens
atggacaacgtcaataaacctgctgtcatttctgtggcagccacggccgccgtctgtattgctgtgaccacgctactggtcctgctaggcgggctggcatggtggctatgggggagcgaacgtgctacgcaatgggatgcgttgcgtccgctgatcgtcgccggttttatcgtctggggaacggcgctcagcctgctgacgctgggttttatggctttccgcttgctgattaaggacaaggttagcccgtcgacatcccgcaagcgtcaaccgacaacggcaagtgagcgtgaaaccgcgtatgtcgcgctgaaaaaacatctccgctctcgctacggcccgttctggcgccgtaacgtgcgtctgctgttgatctgcggtgatgacgccgcgattgaacaactggttcctggcctgcaatcccatcgctggctcgagggtagccgcaccgtgctgatttatggcggtagcctgacatcggaacccgaacgcgaaaaatacgccgccctgcgcacgctgcgccgcggccgcccgctggacggtatcattcgcgtgctgaataaagaccagtcgctgacgccgcagctgagcgacagcgatctgcgcggcttggaaaaaatcggcggcctgctgcgctatcagccgccggtctggctgtggcagctgtgtgatagcgactggctgcagacgggccggaaaccccagccggtaggcatcacgctgccggcgcgggccatcgcggatgatgtggcgacccggctcggcgaactggtgccgcagctgcgtgagcaggggctatcccaggtggcggaaaaccgggcctttgattttctgctgcggttggcgcagcggttggatcagggcggtggcgtgcgctggaaaaatgcgctggcgccatggctgtacggtgcccaacaacgcgtgccgctgcgcggtctgatgttcagcctgccggatgcggttgacgaacatgctcaagggagcagagagagtgtccctacggcgttgcatcaacatgccgttaccttctccgacgcctggcagggcatccttcatgaccgcgtccgcggccgccgggttggcatggcccgggaacagacgctggcgctggcggtgatggccggcatcgggctgtgggccgtggggatgacgatttccttcgttgccaaccgccagcaaatcgtcacggtggcggacaaagcgcaggcgctggtcgcccggccggcggtgacggatgcgcagctcggcgctttgcatgcgctgcgcaacgacgccggccgtctgcagcagcatagccgcgcaggctcgccctggtatcagcgtttcgggctggatcacaatccgcagctgctggccgcgatgctgccctggtacggcgtggcgaataaccgtttgattcgcgatccggccggcgacgcgctgcggcaaaagctgacccaactggtgaattcgccgcccaacagcccgcagcgcatcgcgctggccaaacccggttacgatcggctgaaagcctggctgatgatggcgcgcccggataaggttgacgccgctttctatgcgcaaaccctgcaggcggtgcagcctgcgccccgcggtatttcccccgggctgtggcagagcctggcgccggacctgtgggccttctatatcgccgagctggctcatcagcccggctggaaaattaccccggatgcggcgctggtcagccagagccgtcaggtgttgctgcagcagatcgggcgtcgcaacgccgaaagtacgctgtatgagaatatgctcaaatcggtgcgccgtaactttgccgatctgcggctggaagatatgaccggcggcaccgatgcccggcggctgttcgacagccgggaggtggtgccggggatgttcacccgtcaggcctgggaagggggcattcagcaggcgatagagaaggcggccaaagcccggcgcgatgaaatcgactgggtgctgagcgacagcagccagggcgtcgcggcggatatttcgccggaagcgttgaaggcccgcctgacgcagcgttacttcacggattttgccggcagctggctcggtttcctcaacggtctgcactggcagccggccagcaccattgccgatgtgaccgaccaactgacgctgatgagcgacgtacgacagtcgccgctgattgccctgatgaatacgctggcttggcaggggcaaaccgggcagaagagcaaggcgctgtccgattcgctgctcaaatcggcgaaagagctgatccacagcgacagccggccggccatcgatcagagcgcggccgggccggttggcccgctggatgaggctttcggcccgctgctgaccctgatgggcaaaaatccggccggtcaggtgatggcggccgatggcacccttagcctgcaaatctacctgacccgcatcacccgcgtgcggttacggctgctgcaggtggccagcgcctcggacccgcaggaaaagatgcagacgctggcgcagacggtatttcagggcaaaagcgtcgatctgaccgacacccagcagtacggcagcctgatggccgccagcctcggcgaggagtggagcggcttcgggcagacgatgttcgtccagccgccgacgcaggcctgggaaaccgtgctgcaaccgtccgccgccagcttgaacggcaagtggcgcagggcggtggtcagcaactggcagagtgccttcgatggccgctatccgttcgccgccagtaaaagcgaagcctcgctgccgatgctggcggagtttatccgcaaggacaccggccgcattgaacgttttctgacgcaggaactgggcggcgtcctgcataaagagggcagccggtgggtggtggataaaaccaacagtcaggggctgaacgtgaacccggcgtttctgaaggccgtcaaccagctcagccagctgtcggacattctgtttaccgacggcagccaggggatcggctttgagcttcaggcccgtccgacgcctcaggtggtggaaaccacgctgactattgacggccagaaactgcgttacttcaaccagatggcggaatggcaggctttccgctggccgggagatacctataagccgggcaccatgctgacctggagcagcaccaacgccggcgcccgattgtttggcgactacggcggcacctggggctttatccgctggctggagcagggcaaacggggccagctggatcgcagccggtggatgatgagcttcagcgcgccggatggccgcacgctgcagtgggtgctgcgctcacagttgggcagtggcccgctggcgctgctgcaactgcgcaactttaccctgccggggcagatcttccgcgtggctgagcaggcgctggcggaatctatggatgatgttgagatgaacggagtgaagtaa

SEQ ID NO: 454327 - DNA, 1107 bp, Serratia marcescens
atggcgcgtccgcccagtaccgcccgctggctgtcggctgcggcgctgctgatgctgctgtgcggcagcgccagcgcactgctggcgtctgcgcaagggaaccgcttactggtcgccaccggtatcctgttggcactgctgctggcaggtaccggctggctggcccggctgctgtactaccgcatcagcgtgcataacgccgctttctactaccagttggtggactatgaacggcagcggtggtgggcgcagcatcgccagccgttctggttaagggaaggcgtattgctggggcctgcgggtacgcgcacaaccgactggttgcgggtgcttaatcgtgagcagcgtcctccggaagaaaaaagagaaggtggcggtaacacgttgagactgccgcaaatttttgccgctgacgccggtatgcgtgaaaagcggctggcggaactgctggttattgagtggcaaaggcagcgtggcgaaagcccgctcactgcgccgctgcgctgctactggcagggagccgacgttgcctggcaggcattccgcacccaaatggctgccgctttcccggcgctccagctgccggcgcggccagccccctggcaaggggaagccagcctgatggctatcgccagctacctcgccgacgccgggcctgaagacacggtgctgatcgccggctgtcaggtggtcgccgcgcagtccgggagcaaacgtcccgtcggggagtccgccgtcctgtggctggccgggcggcacggcccggtgcaaatgacgcgtggagaagctttctcggccgagaggggggatgctttgcccgcggtctgtgcccgtgcgctggaacagagtgaactggaagccccccccgaggcctgcccgttgttttcccaccccggtctggaggcgctggcgtccagtggctgggacgtcagccagcatctgcaggatgcctactggggagatatcggcgatatggacgctctgatcgttttatcgctggcggcaatttacgccgcgcaccaccaacaaccgtgtggctggattgcccgcgacccgatcaacaccctcgcacttggaattgtaaaacctgatggacaacgtcaataa

SEQ ID NO: 454328 - DNA, 2454 bp, Serratia marcescens
atgtccgaggtaaaagaaaccgatctggcctgggtgccgccgccgtttccggcgcagggacgcctgccgactcaggcgctgcaggtcgggcagaactgccatcagcagaacagcgccgagcggctctaccggcaggagttgtgtctggccgccggacgacgcgtggagccgccgtgctgtaaaacgctgcatatcagcctgtttttcgacggcaccggcaataacctgaataatgacctgcttctgtctgatcccaagcatccgaccaatattgcccgtctgttccgcgccaccatcggtgatggcactgccggtggcgttcctgaccagcagaaggtatcactggatgcggcgaatgacagcggcgggaaatactttaaattttatattcccggcgtgggcaccccgttcccggaagtgaacgacccggactactcccttgccgggctggtggccgcaaccaagggggaggaacgcattaactgggcgctgctgcgtattatcgatgtacttatgcgcgtgagcaaagacccgcaaaacaacagtatcaaactgtcagaaggcgccagccgtaaatccatcagcaagatgggcaccagttgggaccgcctgtggtttggcggcagccataaccgctatgaggagttttgtcgtttactgaatgagttagccccgcagctgaggccattgctgacccagccggagccgggcaaaccgaagctgttagggatcaagctgtacgtctatggtttttcccgcggcgcggcggcggcgcgcgcctttgtgcgttggctgagcgagctgctgccgccgccggcggcggcaggggaaaatcccccgcagtgcctgcagattggtgaaatgcagctgcccatcagcgtggagtttctcgggctgctggacaccgtggcctcggtcggggtggcgcacgtggtgccgattgccgaggggcatatgtcctgggcggacggcacgatggagctgccgagcgatgaaacttacccggggctgataaaaaaatgcatgcatctggtgtccggccatgaacagcgcctctgctttccgatggactcggtgcgccggggtaacggcaagtacccgccttatgctaccgaagtggtgtacccggggatgcactcggatctgggcggcggttatccgccgggggatcagggaaaagccaatgctgaacatgatggttatttactatcgcaaatagtgttgcatgacctatattcaagcgctttttcatctggtgcaccattaaaagtcaataaatcttatttacctgagagtatgaagacagatatttggcgttctcttgatgctgaacagttgagagattttgtcgtcgctcctgaattggtattaagattcaacgcctggcgcgaactcaccctgaatctgaccacgccagaaaaagtcccccctgaagcagcctctagctacgatccgccgcgcgccagcggcagtctggaaagcctggtcgaaaaccagattgcctggatcaccgcctggcgcatcgaccgctatgccagaggaacgatgctgaaaacgccattttaccagcgcgccacgaacagcgaagcgttgcctgccgcacgtaaggcggctgaaaaggcacggaataaaaaacagcaagatattattgaattacgcaacgatcagattgcaaaacagcccgccgaccagatggacgatctggtgctctatccgggcgtcaaggatttcgacccggacatggcgcagacccagctgtttgaagcggcgaaggagtttggcaaggattactttgacggctaccgcattccggagaatctggcgcaggcggtgctggataccgtgctgcagccgatgattttcgtgctcaataccgatgatgagccgcaggaataccggcggatgaaggcagccggggaggcccgcgtggccatcctgttccccgaagccggtgaggccagcaacgcggagcagcctgccgggctggtcagagcgctgtttgacgatcaggtgcatgactcgcgcgcctggtttatgcacgccgcgctgggttcgcgcgagatgtggggcggctatttccgctaccgcatgatttacttcagcgacaagtgtaataagtcgctgtcgccgctggtgatcgccggcaacctggtggggtttgccaccctgaccaccggcgtggtgctgagcttcaaacaaaagagcctgagcggaaaactgtcagggctggcggcaaccggggctgtgcgggcgctgcaggttgaagtactggatcggatcacccgggaacccgtgccgcagctgccgggcggggaacggctgcgggcatttacccgggagccgggcgtcgtggtcgcccagcaaaaagcacgggtggcggaacagcagctggcgcgggcgcaggccgcgatcccggccagttggcttgagcaaatcctgacctcgatcgcctga

SEQ ID NO: 454329 - DNA, 528 bp, Serratia marcescens
atgaaacattcactgttaagcccgctgctggcgggtctgctgctgttaaccggctgctcacagcccgccgcacaggccggcggcgggggcggcaccattgatgccatcaaccacaccaaatgggcgattaaccatttcagcgtcaatcaccagtcgggtatcgacattatcggtccgtatcagggcggcggtggcggctgctgttacagcgtatccgcccgctggacgccgggcatgacggtgcgtattgactgggaaagcggggaggcatcgacagatgatttcccagggtatgaacattgggataggtatctggaatgggaaaaaaaaatcaaagccagccaccgccagcacagcaaaaccgtgccggttcccgactataacggccaggatgtctgcggtattacggtgcactttttgccctgcgacgaggtgaaggtgacaaccagttgctacacctacggcagccccgcttacccgataaaagcgcccatcaggatgaaggagccgaaagtatgtccgaggtaa

SEQ ID NO: 454330 - DNA, 528 bp, Serratia marcescens
atgaaacattcactgttaaccccgctgctggcgggtctgttgctgttaaccggctgctcacagcccgccgcgcaggccggcggtgggggcggcacgatcaaagccatcaaccacaccaaatgggcgattaaccacttcagcgtcaataaccagtcgggcatcgacattatcggtccgtatcagggcggcggtggcggctgctgttacagcgtacccgcccactggacgccgggcatgacggtgcgtattgactgggaaacaggggctggagatatggatggatttcccggttatgagaacagggaacaatatcttgcttgggctaagaaaatgaaagcccagaatcgccagcacagcaaaaccgtgccgatccccgactataacggccaggatgtctgcggtattacggtgcactttttgccctgcgacgaagtgaaggtgacaaccagttgctggtcaccgagaaatgccaactacccgataaaagagcccatcaggatgaaggagccgaaagtctgtccgcggtaa

SEQ ID NO: 454331 - DNA, 765 bp, Serratia marcescens
atgactacgtcatggattgaggaagtggccgctgcctgtcgggcatccgggatcgattatctggatatgatcattgatcaggccgggctggattttagtgttatcccggcactgaacgcgttgtcgatagagtggcaatcgctgtaccgtgggctgccggaagcgtttattgtcgatgatgctccgctgattgcgcgcataacgcttgacaatgtccagcagcagcagtggctgcaggaaattagccggcaggttgccgtacaggcaccgttgctgctgctgtgttcaccctggccgttctctgccctgacggcctggttaacacagtgcatggacgtgttgcaggagggaaggggcggcattttgcgattttacgatacgcggatatttcccctgctttttacacacatcctcagtgaggagcaacagcagcctttgttgcgcccggccctgttctgggcatggcaggatatggatggtcacccgaggggcataaaaggttgcggcacgcctcaggctcgcgatgaaaaaaaccataaaatcgatctcagcgatcgccaactggagtacctgatgtgcgtctgtgatgtcatggtgctgttggcgcaccgcgcaccgccagcgggcgtttatgcatcgcggcaggcgctgttttctgattgctaccagggcatggtggaggctaccaatcagggcattattctggatgatgcgcgtgaagcctgggtgatgcaaaaatggcttggtgcagcagaaactgactga

SEQ ID NO: 454332 - DNA, 2382 bp, Serratia marcescens
atgatggcaaatccgcttgcggtgattttcagccacagccaccacctgctgcaggtggcggactgcgacgcgctgctggacgtgctggcctttgagggccaggaggaactaagtaaaccgttcagctaccggattgaatttaccagcgccgaccacggcatccatcgggaggcgatgctgatgaaggcggcgtcgctgacgctgcaggcgccgctcaatcagggcgccgcgattaaactgcagcagccgctgcgggtgatccagggcgtggttaccggctttgagcgtctgggcaccaccaacgatgagagtcgctacgcgctgactctggcgccgcggctggcgctgctggcgcgcagccggcagaacgccatctatcaggatatgtcggtgccgcagatcgtggagaaaatcctgcgcgagcgccacggcatgcgcgggcaggatttcctgttctcactgacgcaggactacccgcggcgcgagcaggtgatgcagtacggcgaggacgacctgcgttttatcacccggctgctgggggagctgggcatctggtttcgctttaccgccgacacccggttgaatatcgacgtggtggagttttgcgatggccgtcagggctacggcgcggggctgacgctgccgtcggtgccgccctccggccagcatgacgagggcgtagagtcgtgctgggggctggagagtcgccatcaggtggtggaaaaacaggtcagcctgcgggattacaactaccggcaggcgctggaggcgatggatgcgcaggcggagattggcgccggcgacggcactacctacggtgatgcctatcactacgcggataactacctgacggtcggcagcggcgaagaacgtaacccgacggcggaaagcggcgcgttttatgcccgcatccgccatgaacgctacctgaaccgccagggccggctgttcggcgttagcagcagcgtggcgctggtgccgggcgaagtggtcagggtgagcggcggtgcggaggtgacggaggtgttccgccggggcgtggcgatcgtgcggacgatcagtacggcacggcgcgataaaagtctggaaatcggctttgaggcgatcccggacggcgtggactacgcctaccggccgggcgtgccgctgcgtccggtgatggccggcacgctgccggcgcgggtgaccagcaccaccgagaacgacagctacgggcatatcgaccgcgacggccgctaccgggtcaacatgctgtttgaccggtcgaactgggaaaccggctttgaaagcctgtgggtgcgccagtcgcggccttacgccggggagacctacggcctgcacctgccgctgctggcgggcaccgaggtggcgatcggctttgaggacggcaacccggaccgcccgtacattgccggcgtgctgcatgattcggcgcacccggacccggtcaccatccgcaactacaaacgcaacgtgctgcgcacgccggcgaacaacaaaatccgcctggacgacagccggggccaggagcatatcaaggtctccaccgagtacggcggcaagagccagctgaacctcggtcatttggtcgatgcggaaaagcagcagcgcggcgaaggctttgagctgcgcaccgacagctggggcgccatccgggcgcagaaggggctgttcatcagcgccgatggccagccaaaggcgcagggcgaagtgctggcgatgcagcctgtgattagcctgctgaaaggcgcgctgcatcaggtcgccgagtggggcagtattacgcagatccaccgtagccacagccctgcggtcagcggactgaaacagttggcggacagcgcagacaaactgaaagatccgctactgctaatgagcgcgccgaaagggctgggcgccatgacccctgaaacgatgttgctgcacagcggtaacggtttgtatatgcagagccttggcgaagtaaacctcaccagcgcacagcgcctgtcggcaaacgccagtcaggccgtctcgctgctggcgcagagcgagggtatgcggctggtatccgccaagggtccgttggagatggagtcacatggcgatattttatcgctgacctccctgaaagagattaccgtccagtctacacagggacacctgcaattgacggctaaaaatggcatcactctgggctgcggtggggcttatattcgcctcacgccgcagggcgtggtggaaattcacggtccgggattaatcagcctgaaaggtcagcacgatctgcaggggccagccagtgagacgtttcccttgcctgagctaccggcatcggtgtgtaaagagtgtctgaaaaaagcgcagcagctggcgcagggcttcgtgccaagggaggcataa

SEQ ID NO: 454333 - DNA, 1149 bp, Serratia marcescens
atgatcacgggtgttgctatgcctgccggggcgttgattgccccggacttctctttatcactgcaggaaaaagacatcacgcaaaacatccgcaaacggcttatttccttgtcgctgacggataacctgggcttcgaggcagatcagcttgatattgagctggacgacagcgacggcttgatggcgatgccgcagcgcaatgcggtgcttgcgctgtcactcggttggaagggggcggcactgacgccaaaggggctatttaccgtggatgaggtagagcaccggggaacgccggacacgctgaccattcgcgcccggagtgcggattttcgtggggcgctgaatacccgccgcgatgagtcctaccatgacaccacgctgagccatatcgtgcagaaggtagcggcacgcaataagctcaaagccacgataaccgccggtctgggcactattaaggtgagccacatcgaccagactcaagagacggatgctgcctttcttacccggctagcgtcgctcaacggggcggtggccgtggtgaaaaacggcagtctgctgtttatgcgaccgggcaacagcactactgtgagcggtaagccgctgccggtatttactatcacccgacaggatggcgatcagcatagttttagtattgccgatcgggatgcttatactggggtgacggcaagctggcttaacaccaaacagccaaagccgcagaaagtgaaactgcagcgtaagccgaaagagcaacatttacgggcgctacagcatcccaaagccaagccggcctcaagtaaaaaaccgggtaaacccgtggaagaaaagaaaggggaatatctggtaggggccgaggataacgtgtttgtgatccccaaggtctacgcgaacaaggccgccgctatgcgggccgcgcaatcaaaatgggaaaagttgcagcacggggcggctgaattctcgctgtcgctcgccatgggacgcgctgacatcaccccggaaacgccagtacgcgtcagcgggtttaaggaggtgatcgacgcacaggcttggatagtgagcaaagccacgcacagcctgagcaatagcggctttacgacggcgttagagtttgaggttttgctttctgatgtgacttatgacgtctcgtaa

SEQ ID NO: 454334 - DNA, 2778 bp, Serratia marcescens
atgagtaaaagcctgcagcttcaggtcttgctgaaagccgtagaccaagccacccgcccgctaaagagtatccaacaggcaagcaaaacgctggccggtgacattaaaaccacacaacaaaccctcaaagcactggacgcacaagccgcccggattgagggttttcgtaagcagcaggcgcagcttgctgtcaccgggcaggcgctgaaaaccgccaaggcggaagcggccgcgctggctgtccagttcaaggccacggaaaaacccactgcacagcaggcgcgattgctggcagcctccaaacgcgccgctgccgagctgcaaacaaaatacaatggcttgcgccagtcggtgcaacgccagcgcaatgcgctcaacgctgacggtatcgccaccaagaagctgagcgccgagcaacgccggttaaaagccagcgccagtgaggccacagcagcgctaaaccgccagcgtgctgagctgggacggttgagtaaaaagcaggagtcactgagccgtattcagcagcgtgcgcaggccggtaaagcattgggtgccaccgttcgcaatcaaagtgccgtcgggctgggtgtcgctaccgccgggttgtatgccgaaagccgctttatggcaccgggtgtgcaattcgataagcagatgtcagacacgcaagccaccttagggctggcgaaaaacgacaaacaactgacggctattcgccagcaggcgcgggatatcggggccacaacggcattttcaccaacggacgtcgcccgtacgcaatcggtattggcgaaatccggctttaacggtgatgccattctgaaatcgaccgaatccaccgtgaatctggcgttggcctccgatctggatattgccgacgcggcggacatcatcaccaatatgcaatcggcgtttaacatgccgatagacgagatccagcgcgttgcggatgtgatgaccaagggttttaccagttcaaacagcaacctgatggattttggcgaggcgatgaagtacgtcgccccgattgccgaggcggccggtgccagtattgaggacaccaccgcactgctgggcgtactggccgataacggcattaagggcagtatggccgggacggcgacgagtgccatgtttacccggctgcaagcgccggtcgggcaggcgcaggatgcgctgtcagaactgggggtgaaaaccaaagacggcaaaggcaacatgctgccgatcgaaggcatcctgaagaaaatcgaccgttcgtttaaaaagaacaaactcggcaccgcgcagcaggctgaatacctgaaagtcattttcggcgaggaggcgatgaaaggtgctatcaagctgattgcggcggcaggcaacggcaagctgggtgcgaaaaagcagacggtgacggactccaagggggcgacagagcacatcgccaagacgaaaacggataacctcgacggcgacttaaaaaacatgtcatcggcctttgaggatattcagattgaggtctttgataagcaggattccgggttacgtaagctcacgcaaagcgccaccaaatggctcggtgtcgccgggcagtgggcaaaggaaaacccggaactgtccggcacgctgtttaagctggcgttgggccttactgccgcgataggtggcatggctgttctgggctttttggccgggccggtgatcaccggatttagcctgctgatggggccgacgttggggctaacaagcgggctatttaagctgggcaagtttgccgccaagttttcgtttaagggtattactgctgccgcgcgtgggcttggccccgtaatgaagtttaccggcggtgcggtcgggcgttctttgctgaccatgggcggcggtatgctgaaattgatgtccatcgtcgggcgcgtgtcgtttgccggtctggtcaaaagtctgcgttttgtgggcacggcggtgatgtggttggggcggatcatgatggctaacccgattctggccgtgatcagcttggtggccatgggggcgatttacatctggcagaactgggaaacgctggggccaaaatttcaagccgtctgggagacggtcaagagtgccaccctgggggcgtgggacagcatcaccacggcgacgtcggaagcgtgggaacgtgtcaaacagtcaacaaaggcggcgtgggagggtcttaaaacgtggctgggcgggcaatggggtgaccttgtggggtcggctaaagccttaccgggcaagttcaaagaagccgggatgaacatgattaacggcatcattgatggcattaccgaacgctggcaggcactgaaagacaagtttagcggccttaccgatatgttgccggactggatgaagtttggcggtgataagacggaaatcaacccggccatttcttacaaccggcccacgccgatgctggcaccggggccgggctatgcgggagcttttgataaaggcggcaacattccccgtggtcagtttggcatcgtgggcgaacgcggcccggaagtggtcggcggcccggtcaatgtcaccggacgccggaaaacagcggcgctatcggctgccatgctgtcgttgtcgacaccggtgatggcagcagcaccgtcagccgcgccggtgcagatggccccggcacctatcactattcaggtacatgccgcaccgggacaggatgcgcaggccattgcccgcgaagtgtctcgccagcttgctgccgagcagcgcaaacaagcggccgccgcacgcagccgcatgaattacggagggtaa

SEQ ID NO: 454335 - DNA, 282 bp, Serratia marcescens
atgaacgaacctaaagaaaacgtgatcaccctcgacaccccgattaaacgcggtgataccaccattactgatgtgcaggtaattaaacccacggcaggcgcactgcgcggcgtcggtctggcagccgtagcaaatgcggatgttgatgcgctgctagtgatcctgccgcgtgtcacgttcccgagcctgacgaaagaagaatgcgcccggttggaactgtcggacttggtggcgctggccgggcaggttgtcggttttttgtcgccgaagtcggcggagtag

SEQ ID NO: 454336 - DNA, 771 bp, Serratia marcescens
atgcaagaattaaccgatgcagtaaaaaaaacattggtagacagaattaacacaccgctctttggctttataatattatcttggctttcttttaactggtcagacattgcaaccttacttcttagtaaaaaagacatacaagaaagaataaactccatcaactccacttcagacttattcggacactcattgctctatccgatattattagggtaccttttaagcgttatattcccctatgctcagtggacagtatcctacctacaaagggttgcacagagactattaaactccaataatgaacgaatggagcagcaagaacataacctcacaaaaaaactagcaaaacttagggccgaagctgaaggtgcattagaaattgaaaaaatagaaataaaaaacacgattgcagacaaagagatagtaatagcacaaaaaagagccaatctagtcgagttaaacgacacgtactctgacattcaaaaagaaatatccaatgcagagtcaaaacttatcaaattaaaacaagagacaataaatattgagaatgaggttaaagataaaaacccgaacacaatagcaatgaattattataaaaatcttgactgggatgaaagcggcattaatgctcacaaaaaatacctaacaaacgttaacttcctacttaatgaaatcaaggagatgattcaaggaggtataacacagaaagaaaagccaaaagcaattgaaatccttgatgatatacagaggggtaatagcattagaggttga

SEQ ID NO: 454337 - DNA, 537 bp, Serratia marcescens
atgaatttagtatttaataattttacgctttacgaaccaaaagttttttcatttgagctgcgtggattgaatgttcaatttcttaaatcagacagtggtgaggactggtatcagtgtcaaaaactattcgcgaaagacacggtaaagatagctttcgatgatagaggtgttatttgttcttactcagaggacattagttcgttatggcctattaatctcagtgttgccgaagttcctaacaatatcatggcccgacagttggatatttctggtcgttgggtgtttgatgggaagaacatcgccaaacggatttacacgccagaagagcatcaggagcaggcccgggctgagcagcgaacccgcattgcatcagccaccaatatgatcgcgccgctgcaggatgcggtggatttggatatggtgagcgatgccgaaaaagcccggttggagggttggaaaaggtaccgggtcatgcttaaccgtctggatatttcagccgccccggcgattaattggccatctgccccagacgcttaa

SEQ ID NO: 454338 - DNA, 2289 bp, Serratia marcescens
atgagcaagtataaagcgattattaccaccgccggggcggccaaaattgccgccgcgtcggcaggcggtacccagttaaaaatcacccgtatggccgtcggggacggtaacggcaccttgcccacgccgaacccggcgcagaccaagctgatcaatgagaaatatcgcgctaccctcaacgggttgaccattgataaagcgataaagaatcatattgtcgcggagctgattgtcccggcgagcgtgggcgggttctggctgcgtgagatggggttgtatgacgatttcggcacgctgattgcggtcgctaacatggccgaaagctacaagccgaaactggaggagggcagcggccgcacgcagacgctgcgcatgatcctgatcgttagcagcgccgccgctatcagcgtgattgccgggggcgataccgtactggcaaccaaagattttgtcgcggacgccatcaaagaccatgagaaaacccgcaatcacccggccgccagtaccaccgcgaaggggctggtgcaactgagtagcgcgacaaccagcgcggaagaaaccaaagccgccacaccgaaggccgttaaagccgtctacgatgccagcgccaaaaagtccgccaatctgtccgatctgactgacaagtccgccgcacgcggcaaccttgcattgggcagcgccgcaacaaaaaacgtgggtgtcgaaggcgggcaggtgatggccgtcggcgcgtttggtctggggggcggtggcaggcagtttgatgatgcctattcgaatatcgcgcaaatttaccgggttaatgtgtcatcagaaaacaagccaccgatcagcggtaacattgccgccggggtcattagtttgccttgtgatgccgccccgtccgccggttatgtcagtgtgtcaggtgtagggcatggctttgtcggctattccaataggccggaaaaaggggtgcgatggtcacgcatttacaccacggactacaagccgacggcggccgatgtgggggcgctgactgatgcacaggctgtgcaaaagtacgtccagcgctctatcaaggttaacggcaaaccgttgtccgccgatgttaatctgttggcggcagacgttaacgcgtggaataaaaccgagacggacggccgctatgtgaaacggacgggcgacacgatggccgggacgcttgtcattgatggcgcaacggtactacctacgcaaccgttgcgagcggcgaccgacgtccccgcgctttggaagcaggggatcagtatatcaacgctggaatttgatgaccaaaacaccagcagctaccccgcgcagccttattcgacgttggtaaatttgagcgcgactgagcatcgtgggattcaattattatctgaaaaagcgacgaataatttttggttacggtcagcggatgctaaaaaatactctgattttgtaaaactctatcacaccagtaataaaccaacggctgcggatgtgggggcgttaacggatgcacaagccgcgcagaaatacgccctgcgatcgtacaaggtcaacggcaagccactatccggcgacgttaatttgttggcgggggacgttaacgcctggaataaatcagaggcggatggacgttatttaatgaagtccggcggccaattgaccggaatagtaaaaacctccgctgaaattcagtcactcaccgctgataattatcgattaatcggcggtgattacggcacgttctggcgtaacgatggcaaaagcctgtatttaatggtgacgaatgcgaaaaaccagtacggcacatttaacggattgcgcccgttttctattgatgtgaaaggcgggcatgtaaatttcggtcacaatgtgtctgtcggtggcgagctgaaaacacttagcagtttccgttctgataaaggtgtttcgattggcgaggatttatgggttgatcgaaatgctaacgttgcaggcaacctgaaggtagggaacacgacttatcaaaccgatgggaatattaatgggactgcgtggaacgggtatttaagcaactggttgagtaataatattaatggccgcgccacgtgggattatgtgaacggaacattcatgcgcgacatgagacttggcggtgaagctcaaacagggccggggcgctggggcgtcagagcgccagcggggtgcgttgtcactggtgctgacgttacaagagatggtgatggcacttacactaatcttttttatcgggcgttgcagcgtaacgtgaataataattggtataccataggtcaattataa

SEQ ID NO: 454339 - DNA, 909 bp, Serratia marcescens
atggcaacgattaacttaagcctgcttcccgccccgacagtggtcgaggtgttggactatgaaacgctgttggcagaacgtaaggctacgctaatttcactttatcccgaggccgaacgggcggccatcagccgcacactggcgttggagtcagagccgatcgttaagctgctgcaggaaaatgcctatcgtgaggtgattttacgccagcgcatcaacgatgccgccaaggcggtgatgctggcttattccacaggggcagaccttgaccagtttggcgggaattttaacaccccgcgtctggtgattatcccggcggatgaaaccactatcccgccgacaccggcgctaatggagtcggacgacgattatcggctgcgcttacaggatgcttttgaaggcatgagcaccgccggttcggcaggctcttaccgttttcatgcacgctctgccgatggacgtgtggccgatgtgaccgccattagcccatccccggcctgtatcaccgtgaccgtgttgtcacgtgacggcgacggcaccgccagccctgagctgttgcaagtcgtcagcgtggcgctgaacgatgaggatgtgcgcccagtcgctgatcgggtgacagtgcaatccgccaaaattacccgttatgccatcgaggcaacgttatacctccatcccggccccgaggttgcgccaatcctcacggcggccaatgaaaggctccgcaattacgtggacggtgtgcgccggttggggcgcagtattcggcgatccagcatgaacgccgcgttgaccgtggagggtgttgagcatgtggacatcatcaaaccggctgctgatatcgtgctggataagacgcaggcgggttactgcaccggcttcaccatcaatccggggcgtgctgatgaataa

SEQ ID NO: 454340 - DNA, 609 bp, Serratia marcescens
atgcgcctgctgcgcaatctgatccgcattggcacggtggatgccgtcgaccgtgagcgcggtctttgccgagttaataccggcggcaaccttactgactggcttcactggattacctgccgggcgggccgtgcccgtgtgtggtgggcaccgtcagagggtgaacaggtgttagtgctgtcgctgggtggcgaactggatactgcctttgtgctgtcgggtatcttttccgatcacttcccggccccgtcggcgtcggcggatgcgctgcatattactttccctgatggcgcggtgatggagtatgaacccgccagcggtgcgctgagtgtgatcggcattaaaaccgccaatgtgcaggcgtcagagtcgatcaccgccagttccaaggtggtgatggtcaaggctgacaaaatcacccttgatgccccggaggtggtctgtaccagcaagttgaccactggaacgctggaggtgaaaagcggcgggaagatgaccggcagcattgagcacagcggcggcagcatcacgtctaacggcgtggtagtgcatacccatacccacggtggcgtgcagaacggcggcggcaacacggataaaccggcatga

SEQ ID NO: 454341 - DNA, 777 bp, Serratia marcescens
atgattaaaatatttttctatcggagtagggtaaatgttctctatctagccaggaatgtgttgtcacagataaagccattttcagttataaattctttgtttattgttttggttttgtttatattttttgggttggtgttgtcaatgaaaatgattatttctaacgacaatgaagccttgaaaaactactttttattcttagggtttggtggggttcttctttcctttacctataatttaagacgacatgtttctgaggattattttaaagaagccaaagagcagcttggtaaatccttcgatataattgattgtgtagaccatgctgaattaacgaaagatagactgaaatggcttacaaccgcaaggatgctaaagacatctgagcggttaagtaaaaaaataatgatgacgtcacataaagagttatacattgaagaaaaacaatactacaggattaaatttaaagagctaatcggcgattttcctgacggttttttcgatgatagtctagattattttagggatccgattaattcagataagtcctcattgtctgatgattctatttttaccgtaatgtcattcgttatttgggacgaaagatataaagacccgctaggggatttttttgaaagtgtgatttctgaagaagaaaaaaggaaggttagaaggtctgcccctgataacttgagagcgtatttagaggagagggatagaataagagatgagagatcgaagcggaaacaagacaggaaagaaagacgtgttatttaa

SEQ ID NO: 454342 - DNA, 450 bp, Serratia marcescens
atgagtgagcttagcccctttgacgcccgtttagccgggctgattaccgcattgtcgccgcagtcccgcaagtcgttggccgtcgctgtgtccaaacgtctacgcgccagccaacagcaaagcatcaagcgccaacaggcaccggacggcaccccgtatgccccgcgtaaaacgccgttgcgtaaaacaaagcgcctgcgcgatcgggctatgttctcaaagctacgctccgccagttacatgaaagccaagggtagcagcgacgatgccgttgtggagtttgtcggacgtgtgcagcgaatggctaacgtgcatcattatggcctgcgtgatcggccaacaccgcacagcgctgatgtgaaatatgaagcgcgtccgttattaggattttctttcactagcataagggatattgagcaagagattatttcttttctctctgaattttaa

SEQ ID NO: 454343 - DNA, 471 bp, Serratia marcescens
atgttaaaaccgcaacagctccgcgctgagctgacacgctgcctgcaatggttgcagcgcaaccccgaaagtctgcaggttcgggttcaaagtggaagcattgccgccacgcttgccacatcgctgtcgcatgagtacagctacacgctgaatctgctgtttctggattacaccggtgatctggatttaatcgtggtaccgatacaggcgtggctacgagaaaaccaaccggacattatggccacggcagaaaagcgccgtaccggctttacctttgccacggattttaataacgacggctcttacgatttcagcgtatccctgcagttaaccgagcgtgtggtggtcaacgagcaagacggcggtgcgctgcacgttaagcacctgccggagccgccgttgccggaaaacgtcacgcgcccgcagcagctttttgttcacggtgaattaatgagtgaatggcatgagtga

SEQ ID NO: 454344 - DNA, 429 bp, Serratia marcescens
atgaaacgcatcggtgtgctgttcctgttgctgtcgctggccgcagccggttggttgaaatggcaggttatcgccctgggtgatcagttggatgaagtgcaacgggaaaacagcaggatttcgacggcgctgagcgatacccgcacggcgatcaccacgttgcaggcagcggccggccaactggcgcaggaagagaaaaacctgagaaatgacctcaacaatgcgcaccggctggcgctgacccgcgagcaaaaaatacagagattactcaatgaaaaccaaattttacgtgattggttcaacactcctttgcctgctgatgttgcaaggctgcaccagcgccccggcttcaccggcgccgcaaattatctacgttggctgtcaggcggtgaacccgtgccagataccggcaagcagcccgaaaaataa

SEQ ID NO: 454345 - DNA, 513 bp, Serratia marcescens
atgaactcaatcgctaaacgttgcaccgtggccgccgtgctggtgctggctgctttgctgccgcaatacagcaccctgcacacctcggaggccggattgcggttgctggccgattttgaaggctgtcggctttccccttaccagtgcagagcgaacgtgtggacgagcggcatcggtcacaccgccggggtggtgccgggcaaggtcattagcgaacgccaagccgccgtcaatctggttgccgacgtttaccgggtggagcgttccatagggcgctgtatgcctgtcacgatgccgcaaccggtttatgacgcggtagtgtcctttgcctttaacgtcggcgtgacggcggcgtgtggctccacactggccggtttcatcaagcggcaggaatggcgcagcgcttgcctgcagttgccgcgctgggtgtatgtcaacggggttaaaaccgccgggctggaacgtcgccgggcgtcagaaatggcccattgtctgacaggggccgtgcaatga

SEQ ID NO: 454346 - DNA, 486 bp, Serratia marcescens
atgagcaccgtcattataaaaccacgcccggacgcgccagccccgcgcccggaggatgagccgatcattaaaaacgtctttttcttcccggatatcaccccggcagacgtgcgcgacgtgatgcgcattgaaggcacgatcaccgccccacggctaaggctggcgattaaaagtgcgctggcggaagtcaacgccgggctgtacacctaccgccgcgatcagatggctgacggctatcagcggctggaggatgtccccgccgacgaactcgacggcgaaagcatccgggtaagtgaataccgcaacgctgtcagcaccatgaccaccgccattttgtcagaacaataccgcagcatggacaccaccggcaccggcgggcgcaaagcggatgttgtcgaggcgtctattgatgaactgtggcgctcggctcgtaacgcgatcagcaatgtggccgaccgcacccactgcatcatcgggttgctgtaa

SEQ ID NO: 454347 - DNA, 849 bp, Serratia marcescens
atggcaaagaaagtttctaagtttttccgcatcggcgttgaaggcgacacctgtgacgggcgagaaatcgacgttaacgatattaaacagatggcgcagcactacagtccgaaagtgcgcggtgcacgcatcaaccttgaacacatcaaaagtgttttgccgaccagtgatttccgtcgttatggcgatgttgtcgagctgaaagctgagcagatagacgagccggacgaacccctgttgcacggcaagtgggcgctttacgccagactgacgccgacaccggatttagtggcaatggtcgctgcgagtcagaagatttacacctcgatggagatccgccgtgattttgccaaaacaggcagcacctaccttatgggggtggctgtcactgatgacccggcaagcctcggtactgaaatgctggaatttagccagcgcgcccaaaagaacccattggcaggccgtaaatccgacccggaaaatttattcactgctgccactgaggcactgattgagtttgacgaaattaccgacccggaaaactcattttccagccgtattaaagcgatgtttacccgcaaacaggctggggatgatgtgcgcttcaatgaaatggaaggtgcagtgatgaccgtggccgaacaggtgcaagaggcggaagcgcgttttacccagacaaccgccgcgctcaatgaagaaatcgccagcctcaagcaacaggtagaaaccggcaatagcgctttcagcgaactgaaagcggagctttccagcactgaaagctttagccagaagtcacgcccggaagccaccggcggcaacggtgcgcaggacgtgatgaccgattgctaa

SEQ ID NO: 454348 - DNA, 210 bp, Serratia marcescens
atggatagagaaagtgtgacttcaagcaatatatcttcaattggatatgatgctgaaagccaaacattagagatcgagtttcttaatggtgctatttatcagtacttcgatgtgccagaacaagtgcatgcagaattaatgagggctgattcagtgggggctttccttgctagaaatattaaaggctcctttagatattctagagtgtaa

SEQ ID NO: 454349 - DNA, 741 bp, Serratia marcescens
atgagcgatatgcgtcagctgtactcgtttattgcgctggccgaagagatgcacttcgggcgcgcggcggccaatgtgcacattgcccagccggcgctgagccagcacagcggcgccgacggcgcgatccggctgggatatgtcggatcggcaatttacgatccggcactgatgacgctgatgcgcgactaccgtcaggcgcggccgggcatcgagctggcgatggaggagcatgatgtgaagcgccagctcatcctgctgcagaacggcgatcttgatgcggcgctggtgcgtacgccggtgccgcagttgcccgggctggtttatcagcaggtggtgcaacggacgttgatcgcggtgctgccaaaggatcatgcgctgagcggatgcggaaagctgtcgctgcggcagctggcgcaggcgccgtttttgatccagaacgatccgccgggtatcgggctggcctggtcggtactggacgcctgccggcgcgccggctttacgccgcacccgctgaaggccacgcgtgatgtggcggtgaccatcgggctggtggcgctggggatgggcgtggcgctggtgccggagacgcaggcgctggcgcggcgtgaggatatcagctaccacccgctggacgatccgctggcggtgagtacgctgacgctggcctaccggcagaacactcagcaggcggcggtgaaggactttgcccgctttgtccggcagcgcgccgcgcactga

SEQ ID NO: 454350 - DNA, 222 bp, Serratia marcescens
atgagctcactcagatccttgggaagtaagttagggaaagcggtgggaatatcggcgttgtatgcaattgagataaccgtagccacagtgtgttctattgccgcgttcggttccttattctggttcggcgagtggtggaagggcctactggcggccggtgggttctttgcaattaccgtaattgtgttcgccatatgcggttacgccagaggcgaacgataa

SEQ ID NO: 454351 - DNA, 639 bp, Serratia marcescens
atggatgcaaaaatgatagcgctgggtatcatcgatggaatcgaatctgttcctgaaggtattgctctcagtgtgcgtaggacctgggaaggatctggccttgctggctcagatttaaaacggcgtaatcagttagagactgaaaggtttttcagggttataaaaatggggtatggcatagaagctcccctgcgcgaactaatcagtatcattatcaatgactgctacaagcatatggatcagcaaacccagaatacccttaaccaaaaagtaacccacgctaaagggttcgccggcggccgaattggcacccaaggagccctaacgttttacatagcccacaatattttcaagaaagttgctgctggcttcatgttccgcaaagtagttcaagccggattattcttcagcataaacacgataatgctccaaggatttatcgagcaggcagcggtcgcatcaagacatttacgcaacaaatacccagctacataccacaaactaacgccccgtaatttggatatgctttatttcttagcccaagagtacctggagccattcgttgcatatgcaaacatccactcgaaaatgttctgcgcaggtgtaaatcatgagctcactcagatccttgggaagtaa

SEQ ID NO: 454352 - DNA, 351 bp, Serratia marcescens
atgattgatgttgttctgtatttgttgtcagggctgtgtgtgctgtactcgttgccctctgtgtggatgaatgttgcaatgctggctaaatccagcggggcggaaaaagagattcaagccctattaaggtggaatgcattaaaagctgtgctgatggcagtatcggtgttgtgttttggtgtgtatgtaaacccttcatttcattcgataactgttctgaatttcttaggtgcgcttagcttgttgcttggcgtatcctctatcctttctctcatcgagacccggaatagatctgtagggcttatcgctgtgatttttatcgtttttgggattttgggggcatctctttga

SEQ ID NO: 454353 - DNA, 462 bp, Serratia marcescens
atggatacggttgaagagttgggtgggaagtattttttcaacggaatgagcctcgacaaagatgaacttctcctgtggctgattctcgatgagtttcagaaacagttcagcgggatggttgacttactggctatcgcctcaatgttggtcagcctgcccgtgattcctgtaaaggggaagatcggtaaggcctctggtaaaggtacatcaggaaccagcccattatctatagcctcacgtacgctaattcaacaaaggtttaagaaagctaaaaaaaccattacatgggccaagttaaggcgtggcgagtgggcttacaccacaagtattggtgcctatgttggccgctggcttccttggattggtgcagttctgacagcctatgatttagctatagtaacacgtaatgtcatccatcgttatgagcttatcgttgggaaaggggggggcgggaatgaatga

SEQ ID NO: 454354 - DNA, 315 bp, Serratia marcescens
atgaatgaaattaatgacgtccacgagttactcagaaaacacttctgggaaatgacgaatgatgcgtcgctgagtacaggtaaaaagagtgtactccctgaagatgcttatgattttctggaagagtacgcagataaactgcatgttgatatgactcgttttgagtttcgcaaatactttccaaactcggggctttggctcttacccaatgcgattctccccaaacatatgcaaacagatcgtcataagccggcggcgttaactgtcgatatgctgattgagtctgccaaggctggccggtggctctatgattag

SEQ ID NO: 454355 - DNA, 999 bp, Serratia marcescens
atgtcgcgttttttagccccgggatactgtattgtcgagcaggcagggacattatccttccagacaaatatgctatttcgccatcgtatgtcttcagcatcgaagctattcatgcagctaaatgcagattctccatggctgaaaccagggcaagttttaattgttgctgaccccgccagagatatcccacagaatacactacggcttttacgattggcaaaacagcatgtaaatagaaatatcaatgaattaagttgtgatgagtctgggtttttacaaaaaaactatggagttattgctgcattgacaagcgttggagataaactttttggaacagtcagtgatgctgggaataaatatttttctcatattgaaaacgctctgaggaaaattgaaataagctatcagaaccaataccgttctcagggaacccttgttagtcaacaattctatgtcgaacgggcggctttatttaatgaattgaaaggattaattaataaaccagttctgcaacagctgacccgaagggcagtaaagataatgccttatgaaagcatgaagagagcacttaatttatcaagtaaatcaatagtgcatgagtggtcaacggtaggtgtcggtgcgataaagggttattcaacgtacctcgatagcgcagctcgagcggctaaatttttaaaagccgggggatatgtcgggattgggctttcttttgcgaatacaactaatgaagtaactcactcctgtaccgttggacgtaaagaagaatgtccgaaggtagctgttcgggaatattcgaaattcggactcagtaccattggttctattggcggaggaaccgccggggcttttgctggaacgggggtgtgtattgctttaggtgcgatcagcgctcccgccgcaggtgtcggaggctttgcatgtgctgctattggctctttagttgcaggttatgctggtggtaaagctggggaagcaatgggtgatttgcttttctaa

SEQ ID NO: 454356 - DNA, 408 bp, Serratia marcescens
atggagcttgacgctaaatcagtaggtgctatttttgcgtggttggctatcgcgctgtttatctgttcatttttttattttggtatcaaaaagaaaaaatatacggagctgattgagctatacaaggctaatggtttttctttccctggcctttacgctttcttttcactggctggtttttttggttgttttcctatggctttatactttaaacgtttattggcgggaaatagtgttcgtatggatgatggtggaaacatacctttggccgcttatcgttttatcaagtctcaacctacggctctaactggttgggtgcataagttgtattacctctggttgtcaagcatgctgtttttcgtactggcggcgatttgcgccgccttggttagtttttcccccgactga

SEQ ID NO: 454357 - DNA, 255 bp, Serratia marcescens
atgcttgccgcttccgcgggatattttggcagcatgatcgttaccatatttttttggcagcttctgacccgaaagcgcattcaactgtccaaaaatgagtaccttgggaatgaatcttacgattttgtcaatgctttaccagagagtgaaacacgttggattaaacgctactttcacctctttttaatctggtcattttcaatgctcttgggaggggtgctgatgtatctacccgactggctacctatctcgtga

SEQ ID NO: 454358 - DNA, 1038 bp, Serratia marcescens
atggccttacctccccgtcaacggattgaacctggttactgcgttgttgaaacccctggttcgctcacttcgcaggcaaacatgctgttcagaaacccaaacagcgaagccgcccgctattacctgcagcttaatgccgatactccatgggtgaagccgggacatattctgatcgttgccgatccgcacaacccccaccaaggcccagccctacaccatttacgccgggccaaaaaccaggtgaataaagcgatggcgcaggtggatgccgaacaagcgacatttctgcagcgcaattacgacactctcgccaccatacttaatggcagcagcaccggattaggcatcgccagtgattcagggaaacgctactttgaacgaattgatgaaatattgcggaaagtagaaactacgtatcagaaccagttccgcacccaaggtacgctaatcggtcagcagttttttgtcgaacggaatcgcctgtttggggagctcaaagtgatgctggataaacctgtattcagccgactaacgcgcaaaatcctgaatctgcgtccgtatgacagcatcaaaagcgccctgaatttgtcaagccgctcaattgtccatgagtggtctacggttggcgtgggcgcgattagaggttattcgacttatctggatggaaccagcagagccattaaatttatgaagaatgctggatgggtgggtttggcaatatcagcgaccagcacgaccaatgacgtgtatcatgcctgtacaaccggccgcgagaatgaatgcggtcatgttgccttcaaagaatacggcgcctttgttggcggagtaggattaggttcagctggaggtacctggggagctctggctgggggtggagtttgtgttgccttaggaattatcagtgcccctatggccggtagtgccggcgtagcatgtgccatcataggcagtggtattggagcatacgctgggaccaccgcaggtgaagctattggtagaggtgtaggacgcggcatggccgatatcttgtttaagtaa

SEQ ID NO: 454359 - DNA, 474 bp, Serratia marcescens
atgaagaaactggtctgttttatggttagcctgatagcgctgttatcggttccctctattcctgccaatgccgccacggcgctgctgcattgtgaagccgaaatgctgatccgtaaaaacgtgacggaaaacgatcccatttcactgcatgcaaatgcacactacttcttcgacccggcagggaaaggctatgtggatattatcggcaccgtacaaaataaacggcaagccgcccatctggacaggatcatttacttcacttacgcccgcgccgcgcgcgatggtttttacaccgtgaaatttacccacagccggcccaaaccgctcgacaatacgccgcaggcaatgctggattatttttatgagatcggcaaggaaacgcccggttacccggtggatatctcaaaactgaacgagaacctgatcctgttcagccatttgtccttccccaccatgctgtgccagaagatctga

SEQ ID NO: 454360 - DNA, 1014 bp, Serratia marcescens
atgcagagcatgagattattggtcgtattgttatcaaccctggcggcgttatccgcccacgctgagccggataatacctgctggggcgacccggtgaatattgccgtggtggatatagcctccgcgccttttaccagtaataaaaaaggggctgcagcaacaatgaggtatcaaacggaccctatagagtttgatggggtttgtaatagaagcgaaaattatgtattcatgacccattatgttgacatggggccgacgcttgtaccctctgaaatgagtactggttattttaaattaactgatgatgtggatattaggataaggagtggctcaataagcaaatacttccctttggtaccgtctgatggattggctggcttgacgtctcccaagtcatatggggagaatataaaggtttctgggttcagtgtggctggtagtgggctcgtggaactaaaattaaggcgagatgttattggcggcgctattgtcgtaccgtcagataccgagcttttttcagcctaccgggttatggatcggctaccttacccgccgcgcccaagccggccgatagttcaggcacgcaccaaaggcggcgggcaggtaataccggtgacgccggagtgttcgattaatcaggggaacaccattgaagctaattttcatacgttacaaacgaatttggttccaagtcgcagcgatgatgaggggtaccgcaaagatattgcgttgcattttagctgtactaccagcctaacgcaggatattcaggtacggctggtggcagacagcgcggacttctcctcagatcttatccgctctgataattatcaactggggttcgcgctaaaacataacggagttttgatcagacccatggagtcattttctgcccgattggaaaacggagtggataatgagaatattactttatcgccggtaaaagatgcttatcgtgagctaaaaggcggtaggtttaacgcttcggctacgttagttattctgtctatttga

SEQ ID NO: 454361 - DNA, 552 bp, Serratia marcescens
gtgaagaagctggcgcagcaggtggtgaaagtcaccgatgagtcctttaaaaataaggcatttaacacccaacctgttgctgagtttatcaaaggagagtcgacggctgggggcggtctgtcgacgaaaaccgttgattatctgcgcgatatccagaaaacaaataccgaccagttggtgaaggtgtttgatcccaaacaggcagagagtaaattaaatatgtttgggaaacagtttgagcagattttaggagaaggcgggagtaataaacaaggtaatacaaaagtgtttgctacagaaggtttgtcaaaacaggagatcttcgattatgtgcaatcactggctggtagtaatccattgctggaggtgaaaaacgggatgatttggactgcagtgctaaacgagaggacaggagaaaaagtaacgttaagaagtgtatctagcagtaaagaagaaactaaggcccgctggactgttgatataattggtaatgaacaattaaaagcattgcagggaaaagtgaagaaaagaatgggaattaaattccgttga

SEQ ID NO: 454362 - DNA, 363 bp, Serratia marcescens
atgttatatagcgatgaagaatatagactgtttagctcggagttggagggagcatcaattggtacggtatggtcggcaatgatacccgaaaattttaatagggaaaacttgacgtatgaagaaaagaaattactgttttttgagattgttcttcgactaatgcaagataataagattaaattaggtaagtgtggggagtttttgaacgggagtgctgaggagctaatagctcaatataagtcggcctttcctaaaacagaagatgagtggaaagccaagcatgaagatgtttggttttatgaagatgattgtcctggtggtattgtttggctccatgaaaatggtgatgaggactggacctaa

SEQ ID NO: 454363 - DNA, 339 bp, Serratia marcescens
atgttagtaaacaaagacaatgcgttagaaatattaaaatccgatgtgacggactttctataccctttgaaaatgggtggtgagttcaacataggcaaatacaaaaaacttattttcactctggatgacataactagactttataaaacagagaatttaatccccaagaaattattaagcgaaatttatcttaccgcagaaggaataagtaacgagcctcctcacataaaaaacttcgatcttggttccatggcagaagagataatggaaaaatattatatgttattatcagggaaatccgtagatgatcctaaaccagaagtagggagaataatataa

SEQ ID NO: 454364 - DNA, 525 bp, Serratia marcescens
atggaaaaaagcaattatcaccattcattttttaaaaaaatatcaaacaacctctatggaaaagaaatattacaaaccatagaggtaaaggatgaggacggagatgttattgacaatgttatattcattgaaaccaaagataatggggtggtcggattttacattaacggttccaatccattaattagcacgaataaaattgatgaatttgattcatttaacctgtatgctttatatgaaaaattaacaagtactgaaaaaaacatccccagtcattttgaagtggattatttagaagtattctttcaccctgagtacaatgagttgctcgccatttatttaacctctcatgactttttatcatctttactgattgtgtttttaactgatgaaattaatatattttcagatatcaataaagatgaaataattaacgtaataaaagataatttaattcagttcaaagattcaaaacttctatccttccataaggaaaaaggtaacgaaagctggattgaaagttga

SEQ ID NO: 454365 - DNA, 375 bp, Serratia marcescens
atgaaagagttttttattatatgctccattttacttctctctggttgccctggttctggcgatcgtttaccggaaacgctatacgcagatgttaagatagagggtaacgcaccatgcgtattataccctgttaatttaggcgatcgcattacctcaattcaaattactagcgaaaaagaggtgtcatttaggaaactgtttgatgatgtcccttttagagttgtgagtggtcaatgcttacctacatttggttatcacttcaaaaactataggaactacgttgtctattatggcttggataacgataagtcgaaacggcaaaaattgattcaagctaacttttacatcggtaatttaaattatgccgtcaattaa

SEQ ID NO: 454366 - DNA, 1974 bp, Serratia marcescens
atgatttgtggcctttttttgcgtaactttaaaaattatgaaaatatcaatttcataccatttttaacgtcaggaagcgatcgcatgacaatttttgccggcgataatggcgccggtaagtctgcgatactagaaagtatcgactgtttaatgaataatgttgatagcagggagtgggcatactcgattggacagaaaaaagatcgcgtcaacatattcccattattcattattaaaaaatcagaatggcttggtgatgatattcagcagatggagaggatttcccattatttttggaactttaattttcttgaagtgtcaaacactgagtttacaaagaaatatattacatatcgagatagtctgagagattggtattccccggatgattattttttaatatctattggtaagaactttgatggtgcagtgctgttaacaagtacttttcataaaaaaataacggatgcgacaaagaaagatggtgtttcgaaagacaaaataaccagtatctttaagaggatattggatcgttataaatttgtctatattccagtggagaataaaacaagtgatatattgtctcttcaggcgtatgaaatgcagggtatgatggatagggagatttctgatgaaatcagaatgcttttatctaacaaagagcataatctatctgaagatcatcctttaaataaggggaaaggaaaaacaaagaagcatagtgtgattgatattattaatagcaagcttgatttatatattgatgaaattaataaaaaaatacctgagggttataaatttgaatataaaggggcaattaagcggccaataaagccaactgatattttagattctatcttcttgaggtattttacgtttagaccattatcaaaagattcaaagaacattaaaaacttaagttctggagagcagcgtatagcgctaatcgatgtggcgacagctctattgtctaccgagtcgcctaaaaataaagaggttattcttgcaattgatgaacctgaagtgtcattggagccagcacatagatttgaacaattttgtagtttaataaatttatctgaaaggtatggtagacaaatatttataacaactcattggtatgggttggtgttaagacctatgcatgcgtcattacattatatttctagaggggaggctaataataatgttgtgatagatgcatttccattgcaaaacatccaagaaggtagaagggcatttcccaattcaatagaaattaaaagctattttgatttgatggcatcaatgttaagtttattgaagaaaaatgaatacaattggatattttgcgaaggaagtgaagattgtttatacttaaattcttatttaaaggactcgatccctaatctatttattcttccatttaatggttgtggtaatatcaagaagatttttgagtttctgcatgttccgttttccgatgagcaagaaaataaattaataaaggggaaggtactatgcttaatagatacagatacaaagaatttaatcagaatggaagggtataatcacggacggtataatagaaaacttggttttttcagactgtcgattagaaatgatgaatctaatctcatcagtattgcatcaactgatgcaacaaataccgagattgaagacttgttagatcctgagttattttattcatcattagaaaaaatatcaaaagatgatagtattttacagggttttatgaggttgtatgaatttaaaaagggggttaaatttacaaacataagtaacggtatggaattcttaagtaaaaaaaccaaagactcctatgaaagaatgaaagaattccatgaatatataacgacagatagaatgaaaaaaattattgctgatgagtacaatcgagacccgggaaaagttgtaattagaagtgaggatttatgggtgaataaaataaaatgtttttttgtcaactcataa

SEQ ID NO: 454367 - DNA, 1137 bp, Serratia marcescens
gtgaagaggttgcctgataacctgtaccacctgttctatggggaacttgtacctgaactgtatgaccggatcgtcacaccatcccgtgcatgggataaaatttgtcgccgctatacattcgatcataaaagcgccataggttttagtaactttggttcagatatcaaggaacgcgttgcctgggactcttccccggttgatgagcaaggctattatgccaagtcgataaaacacaacatcgagcatggtgacgttgtttatatcgacaccaagtcactatggaacccgttagacttcgcgttttacatcaatcatcaggggtttctggtatcaaattctggctacagcgcctttaagcttgatggcgccaaccgaattattcactattacgagcaagctgtcgcatcgcgtcgcggacaaagccgcccgcgagctaccgttcggcctgttccacagcagcctcaaaccgctaaaaaagcgctcaatacgttaaatagcaaagcagttggacggttgctagccgcaggcgggatatataaccagaatgtggaggggtttgctgaaacagcaaaacagctcggtggagaggctgcggatggatttaatcaggttgcaaaccctcagtctattggctcgctgatcgcactatcatccatcgtggccgtggcaaagcttccaagtggtggcgtagccaatgtcaaatcactggaagaactacaacaattcttgggtacatataaaggcgagcgtaaattactggataatatcgatgttattaagatgaactatgttcgacgttccagagaggaagcaaaactattacgcagagaatttgatggaaaagtaaggaaaaactttcttaagtctatttctgataaccctgaggctaccagaaggtttaactctgatgatttagagctcatagccaaaggaagggttcctgaggactggtcagttcatcataaacttccattagacgatagcggaactaatgacttcaataatttagctcttattaatgagcggtatgaacacgctgtatttacaactacacaatctcgtattaccagaggaatgtcctcaggggagtcgcgtgaagtactttggcctgtacctaaaggcgttatctatccgtga

SEQ ID NO: 454368 - DNA, 483 bp, Serratia marcescens
atgaaaaatatgaatgatattgtcgaagaaattcaaaaacttgctgagttgttagagtaccccgtgtaccctggtgttacagctaacctaccgtattatgatttcggtaggaaaattggctctcagcaacatgatttttgggcacaatatggtcagtttatccgtctaatggatggttttcagatagatggcattcgtatatacggcctggaaaatcatgggaagtccaagtataaccgactcatcgaatacaatgatgaactaaccttgatatcccaaaaagcccctaatgcttatgttgaatcatatgatcatctaatcgttattggaaataatggaacagatactttcgtatacgacgtccgtacacaaaaatgggatatgcgggatcgtattgccattgatgaatcctacgaatctcatgacacatttgaaagttttctatcctcagtagtgaaaactatacaggtgaataatgcctaa

SEQ ID NO: 454369 - DNA, 483 bp, Serratia marcescens
atggcatcaaatgcgtttttaaaggtggatggcgtttccggtgagtctcaagattcagggcataagggatggattgatgtttccggctttgacctgggtgccacgcaacccggtaatatgcacgtcggcaacggcggcggggcgggtaaggttcattatgacgatctggttatttataccaatgtcgacagggcgacgccgacgctgtttcagtatgccgccagcggtaaacatatcagcaaagttgaactcgctatccataaagccggcggcgagaacattgagtacttacgtttgacgctggaagatgttttagtcacggaggcccgctatgaaggcgatctgaggcaatcgatcattcctgttatctataaattccaggcggctaaggttttgcataaatactgggagcaaacagataaaggcggaaaaggcgcggaagtctccgctggctggaacatcaaagagaatcagggcagttaa

SEQ ID NO: 454370 - DNA, 540 bp, Serratia marcescens
atgcgcagcctgattaaaataaggatattgtctatgggcacgaggccacgttttcttgcagcatgggctgctgcaaaaaatatttatgatcccaatgatccgttgggaaaagtaaaaaatactatcggcggtgctgtaaaacgcaatttcgatatccctgtaaataaaggcggatgggaaaatagttgtgcagtaagaatgagttacgttcttaactacacgggccaccccgtccccaggataagtcagttaaccgtctctggcgcagataagaaatggtatttttttcgagtcagggacttgattgcctaccttaacactacatggggaaagccagatttaataatgagttacccgcaattgcctgtagctcaactggctaataggaaagggttaattctattcgaaattacgggctggagtaacgccggcggacacgcaaccttttggaatggttctcagtgttccgatcattgttattttaatgaggctagtgctcagtactcgaccacacatgctaacttctgggaattaccatga

SEQ ID NO: 454371 - DNA, 444 bp, Serratia marcescens
atgagtaagttgataataaccagtctcactacggtcttagtaagtctttccctgcaatcatttgctaaagatgcccaggacccggtagcatttatcaagcaaatgccttatcagcaggcggtcaaagaactggcattatcccgttgcttatctcaggtttctgattcagacaaaactttttctattgacgctgctagaacggctaatgcaataagagactggataccgtttgatatagagtctggagatgatagaatcaacgcgcttattgataaattcaagtcaagaaccaatgaatttcatagcgagtctgaaactaacagtcagggtgttaccctgaactgcctgcggttatatcacagccatgaattagatggtttgtcccgcacgttaatcgtcggcaatccaactcactcatgggaaacagataacccgcataaataa

SEQ ID NO: 454372 - DNA, 828 bp, Serratia marcescens
atgaaagctatcaggaaaggtgataaaggatctcatgtaaaatccctacaagagatgcttatcggacaaggtgcgaatatttatgctgatggtatttttggcggaaaaacagaattcgcagtcaagaagtttcagcttaaaaaaggtttacatatcgatggaattgctggccgaaaaactttttcagctttaggcaaaccatcagtagtacgggcaccacaaccccccattggagggaagtccgggcgtcaagggacgcgagcaatgaccacatcacaaagtggactaaggtttatattcaatattgaatcgtggcgaggcgtaagtaaccatcttcactggccaggtggcgcaagtggagtaacccttggcccaggttatgatatgaaaacgcgttctgttaactctataaagaacacaatgatcgccataggattagatagtacaacagcagataagatcagtaaggcctctggtttaaaacaccaagacgccaggattttttcacaagaaaaccataatttggttgctttaactgctgcgcaagaaacctcattacttaaatttatcatccccgcgtatgaaaaattagtgaaaagtaaaattcatgtacccttaacccaacaagagtttgatgcgttagtttgcttttcctataaccccggagggagatttaataatgttgcttcattaatcaatcaaaatagaatatctgacgcaatgacagaaataaaaagagcaataacctctgccggaaaggtaatgaaaggtcttatcaatagaagaaattacgaagttgatctatatctaaatggaaattatcgataa

SEQ ID NO: 454373 - DNA, 1314 bp, Serratia marcescens
atgttacttacagagaaaaggttacagaaatttgcactttggtcgctctttatctttaccttttcaggtgttgtttctttaatttcagttaagcttgataaccctgtattaaggatatggaaagaagctattattatcggtattcttctgttatctgtttttagtgccttgttaaggaagaatatagcattaacaaaattagcaagtcttttccttctgctggttcctgcttttttattgtattttttattctctattaatactaacaccctgttagttgcttatcagataaaaaacgatgtcgtacctctgctgttcgctttttctctttatataatattaagcgaccaggaggatactggtgagttttataaaaaaatgatcaagttggtggttgttaccgccacgattaactcattttttatttatattgaaagtatgttcccatcggcttttatggcgacgctgcaaattgaggagtttaataactctggtggtaagtcagggatccgactcgataacgcgctcggaagtttacgcgcgatgggaacaatgacaacgtttatcaacgcaggtactttaactttctttggtatcgtctgcgttttggaaagtggattttatacgcgtttaaagaaatgggtgttgtttgccattatggtcagcgccttgatcctgactacgtataaaaccgcgatgattgctttggttatctatttggtaactaaggtggtctacactttctttaaaaggttgcgtggatcaaagatgatttatcttttttctgcagtagtgacattcttatttatggggttcgtgtttaatacctttacagtatatgatgctctggcagggacgaaatataaaccttttgcctataattctatttatttacgctctctgcaacattcggatgttattaaagacatggagaatcgtgacagtttctataccggattaggggtaggaaccaatggtaccatggggccgaatgaaaaactgaaacttaaaagtaaagcattggatagcacctatatctatttgatgagtaattatggattccttggtgcgttgctgtacgtatctgttctactgatgttgttactgtacttctgctcgcaaagcagtaagtttgataatattgctattatttttcttttttatactttgggagcggatttctttattaacaacactttttccaatttcccatgtaatgttattctttatagcttcattattgtatcactactacacactagacgagcaaagcggagcgacaacccagtgagagatgacccgatgagagtgtaa

SEQ ID NO: 454374 - DNA, 462 bp, Serratia marcescens
atgatagtaattaaaaaaaacttgctaggattgatatcacttggcgtcgtcttattagttttctttttctggtggttttctcacccagtgatgattgttgacgtccataaggatgatgattttagctttgtgttggtgaaaaacttccctcttaccgacaagggcaagatcgattggtggatggataataaagacatgttggaaaaacgatatggtattcctcaatctacatcctctggttttttcgtcattaccttctgggattttagtgatggttataaagaggcgggtaagtacgataggttatgtttcaatgatataccgacaaataaaaaatgcatcgataaaaataagttacttaccgttgaaaataataaaaggaaagaattattgtttactgttgacgatggcagatacctgatgaagggaagtggtgaaactataaaaataaatagggaataa

SEQ ID NO: 454375 - DNA, 858 bp, Serratia marcescens
atgatggctgcactgcagttcccctgcacgatatttaaaacgcaaaagcgcatggacgattacggagcgagcgatatgcgttgtggagacctgtccgcatcacagctaaaaacgcattttcgactggcggacgtttccgccaccgtagacccgtggacgctgaccagaaaacgtcttcaccagacgcacccgcgcgcctatgcgatggtcagccgcctgtccgccccgcaacagacgctgacccgccgggagtgcgccgccatactatttgatgagctgcgccagctgtcgcggatgtttgccctttatggcccctacaagtacctgatcggcaaaatgatcgaccatctgcaatacggcaacggcacaccgtttgccagcccgcatctggacagggcgttgagggagcatattttgggggataatacacaagatagttctcgtttgctgctaaaagatgtatttaacaaatatataaactgggaaaataaatgctatccaaaagagcataaggagaagttaagaaaatatatatctattagtagactaccaaaattcgatcgattccaagataactttaatggtatgggtatcactgtacatgatacttgggctactgacattacgattaagtctctgcaggttgataataatcgttatcgtgcaatagtacattataaagtacaggatcactttggcctggataacgaggatgttttaaagattaaattcaaacagtttcgttttttccgtatttggtttgttctgcagcgatacaaccagtttggttttagaccatttataacgaatatggatgctatcgtcgaaattaccggagagcgtaatgatagtaattaa

SEQ ID NO: 454376 - DNA, 840 bp, Serratia marcescens
atgaacgataaagtcatcaatacaggtaacgttgctgtaataaccggtgcggcgaaaggtattggtgccgcggcggcaagagagctggcacgaaagggcatgaagctttgccttttcgatcgtaacgcacaggcgcttgagcagctagccggcgaactggaggctgaaacattgctggtcactggcgacattacccgtgatgagtaccagcagcagctcaaagacaccgtttacagcgcttggggaaaagtgaacctgctgtttaacaatgccggcgtgaaaatagccgccggagcctgtgattctcccaatctctggcgacagcagatggaggtaaacctgctgtccatggtcgccacacagcatatttttctgccagaaatgttaaaaatggctgggaaaggtgcaattgttaacttgggatcgaaggagggtattacaaccccgcctgggttcgcagcctataacgcctcaaaggcagccgtaaaggtgctgacagagcagttgtctcatcagcttctgaaggaaaccgatactaggctcaccgctcatctgttggttccgggctatacctggaccgagatgaacgatcctggcatggacgatcacagcggcaacaagcccgatgaagcgtggacggcagcgcaggtgatcgattatttcctcccgcgctttgagcggggtgacttctatatcatctgccctgataacgccgttaccagcgagatggatgctagacgtatcctgtgggccgctcaggatatgctggacaaccgtccagccctgtcgcgctggcaccctgactgggaaacggcttttgaacgctggatagaaagctga

SEQ ID NO: 454377 - DNA, 1089 bp, Serratia marcescens
atgagcctcctgccaggcctggcgcagagtaccggcgtatctatcccagctgcaggaggctacatcagcgcttatgctgcgggcgtggtggtcggtgccccgacaatcgcggtgcttggcgcgcggcaggcccgtaaaactctgctgctgatattgttaattattgcactagcgggctatgccctgagcgcactggccacgggctatagcgccatgctggcggcacgcttcatttccggtatgcctcatggtgcctggtatggcgtttccgcactcgtggcggcctcaatggtatcgccaaagcataaagcccgttatatcggttacgttatgctgggacttgccgtcgctaatgttgccggcgttccgcttgtcacatgggctggccaggcactggactggagaatgtccttctggatggtggcagtgggcctggtgctgacggccataatggttctgctttttgttccgtccgtagcggcggacagatccgcttcacctctgaaggagcttggcgcactgaagagtccccgaatcctgatgacattcaccgtcgcttcagtcagcttcgccgggatgtttgccgtatacagctttatcaccccggcgctgacggaaactgctggtttttcaatctcatccgtgccatggatcctggttctatggggagcgggcatggttgccggcaacattatcgggggaaggctggcggacattgcgctgatcccgtctatattcggcatcattgtctggaacattgtcttcctggggctgttttcccttacgggaatgctgcagatcccggtgcttatcgtgctgtttatgctcgggtgcgggttttccctcgtgccggcgcttcaggcgcatatgatgaacattgccggtgaagcacagaccctcgcctcctccctgacccacagcgcgtttaatatttccaatgcgcttggcgcagccgcgggcggtttcgttatcgcttcgggaggaagttgggtctctacggggtgggtaggggctgctttttccctgttagcacttcttcttatgttcatatcggtacgcattactgcgggagtaaatcatgaacgataa

SEQ ID NO: 454378 - DNA, 1035 bp, Serratia marcescens
atgcttgtggcctcagagtttcatctgctcacgaaattatttacggggaatatgttttctccagagataccaaaaccgctgctgctgcttaccacctggcttttcggtatgaccgtttttatggctgctctgttagtgctgggtgacatattctggatagtgcaccggctggtatcaggacgccggttgaaatggcatacggctttctggtttatcctgcctgcagtggcggccatactgacaacacaagctctgaaaaatggtacagcggtacctgcagtgaaagagatagacgtaacgctcaagggattacccccacgttttgaaggctaccggattgttcagttgacggatctgcacgccagcagactgctgccgcgaatctggatacaggacgttgttacctgcacccgcaagctgaatgcggatatgattgtgattaccggggacatgattgatggctggccggacgcgcgtttctccgacattgagccacttggccagttgcaggcgcaggacggtgtttttttcgtaacgggcaatcatgaatattacttcggcgctgaaacctggatccgaacctttgaaaagctgggcctgcactttcttaataatgccggataccgtgtaagtcgtgatggcaactcgttgtatctggcgggcgtgacggatggcgttgcgccgtcatacgatctgccgggccctgacctgcgaagagccttaaagggttcccacccgggtgaaaccgttattcttcttgaccacaggcctgaaaatgccttccaggccgctgaactaggggtgagcctgcagctttccgggcatacgcacggcggtatgatcgccggcctggacaggctggccgcacttgccaataacggttttgtgtccggcctctacgaaaaaggttccatggcgctctatgtcagcaacggttccggcatctggaacggttttcctttccggctggggaaacccgctgaaatcacgcttgtcactcttcatggcgaaaccagtaacggttttgttgaataa

SEQ ID NO: 454379 - DNA, 987 bp, Serratia marcescens
atgccatttgacattgcattgaattttaatcaacggtccaacttcatgccctccagaccttctaccacgctcacccgaagcgatcttgctgagctcaacgcatttcttattaccgagaaaatgcgcagttttaccaaagccgccatagaactcgggataaccacctctgcgctgagccataccatacgcaacctcgagactcgactgggggtcaggctgctgaacagaacaagccgtacggtctctccgaccgaagcgggtgcgagtctggcgctacgccttgaaacaggattcaaagaaattggtgacgcacttgaggaaattaacctgatgcgtgacaggcctgttggaaaactcagactgaatgtgctgagtgacggtgcccgccttatcatgtctcaccaccttccgcgtttcatcagcaagtaccctgaaatggaaattgaaatcagcgtggatgacaggatggtcgatatcatccaggaaggatttgatgccggaatacgtttcggtggaactgtgcctgaggacctggtagcaattcgactgggagacgcgctcagatgggtggcggtggcatcgccacggtatctttatcagcatacccttcctgccgtgcctgaagacctgcgtcttcatgactgcattcaactgcgcaccgggcagggcgttatctataagtgggagtttcgtaaaggagaagactatcgcgtaattgatgtcagggggcagctttgtgtgagcgaaacggcactggcaattgagctggcgctgtccggcgccggcatcgcctactgtcttgaagatagggttcgtgactacatccgtgaaggcagtctgagagtcgtgctcccggagtgggcgccattagaggagccaatgtatctttactatcccggtcaccgacgagttccacagggtctgaaagaactgattgaggtactgagagaaggaattgaaaatgaaaaggaaatagctccagaataa

SEQ ID NO: 454380 - DNA, 213 bp, Serratia marcescens
atgcataacaggaaagcacgccaccggactccatggcgtttgatagccaggacgctgcaatctggcgagctggtcagcgtattgccagactaccggttacctgaccgcttcctttatgccgtctatcccgatgcgcgctttatcccacggagggtcagaaacatcagccgcgcgatcgagcaattgctgcctgaaattaccgagaacggctga

SEQ ID NO: 454381 - DNA, 165 bp, Serratia marcescens
atgatcgccgcttttctttcgaagaacatggaatgcataccaatccccgatgaaaaggaattggtgatgactacgattaatcagtttgctgcacatgttgatctggactggggtcagtccaagtctgtgttcaggttaaaaacggtgaacgtgtttttcatgtaa

SEQ ID NO: 454382 - DNA, 411 bp, Serratia marcescens
atgtctgagattgatgtattaaaaatgaagtatccaggcgcaaatgcctggcaagtgggggatagtcaagagctggccaacgaactcgcgacccttattataaaagggattaaaacggcctcatgtggatctttttcatcttatcagcaggaagagtctgcacccaaaattgggagccataacatcatccttgatggtcagaatatacctgtatgtgttatcagattggtttcgatgcgactggtgcgcttttgtgatgttaccgaggagtttgcccgaaaagagggcgaaggcgatttaagtctcgagtactggcggaaagagcatcagcgattttttactcgggaaggttatttttctgatgatatggagctgatcacagaagaatttgaggtggttgaggttctgtga

SEQ ID NO: 454383 - DNA, 879 bp, Serratia marcescens
atgtttacaggtctgagcgcttttccgctgaccccggtgaccccttcggggatcgacgaaaaaggttttgtgaatatcctggcccggctgaccgaggccggggttgattcgctgggcgtcttaggttccaccggcagctatgcctatctgacgcgtgagcagaaaaaacgcgtcaccgcgctggcggcgcagcacgccggcggcattccgctgatggtttgcatcggcgcttacggtacggagcaggttctgcagctggccgacgatgcgcagacggcgggcgccgatgcgctgctgctgccggtgctgtgctatcagtcgccgacggatgatgaagtttatgcgctgtatgaaaccgtagcgcgccatagttccgtgccgctgtgcgtgtataacaacccgcgcaccacccgctttgagttttccgatgtgttactggcgcgcgtcgccgccctgccgggcgtgcagtcgatcaaaatccccggcgtgcaggcggagccggtgcgaatgcaaagcctgcggaagatactgtcggcggaggttaccatcggcgtcagcggcgatgagtttgcagggcaggggctgaatgccggctgcgaggtgtggtattcggtgtgcggcggcctgttcccgcacagcgccagacagattgtcgacgccgcgcgggcaggggacagcgggtgcgttagcgagcaggtcgcgcggctggaaccgttgtggcagttgttccgccggcatggcagcatccgcgtgatggccgtcgccgccggtattctcgggctgagcgacatcgactgcctgccgcgtccgctgcagcccttgccggccgaagcctgccgcgatatcgccgcggtaatgacgcagttggaactgcgctaa

SEQ ID NO: 454384 - DNA, 330 bp, Serratia marcescens
ttgtctcaggaaaatgccgtcaaggttaagaataacgaattcgataatatggtccgctttgcctttcggctgaccggggtcaatatactgattctggctgcggtcggtctgatcggcctactgcaaccggaagagatgactgcatggctggccctggtggtgctgggtctgataggcatcaacctgttcgccaacctgatagtgttttacctgtcgctggtcgggctgttcaaatcgacgctgaagtggcgtgcggcgctggcgttgttgttctcgctggtgctgtttgcgctgtatctgttaatcatcgcggtgacgatggcaggataa

SEQ ID NO: 454385 - DNA, 444 bp, Serratia marcescens
atgagtcaggataaagagcttagccctaagtggcaggcgcgttttgatttttttgatagcgtcggcggcgatattacctccccggaataccgcaagaaaattaaagaaattagcttctttgggcgcatgaagtacatatttaatttcttcgcctttttcttcggcattatctatatgtgcattctgggcctgtggaaaaaggggctggtactgtttgtcggcgctggcgtgctgaacgtgattgtcgccatggtggagtatgcgaacggcggccattatgattcggtctaccgtgcgttgaatatttgctatgccggtctttgcgctacggtggccaactatgcctattacctgaaggaagtgcgggggatacagggctggaacccgtttgaaggcttcagcaagcgttcagcggcgaaaattgccgcccgtcgcgaagggtaa

SEQ ID NO: 454386 - DNA, 543 bp, Serratia marcescens
atgagcgcacaggctgaggaaggaacattacgccgaatgacaataggcgagattgcaatggctcgtcgggttttcggtgattcgatagtttatagtcgtgtctggattcattgtgatagttatttaccgttcggtttgcagaaacaaaactatgctatgacccctaatggggaactatggtacagaaagtcaatgtacagagatgatttttcttcgaactcagtttttgtcgaagataaatatgtttttattcatgaattagcgcacgtatggcaacatcagcatgggcaatgggttagactgcggggtgcttttagctgggctgctgaatatacgtatagactagataaatataagttgacagattactctctagagcagcaagcatctattcttgctgattattggttgctgctggtttatggaatcgataaatggtatttctatcagagagcagggcaaatgggaaaatacaggggggtggacaagatgagaaatataccttcgctttatcagaaaatagtgagtgggaaaggacggtaa

SEQ ID NO: 454387 - DNA, 306 bp, Serratia marcescens
atgcgacaattatcagatatatcaaggattctgaaagaaaagcgcaccgagttgggctggagtcaaaaagactttttgatgaagattggtatgacgcagcagcaatatcagcgtattgaatccggcagtgatattaggatgagcactctgctacggatattggcggcgatggatttggaatatgttatcgtgccgaaaaggcatgccggtgacgtagagacgttactgcaacaggaaatgggtataacgtcgaaagcggatgtgttgcaggggtttgaaaaaaagctgaaagatctcgaggactag

SEQ ID NO: 454388 - DNA, 1539 bp, Serratia marcescens
atgtttagtcagaatactgataaagtaaatcaagataataatcataatgttatgtcggatgttattagcgaattacgttctaatttttatacggcggaggagtttggtgcggttggtgacggtaaaactgacgattatacggcgtttcaacgtatgttagatcaggttcctgcgggagcaaccattattttggatggaacgaaaacttattacaatgcttttactacctcagggctgagtggttcatggaaaataacgaaacccgtgactatgtattgtaacggtgcaacattgactcgtagaaaaacacaatcatcagcggataaccaatcagctatatttatactcgaacgtgtcgatggtgtgagaatatttgatgtgtctattgatggcgggaaccctattgggcaaccggtaaatagtaccggcacgattgttagcaccaaaaaaacggcattgtgtcaagctatagattatggggtatatgttgtcagttcatccaatgttgttattactggggtaattgagcgatgtgcttttcccgtgtgggtaaaatcatcaaatacctttcggttttccggtagcgtaaattatgccggtcaggtggtgcctaatgtaacagtctcagatcttgcatatggagccggtattaaattatctgaatcttataacttcgatataaatgttgatggtaaagggaatgcaaacgctactgttgaggttgaacctgcaagttttaatggaagtattgtttgtcggagttgggagaatatatctagcggaatgacgattaccgacagtagaagtattacttttaaatcatacgcatttaactccaatacgggggtgcaaatcatccaaaccgccagtaaggatgcggagagacatacacgaagtattgtgggggaggctgtaaatgaaggtggtacatggggggcgtctatcagccaacgttctggtgcggctcagaaattgacaggggtgacactgcgtgtacagagttatcaatgtaaaactcacggcctctatttattgaatcaatcatcaatagaaatgcgaaatattgttatcgattataatggtgttgatacagcaagtgagtcgtatttatcgtcgggtaatgatgtcatcattacaggggatgtccgggttgatcttaagatgaaaacgacgggctgctataatggactggtgattaatggcctacaacacgctgattttcctccccgtgttgtaggcgattttcgtgaggcgaattttgtcccgggttatgtattgggtaaatcttcaatggttgatttgtcagggtcaattacgcgggacgattatatgttgacaagctcggctacaaatacaaaagttgccaaaatacttccgggcggtaaccttgggccatactctggagttaccatggaaactaatcatttatatattcctggagttcctgattctatgggattaaatcatgagatgtatgctgggcaacggccagagggggctgctgggcaaaattaccttatggtaagaaaagataattag

SEQ ID NO: 454389 - DNA, 681 bp, Serratia marcescens
atgaaaaaaattgaacctgaagactactttaccggccaacagctgatattggccaaggccattgaggctggcgacctagagagggtaaaacagctggcaccggaaacggatctgaatacccccggcgagcagaaattaaccccgctgtttttcgccatcaacgaggcaatgtataacgataatccgggcgatcgactagaaattattacggtgctggtcagtgctggcgcggatcctttaccacaaagagggaacaagccggctttatggatggccaaggccgataaggatatctggcttaaggcaatgctggacggaggtctatctccggatgccagagttaagagcactgactatcccatgatctatgaaaccatttatgccaagactaccgatacgttggcattattagttgtgcgcggtgccgatattgatacgagggattctttaggccaaacgccgctaatggcagcttttttcagcaatagctttgagcacgccaattatttactggaccacggcgctgatccaaatccggtaactaagaagggatgggtattcgcttcactggtgcaaaagcgccttaataaaagccagccagatactgaataccaccagaactgcctgcagctgcgcgacaagatgatcgcgcggggggtgaagtggccaccggaggcgtga

SEQ ID NO: 454390 - DNA, 507 bp, Serratia marcescens
atgcgcatgaatcactttacccgctatacaccaaaagagccggcattcggcccgtcagcgctttatttacaagacgataaagggaacgattggtacacatcgcaaaacaagttcacgaaagcttataaactggcgatcagtccagatagcggcaccatccgctgcatagctgaagacgtttctgcgttattcccaaacggcttgtcggttgtcgatatcgatacattgccagacgggtgcgatatttccggcgattgggtttaccaaaatggcagcgtaaaactggcagatggcgcagttgcacgccaggcggctaatcaaaaagactcattaatgcagcaggcaaattatcaggtacaggttcttagcgatgccgtagaactggaaatggcaacagaggaagaaaaaaccgcactaccggcatggcgaaaatatcgcgtgatgctggcgcgtatcaatccgcaggatgccccctctatcgactggcctcatgcgccaaatccgtaa

SEQ ID NO: 454391 - DNA, 312 bp, Serratia marcescens
atgaaaaaagtatttatcttatcggcgcttggcctgtctctgctggcttctgccaacgttatggcggcaaataattttccacgcgattctaggttctcaggcaccacaggcggcgaaaaaattctgtttgaaggcgatgacggttaccgaacatccaactatacgcagcgggatctcgatgaacttatcaatcaacagaaaaatcatgaaagggagctaaaacagctgcaggatgaaaacaggaataaagatcgtcagatcgatgagctaaaacgttcgttgcaggaactgagcaataaggtgaaaggctag

SEQ ID NO: 454392 - DNA, 774 bp, Serratia marcescens
atgaataaaccagttgctctcagcgatctcgacgacacgcttttccagacccggcgcaaaatggttggcgcactggcgcagcaaccttttcgaactgcggccctcgacaaagatctgcacccgcgcagctttatgagtgaagaacagtccatgctggtggattggttactggagcatgcggagcttattccggtgaccgcccgtgggacagaggaaatcagcagggttaacatccccttccgttcgtggtccataacgacgcacggcgcggtcatcctggcgccggacggaacgccggatcaggaatggcaggcaattatgctgcggaatctggcgccctaccgggaaaggctgctttcaatgcagcggtccatcacccgtatgatggaagtcaggaatattaacgcctgggccaggctaaacgtcgaatatgacaacacccccatctatctggtgataaaacaccgggacagcacccgccttgatgagctttattccctggctgatgaccttgcacagatcttctctaccgagggattttacatccaccgtaatggcaataacgtcgcctgggtgcctcagcctgttgagaaagggctggccgtctcctggctgctggacaaactcagagcggagcgcggcattttcccggtcatcggccttggcgacagcctcagcgatcatcggtttatgacactgtgtagctggtttgcaatccctcgccagagccagttcgccgatgccattacgcagcatattttcgggggaaaataa

SEQ ID NO: 454393 - DNA, 663 bp, Serratia marcescens
atgacccagatcattaaaacaaaaaaccatgtcctttctgtctttgactttgacggtactctgaccaggcatgatagctttcttcctttcttacgctttgcatttggcaaacgacgctttatcaagaatatggcaaaactcgttaccccgacgctcaggtgcatgcggcgaaaactcacccgtgatgaattgaaagaagtattgattaccctattcctcaccgatgttaatgaagcatggttaacactcaaagccgaagagtattgtaagcgctattggacacaccttatgcgcccaaaaggtttgatggccgtcgcttatgaagtctcctccggtgcagaagtcaccttatgctcggcatcgcccatgctcgtcctccagccttttgccgacaggctgggaataaagcttatcggtacacggttggaaagcattaacggcgtactcaccggccgtatcgtcggccataactgccgttgtattcagaaaatccaccggcttgaagcaacctatggttctctcagtcaatttcacctgagggcctggggcgattcgcggggagattatgagctgttagccgcggcaaaggaggcatattggcggcatttccaccccgtcaggggttttagcaaacgacctgtcgcccataaacacattccttga

SEQ ID NO: 454394 - DNA, 384 bp, Serratia marcescens
atgactgaaaaattgattaaaatccccctttctgagggttctcttcaagatagccaactagaggattttcactattcctctggttcccttgagctgattctctcttctgagaataatgcagaaggcagcaaagttaaggtgttgttcgattggatttattccttccgagtgactgatgaaggcgacctattgaaaatgcaggaagagcagaaaggggagatgcttactgggctttatcgcgttgaaaaatctaagtatctagaatggtttaatgagcaaaatggtaatgtgcacgatggaatcgttcattatatgctctcgacggtggacgatgttatagatatcttagcctccattagtccttcaatatcaatcagtaagtaa

SEQ ID NO: 454395 - DNA, 414 bp, Serratia marcescens
atggcctttgtctctttatctaatattgcagcgaagaccgggcgtatagctcagagcaatcacgtcacggtcacacaaaacaaacgggcgaagacaggtgctgttgaactgggcttccgtctcagccgttcagcgatggacgcagcgggtatcaacattggtgaccgcgttgacatccttcacgatgcagaatcttcgttatggatgataaaaaaagttactgacggtggtttcgctgtggctggtcagaaaaataaagcgggagagtactcatcttgtgccatccgcctgacaatgcgccctggcttcccgcgtctgtcggacgatgatgatgcatcagaaaaacagttttcacaggattcagacacgcagatggagaaaggtcagattatcttcaggctgggtgatgagtag

SEQ ID NO: 454396 - DNA, 567 bp, Serratia marcescens
atggctcttttagaagtccctccctccgttgcccgtacagaattaggcaacatgttctcttcaaatcctgccatgttgttgcagattaacgctatgcgggactcactcgtagtggttctgtgttccttgctgcgtggagatcggctgacgactgcgggtaataatgttccggctgactatgaagtattacgtctctctgctgccatcgaagatctggagaaaaagtattttattccaatccaacatcgcaatgtaagtacggtatctgttgttgctggcggcaaaaaaaccaatcagatgtattacgacatggataaagatgtaatcgctcggctgcaatcagatccagaacctgtgctcagggagcaacgaaaagatctttcttccaaagaatggatgaggaaacagaagaaacttgatgatttactcaagaatcacggtggagttacagagaccttcttgactctagttcatcatgcatacaaggataagccgttgagcaatgaaaagtgggcagagcttgaggcgaagttcagggatttactgaatggactggatgcagcgtaa

SEQ ID NO: 454397 - DNA, 2604 bp, Serratia marcescens
atgagccgggtgatgcatctgctgctgatgccgccggtctatcaggcggtgcagacgcgctatcgcggctaccggcgcaacggttcgtcagcgctgaccgccctgctgaccacgctgctggtcgcctgcggctgggcgctgctgcgctttgaatcaccgtcctggcagcgcattcgcgccggccggacttactggttcccgcatctttcctctacccggccgcgtccggccgacgcgctgcgctatctgctgcaggcgctgtggctgctgctgtttcgcagcgggcgcgggtcgcgcacacgttttaccttcagcggctggcgcacgctgcgcctgcgctacctcaactggatgcaacgtttgccgcaccggctggcggacgccggcgtcgagcagcagactacggcgcgcctggggcggatgaaccgccatctgcgccgcatcctgtttatctttgccggcgtgctggcggcgatcctggcgctgctgtgcatctcccagccgttcgatctgtccgcgcagtttgtgtttgtgctgctgctgtggggcattgcgctggtggtgcggcgggtgccggggcgtctgccggcgctgatgctgatcgtgctgtcgctgaccgtctcctgccgctatctgtggtggcgctataccgccacgctgaactgggatgacccgctcagcctgatctgcggcctgttgctgctggtggcggaaacctacgcctgggtggtgctggtgctgggctatttccagacggtgtggccgctgaaccgtcagccggttgagatgccgccggacagccgccagtggccgacggtcgatctgatggtgccgacctataacgaagatctcagcgtggtgaaaccgactatctatgccgcgctgggcatcgactggccgcgcgacaagctgaatatctttattctggacgacggcaaccgcccggagttccgcgctttcgccgaagaggtgggggtgaagtatattgcgcgcgccacgcacgagcacgccaaggccggtaatatcaaccacgcgctgcagcacgccagcggcgaattcgtggcgatcttcgactgtgaccacgtgccgacgcgctctttcctgcagctgaccatgggctggttctttaaagaccgcaagctggcgatgctgcagacgccgcaccacttcttctcaccggatccgtttgagcgcaacctgggccgcttccgccagacgccgaacgaaggcacgctgttctacgggctggtgcaggacggcaacgatatgtgggacgccaccttcttctgcggttcctgcgctattttacggcgttcggcgctggatgaaattggcggtatcgcggtggaaaccgtcacggaagacgcgcatacctcgctgcgcctgcaccgtctgggctacacctcggcctatatccgcattccgcaggcggccgggctggcgaccgagagcctgtcggcgcatatcggtcagcgcatccgctgggcgcgcggcatggtgcaaatcttccggctggacaacccgctgttcggcaaggggctgaagctggcgcagcgactgtgctacgccaacgccatgctgcacttcttgtcgggcatcccgcggctgatcttcctgaccgcgccgctggcatttctgctgctgcacgcctatatcatcttcgccccggcgctggccatcgcgctgtacgtgctgccgcatatgatccactccagcctgaccaactcgcgcattcagggcaaataccgccactcgttctggagcgaaatctacgaaacggtgctggcgtggtatatcgcccggccgaccaccgtggcgctgctcaacccgcacaagggtaagtttaacgtcaccgccaagggcggcctggtggaagaggaacacgtcgactgggtgattacccggccatatatggtgctggtgctgctgaatctggccggcctgtgcttcggcgtctggcgcatgatgtacggcccggcggatgaaatcatgacggtgatcgtcagcctggtgtgggtgctgtacaacatgaccattctcggcggggcggtagcggtggcggtggaagccaaacaggtgcgtcagtcgcaccgggtggagatcgccatgccggccgcgctgtcgtgcgaagacggccacctgtatccctgcacgctgcgcgattactccgacggcggcgtcggggtggaaatgcgcctgccggatcggctgcaagagggcgacaaggtcgggctgctgctcaaacgcggccggcaggaatacagcttcccctgcgtggtgacgcgcgccttcggcgccaagatcgggctgcgcatggtggcgctgaccacccgccagcacattgattttattcagtgcacgtttgcccgcgccgatacctgggcgctgtggcaggacggcttccctgaagacaagccgattgacagcctgcgggacgtgctggcgctgggcttccgcggctatctgcggatggcggactatgcgccgccgctggtgcgcggcgtgctggtcggcgcgatgtcgctgctgagctggctgctgtcgtttatcccgcacggcgtcgggcgcagcgcgacgttcagccagaaagaaaccgtggtgtag

SEQ ID NO: 454398 - DNA, 1332 bp, Serratia marcescens
atgcgcaacttcagaataaattggctggggctgtttcccctgagtctggccctgctgccgccggcgctgggggcggatgccgtatcgcccgaaaggtggctgttggaacaggtgcgggttggcgaagccagccataaagacgagctggtgcgccagtcgctgcaccggctggagctgatggatccgaataatcccgaggtgatttcggcgcggatgcgtctggcgctgcgtcagggcaaccacgtgctggcgcagcagcagctggagaaattaaagggcgttgcgccgcagtcggctgcctaccggcaggcgcagatgaatatgctgttgacccagccggaaacgcggcagcagctgcagcaggcgcggctgatggcgacggcgggacggctgccggaagcgaaggccgcctacgacgcgctgttcaagggcgaaccgccgacgctcgatctggcgatcgaatattggcggctggtggcccggctgccggggcaggaagcggcggcggcgagcaaactgcaggcgttggataaacagtatcccggcagcgtgccgctgcgcatggcgctggcgcgtatgctgttcagtcaggataaggacgcgcaggcctacgcgctgctgcaacaggtggcggcggacagcgccggtcggggtgaagccgccgatctgtggctggataaggtgaaggcgatgccggtcagcaacgacagcgtggcggcgcttaaccgtttcctcggcgtgttcagcagcggcgatcaggccgccggcgcccggcaggagctggcgcggcagcagacgctgctggcggatccggcctatcaggcgcgggcgcgcggactggcgcaggtcggcaagggcggcggccgcgccgcgatcccggaactgaaaaaggcgctggccgcctccccggacgatccggaagtactgggggcgctggggctggcctatgcgcgcgccggcaaccgcgcgcaggccatcgcgctgtttcgtcaggcgcaacaggccgacaagagcggctatgacggcggtaaatggcagagcctgatcaaaaccaacagttactggctggcggttgccgaaggcgaccgggcgctgaaggccggcaatctggcgcgagcgcagcagcagtacctgcgggcgcgccagatcgataacagcgacagcgacgccctgatcggcctcgccgacgtggcggtggcgcgtcatgacgacgccgcggcggagcgttattaccagcaggcgctgcgtcttgaccgcaacagcggcagcgcgcgggctggcgaatatctaccagcgtcagtcgccgcagaaggcgctggcctatctcaatag

SEQ ID NO: 454399 - DNA, 156 bp, Serratia marcescens
atgtatcagagacttgcttttgtgctgctggtcttggctgtgggcttaatactttcaaagtcaaacgttagcaatatgattgtgaatgatgattcggcctcattaagtaagcagcaatctttctcaattttttcaatcacttttaatcataggtaa

SEQ ID NO: 454400 - DNA, 489 bp, Serratia marcescens
atgccgcttgatatgacagagatgaaaatcctcaggctgttgcaagacgatgccagagtcacaaaccaggcgttagcggagaaaataggcatgtcggcctcgccgtgctggcgcaaagtccgcaaacttgaggaagaagaagtaatccaaggctatcgcgcggtgttggatcgcaaaaagatcggcctgggtgtaatggtgtttattcgcgtcgccatcgacagccatagcgaaacggaagccaagaaatttgaagaagaggtaacggcgttggaagatgtggtggcctgttacagcattggcggcgatgccgacttcttgctgcaggtcgtggcctccgatctcgattcgtatgctgattttgccatgtcggtagtccgcagattgcccggcattaaagagatgcagagcatgttcgtattaaaagagatcaaaccgcaggtgtcttacccgataaagaaaactacgcagactaaaaacggacagtga

SEQ ID NO: 454401 - DNA, 831 bp, Serratia marcescens
atgaataacatttttgcgaaagtaaaaggacctcgtaagaaacctttttttaaattggtatcagactacactttgtttgacgctttagatttatctactcttagcctcattccatataaccctgaccataatcttgatgaagattcttggttcaaaattgaaaattttagccagcaatcattctgcttatcatgcattaaggatgaatttgattctaaggacttcgacgatttaacaaaaaaatatttcacgaagatttcatatatattctctcatcaaaatgaagacttttattttcagaaaataaccccatccctgtttatcaagagaaaaacaatcgcttttggtgaatcagcagaaatagaagaaaatgaagggcggttgattgttaatcatatacctgatgctgtatacctaaaggaaaaaaatatattattattcagaaatctcgccacaatttcaagtatatttaaaggtatcgatgtcctgtacaaagaagccacggaagaagaagttaagtcgtttttaagtgaatccttcattgtactttcaactgactatgatgtagaaaaggtatcaaagccaaaccgaaagagaattgcattagctatggatactcttgcagcgatgccagtggaagacagaggtgagatgctgaattacattaatgattattgtgctgaaaaacttaagtatgacactactgagtgtaaattcgaagtatcatcagaagaagagttaaaatatttgctgtatggtatcgaacaaagattttatactactagatttggtaatgaaaagagattagccaactcaatacaaagattataa

SEQ ID NO: 454402 - DNA, 363 bp, Serratia marcescens
ttgtttttaagttccagactgggcaaggatgagtttaaagaaggtgaaatagtttctgtggagcatgcgaataactcatttcttccaagttatcttggttatttcttcgtggctttaagtataactagttggtctgccttgttttttgtttatgccgttttgtttatttttacctttatgtctcaagctttatactttaaccctttatttctactgtttagatatgagttttataacattaaaaacaagagcggcgcatccatttttttaattagtcgtcataaatacaaaaccccaaaagaaatcaagatccccgttgcatttagaataaacaactatacctttatcgaaaggaaaaagtga

SEQ ID NO: 454403 - DNA, 246 bp, Serratia marcescens
atgatgcagagtcacgcaagaaaccccaccgagcaactgatggcccagttggaagtgcagtggctggaggccagtgaggatccggccgcgcggctatttatctggcgggtcaaggccaatgccgaaagtattgtgcatgcatttatcgcgctgcagcagcagccgccgagcgactacagcgcgccggatctgtttatcggctttatggcccgttcgacaccggttacggctacagccgggcgctag

SEQ ID NO: 454404 - DNA, 4122 bp, Serratia marcescens
atgcattccagttcacactttgacccccagctggggatcgatatccatacctatccgttcgggccgctgccgacgccgcatatcggcctggtgttcgacgtctttgactatattccgattatcggcaccacggtgaacgtcaacggcatcaagcgcgccagcgccggtaccggcggcatggcggtgcatatcccgatcggcggcccgtggctgccgccgctgcgcgtaccgggcggcccgcagttgaatgacgacgagttgtttatgggcagccgcacggtgcgggtggacggcgagcctttcgcacggatgaccatgccggtgctgagctgcaacatgctcggtatgatgccaccgttccgtccgaagcgcgccgccgagcccaaaccgctgtcgctgacgatgccgctgaccctcaacctggcgatccccagccgggtgacagtcggcgggccgtctaccatcaacgtgacggcaatgctgatgcgtgccggcctgttcggcctcggcaaagggctgaaaaaactcaaaaaaagcgccggttacggcaagtttatgaagaagtttcaggcgctgcgccagaagctgtttaaaaacatggaccccggctttctcaagtgcaaggtgctgcgggccgagccggtggatatccgcgacggtagcgtggcgttggagcatcaggacttcctgctgccggggcggatgccgctctcctgggtgcgcagctattcgtcggcggatatcgatgaggccggttattgcggctacggctgggcgacgccggcggatatcagcctgacgcgcgatgccgacgggctgatgctgctgatccgaccggcgggcatgaccgcctttggtgacctgccgacgttaccggggcgcgagcacgcggtggtgggcctgccggatggcgggcggctgtggtggcagcaggaggaacggcagcgacgctggatctacgaagacaacgacggcgtgcagcatcattttgacgacgacgacggtgacgcgatgccgctggcggcgctgggcgaccgcaacggcaaccgctggcagtttgtgcgccggcaggggcagctgactcggctggcggagtacgccggcgcggcgacgaccgggcgcgaggtgcatgttaccgtcgagcgcgggcgcatcatcgccatgcgcctgtatgaggcggccaacgacgcctactcgccgctgacccgctatgagtatgatggcgaggggcagttggcggcgcagattgatgcgctgggggcggcgcggcgtttcggctatcagcgccggcacatgacgcagcaccaggaccgcaacggccagcgcttctattatgactacgatgccgactggcgggtggtgcacgcctggggcgacggcgggctgtatgattatcgctttgtctatcacgatgtgctcaatgaagtggcggtcaccgactcgctcggccatacctcgtatatccgcttcgacagcggcgggttaccgattagcgagatcgacccactgggtggtaacacggtgtttacctatgacgatctgggccggccgctgagcgtgacgcaggcggacgggcgacgctatcagtgggagtacgacccgcaggggcagatcgcggcggagatcgggccggacggcagccggttgagcctggagtataacgcactggcgcagccggagacgctggtcgacgagaacggcgcgcagtggcagatgacgtacgatgcgcggggcaacctgctgtcgcagagcgatccgaccggtgtgacccggcgttatcgctatgatgcgacggggcagccggaggaatatctgggggccgacggcgaacggcagacgctggagtatgatcgctacggcttcccgcagcgggtgacgagtaatcagagcgggacgttgcagctgcgctttgacgtgcgcggcaacctgcggctgaaaaccgatgcgctggggcagcagacccgctatgagtatgatgcgaaggatcggctgacggcgcagctgtccgcatcggacgcacaggtggcgatcgactacgatcgcgaagatcagccggtatgctaccgggatgaggcgggtcgtgagacgcggctgcgctataacggcaccggaatggtgacggagtgtcagacggcggacggcgagcgggtggcgtaccagtatgataccgaggaccagctgacggcggtggtgaacccgctggggcaggcgtggcagctgcagcgtgacgcactggggcgggtgacggaggagcgtgactactgggggcaggcgaccggctaccgctgggatgcggtcggcagcctgttacagcgcaccgatgcgctggggggcacgctgacgtacgcgtacgaccgggcgggacggctgcaggaaaaacgcagcggcgacacgctgcttacgcgctaccgctatgctgccgacgggcagctgacgcagtgcgagaaccgctggcggcagctggcatggcgctacgacgcggcgggccggctgctggcggagtcgcaggacggctttacgctgcggcaccactacaatgacgccgggcagcgtattctgcgtgagagcgacggcggacaccgggtggcgttcagctggagcacgacggggcagctggcggcgatagggctgaatgacgatgcgccggtggcgctgggctatgacgcggcgggccggctgtgccgggagcagctcggggcagggctggtgcgcgagctgacgtatgacggcgaggggcggctaaccgcccaacgcacgctgcaggatgaactgccgctgttctcgaccggctatcgttacgacctgcagggcaacatgacgtcgcgggaggacagtggctggggcgtagaccgctaccagtatgacgcggtgggacggctgctggcgcacgttgacccggcggagcgggtgcggcggtttatgcatgacgcggcgggcaaccggctggcgctgacggtgcgggcggtgaacgagacggcggaagggtggttccgcgagggctggcacaatgatacgcgctacgtgtttgaccgtgcgggcaacctgcggcagcggcgctatactgacggcagccggcaggactttgtctgggatgagagccagcaattggtggcggtgcatcagggcgagtcggtcacgcactatgcctacgacgggctgggtcggcggattggcaaacagacggcgacggagagccgctggttctactggcagggcgatgcactgctggcagaggtggcggagccgggcggcgaaccgctgcatccattggcgctgtacgacgtggccggccggctgcagcgagagaagcggcaggcggcgctctttaacaatctgcgggaatacgtttactaccccggcagcttccggccgttcgcgctgctgacgcagcaggacggggtacgcagcagttaccactaccactgcgatccgaacggcgcgccggtgcggctgaccgacgtacagggcgagctggtgtggtcggaacaatgcggggtttggggtgagccgggggtggtgcatgcagaccgggtggccaacccgttgcgcttccaggggcagtactttgatgtggaaacggggctgcactataaccgctaccgctactacgatccgcagaccgggagttatatcagtcaggatccgattgggctggcgggtgggttaaacctatatgcttatgctccaaatcccctcacatggatcgatccattaggtcttgctagatgtgaggctggagttgcttcaggcaaaggcagcaacataaatggaaaatggttaaagggctctcatggcaatgcaggtttattcccatcctctgttgctgataaattacgagggcgtcaatttaaatcttttgacgatttcagagagagtttctggaaagaagtagctaatgatactcatctttctcgacaatttagcccttctaatatttccagaatgaaaggcggtaaagctccaatagcacataattctcagtggaatgggaaaaatagatcttatgttcttcatcacagaacgccgatccaacatggtggtggtgtttatgatgttgataatatattaattgttactccaagatatcatcttgatatactagatcgcacttaccatttttga

SEQ ID NO: 454405 - DNA, 237 bp, Serratia marcescens
atgaaaaaacacacattagatgcgttaactgaatcaatatctaacagtgaaaaaataaaaaaaataatcatcaacaatattctgatggaagagagtaaagaaattagattaaatcttgtttacattacttatgatttttcatctaggtgtgtattaatagaatattatgctgaggataatgagtatccggatgtagagatgaaatttgatgatttaattgactttgttaaaaaataa

SEQ ID NO: 454406 - DNA, 240 bp, Serratia marcescens
gtgcggctgaccgatgtgcagggcgggctggtgtggtcggaacaatgcggggtctggggtgagccgggggtggtgcatgcagaccgggtggccaacccgttgcgcttccaggggcagtactttgatgtggaaacggggctgcactataaccgctaccgctactacgatccgcagaccgggagctatatcagtcaggatccgattggttgttggggagtgagcttgtggaagacccattaa

SEQ ID NO: 454407 - DNA, 834 bp, Serratia marcescens
atggcaaaagaggaaggtttacgggtcgtgctttcgccggttcaactggcggcgatcatgtcagacaggagtgtcacagaaggggaaaccctaagcaatcgcctatttggaggtctggggcttgctggtggtgttgttgagcttattggtgctggtgcgatgtgttatgtaccagatcccacacttttaacaaaaatcggttgtgtcattgttggcactcacagcttggacagtatcaaggccgcttctaatcagatcattaccggccagccgaccactaccgatacttaccaatcagctatcgcactagctaaaactttgggtgcggatgatgatacggcttacaatgtggggcttacggttgatattgctgttccgttagtgtttgcggcagcgataggtgcggcacgtgttgcctctgtgcgtatgggcaaggtaaggctgattgagcacgagtcaatgaccgggggaaagcctggtggccacacaatcgttcgccatgtaggactatccaaggctgttttgctacagcgattggaggagactaaattcgggcgttttcctccacgttctatcagttcatttacgaatcttgcgattgctgagagagcaatctcaagcgctatgagcgccaatcacacactaataaaaaactgggctaaatacccattgcgtaatcttgtcataactcatagggctgtaaatcacgtgggatactacatacagcgaggagcttctgagattgtgaaaacctccaaccttaaggttgtcattgagcatggctcttttaacggaaagccttactacatacttaccgcatatccaatcccctag

SEQ ID NO: 454408 - DNA, 948 bp, Serratia marcescens
atgccattgtttaatcctcgcgccgtcgttgcgcacgccctgctgctgggtgccagcttcaccgccggcgccgcctacgatgttaccgccattgacgctgcatccaacgtgaccattgacacgacgggcgatgtaacactaggacatatcgccagctttgctatcgatgcgacgactgtcaccggtacggtgcattgcggcgatcgcaacttgcataacgcctttggcagacaacggatatttatcgacttaccgcaagactccgcgaccgggcgcttcaaaataaacaacaacctctcggtagaggtaagctccaccgtgcctacatcaaactggggagacgggcttacaactgtttgtgatctgaattcaccgaatgatgcctatcccgccagctctctgaccaatgcttttccaataaagctggatttttacttggacagggaaaccattgacggggtaattacgataccagcctttcaattggggggatactcacgccgatttgacaccaccgaacctgggaattacaagccggcaaaatatactattccgataaacttaaccggcggtcaaattaccataccagcgtattgtaatacctacccaaacgcgatagaattagatcacggaatgttgtcgtcggataatacttacgataaagcgtttgccgaacttacctatacctgcttaaacccggttaatacgacaataaccatcaactatcaagaaaatgccgacggagatttaaatctctttcatacagatggcagcgttggcgccagcagtaaattaaccattagcgataccagcagcggattgcaggggaaagaaatttccacaaatatcgataccagtaaaactttccgtatcaccagtgaactgagtaacctcagcggtgaaggaacgataaaaggtacggcctggattatcgcctatctggattaa

SEQ ID NO: 454409 - DNA, 168 bp, Serratia marcescens
atggggcacgctcgcggtgatgatatcattgccctgaaacgcaagttcttggcgggtgagaatagcgggaaagatttttataccgtgatgtatcgccaagatatgcgtattgccagatttgggagccggttgggtatcgggaaattttcacggtggcagatcaagtga

SEQ ID NO: 454410 - DNA, 432 bp, Serratia marcescens
atgaagacgtcagtaaaagttacccttgtcctgattatcggtattgtcgcagcatggacttattgctggccgttcataaaaatgaattttgccggcagtgcacaatataccgagcaagattctcgacagtatgagttctacactcctgaattattcaagaacatgccgcgcattactgaccactatgatttcaattatgcaaatgttgccggcccagaagccttgatctatgcggtgacattttatgggactgacgatactcgtcatgtgaacgactatctgaccgccatgggttaccaaccgcagcctacctgtatggttgtggccgagtgctggcgcacaacgggttcaaaagatgtggtgatggttgcgcagctatcagaaccggaaagggtatttatccagatttacagcagtccctatacacgttaa

SEQ ID NO: 454411 - DNA, 984 bp, Serratia marcescens
atgtcctggcgaatcagcattctggataaaagccccgtcgcggaaaacgaaaccgccgccgaggcgctggcgcgtactttacacctggcgcagcaggcggaggccgccggttttcaccgcttctggctggccgaacatcataactccccccaactggcgagtccgtcgccggaactgcttatcgcctggatcctcggtcagacacagcgcatccgcgtggggtccggcggcgtgatgctgcagcattacagcccgtataaagtggcggaaaatttcaacctgctggcgtcacttgccccgggccgcgtggaccttggcgtgggtaaagcgcccggcggtttgccgctctccacgcgggcgttacagcacgggctgaacccacaggataaaggcagttttgccgaccaactgacgcagctgaaccgctggttgtcgcccggggccgacgaaccggtgcgcgccacgccgctgccgccgcagcctgcgcagggctttttgctgggggccagtgtggaaagcgcattactggcggcgcggctggactggcgctttgtcttcgccgcgcacctgaacggcgataccgaattgatgcgcacggtgctcgacgcctggcgggcgcacagcacccgtgaaactctggttgccgttcaggcgattgtcgcgccgacacaggccgaggcgcaacggctggcgcgtcacgtcgaggtatggggcgtcgagctggcgaacggccagcgcgtcagcgtggccagtgaagagcaggcctatgcctttgcccgtcaggcgggcagtgaaccgttgcgcatcgccagacgcgcccagtcgctgctggccggtcaggcggatacggtgctggcgcagcttgaggcgctgcatcagcgctggggcattgatgagttcattattgacacgcctatcgccgacggcgcggcgcgcctgcgctcgctacggctgctggcacaggcccgacaggtggcggcatga

SEQ ID NO: 454412 - DNA, 315 bp, Serratia marcescens
atgaagacgctgaataatatcgaattaatcgcagtggccggcggtggtggttttagctatgccgagttagccggaaccgtcgccgccggagccgtaacgggaggtcttgctggtgcagccgtcggaggtatcggcgctattcccggtgccatcgctggagcggcgctggcaggatccggttatgccgccaaccaattggtgcaaggcgtattcaataatgacgcatcctggcctggcgggcgtattgaaaaaatgtcgtcaaacggccccgggatgacgttctgtcagttaaaaggactgcctgaaggctgctaa

SEQ ID NO: 454413 - DNA, 282 bp, Serratia marcescens
atgtggttttactacattctttcagcattagtcgccttgttttttcttagcataaagctgaaatacaggcccacggacaacaaattacccgcgacaatactcatgatagtgggctgggtattggccacctggcaattcataatatttgccaatggcagagctttatttattacagattcaactcaatggatcagtgataactggcttctgcgctactccgcattagcatttgcgatcatacatatcatcgccacgtttgagtttaaagcgaaaaaacgctaa

SEQ ID NO: 454414 - DNA, 777 bp, Serratia marcescens
atggataatccactaggttttaatcaaaggctcaatagttattcacaagtaatggcacgccaacacggccgttcattactcgaattatctaatagggtgagtcgtgacttcataaaagataatacgttagcaaataaattcagacacgaaatattatgctttgtgaataataaaattgaaaagtgtcaagaatcaggtaaagcttcaactcttgccatacaagagttgaagcaagagtatcacgcgttacaacaacaggaaaacatgcttagggctaataaagttacgccctacgctgtgatgaaaaagaaatttgatggcaattcatcaaaatatgtcttagcagggattggtcttctatcaggtatagggcagataattctaggaataggactagattggaccggcgtcgccgttgttcctggcacattattgatggtcaatggtatcaacaatgtttatgaaaatgctcacatattgtttttaggaaaaaatgtcataggtcctgcccgaatagcttaccgggcttccgcatctttctttgggtatgatgaggataaagcagatattgtatatggtggagtagatttgctcctttctgggtatggagcattgagaatgtctctgaagccggaagcttggcgtttatttaactatataaatacagattatgttagagcatggcgaaacatgggaaaaggtgccatgggtttagaaatcgcagctgatggcgccacaatagaaacaatttatcataaaggctcagggggtcattaa

SEQ ID NO: 454415 - DNA, 462 bp, Serratia marcescens
atgaaaaaaggtaaaaatattctgtatgcactgatattgatgggtgccatactatcaagttatatattctggctaacattaaatccagtggaaattgttgctgttcatcagagaggtaactatagtgacgtactgacgaaaaatttcccctttactgataaagggaaaataaaatggtggctaaaaaataaagaaaaaatgaaagaaaattatgatattccacagcctgcatcctatggatttttcacaattatcttttgggattttggtgatggttataaagaagcagggaaatatgacagaatgtgttttgatgatatgaaagataaagcgaactgcatcgataaaaacaagatattcactgttaaaaatgataggaacggtgatgttatatttgcctttggcgatggacgctaccgtatgggaaaagatggtgaaatcgttaagctcaggcgtgaatga

SEQ ID NO: 454416 - DNA, 909 bp, Serratia marcescens
gtgcgctacctgccaaaattgcagcagcttcgggtttttcagcaggtgattcgcagcggcagcattcgcggcgcggcgcgcgcgctgcagcaatcccagccggcggtcagccgcagcctgcgtgaactggaacaggcgttggacacgcagctgattattcgcagcaatcagggcatgaccctgaccgaaagcggtcgcattttcgcggtgcggatgcagtttattctggaagagctgcagcgtgcggcggatgagattcagcagatcagccaacactcacaggggacagtggcgatggggctttcttcactgctggcgctgacggtgctgccgatgctggccgacgcgttccgaaaacagttcccgcaggtaaatctggtgctgcaggaagcccagctctccaccctgctgcccgcgctgcgcgaaggccggctggatttcgccgtcggttccatcagtccggaactgcctttagaagatctggtgcgcgagccgctgttcaatgcgtcattttgcatcgtcgcccgccgcggtcatccgctggccaacgctcgctcgctggatgcgctgcgccaggccaaatggctgctgccggaaaccgatatgggctattaccagcatctgcaatccgtgctgggtgatttttatcaacagctggaaacgccgccggtgcgctcggactctgtcatctgcggcctgaatatggtgctggcgtctgactacctgaccattgtggcgcgcgcgatggcgcgtccgctgcatttgcaggaacaggtggtcacgctgccgattgataccctgccgcaggcgcagtattgcgtgctctattcgcagagatcgccgctaaccgtaacggcgcggcgtttgctggatttgctgcacggccagtgtcagcgctacgcctggtaa

SEQ ID NO: 454417 - DNA, 1203 bp, Serratia marcescens
atgaagccgcgagctttaatgatttttttgctttttgtcggttatgtgattgtttatatagataaaactgtgatggggtttgccctgttgccgattgagcgtgaatttaatctgccggcggaacagctgggctatgtcaccggcgtattcttcctggcgtattcattgtttcaaattccggccggctggcttaacgaccgcttcggttttaagaaggtgctgtgtgcttctttattgctgctgggtggtttcgccttgtgcttcggcctactgggctttggcctggggctgctggtgacgttccgctttctgtcggggatggggcattccggctatccctgctcatgcgccaaagcggtggtcgccaactttccgctggagcagcgcactttcgcacagtcgattttgctctcttccgccggcctggcgatgaccgccgggccgttggtggcggtgtactgcctggagcatatcggctggcgcggctctttctcggcgcttggcctactggcttttgcggttgccgcctgcgtgctgtggctggtgccgaatccgccgcgggcggcgcagcgttcggcggacggcgccggcaatacctaccgcaccttgctgaaaacgccgattgtgctgctgctgtttgtggcgattttctgtatcaacattccgtcttacggcttgatggcctggttgcctaaatttctggttcagcagcgtggtatggcgcttggcatgtccagcctggtggtggccgcaggcggcctggggatctggatctcttcgctgggcaccggctggctggtggggcgctatatgcaggggcgtgagccgctggtgattttctgctgctcgctgctgagtgcgctgtgtatctggctggtttatacctccacgtcggcatggggcgccagcgtgttgctgtttttggggtatgtcttcctgatggcgtcctttgtcacggtgtttacgctgccgatgaagcgcctggcgccggaggtgatgggcgccgccatggggctgatcaataccggcggcacgctcggcggttttgttgcgccgattgtgatggggtatctgatcaccctgagccaggggtatgcatcgacctttatctttctggcgctggcgatggtggtttccggtctggtgatgctgccgttagcggtgaagccgcgccaatccctgttaaacggaggtgaattgtga

SEQ ID NO: 454418 - DNA, 1173 bp, Serratia marcescens
atgaatatcgataagctgatcgacgatgtggcggcggatgtgctgcgctggcggcgttatctgcacgccaacccggaattgtcgtttcaggaggcggcttcggcggactacattgccgagcaactggcggcgctggggccgttgagcctgcagagaccgacgccgaacagcgtggtggccgaactggcgggcgggcgccccggtccttgctacgccctgcgggcggatattgatgccttgccgattcaggaagagagcgatgaagcgttctgttccacccggccgggggtgatgcacgcctgtggtcacgacgcgcacagcgccatgctgctcggcgccgccagcgtactgtgtcaattgcagtctcagctgagcggaacggtgcgttttattttccagcatgccgaggaggtgccgccgggcggggcgcaggagctggtggatttgggcgtactggacggcgtgaagatgattttcggcctgcacgtaatgccgaatttccctaccggcagcgttgcgctgaaggaaggggtattcagcgcctccagcgacaacttcgatatcatgctgcaaggtaagggcggacatggttcgatgccgcagctgtgtatcgatccggtcacgattggcgcccaggtggtgaccgcgctacagcaaattatcgctcgccggcttgacccgctgcatgcgccggtactgaccgttgccacctttcaggcggaagggggttataacgttattccggacagcgtacggctggccggtacgctgcgtactcacgatcatgcggtacgtgaacgggtgccacagctggtggagcaaacggtggccggcattacgcaggccagcggggcgagttatcagatgcggtggacgcgcggttacaccattggcgacaatcatccgcaggcctgtgaaattgcccgtgaggtgattggcgacacgctgggcaccgatgcgctgcacgaaatgagcgcgccgatgttcggcagtgaggatttttcttcctaccagcggcaggtgccgggctgtttcctgtttatcggcagcggcaacgacaagatcggcgcgacctatggggtgcataacccgcgctttaaactggatgaggaagtattgcagatcggtgtgaagctgcatgtcggctttatccggcgcttgctgatggcatag

SEQ ID NO: 454419 - DNA, 441 bp, Serratia marcescens
atgagtttttatttgatgctggctggctcggtgctgatatttctgggcgtgggtttttttatatttatcatgctgtactttggcgtaacgaaaaagaaatacgaaagaattgtatcgggctacttgtctcgcggtttacctatgccagacgtttataccgttttttatcatggtggttttttcaccagctttttactggtgagatttatgagaaaggcattacgggggaaaaaggttgggacgggtaagaggcactaccaactatccgccgagtcatatgattatttcaacacgctgccgaatgagttgattgcctggataaagagatattacatgctgcatatcatagagttatcgatcatcattcccggagctatcttcattttgttagaccgcctgttaggggccgttgtacccggatatgccgcatattcagggtaa

SEQ ID NO: 454420 - DNA, 273 bp, Serratia marcescens
atgcgtgaattaaacaataaagaactgaccaccgttagcggcggtactttcgatggtatgctttggggtatcatggatggcatcgccagcggcgccggcatggcgaaattcgctaccggcggcagcatcatgtttggtgcctttgcccagctggttggcgtcgtcattgctccaatcatcggcggtttcgtcggtggtgttattggcctgatgaccgatcgcgataccgtcgccgaatatgctcagcgctatcgcgaaacgatgggtaaataa

SEQ ID NO: 454421 - DNA, 1500 bp, Serratia marcescens
atggcaaatatcgtaacctgcatcacaaaggacggtgacactgttcagtacgttgatgagatcatcggttcgggcaccatgaaagatgtctatttttcccctgataaatcctacgtcgtcgcattctacaagaaaccgcagaacgagcaggcacgtgaacgtattgatatgatcaccggccgctaccggcaaaatatcttcggtcagtccggtggcgactactggaaatcgttgttttgctggccgaccagcgtggtggagcatgaggggaaaatcggtattgtcgtgccgacataccagcatcattttttctttcaatatggttcaaagaataatgatttcctcggtattaaaggccgggaaaaagaggggaagtggtttgccagcgccagtaatcagagcaagtttcttgatccgcgtgagcgtggcaatatccttaactacctcaaagtttgtctgctactgacgcgtgcggtgcgacggatgcatgcagccgggctgtgccatagtgatctgagctataaaaatgtgctggttgatcctgaacagggacatgcctgcattattgacgtcgacggtctggtggtaccagggaagttcccgccggatgtcgttggtacgccggactttattgcgccagaagtggtgaagaccagccatttgccgaaagaagaccttcgccgtattttgcccagcatcagcaccgacagacatgcactttccgtattgatctatatgtacctgttttaccgccatccgttacgcggcggtaaaatccatgatatggacgacgaattgcgtgatgaagcgatggcaatgggtgagaaggcgctctttgttgaacatccgactgaccgtagtaataccgtgaaactgaaacaggttagcccggcttccctgccgtggggcgatccgcaaaaaatcccttataccgtgatgggaccgtacctcactccgctattcgataaagcctttatcagcggattacatgagccgacccagcgtccgacggctgatgagtgggagagcgcactggtgaagacgattgacctgatacagccttgccagaacgcctcctgcgaacagaagtggtatgttttttcaggtaaaacgcggcctgagtgcccctattgcggtgtggcttttaaagggatgttgccgatcctcaatctctattcatcacgtaaaaccgggagctaccgcccggatgaccatcgcctgatggtgtggagtggtcagtcgctgtacgcctggcacgtcaaccgtctgattgcgccaaatgaacgcacctcaaacgagcagaaaaagcgcgtaggttacttcgtctttcacaatgataaatggtggctggtgaatgaaggcatcagtgggttaatgtcgttaccggataaaaaagcggtggcgatcggagataagctggcgctaaatgacggcggacagtttgtgctctcccgggaggatggtggtcgcctggtggtggtacagatggtggtgaattga

SEQ ID NO: 454422 - DNA, 1752 bp, Serratia marcescens
atgatgagtgatatcactgtgcagcataaggtgctgagcctgctgctggccgacagccagcttagtctggcggacgcggagctggcggcattaagcgaagacaaagcgataggtgaactgctggatgagctgagaaaacggctgcatgcagcaggggcgttgtccgtcaatgctgaggagctgcccgcagcagaggtgagtctgggatcagtaccagacgatagcaccgctgaaacgacggcagaggccccactcgcagagccagcggtagaagaacccagtgctgaaacggcggtagaagcagagtgcgcagagccggttgtggaagaagccagtgctgaagccgtggcagaagtacagcatgcagagccagtagtggaagagcgcaccgatgaaagcgcggagaaagagccggcaccggtgcccgccacagatgcgcctgactggcaaaaaatgaatttcccggagatcacgccagcatcaacattgcctccggcagcgctaaaacccggtgaagtgccggtggccaccaccagagcgcctgcaccgcccctgcgcgcacctcaggccaaaatcaatgtggcgaacgcccgcgtcggcacgccattccactcggaaattgacatcactctggataacggtgcccgggcgcagattgagaaggtgcagttcggggttgaggtcgggctgactttcgatgcgcaaaacgcctcaatcagtggcattcccacacagtctggtgatatcgacctgaccgtgacctggtcctgtccttcttccccatcctgtatcagccatgtgttgctgattatcaacccggacccgcgcagcctgtggaaagtgattgacccgccagcagatgaccgctatttcaaaaaaaacgtcgacttcaggcagatccgtgaaagcaatggtttgattgttgccgccagtcgacgcgggcgttcacacgaacatgttgggtcatttcgcgacgatgactttttcatcgccagcgatgcacagacaggctggaatattttgctggtcgctgacggggccggtagcgcaaagaactcgcgtcaaggctcgcgtatcgtcactgaaaccgtggggaaatatctcacggcgcagttagcgggagaaaaaggccgcgaattgcagcaacgtatcactcagtggagcccggacgatcggcgggttgtcggagaaacctttatccgtcagtttcatcatgcgtcagtcatggccatcaacaatattaataatgcgtctatgatggtggatgagcccattaagagctattccaccacgttgctggcctgcgtctcattccgggctggcaatgagctgtttgcagcggcattctggatgggtgatggcgcgatcgcggcttatggccctaagggaaaagtgcggatactgggtacgccggacggtggagaatatgccggacagacgcgtttccttgatgcggatgcggtgcaggatccagaattcagtaaacgggtcagcatcggtaaatggagcgatgtttcccatctgattctgatgaccgacggcgtctctgatccccgttttgagacggataacgggctgctccaggaagcgaagtgggatgcgctggtcagcgagctgtccgggtgcctgcgtgacgacccgcaatcagcagaaagaatggccgactggctgaactttttctctccaggcaatcatgatgaccggacgcttgtggtgtcatgttgtgcggataaattactggcggctgaataa

SEQ ID NO: 454423 - DNA, 993 bp, Serratia marcescens
atggtcggggaaaacagtaaaaaaatgaatgagggtctgcagttgattgtgaacgatctgaaaaaagatcctcacgcgctggagactgcctggatttcgattattgcctttgcgggggtggcgaaaaccattgttccgctggttgaagtggcctctttttatcccccacgcctgcccgttggcagcggtactcatcttggtgcggcactgggcgaattaacgcgccagattgaccttcaggttaagaaaaccaccgaagatcgtaaaggtgactggaaacccgtggtgtatctgttaactgacggccgaccaaccgatgagaccgcgccggaaatcacgcgctggaaagcgcaatacgcgcgtaaagtgaatctgattgctatcggtcttggcccggcggcggatcttaatgttctgcgtcagttgaccgataacgtcatgctgtttaacgaggcgcgggaaggtgattttacccagtttattaaatggataacggcatccgtgacggcacacagccgcagtgtcggtgaagaagcgccgccgttgacccacagtgattatgtcgtccggttagcgaaagatgatgttgcccgtgcctctgatgaaacctgcgtggtgctgacggggcgttgcagcaagtcccgccggccttatctgatgaaatatgaacgtcctgcgatcaatctctcgtccctcgattttaaactcaatatcagcccctttaatctggccggttgcttccctattgatgaagactatttcgcctggagtgacgagtcagcctctgcattgcaggtgaataccagcgaactgcacggtgtccccggctgcccgcactgtggtaacagcagtgcttttgcgctgtgtacctgcggcaaactcctttgcattgatggccctgacgatgtgacctgcccgtggtgcgataaaggattgtccttcagtaacactggcgatcataccgattttgatgtcaaccgcgggagaggttaa

SEQ ID NO: 454424 - DNA, 156 bp, Serratia marcescens
atggtaaaaatgattttgtttttattaaagataacgctggaaaacccgttattgttagccattgatgttatttatcaatggttttactctgattttttagaaagggtaatgagatattggtcgttcgcgttaatggataatccaagtttaatatga

SEQ ID NO: 454425 - DNA, 273 bp, Serratia marcescens
atgatatccatactggaagtcgccaatgtaatattaacctttgtgattatcttggtgtgctattattttgccaaccggatcgtcaaaagaaaccgccaacgtgaacaggtgatgactgaacggggagcagacgtttacgtgactatcctttcgctaaagcaaagcgacgtattcataaataataaccctgttgttgagatggatttgcagttggagaatcctgaaaaaaagaagtgtggatgttggaaaaacaccgggaaaccgtgttgctga

SEQ ID NO: 454426 - DNA, 375 bp, Serratia marcescens
atggctctggaagattattcaaagtattttatgtacggtgggattgctttatctattgctgcagttgcttttttttattttcttgataaaaaagataggactgatcttggtgaattgaaggtttatttatcaagtgaccgctggcaaggcgatattttagattcaagaattgaatcttggcagcaaacgaatgctaagtatggcaatgatttcttttatgatatcagtttttatcttaatggtgaaactaagttatacacagcaaaagcattgattcaaccaagtcagatacatatgattaaaaaaggattaaatataaaggtaaaaaaaggtggtaaaggtaaattagcggttgttggaatagaatttaattag

SEQ ID NO: 454427 - DNA, 348 bp, Serratia marcescens
atgactgactcagtgctatgggctacaatttttagcattttgcttattgggtgggttgtatatattatatttaaatctggaagtgatgataaaaaatacaggaaggaaggtgtaaaggtagaagcaaaaattattaataaaaaaaacattggagcgtctgggacggggaacatgaagttctatgtagagttagagtttccaactaataatggcattgttataactcatgctaaacgtttcttcacaccagaagatatggtgaaaatcatgaggaataacacggttactttgtactatctacctggaaatcctaaaaaaatttacttggttcctggcgatatggagtga

SEQ ID NO: 454428 - DNA, 177 bp, Serratia marcescens
atgacttacacattttctgccaacaatattaattatactaaagataatcagacgctaaatatcgacactacggaccttgataattattatgttggtaaggaaatacccattgtatattatcgtgtcaatccaaaatatagtaaaatcgattactatcacgcaagtttaaagagataa

SEQ ID NO: 454429 - DNA, 138 bp, Serratia marcescens
atgggggtattttcagaattttttggatggggggcgttttttgcgatattaatatttctcatcatttattttttgcaaggttatattttgcatttgatgataaaaaagatcctgtttattctgtggcgcatatcgtaa

SEQ ID NO: 454430 - DNA, 381 bp, Serratia marcescens
gtgagttttatctcagagtatgcatctatggctgtttggatagttgcaataattattgtgtttgtctcttttaaagggattaaagtaaataaagaaggacaggaggagataaaaaactggagtagccaaaacttatggaatggagatgtggcctctgctaaattggtctcgtggaaacagttacaggcaaaacacaatattgattatttctattcgtttacttttgagtgcgatttagatggtggtacaaaaaaatataatgctgcggcagttgtcaaggtgtcagaagcaagtaagttaaagaaaggattgaatctaacaataaagtatcaaggggttcctccaaaaaaaatagcagttattggtattgattttgagtga

SEQ ID NO: 454431 - DNA, 468 bp, Serratia marcescens
atgagtgactgctggcaatcgggtaataccttcaacggtgataaagaacaagttgtacgccccactcaagcggttctgtcagtccagacgggagatgtagtcattagcctgattcatggtaaggccgcaatcgtcagccctgagcatgccgggcgtctgcttagtaataactatgtcagggtcgaagttgacagccggaaggttattcctgcgtggtttgtctggcacttcaatgaaagcagggaaagccgccgccagcaagctatggcaacgcaggggtcaacgtttgtattgcgtttgtctctcactgaggtacgtcagtttactgcaacgctacctcctcttaataagcagaaggcaatcggtgggctctatttggcaaccattgaaaaacgccattaccaggagcgcctggccgcactaaacgaacaacagatcctgagccagctcagtgatatgattcagtaa

SEQ ID NO: 454432 - DNA, 891 bp, Serratia marcescens
gtgtcagtcaatatccttagtgcgcaaattcctgaggtccagaaacaatccttatcccgtcacccgggcgatattctcgacgacctggtcgggcgactgctccactgcgttcactatgaaccggtgattggcatcatgggaaaatcgggagcgggcaaatccagcctgtgcaatgtcctcttcagcccgcctcctgcacctgttgatgctatcaggggctgtacacgacgcgtccagcgttatcaggttcaccatagccaccacaagcttcatctcgccgactttcccggcattgccgaaacgcctgaactcgacaggcaatatcgtcgtctgtacagggcatgggcttcaaaactcgaccttaccgtctgggcgctgaaagcggatgaccggacctggaaggatgacctgaattgttaccaggagctgctgaacgcgggcgcagagccggaccgctttctctttgtacttacccaggccgataaaatggagccctgccgcgaatgggacgagccagcccaccggccatcgccgcgccagtgtgaaaatcttctctccaaaactgagcttgccacgacgctgtttgccaccgtccatccggttatcgctgtatctgcaacggaacattttaatctggaacagtgggtggaagcactgatgcgggcactccctccgagcagcagcagtgcagtttcccgtcatctgaaccctgaatggcgcaatgtgcaggttcaggaaaccgcacgggaagggtttgttagtatcgcgggtgcaatttttgacgaagcggcttccgttgtgcagacctccgggaaactgatatgtcagttacaacgccttcgccgcagattcctgtcggtcattcgtgccctctggtatcgcctgttctga

SEQ ID NO: 454433 - DNA, 552 bp, Serratia marcescens
atgaaatcttatccgttattacgtcaggatctgttcgcatggtgtctggcggcaattctcccgaccctctggattgtgctttacctgaactttccgcaggtcgtcgccggggtcatttatatgatcattgccctggtctgggtgttactggaccggataaacctgaggaagcagggaattacaccaccttcatggctgtggtttcccttgcattttgtctaccttcgcaagcgtgaccagagccagggcaaaccgtggaggcttctgcaggtctgggtgctttgtacagtgctgtcattcgtggcgataaatcagtttaagaaaacctcgggtacagaaaatctggcgcagagtacctgtgccgtggtgacaaaaatcctgcataaagagggggctgatgagcactgtgtccgcgtgacggatatgcatgaggaggtcagcggtcgtttctggcaggcgcaggcattgctgaataccggtgtaaaggagcccgtgaccattgaggtcaggggccgggatatttatgtcgttttacccgaagcgggagagtga

SEQ ID NO: 454434 - DNA, 684 bp, Serratia marcescens
ttgaggtcaggggccgggatatttatgtcgttttacccgaagcgggagagtgaaaaaatgaaaacggtaaacgttatcgcccggctgctgattgtcgtcgcggtgttatggattcaggtgagccgtgctgctgcctatgacattaaacccgttatcgtcacaggcgaggtggcaggaaatgtgcaggtcacgcatgaccgcatcatgggtggcgtggatgattttatcattagcgccacaaaaggtaaggaaacgcagaaatttattcttacctgcaacggcccggaaaagcgcctgaacattctctactggctgaaagatatcacaggaggcaaggcatcaggcgcaacgggtatgactatccagtattacccggagggggagcatcagatgaagaatcatgcggtacagccactgacacttttcgacagccagatctcaccggattttacacgagcagcgtcacgtatgctggattataaacagggaagctttgttttccacttctatgaaaatgatggagtatcctctcacggtccactggcatggagctggcaatatccggctcagaaactggccccggcgctcgctggcgcactggtatccgccagggccaataactgtagcctggcgcagggtgaaacccgtattgcctccctcgcgcgtctgactgaccatcagtaa

SEQ ID NO: 454435 - DNA, 822 bp, Serratia marcescens
atgcgcttagccagccgctttggccggattaaccagatacgccgtgaccgtccgttaacccgtgaagaactgatgctgcatgttcccagcgttttcagcgaagacaagcacgcgtcacgctctgagcgttacagctatataccgacgattaccctgctggagaacctgcagcgcgaaggtttcgaacctttttttgcctgccagtcgcgcgttcgtgatcctgaacgtcgggaacataccaaacacctgttacgcctgcgccgggcgggccagataaacggtcagcatgtgcctgaaattattattcttaattcacatggaggcgagtccagctttcagcttttgccgggatacttccgaagcgtctgtaccaacagcctcgtctgtgggcagtcgtttggcgaaatcagagttcctcaccggggcaatgtggcggagaaggtcattgaaggcgcttacgaggtgttgggcgtctttgacctgatggaggagaagcgcgatgcgatggaatcgctgctgttacccccaccagcacaacacgccttggccgaagcggcgctgacataccgttttggcgaagaacaccagcccgtgaccaccacgcagatactgacaccccgacgctatgaagaccgcagggacgacctgtggtcggtcttcaatcgttgccaggaaaacctgctgaaaggggggctgcccggacgtaccgcgaagggcaaacgcagccacacccgtgccgttaacggtatcgacggcgacgttaagttaaaccgcgccttatgggtgatggccgagaacatgatgaatttactcggcaaataa

SEQ ID NO: 454436 - DNA, 480 bp, Serratia marcescens
atgactgacattattaaccttaacgacactctgccgttacagccacaatctgccggtgccagctctgcgccagcactgaccgccacgcccgtacccgatgagcagcgagtgggcttctggccgcagcatttcggcagcataccgcagtggataatccttgagccgactgttttcgcctggatggaccgcttctgtgcggactacagcggcggcatctggaatttttacacgctgagcaacgatggtgcctttatggctccggaggacgagaacagggagccgtggtcgctgttcaacagtatgaatggtaacggcggcgaactcagcgctgaagctgccggaattgcggtttgtctgatagcgtacagccaccacgccatgcgcaccgattgcgacgccatgaccaaacactattaccgtctgcgcgattacgcgcttaaccatgcggaatgcaaagccatcatgcatatcatcgactga

SEQ ID NO: 454437 - DNA, 480 bp, Serratia marcescens
atggaattacagttaccgctgtttgcccgtgaattaccgctggccgcacaacacactatccaggaagcgttatccctgctggagcgacagttacgcgaacccggtgcgtcatttacctccagcagctcagtacgcgactggctacgcctgcagcttgccacgcttgaccgcgaagccttcaccgttctgtggctcgacaatcagcaccgtctgatagcccacgacacattgttcctcgggacgattaacagcatcaccgtccatccgcgtgaggtcgttaaatccggactgaaaaataatgccgccgctgccgtgctggcccataaccacccgtcaggggaagctgaaccaagtcaagccgacaggttaatcaccgaacgcctgaaacaggcgctggacctggttgatatccgcctgctggaccatctggtggtcggcgggatggatattgtctcttttgccgaacgcggctggctgtaa

SEQ ID NO: 454438 - DNA, 363 bp, Serratia marcescens
ttgtcaaataacacaccgccagccaaccatgatattgacgccccttggtggggactaaaacccaccgtcacgccgtgttttggtgcacggctagtacaggaaggcaatcggctgcattatctggctgaccgggcaagtatcaccgggcagttcagcgacgcggatttacgctattttgaccaggcgttcccgttgttactgaaacagattgaactgatgctcaccagcggtgagctcaatccacgccatcagcactctgtcacgttgtacgcaaaagggctgacctgcgaggccgacagcctcggctcgcatggatacgtgtacgtggcgatttacccgacactatctgaagcaaccgcgtaa

SEQ ID NO: 454439 - DNA, 378 bp, Serratia marcescens
atgcaaacccaaccactatccttcacgcaggaggcttcgccacgtccgttaccggtggatatctggcagcagcttctgagccatctgctgtatcgtcactacggcctgacacttaacgacacgccatttggtcacgatggcgtgattcaggaacacatcgatgctggtatctcactgtgcgacgcggtgaattttatcgtggaaaaatacgatttggttcgtacggaccgccatggcttcagcgcagaaacgcagtcgccgcttctcaccagtatagatattctccgtgcccgcaaagccaccgggctgatgacccgtaacgattacaaagtggtgaccgacatcaccacgggtaaataccttgagagacagtcatga

SEQ ID NO: 454440 - DNA, 492 bp, Serratia marcescens
atgaagctgtccctgacggtggaagccgataccgttaatgtactggcccttaatgggggccggatcgccgtcgatatcgatggtattgagctggctgcgctgattgatgtggtcagtgacaacgggtattgccttcgcgttgctgacgaacccgggaagctgattgttgaagctcctctgccacgcgccgcccgtctgaactggatccagtgcagtaccgcacatatcacggaggaagacaatgctctgctgtttactctttcacaccagcatgaagactttggtgagtctgaatggattttgtacaccggctcaggatatctgctcaacctgggcgcgtggtcgtttccggtattacgcctcaaacgtctcggtctgtcgaaagcctgtcgtcgcctggtggtggcgcttatgcgtcgttactccgtcagtattgttcatcttgatgcctgtggcgaagtgctaccaggctttgccacctttgactggtaa

SEQ ID NO: 454441 - DNA, 852 bp, Serratia marcescens
atgtcagaactaactctcaccgaacccgaagtgttaaccgaccacaccgacatgatttgctccaccagcattgagcgcatcgtcaccggacgtaatgccgcgcttgcacagactgaagcgctcattcagcaactcaacgatatttcaatgctgacccgcagtatcggggggaaaaccgctctggactgggccatgaagcaggacttccgctgcggctgctggttgatggaaaaaagagaaacagcaatgaaggccattacccgcaatctagatcgcagcatatggcgagagctgatgaagaagtccgggatgctttcgctcatggacgctcaggcccgtgacgagtggtacaacagcctggagaaagacgacattccggcgatctctaaagacaatatactgagtacgttcaggcaactgcatcagagcaaaggtgaggtttttgagcgtggcgtaattaacgtgttcaagggtctgagctggaactataaaaccaactcgccctgcaaatttggcgcgaaaatcattgtcagcggtctggtgaaatacgacagatggggatttggacttaactggggctggcaacgtgatcggttagcggatcttgaacgcatgttgatgatccttgatggaaaacccattccagacaaccgtgccgatgtcaccggccgtcttggagatcacatccatgagaacagacacagcaatcgttatgaggacgagatgtttacaatcaagtattttctgaaaggaacagcccatatcaccatgaaacgtcccgatctggtggataagctgaacgatatcatcgcgaagcactatccgggaatgctggctgctaagtatgtgtaa

SEQ ID NO: 454442 - DNA, 2373 bp, Serratia marcescens
atggcagagtatgaacatttgcgtcttgttaagatgccacagcaattcgaaagacggaaaaagcccggatttggttccgctcctaaacgtaacagtcaacaaagagttacgcatgggacctctcttataagacagttagattcaactgttgcttatatcaggagcaagcgaaaaccaggaagtattgatccatcattaatcatgaaagtaaagtatgagggttcagctgctgatgaggattgggaaagacttggattgcatgtactttcacatgacgaagacaaaactttagttctcttttcgtcaaacgactctctattatctctaacagaaagaatcaatgcgtactcagcccctattcccgccaatcagcgcaaccctgcctacaataattttgtaggcaacttaacatccatagaaacaattaccgccaatgacaggattggaataagacttagggaggatggattcgtttccttagctgattttgatgaggatgaagtttacacttttgacgtcgagctctgggattttggtggcaggatagcccgagaagctaaaattgaatcaataaaaaaaatcgccattgaaaatggaggcgaatacattgattcatatgtcggaccgtccatatctcttctaagaataaaatgtaacactgaatgcttaaacgaaatattggaaatccctgagatatacacagttgatctgcctccatcacctgatatggaaactagcagatatatggaaatagatctagaaaatgctcatgaagttaatgatgcatatgaagatttacccgtaatcggggtgatcgatagcggtgtaaataatcacccattcctagacggtgctttaattggtggaatatcttttttgcaggataccggtgaagatgttttgggacatgggacttcagttgcaggaatagcagcatttggtgattttcggtatcagcttagcatcagtaaccggcttactcgctatgccaaaatttgctccgccaaagtagttaataatgaaggtaaattccctgaggatgttgtaattccaaaattaatgtctcaggcaattaatgaacttcatagacattatagttgtcgcatttttaacatttctttgggagatcccaaagcaccatttaatggtaagcgaaatggtcaatgggcatccattctcgacgagttggcacgaagtctcgatatcctaataatcgtttcagctggcaacggtaatgcatggggtcaaaatcctgaagatgctattaatgagtatccaaattttctcttagatgaaaaaaataagttccttgagccagctggtgcagtcaatgtactaactgtaggttcgttgtcttgtggtgatggcttaccacctagcttagcgccgtatgttggagtgcaacctacagctaaattggatgaaccgtctattttcacacgtactggccccggtgtattaggtatatgtaaacctgatatggttgattatggtggcactgctattttcgattccgcaatatttaaaatacggtctggcgccgatatttctgaagctggcatgataagccttaataaccattttttgactaagttatttaaaacatcctctggcacatctgttgctgctcctatggtagcccataaagcagcaatattactcaagcaaattccagattgctctgctaatttgctaagagctctattggtaaattcatcaaatcatcctacgctcaaccaacaaagaataaatatgttagatgaagcgtctaaaggaaaaatttatggaaagggagttcctcagctaaaaaacctaatagcatccgaagataatcgagtggttctctattcagaagattcattacaaccagattactttgcagtatacgaaataccaataacagaaatcttcagaaatacggcaggcaaaaagacaataaaggtaacacttacatttgatcctcctgtaagacataccagaaaggattaccttgggtgtgaaatgaatttcagattaattcgtggtaaatctgccgctgaggttttcgaattctttaaagttaaagatgataccggaatcgtctcagaaatgtctcaaagtaataattgcgatcttaaacctggtgcaaattcaagagactttagcactgttcagacggcatcagtcacctattaccgtgctatgcaaaattacggagatacatattatttagttgtaagatgtcaagctggatgggccgactttatccaagaacaacgttatgcaattgtagtagaaatgacacatacgcagaatataaatatttaccaaaccattcagcaaagaatccaaccaagggttcaaccgagaattcaaaacagaaatcgtgtctag

SEQ ID NO: 454443 - DNA, 969 bp, Serratia marcescens
atgaaaaaacttttggctagctacggcaatgactcagaatttcgctcggtagctgaaagaattattagtgaagaagaaaaaaagaataataaagtattagctaatagtttgagacgaactctcgaaaacagccaagctataggttcgaattattctttaaaaggtctggaaaagttcgccccgactcttgaaggtaaaaatgactttgtcgaaagagttgagccaagtaattcccacaaagaattagttctatctttcgaaaatgtcagaatacttaaaggattaattgaggagtatagacatgcagaagcaatacgaaaaaatgggctatcgttacgcaccaagctccttttttgtggtcctccgggctgtggtaagacactaagcgctgaggttttttcctctacactaggtcttcctatgtttatagttaagttagataagttgatctcatcttatctcggcgagacagccactaatattcgctccatatttgaattcgcgaataacaaaccttgcgtgctttttttagatgaatttgatgcaattgcacgttcacgtgaggatggaaacgagcacaatgaacttaagagagttgttaatagccttttgctatttattgaacgattagctccaaaaggttttatgattgccgcaaccaatcttgataaaagcatagatccagcagtatggcggcgtttcgatgaagttgtttggttcaaaaaccccgataaagggatgattaaaaggtttttgaaaagcaggcttaaaaatgttaactatgatttcaacccagataattttatattaaagttagataatatgagtttttcaagcttagaaagagtattaaatcaagctataaaaaccatgattatagggaagaaaaaagtattgagtgaacgttatttagttgacgcgatcaatgatgaatatcgcaggaatagtggtgttgataaaatgcgttaa

SEQ ID NO: 454444 - DNA, 267 bp, Serratia marcescens
atgcgtaaagcccgttttactgagcatcagatcatcgccgtgattaagtccgttgaagccggacgaactgttaaggatgtttgccgcgaggcaggtatctctgaagcgacttactacaattggaagtctaaatacggtggcatggaagcttctgatattaaaaaaataaaagatcttgaggacgagaaccgacgtctcaagcagatgtttgccgacatcagccttgagaaccgggcattgaaagacgttatcgaaaaaaaactttga

SEQ ID NO: 454445 - DNA, 849 bp, Serratia marcescens
ttgaaaccagcctttaagcgtgagctggtcacacatctgataacgacgtttggactgagtatccgtcaggcctgccggagcctaaacctgagcagaacggtttaccattaccgcccgaatactacgcgtgacgagcctgttatttccgccttacaggctgccgccgaacggtatccacgctatggttttccaaagttgtttcaggtcctgcgacggcagggatatccgtggaatcacaaaagggtccaccgtatttactgtctactgaagctgaattttcgtcgcaaaggcaagcagcgtctgccggtacgtaatccatcaccgctcgctacgcctgaagcgttgaaccagagctggtctgttgacttcatgcatgacgccctgatctgcggtcgtcgttttcgcacgttcaatgtcgtcgatgactttaatcgagaggcactgacgattgaaatagacctgaacctacccgcccagcgagtggttcgtgttctcgacaggatagcggcaaaccgtggctatccgataatgcttcgcatggataatggcccggaatttatctctctgacactggctgaatgggcagaaaggcatgcagtaaagctggaatttatcaagccagggaaaccaacacagaatgcttttattgaacgttttaaccggacataccgtacagaagtactcgatttttatctgttccgaacactgaatgaagtgcgtgagctcacggagaaatggttgtcagaatataactgtgaacgcccgcatgaatcgctgaataatatgacaccggaggagtatcgccaacagcattaccaggccgagatctcaaaaagtgcatggaactaa

SEQ ID NO: 454446 - DNA, 1152 bp, Serratia marcescens
gtgaacgcgcctggcgatctgcgtaaaaaactgacccggcagtggtataacgccaaagtccgatccgagcgattactttttccacattgctggccactgcgtctgtctatcggttcccccacacctaaagcattagccgaacgtcctcagcgcgtgcaacaacatattcagctatggcgacaggtggataatggacaggttgaatggggagcaatcagctatcgggccagcgccgcgccgatagagatgccgctacgctggatcctgaatgggccttccgattgggtgaaggcagcggccgacccaaacgtcagtcaggagtttcgcctgcttgaggaaatcattgaacacgttgacacagtttttcatccactattaatccggcagcgctcactgtggcactatcgcgatccacaagaggttattaccgccgccaaactggccctgcgcttgacgccaggctgcgcgaaaggacggccattgaggttaatttcagggcaaggggttgataccaaatttatcgaaaaaaatacgccattactaacccggctattagacgaacgctttgccggggaagttagcgaacaagggttaaccacctttctggatgcatacgatgaaaacagccattgggtgcttataacaccgctatcagcggggttattacccttcaaaagaagcaaaatcaccacggcagagttggcaacgacgccattaccggcatcacgcgtattggttgttgaaaacgaaaaatgcttgcaccagcttaccgagttagcggatacgatcgccattttaggcgcgggcctcgacttacaatggttatccgccccaagttttgacgataaatccatcgcctactggggagatatggatagctgggggctattgatgctggccaaggccagacagtatcgcccaactgtatccccgctactgatgaaccgcgaactgtttgatcactatgccgagcatagcgcagtttatgaaccaataacggcgcaggaaacaccgccggaaggattactgcacgaggaggccgagttttatcgttatttaatcgcacaacagcgcggccggcttgaacaagagtttattcccgttgatgtcgttttgtccgctttaagagattgggttgatgggatcaggtga

SEQ ID NO: 454447 - DNA, 3294 bp, Serratia marcescens
atgaaccaggacattcatctgacgaataacaacacctttatcctcacggatattgcattgttcaattggggaggattccaagggttacaccacgcaacactggaccccgcaggtaccgcagtcatcggccccaccggcagcggaaaaactaccttggttgacgcgctgatgacccttctctgcgcgaaccccagatataacctggcttcaaccggaggccatgagagtgaccgcgatcttttatcctacgttcggggcgtttccggcccaggggacggaaaagaaggcctctcacatattgccagaccgggcaaaaccgtcaccggtatctctgcaacgctgaaaaacggagagaaacaggttcagttgggggggctgttctggttcgacagcgccagttccagcgtaacggatatgaaaaggctctggctatttagcgatgctcctgagcatacgctggagcgctggctgaatgtctaccatgacggcggcacccggtcactgaagcaaatggaaaaaggatcaaccggcatctggacatggtcgaataaaaaacagtatctggcacgtctacgtgactacttcgaggtaggggaaaacgcctttaccctgctaaaccgagcagcgggattaaaacaattaaacagtattgatgacctattccgcgaactggtgcttgacgatcacgcggcctttgaccgcgcagcggaagtcgccaacagtttcgatgacctgagtgaaatccaccaggagctggagatcgcccgcaagcagcaacacgccttacagcccatctcatcgagctggaataagtatcagcagcaacaaacacagttagccaaacggcaacgcttggagtcactgctgcccatttggttcgcagagcaagcacacgcgctgtggcaacaggaggcggagcggttagaacacgcgcttgatgctgcagaaaccgatgaaaaacagctgcaaatacagattgcgacacagaaacgcgtagtggctgactgtatgcagcattttctccaagtcggtggcgcaaacatcaatgagttaaatgagcgcattgacgactggcaacaaactctccacagccgtaaatcccaggcgcaccaataccaacaattaaccaaaaaacttggactacacgctgagctaagcgcacagcgactcgctgaaaaccagcttgctgctgcggctaaaagccaagaaatcgccggtgagatagaggaaaaacaggaagatgcatttcaaaaaggcgtaatacaccgctctttaacgatacagttacaggacctggcagcagaaaaagctgatatagctcgccgtccggactccaacctgccagcaaactaccagacgtttcgtagcgagttggcggaggccctaaatgttgacgaagcccagctcccttttgtcgccgagctgatccaggtgaaacccgaagaggccgcctggcgcggtgcgattgaacgggccacaggtagccaacggttacgtattctggttgcaccggaatccttgccgcaggccttacgttgggtaaaccagcgccataacaacctgcatgtccgcctgctggaagttaaattaccgcatacggcaaccacgtttttcgatgatggctttacacgcaaattgcaatggaaagatcatccctggcgagacgcggtaaaagcgctgttagcgaacatcgaccgtcactgcgtcgataacccggaacagctgcgcactttgccacatgcgatgaccgttcaagggctaatgtccggcaagcaacgcttttatgataagcaggaccaacagcatctcgaccgcggctggttaaccggatttgataaccgggatcgtatggagtttctcacccgggaaatagaacatattcaagtacaagttaatgctgccaaacaagcattacaaaccgcagaaggagaaaaagggcaactacaagcccaaaatgcactgttggaatccattcagcaactagaattcgaccgtatcgaccttcccggcgcagagcaacagttagccttgctcaaggagcgattggcctatttgacccggcctgactccgatgctaaagcggccgaacaggctttgcaccaagcggaaaataaacgtgataagatcgagacgcaacagcggagcttactcaaagatattggcgggctggaaaagaaacttgaagccgcacggttggcaaagcagcaagctcagcaagttagccaacaaggtttgtcagacgataatcgggcattaagcgccgagcgttttcctaccttagagatagcgcaactgccggacatcgctcggttagaacgccaacaggaactgaagctccaacaagaaatcgatgaggtcaacaatgagttaaattccctaacaggggaactcatccggcgcatgtctgccgccagacaggtagataccggcgcactctccgaggtcggtaccgatctggaagatattcccgcttatttacaacgtctggatgcactaacggaagaagccctgcccgaaaaactcaaccgctttctcgactacctgaatcgctcgtccgatgagggcgtcacacaactgctcagccacatcgaacatgaagtgttaatggttgaggaacgcctgagcgaattaaacgccaccatgttcagggtcgatttccaacctaaccgctatttacgcctggaaaccagaaaagtcattcatgaaagtttacgcacacttgaaaaagcacagcgtcaactcaacgccgaccgttttatcgatgacaatggcgagagccactataaagccctacgcacattggtcgctttactgcgcgacgcctgtgaaagacaccggaccttgagcgcaaaagcgcttttggacccgcgctttcggcttgaattcgccgtgtcagtgatagaccgccagactggtgaagtcattcaatcgcaaaagggttcacaaggcggtagcggcggcgagaaagagattatcgcctcctacgtgctgaccgcatcacttagctacgcactatgcccaaaaggaagcagccgcccgctgttcggcaccatcgtacttgatgaggcattttcccgcagttcacacgccgttgccggcagaatcatcgccgcgcttaaagaatttggcctgcacgccatctttatcacccccaataaagaaatgcgtctgttacgccagcacacacgttcggccatcgtcgtccaccggcgcggtgcaaattccaacatggcctcgctcagttgggaagaactggaacagcactctcaacggcgtgaggagagtacgccgtga

SEQ ID NO: 454448 - DNA, 780 bp, Serratia marcescens
atggcaggtttttttgacagactcgttagccaaaataatgacgtaaactcagacagcgaattgatacagcagagcgataacaccagcgaacaagtagtcgaagaaaacaacggtggtgaaacacgtaacacacaaaaaaaactgcgcgaagcaacacaggaactgcttaagtatggcctgctggaagaagccagcaaacctaacctttaccacattgctctggctcattccgacgaggtacgcaacatcctggagccgctcgatctgactatcggcatcgatgagattcgcggtttactgtatgtcaaagtcaggcttgacgaaaccgcagaaagcgatgaatggtcacatccgttagttcggcggcaacggctgaacctggagcaatctttactcattgccatcctacgccagcattttattgcctgggagcaagaaagtggtaccggcgccagccaggcgcttatctccattgacgatattattccacagttacgcatctatcttggcgatccaggcagcgagtctagagaacgtaaccgattgagtactctgttggatcaactaaaaggtcatggtcttgtcacttcgcctgacgcccatgaacaattcactattcgtccaattatcgcccaccttgccgacccgataaatctgcaagctctgatcgcttggttacaagaacagcttaacgctcaagcatcccctgatggcgaatctaacaaggatgatagaaaagaggagaggaagcatgaaccaggacattcatctgacgaataa

SEQ ID NO: 454449 - DNA, 1497 bp, Serratia marcescens
atggaagagaaaagcaaccagcgcaccagtcgctatatttcagcaaggaaccagcaccctgcatgggtattacttgccgcccatcgcgcaccgctggtactaagctgcctcaaaacgctatttgaaaaatcgcacgacggcattctgttggaagaggctatccagtcgttatctggcattcttagcgcccatgcaggacaaagccagtatgaaatcatgccggaaaacacgccattacaggccagtcgtgaattaagagaatggattaaacgtcgcctaatcattgagcgcgatggacgactgttcgccaccgatgcactggaggtcgcactcacctttgttgatacattggataaccgttttatgacctctaccgcatcacgcttatccactgttcagcgcgaaatcgaaaacctggaaacccgactcaaccctaacccagccaaccgtatttccacactgcgccgccgtattgccgagttggaacgcgagctgcaacaggcagaagctggaaacatagagatccttgatcgccatcaggcggttgaacatattcgcgaagtatttaacttggccagcggcctgaaggccgattttcgtcgtgtagaagattcctggcgtgaagccgatcgtgcgctacgtcaatcgatcatcggcgagcaatatcatcgcggtgagatcgtagaacgtttgctaaacgatcaggaagcactgctgaatactgccgaaggaagagtcttcgacagttttcaacaacagcttcgtcaacccggagcgttaaccacaatgagcgagcaactgcgcgttatcctcagccatcccgcagcggaaagcgctctcagccgtatacagcgtcatgatttgcgctggttggtaaaacggttggtggatgaatcgcaaagcgttctccaggcacgttcacgcagtgagcgagacgtgcgcggctttatgaaaactggccttgccgctgagcaccatcgcgttggacagttgctcaatacgctgctaggtctggccactgaaatcgactggcagcgccaggcgatacgtaaaaaagaagtgccgctccccgcagtgggcgtacctgtaacggggatccccgctattgagcgtttgcgctttaaagaagcggataatgatgcggaacaagcgctagatctaagtaaccatgccaccgacctgacccagattggcaatgatttctgggatgcgtttaatggcttagatcgtcaagcgctgatccaacaaaccctgcatctattggcgcaagaacaacggccggtcagccttgccgaactggcaacattgctgcccccactccatgatctagaaacattcgccatctggattagcatggcgagagaagccggcattaacgtccaggacgagcaacgtgaatacgttgaacttaacgatggcgtgaaccgctggcggtttaatctgcctttaaccgggctggacattcagtctttaaaagatattgattgggagttatag

SEQ ID NO: 454450 - DNA, 1890 bp, Serratia marcescens
atgaaatatcaggagttggccggcgacattctgcaaggtgtcggcgggcgggaaaacatcatcagcctggtccactgcgcgacccggctgcgctttaaactcaacgacccggcgcaggcggacgccgccgggctgaagaacaaccccggcgtgattatggtggtcgaaagcggcgggcagtttcaggtggtgatcggcaaccatgtgcatgaggtgtatcaggcggtctgccgcgctgcagggctgaacgacgagtcgccggcagccgcgccgcagcagggggagaaatccagcctgctggcgcgctttatcgatgtggtttccggcattttcaccccgttcctcggcgtgatggcggcatcgggtatcttaaaaggcttccttgccctcagcctggtcggcggcttgctgagcgagagcagcggcgcttaccgcatgctgtttgccgccagcgacgcgctgttctacttcctgccgatcgtgctgggctacaccgccggtaaaaaattcggcggcaacccgttcctgaccatggtgatcggcggcgcgctggtgcacccgctgatgctggaggcattccaggccagcagcgagggcgaaaccatcacctttttcggtatccccgtggtgctgattaattacgtctcctcggtgatcccgattatcgcctccgcctggttctgctgctggctggagcgtcagagcaataaagtaatgccgtcagcggtaaaaaacttcttcaccccgctgctttgcctgctggtcaccgtaccgctgacttttctgctcatcgggccgttggcgaccgggctgggcgaactgctggccgccggtttccaggtagtttatcaattcgcgccgtggctggcgggcggcattctcggcgcgctgtggcaggtttgcgtgatcttcggcctgcactgggggctggtgccgctgatgatgaacaacatggcggtgctgggccatgactcgatgatcccgctgctgctgccggcggtatttggccaggtgggcgccgcgatcggcgtgttcctgaagacccgtgacccgcgcctgaaaacgctggccggctccggcgccgtcgccggcgtgttcggcattaccgaacccgtggtgtacggcgtcacgctgcccaaccgccgcccgtttattttcggctgcgtcggcggcgcggttggcggcgcaattatcgcccttgcccaaagcaaagtttattcctttggtctggccagcatttttacgctggcgcaggtcatccccgccagcggcttcgacaccacggtatggggcgcaattatcggcgtcgtggtggcgttggtgctggccgcgctgctgactctgatcgccgggctgccgaaacagccggcaacggctgaagacgccgctacagcgccggccgccgccggcgacgacgatattctggcgccgctgaccggcgtggccgtcgcgctggatgcggtgccggacccgaccttcgccagcggcctgatgggccaaggcgcagcgatcattcccgccgaaggacgagtggtggcgccgtttcacggcgaggtagcatcgctgttttccactaggcacgccctcggcctgctgagcgacagcggcatcgaggtgctgatccacgtcggcatcgacacggtaaaactgaacggtgagcactttaccgcccatatcaaagagggcgacaaaatcgcccccggcgacctgctggtggagttcgatcgcgaggcgattctgcgcgccggctacgacctcagcaccccggtgattatcagcaacagcgaggattacgccggcgtggagagcatctatcccacccctgatgtgcatgcaggcgcgtcgttcctgcaggttaagcgcaacaacaaaggagataaccatgaataa

SEQ ID NO: 454451 - DNA, 264 bp, Serratia marcescens
gtgaagcagagaacgcaggcggcgctgcgcactattgtcgataatgccaaagcacgcggtgataaaaacgtgctggcgatttcctccggcacctcgatgcagattatgatttctgatttgaccgaggatccggctaagaataaaccgttgtcgaacgccgcagtggtcaaagtggtgtatcagaacggcaaatatacggtgccggaaattggctccatgaaatatgttgaagtcggaaaacaggcgctcgataaaaataaataa

SEQ ID NO: 454452 - DNA, 1347 bp, Serratia marcescens
atgaaaattaatttattaaccatcgcgttagcgacgtgggttattcccgcctgcgcctggtcatcttcaaccgatgtgcgtattcaggaaaaggatgctattgaccaggtactggcagaccccttttttacccagtcacagatgacgctgtcgctgaaaaattactggaaatatctgaaggaagacaataccgaaccgaaaaaagtgcataacgcctgggggcagggcgtggccgtggactatcagtccggctattttgccgatgtgattggcgtggatgtggtgtattacggcgcggtgaaactgggcgccagcgactattttaatacgcgcggcgtgctgtacaacaacggcagtggtaatgataaaggcaacgccgaagggtatagcaaatttggccagcgcaacctcaaattcaagtacgtgctcggcgacgtagggttacatgcccgctggggctggcaggtgatgaaaaatgtcggcgtgatctctacctccacgcgtctgtcgccgaccacctattcaggctggctgggggccgtcgactatggcggcttaaccctgagcggcgcgtatatcgaaagctcaatggaccgcaattcgccggataaaaaacgctttcagaccaacaccggtaaatacattaaccatattgccagcggcgacctgtcatggaaaagcaaacgatgggacctgaaatacggctacggggaaagcgaaaattatctgcagcgccacatcctgcaggcgcatgttatgccagcagaacgcttaaagctcggcgcgcaaatctatgacacccatgcgctggaggaatataaagcgatgccggccggcaagcgtgatttcgataatcacgcgcgccattatacgctggaagccggctggcgggcggataattggagcacccaatgggggctgggttataccgacgctaaaaaagagcatcaggtggggttttatccgcgccacatgagtaaaaactcccgcggtactttcggctcgatggcgtatgccggcgatgactacatgcgtgacggcgaggtgatgctggcgaatatctcggactataagctgacgccagattttgcggtaggcctggcgggtaatatcggccagtttaattataaaggcaaccacgtgcgcaccggggaaatcagcgcctttacccgctggacgccttctcagatgccgctgaagaacctgaccgtctggaccatgttcgggccgggctggtcgtataaagccagcggtaaaacgccggtgctgaatgatgacggccgctatatgcgatcccacaccctctcttccgaggtgattatcgaatacaaatttaaactgctctga

SEQ ID NO: 454453 - DNA, 798 bp, Serratia marcescens
atgagcatcaacaataacaccccgctcctccccccggcctggcagccgctgctggaacagggctaccttgagcggcagcatatcggccgctctgatgcggacgtcttccgcctgcggcggcggcacggcgaggacctgtttttaaaatcggaacgggtcggtgcgtttagcgggctgccggccgaggtggaaaagctgagctggatgggccagcaggggctggcggtacctgcggtggtggaatttacccgccacgccgagcatcactggctgctgatgagcgccctgccggggcgggatctggcatctgagccgttgctgccgcctgaacgggtggtcgccatcatggcgcaggcgctgcgacagttgcatgacttgccttatcacgcctgtccgttcgatcaacgcctgagcgtactgatcccacaggcgcagcagcgcctgcagagcggcctggtggacgagtcggacttcgaccccagccgacagggcaaatccgccgccgagctgttcgcaacgttgctagccggacgccccgcgccggaggcggaagatatagtggtgacccacggtgacccgtgcctgcctaacctgatggcggacggcgatcgctttagcggctatatcgactgcggccatctgggctatgccgaccgctatcaggatctggccctggcgtcgcgcagcatcgactacaacctgggcagcgtctgggtggcgccgtttttccgcgcgtatggcatcgtgccggatgaagcgcgcctggattattaccggctgctggatgagtttttctga

SEQ ID NO: 454454 - DNA, 1074 bp, Serratia marcescens
atgcaggagtctgaccaaatcggtcgcgacaaatttttaaaaatatatggttttaaaccttcaagaaaataccacctccaacacaatggtaaacgctatgacagcaaagccattgttgccgttgcttgcggctatgagttcggccaaccactaaaaagtaaagattttagcggcggggcaaaaacggtagttcccgtattgcaaaagctaggtttcgaggtactagaaacaccacatcccttgggttacttagttagcggcacgctgtatcagcgcaaagcactacgtgacctttatggtgggcaatatcaaggtggcatatggacgccaaaagactttccggtaatctttatttttaccggtgaaagcggtcaagagtacggctatcaggatggctggaccaaagatggtagttttatctacaccggtgaaggccaaaaaggcgacatggcctttacaagaggcaataaagccattcttgagcataaagagaaaggtaaagatatctttttatttgaagataaagctaaggaaaatggcgttagatatgccggtatgtttgagtgcgacacctgggaatatattgactgcccggatgtagatggcaatcaacggaaaggtattcgctttaatttattccccgttcactctcaacaagagatagacattgaggattctcatttttcctcaacgccaagtcaggaaaaagaaaatatcgcgcaattacgtggcaaagcgttgaaagcatcaatgaccacaagcactcaccagcatagtgacaacaaacgctcctggtacaaacgcagcgaagatgtcaaaagatacgtgctaaaacgtgccgccggtatctgtgagtcttgcgaacagccagccccctttaaaaagaaaaatgggacaccttacttagagccacatcacaccaaacgcttagccgatgaggggcctgatcaccccaaatgggtaggtgcaatttgcccaacttgccaccgaagaatacatagtggagaagatggggaggaggtaaataaaaaactcatgcaaaaaatcgctatcaaagaaaaaacttgggaataa

SEQ ID NO: 454455 - DNA, 3819 bp, Serratia marcescens
atgggtgaagcagcgcgcgtcggggacagcatcggccattcccacgcgctggcagggatgattggcggcacgcttatcggcggcctgattgccgccgccggggcggtggcggcgggcgccctgtttgtcgccgggctggcggcctcctgcgtgggcgtcggcgtgctgctgattggcgccagcctggcggtgggctacctctccggcgagctggcgacccaggcgcgcgacggcattgccgccgccggcgctggcagtctgtcgcccaagggcacgatactgaccggttccggcaacgtgttcatcaacggcaaaccggcggccatcgccaccgtcagccgcgtcgcctgcgaggacgacggcccgagcatgcagatggcgcagggctcggacaaggtgtttatcaacggttatccggcggtgcgcagcggcgacaagaccaactgcgacgcgcaggtgatggccggctcgcccgatgtgcgcatcggcggcggcaccgtcaccacgctgcccatcaagccggaagtgcccgactggctgtataaaatctccgacctgacgctgctgtttgccggcctgataggcggcgtcggcggtgcggccagcaagctgggggcgctaggacgcatgctcagcaaggcgccgggcatcaacaaactgggccgcgtcgcctgccgcgccggcgcgctgatgaccgccaccgcggcgacgggcattatcgcccggccgctggacgtggtcagcggccagaaatttctcgacggcgacgacgagctggactttgtgctgccgtcgcgcctgccggtggcgtggcaacgctactggcgcagcggcaacccggcggaaggcatgctggggcgcggctggagcctgttctgggagagcagcctgcagacctggcaggaagggctggtgtggcgcgcgccgtccggcgactacgtcgccttcccgagggtgccgcgcggccacaagacctactgcgaagcggaaaaatgctggctgatgcacaacgccgacggcagctggcaggtgttcgacgtcagtgaacaggcgtggcactatccgcgtctggaggcgcagcagccgagccggctgagcatgatgaccgatgcggtcggcaacgccacctcgctgttctacaacgacgcggggcagctgagcgagctggtggacagtgccgggctgcgtctggcctgccgctacctgacgacggccggcggcgcggtgcggctggcggcggtagcgtggcaaaacggccaggacacacaggtgctggcgagctacgagtacgacgacgacgggcaactggtcaccgtccgcaaccgtgctggtgagatgacgcggcgctttggctggcaggacgggctgatggtcagccatcaggaccagaacggcctgctgaacgaataccgctggcaggagattgacggcctgccgcgggtggtcgcctaccgcaacagcgccggcgagcagctggatatccattacgatgttgccagcgggacgcgccgtgcggtgcgtgacgacggcaaacaggcgctgtggcagctggacgatgacgacaacgtcgcgcagttcaccgactatgacggccgccgctacgggcttatctacgacgcgcgcggcgaactgtgcagcgtggtgctgccgggcggcgcgcagcgccagagcgagtgggacgcgtacggccgcatgctgagcgagaccgacccgctgggccgtaccaccacctatcagtattcccgcaacagcggccgtctgttctcggtcacctatcccgacggcagccaggcgtttcagcactgggatgcgcaggggcggctcggcaaacagacggacgcgcagggccatgtcacgcgctaccactatcccgacgatgaagagagtctgccggactgcatcaccgacgcgctgggcggcgaggtgcggctggcctggaacgcgcaggggcagctgacgcgccataccgactgttccggcagcatcaccgcctacagctatgacgcgctgggtcagctgacgcaccgcaccgatgcggaagggctgctgacccgctaccgctgggacgccgccggccggctgcaacagctgctccacccggacggcagcgaagagcagtttggctggaacgcgcagggccagctggccgcacaccgggacccgctcggcagcgagacgcgctggcactacaacccgctgggccagccggtcagcatcaccgaccgcatcagccgcacgcggcgctaccactacgggccgcgcggctggctgacgcggctggagaacggcaacgacgccgactaccagttcagctacgacgcgacgggccgcctgcaggtggagcagcggccggacgggctgcggcgttactaccattacggcgccgacgggctgccgacgatgctgctggagaccggcgcgcaggctgccgatggcacacaggcggagcgccggcagcacttccgcttcgatgaggcggggcaactgacggcgcgcaccaccgacagcgccgaatggcgctacggctatgacgccggcgggcggctgacgacgctgacgcgcacgccgaccgccgccggcgcagcgctgggcatcgagccggacagcatccggctgcgttacgacaacgccggcaacctgctgagcgagcagggcgtcaacggcgaactgcagtatcagtgggacgcgctgggcaacctgcaggcgctgacgctgccgcagggcgaccggttgcagtggctctattacggctccggccacgccagcgccatcaggttcaatcagcaactggtgagcgagttcagccgcgaccggctgcaccgggagaccgggcgcacgcagggcgcgctgcaacagcggcggcagtacgacgcgctggggcggcgcagctggcagagcagcggcttcagccacgggcagctgacgaagccggaggacggcgtgctgtggcgggtataccactacagcgggcgcggcgagatagccggcgttgacgatgcgctgcgcggagaaatccgctacggctacgatgcggaaggacgcctgctgcagcatcgcgaggcgcggcagggcaagccgggccaccggctgcggtacgacctggcggataacctgctgggcgcgcagagcgccagccgggccctggaagagcaaccgccgccgctgagcgacaaccggctgacgcactggcagcagctgttctaccggtatgacgcctggggcaacctgatccgccggcgcaacgggctgtatgagcagcactacgtctacgatgcggacaaccggctgacggcggcatatggccacggcccgcagggcgagttccgggcgcagtatcactacgatgcgctggggcggcgcacgcgcaagcaggtgagctgcaagggcaaggcggcgcagagcacgcgttttctgtggcagggctatcggttgttacaggagcagcgggaagacggcacgcgccgaagctggagctacgagccggacagcccgtggacgccgctggcggccatcgagcaggcgggcgacagccgacaggcggatatcttctggctgcacagcgaccagaacggcgcgccgctggaggtgacggacgccggagggcagctgttctggtcgggcaattacgacaccttcggcaaactgcaggggcagacggcggcgggcatcatgcagcgccggggcgcagtttatgaacgcccgccgctgagcgacaaccgattgaagcaccggcagcagctgttctaccgttacgacatctggagcgaacttgatattcgctccactgctggttggcaccagcggcgtaaccgcgcttag

SEQ ID NO: 454456 - DNA, 339 bp, Serratia marcescens
atgtccgtcgagttacccgtacaggcgcagtttacagcctataacgcccataatattgaagcgtttatcgcatgtttctcagaagattttaagggatatcggatgccagccgaatccccttccaccgtaggtaaatcctctttgcgggaattctatatcaatcaccgcttcaataatccgcagcttaaagcagagctaatttcacgcacggtactcggtaacaaagtgtttgatcacgaaatcatttacggcctgtcgcccaccccgatggagagcgtggccgtttttgagattgaaaacagcctcattaaaacggcgtggttctatttcccttcataa

SEQ ID NO: 454457 - DNA, 888 bp, Serratia marcescens
atgtctctttttggctacccgctgccaaccacaccgtttctcgaccaggctaacggcgacttttacagcaactatatttctactgcccccaataccttcgagtccctgccccgtacactggcgctcagccaaggtaaacaggttgattacgcaaataacgtcgtaacgctggccaaggccgccggcatacagacctactggttttccaaccaaggattcattggcgattatgatatcccagcgtctaaaatcgccagctacagcgaccggcgctatttccttaagcacggggactatctgtcgtcaaacaccgatgattatcaactgctgtcgcccttttcccatacgctaaaaaatagtcataatggactgtttatcttacatatcatgggatcgcatccagatttctgtgcacgtctgaatggtgccgaaccaacgttcagcgttaaaaaccaggatctatcatgctatctctccacctatcgaaaaaccgacgactttattcagcagacctaccacctactgcagcagacacagcgccctttcaagctgttttatttctccgatcacggcttggccaagcgttatatcggcggagactcctatctgcgccatagcagtgaattcaagcaaaattacgacgtgcctttggtgatcttgtccgataatgctacgcagcaccgacagatagatacgccttacagcgcgttcaatttcatccaaatcttcgcccaacaaaccggcatcgccattacccaacctgatatggcagcctacgcgatacagcaaaagcaacgccaagtttactcagggcaagagatggtggcctatgatagtctggcagaagacaaagttgatctgcctgatgaaaaccacctgcgcggttaa

SEQ ID NO: 454458 - DNA, 144 bp, Serratia marcescens
atgatctaccacaatgatttggcgaatattcagcgtattaggggcgtacaccggggaaaggccgccattctgcacccgctgtgcgggagcgagcgtgcttttgccggtgacaaaagaggagcgggaatcggctactgtgtataa

SEQ ID NO: 454459 - DNA, 303 bp, Serratia marcescens
atgaaaacaattgatggtttcaaagggctactatctatttataaggacctgcctaaagtcggtggcttctttgttgatgaagactttgttaatagagcagagcatatcgaggctgcacgttattatcttgctgaaacacctgacgaagatgatgacatggaagatgagtacaaaacatggctcgaataccctacattcagggcgattattgagaataaaatcgaccataaccctgctgttggggaaaaagagttgttacaagcggtcgtttattaccttgaaaacgatgattttcaggactaa

SEQ ID NO: 454460 - DNA, 411 bp, Serratia marcescens
atgcggatttttccggagctttacggttttgtcattttctctgaacagccgctgctgtccttcatgaagaagaacggtatagagaaggatttgctcgcctttatgacaactaatgatgaggcagataaattgaccgaggcggggatcatcgtccctatttttgacgtgcctgagggcttgtatgaggtgtccttgcagtgctcaaagcctgcaaagaacatctccaaacttgggatgttcaagtcagagggcaaattgagcatctgcggtatgggatacttggcggattttgacgtagaaaccttgcgtaacagagagagaacccaagatttttcggtccctcagggagtgtttgatttgtactgtgtagttgatgagccaaatgagaaagtctcattgaccctgagttaa

SEQ ID NO: 454461 - DNA, 306 bp, Serratia marcescens
atgattgttattaatggttttagtgaattattaaaaatgaaggatggtctgccagatgtaggttggctttatgtctcgccatcgttcagcctttcctctgaagagggtatagtcaacggtagttattacattgctgaaaacgaagacgaagaaatggattttgaagagagttacggtactttccttgaagcgccaatcttcaaggatattgtcatcaacaagagaaaccacaatcagcaagcgacagaggatgagatccttggtgccgtcatctattacctcgaaaacgatgattttcaggactga

SEQ ID NO: 454462 - DNA, 1221 bp, Serratia marcescens
atggaactgaaggattttgagctgaattatatcgagaaatggttgccggaagcctcggtgaagtataaggacggcagtccggcggtgaatcttgggctgattatcaccgtgttttttaaagacggccataccccggaagttattcgtaagatggtcgaatgtgtggatcgttactatggagagtttaaacctcacctgaagaaaacggtatatggaaaaaaatgggtcgggattacagaaaataactatcagaaaaagcggcaacagcttttggagctgacagaagaagaaactgcgtcttggtatctggggggagcggagaaggattatcaggcatcggactacagcgtgctagtgatgaatacgcgaatttttcataacgataatgatcgctcggtaatcaaactaacctttccgctgtcactgcttagagagtcggaaggtaaggtacgctatcaatcctggctgatgtggctgtgcgataccttttcggttgaaagtggttatgcgggtctatcgttcattctaccttatgcccgtgaaaagatgtttccctatgaatatgcactggctcagcgctttcctggcgtaatggtggactctattggcactcttgaagggactggagcagctatcagcctgaaaggagcctgctggtacaccattctgggtaatccatggctggaaaaactcggtggtgtgaagacactggctcaccgtctggcgaaaacgccagaaatagagctgctgccctataacagcggcattatcctcaaggccggagcactaccgccagcgctgggcgaaacgaaaactgaagaactgccgccattactggtaaaagtaaaccaaatgatcaaaccagtgcgttttaatggctcacgctcgctgcatttctactcagagcacaataactttcagtttgataaagaatcaacaatgaagtggtatagacgcttcgatgcggccagtgcggagctggataaggaagatgaaggcaaatcatttgagccggtgcgtatcacctgctggagcggcgtggttgctccgtttgccggacgctgggcgaccattattaacggtactatacagtacactcaaatccgggtcgcacaggttatgcctgattttgaagacaagcatggcaataaacaccgcgcctgctggtcgctgctggagcgcgatgatggcggagacgtcttcgctataagatcggaataa

SEQ ID NO: 454463 - DNA, 1221 bp, Serratia marcescens
atggaactgaaggattttgagctgaattatatcgagcagtggttgccggaagcctcggtgaagtaccaggatggcagcccggccgttaaccttgggctgattatcaccgtgttttttaaagacggccataccccagaagttcttcgtaagatggtggaatgtgtggatcgcttctacggtgaatttaaactgcacctgaagaaaacggtatatggaaaaaaatgggtcgggattacagaaaataactatcagaaaaagcggcaacaacttttggagctaacagaagaagaaactgcgtcttggtatctggggggagcagagaaggattatcaggcatcggactacagcgtgttagtgatgaatacgcgaatttttcataacgataatgatcgctcggtaatcaaactaacctttccgctgtcactgctgaaagagcctgatggcaaggaacgctatcaatcctggctgatgtggctgtgcgataccttttcggttgaaagtggttatgcaggtctatctttcgttctaccttatgcccgtgaaaagatgtttccctatgaatatgcactggccctgcgctttcctggcgtaatggtggactctctgggaacactggaaggtggtgaggccctggaaggtgtaaaaggagcctgctggtataccattctgggtaatccatggctggaaaaaatcggtggtgtgaagacactggctcaccgtctggcgaaaacgccagaaatagagctgctgccctataacaacggcattatcctcaaggccggagcactaccgccagcgctgggcgaaacgaaaactgaagaactgccgccattactggtaaaagtaaaccaaacgatcaaaccagtgcgttttaatggctcacgctcgctgcatttctactcagagcacaataactttcagtttgataaagaatcaacaatgaagtggtatagacgcttcgatgcggctagtgcggagctggataaggaagatgaaggcaaatcatttgagccggtgcgtatcacctgctggagcggcgtggttgctccgtttgccggacgctgggcgaccattgtcaacggtactatacagtacgctcaaatccgggtcgcacaggttatgcctgattttgaagacaagcatggcaataaacaccgcgcctgctggtcgctgttggagcgcgatgatggcggagacgtcttcgctataagatcggaataa

SEQ ID NO: 454464 - DNA, 1284 bp, Serratia marcescens
atgaccatgcccgatttacccgcccccccgacagcggatatccccaccgggacgaacaataaggtctgggactgcacgacaaccggcgttgaaatgaccgagaagcagtcccgactgccgaccccggataaccgtcagtatctgcacatcaaagtggaatacgccatgcgttttcctcgcttatccgctgaaattcgccgcgacggcagaagctatcagatgagcctcaagcaactgatgctgagcgggcttatccggctggatgaaatcgcccataattatcagtggtggtataaggccgaagtgccgttcgatatgcggaccataccaccacgcccgttcctcagcagtacgttacttgcagaaggccccggaagacggcataccaccaacccctttccggtgccgggcaagggcatctaccgtcgccccgatatcattatcgtgaagaacaaatacgaccgctggccggggctggcagggccggatgcagaaggccagatgcatgtggataatctggaacggctggttgaggtcaagtttccgggggatagtctggacgaggagcaatacggagattacatgaaaattgtgggcagaaatcgcgagcgtatgaccattctggagatccacgactgtcgtcctgaggaacagcagtgggttgaccaggtggtcaacgtgacgatgaaagcctggcagaccaacggggcgaaatactggccgctgttcctctacccaccgatctttactccccggcctccggctctccccactccggcgaagatagaaccgtggagctatattgggaaaaccgttgccgacctcagtgaagggatcgttaacaacgtcgccgcaggctggaatgccctgtcagacgagatgcaacagacgctgagccaggttgccggctggctgaatgacaaaggtgaatgggtctattatcaggggagccaggtatggcagtgggtcagcggtacaggactgcgcgtggcatcgtggacggacgaacagctcagagcggcatggtcggcgatacagcaagcgactgatataacgctggagatgttaaaacaggtcgactgggtacaggtactgacggatgtggcgattactgtcggtgtggtgctggtcgctgtcggcgtgggggggctggtggtgacgctgggcatcccggaagccctgctggcggcatttttgctgattgtccgtctggcgatcgctgcgtgggaaactctggcggcagtactgggcgccggagcggtcggcacactggcaacgcaataa

SEQ ID NO: 454465 - DNA, 2493 bp, Serratia marcescens
atggaaccagtctctccctattctctgacaatcaacaacagcccggtaagtcccgatgtactgcgttttcgtggtactgaagcactaagccgccccttctcctggcgtattgagttcaccacccggcaagacgtgacaggcagtgacgtgctgctgaagtacgccagtctgttgatgcgcgccggtaagagcgtgcatggtgttatcacccgttttgagtggctggggaccagccctgaccagtcgcactacgcggtgacgctctcttctcgccttttcctgctgaacctgacccggcgctgtgccgtatatctgaataccagcgtgccggaacttgtggagcgaatactgcgggcccacgggttggagggggcggatttcaatttcaggcttgaacaaagctaccctcagcgggagctgataacgcagtggcgggaaaccgatctcgaatttatccaacgcctgctggcagaggtggggatctggtatcactgcggagtgagtgagattaccgggctggataccgtgaccttggccgacagccagcagttctaccagtttggagaacatctgccgtaccaagagccgtctgcgttgtatgacggtgccgccgaatctgtctggggtctgcgcacctggcaccacacggtggccgggttggtccgcacccgcgattacaactaccgcgcggcggctacgccaatggattcgactgtggtagtccgcaacgaggccgtcactaccggggaacattaccgctatggcggcccgtttctggcagttggcgatgacagcgagccggaaaccgaaagcggggctttttatgcccgacttcaccatgagcgtgaactgaatcaatctgtccgcctgcatctgttcagcaacgcctgcggcctgacaccgggtcaggtactggaaacctcaggcagcacaattcacgccctcagtgacggggtactcattaccttcacttctttctgggcctcccgcgattcacgcctgcatgtttcggtctgggggatgccttacagcgaacggttctgctttcgccctactgaaatcccccgcccggtcattcacggcacgctgccagcgcggattgaaagccgggagcaaggcgacacttacgcccatctggacaacgtcggccgttaccgggtgaagctggacttcagccatgaggatgccgaaccgggctacaactacctgtggatccgtcaggccaagccctattccggcgagagttacggctggcacacgccactgattgacggtaccgaagtcggtattgcctatgacgacggcgatatcgaccgcccgtatatcgcccacgcgttccacgactcagcccaccaggacatcgtcacccgcgagaaccgcagccagaacatcctgcgcacggcggcagacaacgaactgcggatggaagaccagcgcgggcaggagcacatcgcactgagcacgccatttggcagcacgcagctcaatcagggacatatcgttgatcggcagaacacacagcgcggctccggctttgaactcagaaccgatgaatacggtgtaatccgcgtagcaaaaggattgtttatcaccgccgacgggcagcaaaaagcggcaggtgaagtgctggatatggcaacggcccttaatgaaattacactctgccggcagcagctgcaagcgctggcggccgccgccgaacaggcacaggcgctggaggcggatatcgccagccagatagcgatgttcgaccagcgcctgcaaccgctgaacgcgatgatccatttccacggcccgcagggcgtggcgttcaccagtggcgaacatatgcagctgaccgccggtaacaatgtggcgatgaacgctgcgggggatttcagcagcgggtcgcagggcaacaccgccatactggccggcgaaagtgtcggcctgttcgcacgcacgggttcactgacgctgaacgccagcgaaggtccgctgcaaatccaggcgcagaacggcgcaatgcacatcagcgcagagcaaagactgagtctgatatcggccagtgacatgctgtttgcgggcaagaagaaagtgaccttaattggcggcggcagctacctgaaaatcgaaggcgggaagatagagtacggcacggatacgacctatacgcggaaaataaagcggactcaccttacaaggccaacggcaatgcccgtatcatttccgctgatgggcacttcgcatatttattccgccgtttaccagctccgtgatgaacagggcaatattctggcaggggtaccttaccacctgaaaacagcgtccgggcagctcgcaacaggctacagtgacgatgagggctggaccgtgccggtttataccccggaacaggaagacgtggagctgcatattgtgcagagcaagccggcaccgaaagaaaccatgtggtttatcggtgatgaggacaatcagcaactggcaaccgaactcagggagaagatgtcatga

SEQ ID NO: 454466 - DNA, 243 bp, Serratia marcescens
atgaataataaaaaaggtcaaggctttattaaacgtcgcaccgttggcgattacattcacgccgttgattctggcgagattactttcgcatccctgaagcgccagaggaacagcgctaccattacagaccgccgccgtgcaatgatttgcctcgcagtggcattaatcgaacaacgccagaacatgcaacgcatcgcagagctgcaagaggcattagatgaagaggacactgccaatgagtaa

SEQ ID NO: 454467 - DNA, 168 bp, Serratia marcescens
atgagtaaagttagggttctcttagagatagattccgatttgtatggctcaatatctcagctaaacgcctccattggtgggagtaaacttgatgaggaaactattattaactacctgctggcgctggggttagagcaggttctagagcaggcagaagtcactgaataa

SEQ ID NO: 454468 - DNA, 162 bp, Serratia marcescens
atgaatatcacattcaacaatgaaacatataaaggtctattagacgaagccaataagcagagtaaaccaatggcacggctgattaacgaaatattagtcgattatgtaaataacaaagcccacaacgagagggataatgaagaagaacaacaaccagaataa

SEQ ID NO: 454469 - DNA, 792 bp, Serratia marcescens
atgaagaagaacaacaaccagaataataactttataaggagtgcatattctcacactatggtgagtgctgtaatcgtaaacgggaaaaaagaaaagtttaacgctaacgaaaagctcatatatggatacctgttagggtggagcaatacagttaaagagactggcggaaccattcacccagacaggatagatattggtctacattgcggcattgagcgattagcaacggttgacgagtgcctaaagcgattgaaaagtaaagggcttattagctgggttaaggggaaaggcaaaggcgttgccaatgtttataccgtctacgatatagctaccgttgaatgtgtgtatcctgattatgcaaaacagctatccggcacaaactataaccactcagcagaaacaacaagcgccgctgaaccgcttcctgttgaaatctgcgaatcaatgcccgaacaggaatccagaatcaaagcagcaccactttctactaagaagcatgaagccacaccacaggaagagcagcatgccatggtgttgcaacctgctgagaagcatggatctgacgccgtcagaccaccaccaaacacaccggagagggatagagatatggatttagattttgatgagctattagaaccgcagggcaatgagaatggcagtaaacaaggggagccaccgcaggaggatagggagcaaggggattatagggttactcgaacacccgtacatatccctgctgggatagatattgatgatcctgacagctgggatgaggatagtttgccgttttaa

SEQ ID NO: 454470 - DNA, 345 bp, Serratia marcescens
ttgacagacctgaatgagattaaaaaaacccgccgatttgaagggttcccactaacagatatcgaccgcaggaaggtggttgcgctgttagaagctaaaatcccagttatgattattaagcagtatatgagccatatcccctttaggattatttggggactggcaactaatccagaaagtttcccggcactgcggacagaggagccttatttatcaggacagaagagattgaggaaggcgagaaatatgctttcagagggatatgcctatgaagaaatcagcgcaatgagtggatatccggttaggattataaaagagattgaaaggaggaataatagttattaa

SEQ ID NO: 454471 - DNA, 315 bp, Serratia marcescens
atgaataataaacaatcttctttgagggctgtgaaagatgaactcaagttccaaatatgcaatacacagaagaatacagaaatatcgaaacaagctcaagatgacccggagcatctttatctggtcactgttaatcacaatgatcatattaatggtgtggtgaaggagtggattgccccattggattgttccattcctattccatatacagaagcggtatttatggtttccgaaggccagcgcttggctgtactgagaagcctgccaaatgacggctctgtcaccctgattaaaaaatataaaagggagaaataa

SEQ ID NO: 454472 - DNA, 1755 bp, Serratia marcescens
atggcaggagctaacattgtaacgaccactcaaaaccgcattgtatttgttacagaccactcaagctaccagcgcgccctgaaacagattaaatctatcggggcagcgtggcaaaaagccagcaacaagattaaacctgtaaaaatggatgcggggctgtcccgtgccactgcactatctcgtcaacaactggctgaccagaagaagaaaaaacagctgcttgacagggaactgagggctaccaacgcattacgcagggtttcatttgatattgcccgcctacaggggcaaagcatcacggaacgccagaaaaatattgaggcagccaaggcgattacgcgtgaatacagagaaggaaagatcgagctagctcaaatgaatgagcagatgcgccagcttaaaacaaaagcggttgcggctgcacgtgttaaccgcaatctagctaaatcccgtggacagaaacaacatcatgacaggtcaccggggagcatgtttggtgttgctggcgcggtgagtgcgggggcggcagcggcggccggtgctgggtatgctacatatcgaaatttggatactgcatcaacccgtgctcataatctgctgcaaattcaacggcagacaggagtagacccgaacgtcctgacagctatggcgcaatggggtgagcagcatggtgttgacagcgcaagcctggataagattcaggacaatttgaaagacctagacgagcgcacaggcgagtttgttactggcgctaagcgcaacaaggccggagagtggacagggggcgggcagtggacagaagcagccaacgccctcaagctgtctatggatgagataaaatctttgcagggcaagccattggaagctgcggcgctcattgtagaacgtggccagcagatgaaactgagcgaaagccaaatcaatcacctgttggagaatatggccgatgacctcctctattatcgaaaactgtttgaaaataacggtgcagagttgatcaaaactatacagcaacggcattccgatggtctgaccttcacaggcgatgatatgcaggcgcttgagaatatgtaccagttcaacattgcactgaaacagggcgctgagtctctccagaataagtttgtggtaggtctggctcagagcatcaccggaacagatgacctgaaagaggcctttgctatcctgcgccctcaagttcagcaacttggcgaatcaatgggaaccctcattagaggacttactaccctcattggttggcttccaacaaccaaggttaacgaggcgcagcagaacctgaaagacaactcacttgagatagataaaaaacctatcatctcggacaagacatggcatgactggatacccgctccccttcaggaattgttcaacattggccctaatgccaatagaactcctgcacctgttgtaacacctccacagccagcgattagcaaccctgtggttgattgggtttccaatatcaggaagccagaggtggggttcggaggattggaaacaagcccagcggctatgtttaaaccgccaactgtaaacatcccaacaagttttgctccctatgcaaactatcagaatcagaatcaaaataaatctgagcagagagttacgattaaaactgatgttaatgtcacaacaaacggtaagttccaagatgccattgatacgtctgttaactctgctatcagtgattatgacaggaatcagattaatatgattatgggtggtgctaactaa

SEQ ID NO: 454473 - DNA, 330 bp, Serratia marcescens
atgtcttatacctctgtaaaaaccattggggacatcctctgtgatgtaagtgacgtgacctacgccatgctggcatatagcacagttgcactgacagctgactttgagtcaggaagtgttatagatccagcatccggctcgctggctacgtcagcaagctcagacttcctaatcctgctgcaacctcagaaagcaggtgataccaccattgtggctattgatcgcaatgtaacggttatccgtgaggcgctggtcgctgctgatgctgctgcggttgatgccgctgttacctaccatctggcacgaaatgcaggcgtgcgtttcgcttaa

SEQ ID NO: 454474 - DNA, 1017 bp, Serratia marcescens
atgaatcaatatactatcgtaaatactgcaccattctctaaggtacctgttggcaggaacctgattacttctcttggcttctttgatgatcaggaactcatcgcagattacaagttgtcatttgaccatgtagttgggaatgacattagtgaacaatcccctgtggagcgtttcaactattcagaattcactgctggtaccatgcctaagttctcaacgcatgccattgaaattccgcactttgtagagaagaattttgtcggttcggcagattttagcgggattagggcgatggccggccgctgtgatcaggccgctgtcaaagcagatctggttgctcagcgtcaattgctccagtatcagcgctatctccgtactacagagctggctaagcagcgcagtttgtttgaaaacaagattttgcttgataatggcaaagaaatcgatattgcagctgagctgggcattcagcaggcaaccggcccaactctagacctaacggatctgaccactcacccaatgaaaaccatgagcgtgatgaagaacaatcttgttaaaagtctcggtcagttgagcaaccaggtgactggcctgtttgtgttcttgggggatgcagagttctctgctctcaagtattcaccagagttacgcgaggattatcgctatgtgatgaatccttcagtcaatccgctcactaagttcaacactgagctggacgtattcgagtcgatgacccttaacgggatcacctatgtcaatgtttcgcttgatgctcaactctcagcaaccgttggttccggccggggctttatggtgcctcgtttcgacccgcaagctggcgttatgacgcagttctcaggcaaggctatcaggcagacaaagatcaaccatctcgctgattggtatagttattatctggaggattcatacggccagattcaggtggaatcagaattctcacaggccaacattgtgaagtaccctgttgccgtgatctcgttccctatcaccatgtaa

SEQ ID NO: 454475 - DNA, 201 bp, Serratia marcescens
atgattattcgtttttatagcgacagtgacgaaggtcaggcggtgctcctgaccattagtgatagtgatgcgcttttgaatatctcggcgcttgccagccacctaggcatcccaatcgcaacaatgcatgcatgggtgaaggagttcggggtcagcgccgcgatcaagaaagccaagcagaagcagcagaaagctgattga

SEQ ID NO: 454476 - DNA, 165 bp, Serratia marcescens
atggctgcttatgaagagatagacctaacccctgatgagttagcatttcagtgtctggcgctcgctgaagcggcgttatgctcgcaggatagcgcagttagagaggtgttgttgttcatcatcagggaaaaggccgaacagctttacactatgctgtcagaataa

SEQ ID NO: 454477 - DNA, 327 bp, Serratia marcescens
atggtaactgatgaggatgttttagcgttttttcgtaaagaactgcccatggttactactttgcgtttgaagcctgtcccgcttgagttggataccgttttacaagagttctcagagatagatgacttggcgccggcaatagataggtacagcgaaacattcaatattgatgtgtccatactggatattgaatgttattacccgtgggcgatcccatggtttttccgcaaatggtttacgacaaaacccgttaagcagtccaaaaaacctcttaccgtgcgtatgttcgcggagtctgccaaggccggtcgctggctgtatgattaa

SEQ ID NO: 454478 - DNA, 504 bp, Serratia marcescens
atgaaaaaatcattggggaaaggaatatgtttgccattatttaccgctgcggcatcgatattattcgccgccacttttatgcctgccacttcattggcccagagtaagtttaacatgtctggttttttacagcagaatcctgactttaagcccggcgccgccaactggtcagcgcaagagttgatgcctgatatgtcctcctatgttacaacctacacagacaatggattaatcttggttaaactctcgctggaaaagtatagcaagttcggtaatcatgccgttttacatcaatgtgaaaggataggggataagtatatccgctgcggtttttcttatcagccgtatagcgccggctctcgacctgttagctatagagtaacctatatgctgacttctcctagctattatccgaatatattaaggtgttctgtcgatggctactttaattacggctatcaggagtgcgttacgaaaaatgactggcgcggtttattaaattga

SEQ ID NO: 454479 - DNA, 285 bp, Serratia marcescens
ttgctgtataaaaaatacaccgagctgcagccaggaaagcgctatcgtttcagcattcgggcgcgccgggataacgactataaagtgatcccggaactgtcgctgcgtgttgcaggcagtgacattacgccgttgacaacattaaaaaacaaaggcgagtggttaaccctcacaggggaattcaccgccgcacagggcgaaaatctgctggaaatattcagccataaggcgagcggcgacggcaacgatttcagcatcaccgacattaaggtagaagagatctga

SEQ ID NO: 454480 - DNA, 378 bp, Serratia marcescens
atgccagaatatctgggctatcagcgaggtcagggatatttttttggctgcatccgaaagttgcaggagaattctggcagcgtggtgattggcgacaaatgttattatcgcctgctgtgcggtattcccggtattcgctgggtgtgctttattgatgcctcgctcgcggtagctgaaatggcgcgctgttttaaatctattctgcgccgccggtcttattgtatgcggctcagcgaatatcggctgaccagcgttgagacattttccgtcagaaccagaaagatcatcgggctgttgctgcaaggctgtcccccgcatgatatcgtccacgagttcggcattcaggcgaagacggtcagcctgtataaagaagcgtga

SEQ ID NO: 454481 - DNA, 759 bp, Serratia marcescens
atgaatggaattcgagtatggcgatgggcactgttgggcggggtgctgtgcagctttctgccgccggccggcgccgagcaggccagaggtgtggcggccaaggcgaaaatacaggcgctgacctgcgtgctgacgctgtcggtggacggcggcgagcaggcgttgaactggcgcgccggcctgacggtgcgcccggacggcagcacccgggtggtgggcgggccgtcggcgctgcgtcgtcaggtggtggtggcgtttcagaacccggagtggcatcaggtcgatccgatgacgggggagccggtggactgctcatcggcgcgcaatggcgttggcatcagctttgccgcgcgggatacgccgctaacgctgaaccagccgcacaaagacgcccggatggggctgatacccgcagcgacgccggcgacacccggagagacgagcggttactttgagtattacgtcacctatgtgccgtcggtgatgcaggcggcggccggcagcgatctgctgctggagcagccgccggacagcgcgcagtaccgtaatgagcaggtgatgccgttgcatggcctgggagattccggtgagatgcggctgatgttccgccccggcgcggctcccgcccataagctggggcgctacccgtttaacgtctggctggaggacaattataccgatccgcagaccgctccgcgggccgatatggaggataaccgctacctgagcagcctgaccgtgacggccacctggctgtaa

SEQ ID NO: 454482 - DNA, 861 bp, Serratia marcescens
atgagcaaactgacgggccgcgccctgctggccgcactgatgatggccaccggcggcacggtgctggtgagtccggctggcggcagtgatggcggcaccacgctgaacctgaaggcgcgtatcgtggagtccacctgcgccttttcatttggcggcgccaacggcgccacgctggattttggcgaatggtcctacgtcagtatcggcacgccggcggcgcctaaatatatgctgacgccggtgcgtggcaatggggaggtatccaccaataccacatttaacgtcagcgtgacggcggacccgaactgcccgaaagagggaaaaatggtggtcatggttggcgggtttgatgttacaccggggactgcgggttttgcgggggcgaaagtacgggaaggagccccttcggcggtgttgactgcgcctcgtctgaatgcagatggcagtgaggccgccaccccctattattttccttatgatgttggcttttatatgtcacaggatagcggggactgcactatcgcatggtatgagatgttcagtcatgatggcacctatttgacacatgatgggaaatatttacattgtactgcagagcctacaggatgggggcgtgagcagaaaaaaagttctaacgcacagtctgatggaagagtctttgtaacgagcggaaccaggccaaatagctatatacgagcagatggagttatgggggtaggtacgcctgataaatctgcaaccacccagctcatgatgttctttgctggcccgatagagatcaccaccctttggggcgctaacccgccgccgccgggcaccatctttagcggccaactgacgctaaccgccacttatttatag

SEQ ID NO: 454483 - DNA, 813 bp, Serratia marcescens
atgaacagagccgtaatcaagccgctgtgctgcctgctggcggctgggctggtcagcagcgctcacggcgcgccgccgccggggatgacccaggcgcagggggaagtggagttgattgtgatgccccgcccggtgacctgtgagcttgcggtgggcaatgacggcgcgcatggtgacaacgacggcagcgcgctggtgtgggcagtgggattgagtgaaaaggcggaaagccaccccggagccggggacaatcaggccagcattacgcgtgcggcggcggcgttaaagcgcacgttcagggtcgggtttcgtaatccggccgccggcgacggcagcatgattgaaaacggttgccggctggcggcagagagcctggcgttgtcgctgcgggcggcggtgcgtgaagaggccggcggcgtctggccagggaaaatactcagtaccgacggccgcacctggttcagctacggcgtggcggtgaatgaagcccagtttcgtcaggtagcggaaaccgccgccggcggtcaggagaagattacggtcgacttcccgagcagcaatctggggacgatgaacggcgcgacggtgctgcgggtagacggtaccgtgggtgaccaggtgattatccgccgggcgccggagagcgccgccccctcctttacgctgggggagtacccgtttgaggtctacctgcggcgggattaccgggggccgacggcacccagcgtgcaccggctgacgggcaccagcggggatgacagcggggttaaccagtaccgcagccactttgtggtaacggcgacctatggatag

SEQ ID NO: 454484 - DNA, 837 bp, Serratia marcescens
atggaaaatatcatgatgaaaaaactggcgttgagcgtggccgtagcagcactgatgggcacctctggcctggcggttgccgactcgacgccaaataccggcgttactgctgaatcccagatcgatctgctggtggtgccaacgaccgttacctgtgaaatcggcgtcgacaacggcagtgcacacggtgataacgacggtactgctctggtgtggaacgtcggcctgaccgagaaaggtgaatcggcggccggtgccggcgacaaccagtccagcatcaccgatgcgcagtcaaagctgaagcgtctggtttccatcggctttaagaacccgtccgtgggtgatggctctgccaccgttgcagataaagactgttccctggcagcagacagcatgacgatctccatgcgcgccaacgcgctggacgctacggcacctaacgccgcctatccgggcaaggtgcagagcagcgatggccagaagtggtttaactacggcatcgccgtgaatgaaaacgcctttaccaacgtggcggaaaccgctgcgggcggcgccggcaaagttgagatcgacttcccggcgagcaccaccgtgctgaacggcggtaaggcgctgacgctggacggcggtgcggactccaccgtgaccatccgtaaagcatccaccaacaccgatgcctcgttccgtctgggccagtatccgtttgaagtctacctgcagaaagactacagcggcatcagtgcgccgaccgtgcacgcttccagcggcaccaccggtgaagataccggcctgaatcagtaccgcagccactttaccgtgaccgcatcttacaactga

SEQ ID NO: 454485 - DNA, 918 bp, Serratia marcescens
atgaaagggatagcagcggcggtactgatgggttctttgccgctggcggcgggggcggcgctggaggcggaagtgctggggggcgtatcacagcatgccaacggcatggcattttacggccacctgtacgtgcccacctgtgaggtgagcaccagccgcattgagggcgggctgttggagaacggcggcggccctctggcgggaagccatacgctgcgatttaccgaaatgtccggcgggcgctgggcgcgcaagtcgccgggtgaggtgctgcaggacgggctgattaacgtggtgctgaacaactgtacgttgtcgcagctgcgtctgcagctgcaggcgggcgagacggacagcgacccggcgccgggcgcggagacgggcgtcggcggtgcgtttatcggggcgatgacctaccaggggatcccgtccgcccagccggaggtcgactggggcaacgacgatccgcgctggggggatgagcgggacgtcagcagcagccgctggctgtattacaccgtgggggccggggatgcggtggtgggcggtgccggcacgccgcggcggctgcggctgaaaaaagagagcagcgttatgcagtgcaccgctgcggaatactgcctgctgaagctggataactcgacctacttattcagcaatgaatgggggcaggagaaggtgaatgggagcggcggcgagtgggatggcgcctggagcgatgccacctcgctgattaacgatattcagaacctggcgccggcggggcaaggctatttaccttccaatctggtgagtgccacctcgctgacgctgccgctgcatatccgcctgcaccatggttcccgggcggaggcgaagaccgacgtgccgcgcggggagtatgccgccacgctgacgctgaccctcagcttcgactga

SEQ ID NO: 454486 - DNA, 1176 bp, Serratia marcescens
atgtcgatgaatcagggttacacatcggagcgctatccgcttcggacgggcctgcgggcgctggcggtcacatccttgctgctgtgtgggctggtgccggaaggcgcagccgcgccgacgacccgcctgtatacggtcgcgtttggtacccaggcgttgacggcgccgctgcgggtgagcgacagcgtgccgctggtatcgcggatggtgacactgccggcggtaagttgcccttcctgcagcgatgcgtctgcaacctatacctacgacgaagtgtgggaggtggatcgcggcgtgttggataccggcctgtcgcaggcggtaagcggcgccggcgccaggcagcggtcctgggtgtttcagagccgtgcgataggggagtcctcgggcattgcggtgatgattcgtcagcaggatcccactcagggacgcgactgtgaagtggtgaccggcggcccgggcgagtaccagtgccgcagcatcggcaagaacggctccgagacgccggcggtgccggtcgaggtgggcctgatggtggtaaatgcttcggtaacgccgggcgggttggctacgctgaaccgaccgtttctgacccgggtggtgacgttccggcaaggggacagggtgatggcggagtaccgcgacgcgattaccgtcagcgccagcactaccatggcctcttgcaacgtcagcgctggcgcgctggtgtttaacctgccggcccgcagcctgattgccggcgggccggccagcgtcagcagccggataactacggcgccgccggcggacagcgtggaacgaaccctgaacctcagctgcgtggggaacacccggctggacatccgtttcacgccgctgaccggtacgttggacagcgaccgcatcctgcaggcgcagtccgcgcaaggcacgcccgggcggatggggtttcagctgtggtaccgctccagcgagtggcccggcggcgacagcgcctggcgtctggcgcagtgggatggcgccagcgagacatcgttgctgagcggtacgccgttgctgaggccacggccggcggatgcgccggatatcgcgctgaagttccgggccggctacgcctggccggcggatacggccgtcagcgcggcagacgcggggccggtgacggccagagggttgtataccctcagttaccagtaa

SEQ ID NO: 454487 - DNA, 2580 bp, Serratia marcescens
atggataatctgccgggaaaaatcggaagggattggcgtctgcgtaaaaagcctgaggggcatattcttctgggggccatattggccgcgctggccggaaatgtttccgcacagcaggatgaaccgttgaattttgataccgggtttctgaagttctctgatggagaatcctcgtcttcatttaatctggactatttctcccgctcgggggggatgttgcccgggcagtatgaagtcaccgtttttgttaacgataaaaaagttgatacccggattgttgattttatctcccgcacgcaagaggctggccgcctgcaggcatcgatccgcgctgcggatttgaacgcctggggcattcaaccgcaggcggagattgtctctgcgctgcaggcggtgcgcccgccggaaatgaaaacggccggagaaaatagggcctatacgctgagcgagtgggtgccacagtctcaggaggcatttgattttcagagtggcgagctgcgcattatcgtgcctcaggcgtatgttgcgcccccgggctggttgcgcacgccgccggcgctgtgggaccaggggatgcccgcactgctgctgaattatgactattcgggatccttgcagaacaacgaagacggccgcaaccagaatgactttgtcagtcttaacgggctgctgaacctgtggggctggcgtttgcgccacgatatgaactggtcgcgcagctcgggggccaaagggcgctggaacagcctgaacagctggctgcagcacgactatgggttctggcagggcgggcagtttaccctggggcagacttcgaccgacggcagcattctggacagcgttccctttcgcggcgtgatgatgcagtcggatgacggcatgctgaacgccgagatgggggcgtttgcgccggtgattcgcggtattgccaacggcaatgcgctggtgtcggtgcggcagaatggtcaactgctgtaccagaaaaacgtgccgccggggccgttcgagctacgagatttttctcaggcctatgcgggtgacgtggatgtagagattaaagaggcggacggcagcatacggcgttttacccaggcatccgccacggtgccggtgctgcaacggaaggggcgggttcgctacagcctggcgctgggcgattatcatcagggcaatgacgtcagtaacggcgtgtcacgccgttttgcactggcgtcgtccgcctggggcatgggggtcaataccaccttgtatggcggcgcactgctttcccgtgattatcagtccatggtgctggggattgggcaatatctgacgcgactcggggctttttcggcggacgttacccatgccagtacgcacctgccgaggcggggacgcagtcagggtcaggcctaccgtttcgcctgggccagagggtttggcgccacatcgctgaacctgatggcgtaccgttatgccacccgtggttattactcctttaacgatatacagcaaatgccgaaaaaggcgctgtcgcaggaagagggataccggcgcggccaccagcgttcacgtctgcagatatcggcttctcacagcctgggaagctacggttcgctctccctgtcgggcagccgggatgattactggaataagtccggctacgggcagaactggtcggcgagctacggcaccagcctgaaaggcatttccgtatcgctttccggcggatacagcacctcgccgtatctgtcgcgcgccgataaaagcttttcgctgagcctctccatgccgctgaaccggctgtttggctcgggtatgtcgtcggtgaactactccaccacggcgcagaacgcccgtacccagcaccagatgggcgtcagcgggtcattgttacaggatgacagcctgagctactccctggctcagggctgggggaatcaggggcagggggcgtccggcaacctcaacctggggtataccgcgtcttacggcatgatcaacggcggctatggctggcagcgtaacagccggcagtggaactatggcctgagcggcggcgtggtggtgcatccgcacggcgccacgctgtcccagccgctgtcgctggaaggggccagcgcgctggtcgagatgccgggcgcatccggggtgaaggtgtcccacggcaatatccgcaccgactggtttggctacgcggtggtgcccaacctgatcccttatgagcgcaacgagatcacggcggatattcaggatctgcacgataacgtggagctgaaggaaaccaacaagctgctgattcctgccaaaggatcgctggtttctgcccggtttaatgccgaagtgggccgccgcgtgctgattacgctgcagcgcagcggtaaaccggtaccgtttggcgccatggtgtcggtacagctgccggatgcggtcagaacgggcattgtggccgatcgcgggcaggtctatctgtcggggatgccggacagcgggacgctgacggccacctggggacgctatgaggatgaacgctgtcaggccgagttccgtctggcgaaggataacggcacttttgcggaggcaacggcacaatgtcgatga

SEQ ID NO: 454488 - DNA, 711 bp, Serratia marcescens
atgaaatttacacttggcgcattgctgctacttactgcgggcctggcgcaggctgcaggcggtgtttatcttggcaccacccgcgtgatttttgattcggcaaataaaacgacgacggtgatcgcaaataactcgtctgagaaagatacctggctgttgcgctcctgggtttcgccttatacatcaaaaaacaaagaggcctctgcggatagttccgaagggggtgggcattttgtggtaacgccgccattatatcgccttgatcctaaggggtcggttcaattgagaattaaccgaactggcggcgtattgccggaagaccgggaatccgtattttattttaatgcgttggccattccgccaaagcctaaagaggggaaaggcagcatggtgcaatttgcgctgaatacccagataaaattattctatcgcccgcatgcattaaatgaagagcgcgccgtggcgcaggcttataaaaaaataaccgtgcgaagcaatggtgcgttgctgacgctcagtaacccgacgccttattatctgacggtgacgaacgtgttgctcgataatggaaaaggcgtggcctttaacgatccgatgattccgccattcggcaagatctcgtcacccttgtcggtgtcgaacggcacgttgagctatcaggttattaatgactacggcggtcagacgccgcgtattaataaaaccttctga

SEQ ID NO: 454489 - DNA, 696 bp, Serratia marcescens
atgagtaagagaagtgagattattgatggctataaagcctccacggcaaatagaggtttaatttacaccgaagtactcggttggatcgatctaggccatgctcgaggtgatgacgttaaaaaactaatgggtaagttgagggaaggggaagcatcaggtaaaaagtattatgatgttaaatacatccagtcaatgctggcgcgcggcgttcttcgtactggaaagtatattgaatggcgcataaaacggggaagaacctattatgagcaacaaagtattacgctcgcaatgatgatgacgtgcgcacgaaaattcgaagcattccagtcagcattcccgaacaaccttgttactgatagtgggttcagcggtgaggatttagtatctgacttattgggtttctaccgtgtaatgtctatccataacccattccatattctccgcccactcaacaaggatgaagccttaagacgttgggatcactatggtccgataggctcttttaagaatgagagttttacaccgctattgtttcctgatccggctagatttcctcacgccaagccatattggtcggaactcccaccttttatgaaaaccatcatgccttacggtgacttttcatctgggaatgtctctgtgtctacaaatgacggtacttacataaaaatagggaaagtagagtcaagactatga

SEQ ID NO: 454490 - DNA, 423 bp, Serratia marcescens
atgaaaatatcaaaaaaaataatcctgagtgttgctaccgttgctgccctatttgcctactattggcccacgataaccatgaatttcgccagcagcgcgcaatataccgaacaggatgaaagagaatatgcgttttacacccctgaattgctcaagaaaatgccacgcatatcggagcgttatcagtttgattataccaacgtctccgggccgcaggccctgatatatacggtgacattttatggcgccgatgacacccgaaaaatcagcgactatctgaccgccgccggttatcaacggcagcctgaatgcctttttgccggtgaatgctggacatcggctcacacccattatgcggtaagcgtagtaaagcccgacggtgccaaagaagtcacggtacaggtcgaagacagctcgcagtaa

SEQ ID NO: 454491 - DNA, 336 bp, Serratia marcescens; identical to SEQ ID NO: 442485

SEQ ID NO: 454492 - DNA, 153 bp, Serratia marcescens
atgcaacagaaaacgacgctttaccccgtccagatcaaaaaaaccgtaccggcgggccgtcgtttcaatccgctccccattatgccgtgttttacgccgctgcgacaaacgcgtaaatcgattcagcgcaaatcagaggcgggggacgattaa

SEQ ID NO: 454493 - DNA, 477 bp, Serratia marcescens
atgatgattatgaaagatattgttgatgaaattaaaatccttgcctcacagtatgaggaagagctgccttgtggtgttgattttgatacttcactttatggttatgattttgaaggtaaaatacaggtggcccctaaagaattttggcggcagtatagagagtttgttgagttattagatggctttgatattgatggtttttgcatatttggaataaaaagtcattttgaacatggaagagtcattctagattataatcgaaaaaacactgagatcgccaaaaactcccctgcattaacatttgacgactatcaatattgtattatttttggcgattcgtcgctggatatttacacctacgacgtgcgtactaataagtgggagtccagagaccgctttcagtatgataatttatttattagctgtgatactctcactgaatttttaatggcattgatcccggaaatccgcggatga

SEQ ID NO: 454494 - DNA, 1152 bp, Serratia marcescens
gtgaaaaaattacccggcaatctgtatcacctgttttatgatgagctaccgccagaacgctatgacaggatcatcagcccctataatgcatggcgcgagatatgccaaaattatgtgttagatactggctgctccttcgggtttaatatgttcggtgatgatatacagctacgttcgcgatgggataatcgtgtggtgaatcatactggtcgctacgcacgcaagttaaagggcgatatagaatgcggcaatgttgtttacgttgatgatgacgaaatgtggagcagcacccgttttgctttttatatcaatagagctggccgtttggtgagcagtggtgaatttaacttttttgcgttgaacggtagcaaccgcatcattgactactacgagcaggcgataaggcgcaggggggaacgttcgcgacctttgccaacgtcaaagcctgcggaatattacacaccaccccagcacgctcaagcagcaaaaaagcagcttagcatgctgaacagtaaagccgttgggcggttgctggccgcgggaggtatttataaccagaaccctgagatgtttgcggatacagccaagaaattaggtagcggagctgctgagggttttggccaagtactgaatgagcaaaccgccggatcgctggtagctctttcctctgtgctgatggcgggacgggcatcgatcgccgggcgtctatccacggctgaactggaagagctgaacaaatatttgggtaaagtgagaggtgagaaatatcttctcgacaatattgaagttgtcaaaatatcttatgcccgccgcgatagagctgaactttcagcgttacgaaaccagtttcgtagtgtaaaatcgcaatatttgcaatcgataatcaacgatcccaaggtgaaaaaacgctttaatgctgaagagctggcgaatctagccagcggcaagcgccctaataagctgtgggatgtgcatcataaattacctctagatgatagtggcactaatgaatttaacaatttagtactaataaatagagacgcggaacatcttattttcactaacatgcaaaataaaatcaccaagagtatgagtgttggtgaaacaaaagaagtcttatggcctatgccaaaaggtaatatctacccataa

SEQ ID NO: 454495 - DNA, 933 bp, Serratia marcescens
gtgtctgagcagcaagctagcgattcagctttaactcaaccggaagtaccagcagttgcggataaggtcgctgcggtgatcgtctcatatcacccagaattgggtaacctgagaacattactacaagaactaaagaaccagaatattcctagtgtattagtggataatggctccttgaatcctgaggttgttaaccaactacaagaaatcgcaaccgtggttcgtcttgatgacaacctggggattgcccgtgcacaaaatatcggtattgagcaagctcatcagattcatctagctgagttaattgtcttttttgatcaggacagccgcatcgacgatcattttatcgctggtctgctgcacgactatcaccaagtttcagcctctaacaagatcgcagcaatcggcccagtatttaccgactcacgctatggcttctactatccattaattaaggtcaatcgcttcggatggcgcaataaaattaatcctcagcagaagaaaaatccgtttgaagtaagcatgattatctcttccggttcactgatcccgatgaacgcactaaaagacattggcatgatgaatgaaactctattcattgattatgttgatactgaatggtgcttacgagctgtggcgaaaggttataaaatatatgccgcaacatcggccagaatgtcgcatgcgatcggcgacagagcaatcaagctcttggcatggcatattccgatgcattcggcgtttcgcaggtattaccgtttacgcaacggattatacctttgcaaaatgccgcatatccctctactggtaaaggtcagagagaatatttttaatagcctgcatcagaccctgttagtcttgactcaaccgaacaaaaaaacgcacctggcgacatggtaccgtgcgtttaaggatgggatctgtttaaaatga

SEQ ID NO: 454496 - DNA, 858 bp, Serratia marcescens
atgaacgtagcagaagcaaaaaaacagatcgttgcgtctgttgttttatataaacacagcaaagaagatattctgcctacgctaaactcgctgttagcagaagatctgattgaaaccatcgtgctcgttgacaatgctggctgtggctgggccgatcaattaaacaatccgcgaatcacctacattaagtcggataggaacgctggttttggtcatgggcataatcaagctatggccgttttcctcgacgagtgcagatattttattatctgtaatcctgatattgagttctctcccggtacagtaaaaaaactctttgattttgcagagcaaggtcagcaccgttttttggctccgcgtatcatttatcccaatggtgaagagcaacgggtctgtcgcctgttaccaacgccggcgcatttattcctgcgccggtttgtaccgtcattatctcgcattctggacaaatcttatgagttgcatgcggctgattacaataaaaatttctttgccccagcgctctcggggtgctttatgtttattgaatccggcctgcttaaacagatcgaaggttttgatccacgttatttcatgtacctggaggatatcgacctctgccgcaaagcgctgcgttatgagaaaccgatattttgttccggcgccacggtaacgcacggctttgctaaaggctcatataaaagttttaaattaatgcgttaccatatttcttcggccattagctactttaacaagtggggatggtttttcgacccagatcgccgaaagctaaataaaaagtgcatccgtgaacttcctataatcgacaatttccgagaggaaaaacaagatggtaactaa

SEQ ID NO: 454497 - DNA, 1494 bp, Serratia marcescens
atggtaactaatgcattgggccgctatgctctcgcagggctggggcttgccggtatcgccggactcttgatattgccggtcaacgcagtgagtaaaagctttgcgattgccggcatcgttaattttttgttttttagttattatttcaaaaacatatataatcctgcatccatatttatgagtatgtttttattcatgatcggctgcagccaagcaaaattgacattgattgaacaagatagttttgccaactcaacctggctcacgctgtttagcgttatcctggtattttatgccatcgttgcggccttcatgctgcgtcatggccgtatcctaccgaaggaaaaacagcagaacagttatactatctcagctaaaaccatattctggtcaaacatcatttgtttatcagtagaaataattatttattattatgcaattaataagataggcagcattcctctattcgatgacaacgcacgcgcgaacatcatgccacatgtcattagcaaccctctaatgacactgatggttatccctacattctttattatattcaacacagcctatacgattcagacaaaaaaatatgggtatttattttttagcgtagcctacttaatattactgatacttcttggcggcaggataaatatattcatccctgtaataaccagccttttttatactttaattcaatatcagtttgcaaaagagaataaaaaatctgtcgccatcactggcacagcaatactgatcacggttgctgccttaatggtcaccatccctcttgtcagaacgcagatttacgttcaacaacatcagacgacatccgagggtcaagcaccgtccagcggcagcgactattacgcaaccatttataatacggtaaatacccatacccttgatgctcaccaggcagaagagaaaaccaagcaactacgccaaaatttcaagccgacaatgacgctgccgccgcagatgatgtcagtctggatcaatctcagcacagagatgcatgcgttcaacaagatggtgatctattttgacgaacacaatgacttcagagatgggcgcatgctgctgacaggtaccttccgctttatcagcaaatattttatgcctgatgaaaccctggatctggtcaaaatgggtgggtacgactggatcaatatcatgacctttatgcaaaaaccctatatggattttggcgtggcgggcgtggcaggctttatgctgctgtttaccctcgtagggatgacgctttatcaacgcgttcagcaacgaagaacgatgaccaacatgctgctgtatagctatttttgcatggcgacattgtttatggtgtttgataaccacttctactattccaccgtggtggtcaacgtacttctactgctgttgttcaaagcctacatgaaaattgactggttaaagagcttcaacgttagcaaaagcaaaaaaatgaacacagacaaggccatagatgcatga

SEQ ID NO: 454498 - DNA, 1260 bp, Serratia marcescens
atgattaaatatattaatcagcctctggtcaaaaactatgcgtccctattgcttgtacagggggggaacttcatcttccctctactggtttttcccttaattgggcgcagtatcggcgtcagcgaatttggtaacattttattttgttatatggtcggtttttatttctccatttttgtcgactacggctttaacttttcagccgtaagaacggtgtcaaaaatggacaaccatagccagcttggccgcaccttctataatatcactctggccaaacttacgctggccgcagctgctttattcatcatttttatgatgactatgttttgggcgaaacttaatcagctaagtgattacatgctaatctcatcgctactcattatcgcgtccatgctatcgccctattggctcctgcaaggtgttggcaaaatggcggcaggtgcaatgatcacgctgttatctcgccttgtgacgctggcattgttccttatattgcccatcaccaaaaacagtgccgctttgttactggcatttcccaacctgttagcttcattagtcctgctatactgggtgttcaaaaggtaccacatcggcctgccccgctgccatccggcagaagtagcggcgaacttaaaggaaggatggcctatatttgtcgcaaactctattaccatggtttattcagccagtaatactatcctgctagggctgatttctgggccggtcgtcgccgggctgtacggcgccgctgagcgcctggttcgttccgggcttgcggtcatggcccccctctgtcaggctgcataccccatcatctgccgttataatgcctcagagtggataaagcgtaacaaaatcatcatgctcgttctggtatgcagcttagcttttggcgcctgcagcttcatcgtacttaacttcttttctatgcaaatcatcaccatacttttcggtgagaaatttatcgccgcggcccacatcttatccctactgtccgcgttgctactgattattcctccggccatcgtcctggcacagctctatttactcgcgaacagttacgataaacaactacagagaatatatgttatttgctctgcaacgcactgctgtcatatctattttatgattaaatacttcggtgccacaggcgcatcctattcactaataatcaccgaagcattagctactttgttaatcatcatggtgtcagtaaaaatacttaagcgtgaaagcacgcggaaaacgctgcaaacctaa

SEQ ID NO: 454499 - DNA, 858 bp, Serratia marcescens
atgagagttttattgacgggatcacggggacagctggggagctgttttcaagaccgtttaccggcaggatgggaaattctcgcgactgacagtgagcagttggatattaccgtcctggaacaggtgaaggcggtggtcagccagtttaagcccgatgtcattgttaatgctgccgcctatacggcggtcgataaagctgaatcggagcatgagcgggccagcgcaattaatcaggatgggccccggaatttggctctggcagcgaaagagtttggctgccgcctggttcatgtgtcgactgactatgtttttgatggtgaagctgataagccttactgtgaacaggacgacaccaaccctttgggcgtgtatgggaaaagcaaactcgaaggtgaaaaagcggtgctggcggttcagcctgaagcaataattgtgcgtactgcctgggtgtttagcgagtacggtggtaactttgttaagactatgctgagactggcgcaagaacgcactaccttaggtattgtctccgatcagcgcgggtgtccgacctatgcgggggatatagcacaagcgattatcgtgttgttgcaaaatcgtgcggccggagggatttatcacttctgtggtgataaggaagtgagctggagtgagtttgcacaatctatctttagtattgcggtcgagtctggcgttttagcgcaggcgcctcaggtaaacggcattggcactgaacaatatccaacgccggcgaaaaggccaaagtattccagcttgagttgtcaaaaaatcagcgagaatagcgttgagccatctaattggcagttggctctgagtaagataattccaagttttcgctaa

SEQ ID NO: 454500 - DNA, 1014 bp, Serratia marcescens
atggcgattttagtcactggtggggctggctacattggttcccacaccgttcttgcattgttggagaggggtgaggacgtagtcgtgttagacaatttgtctaattcttctgaagaatcattacgtcgcgttgctcgtttggccaataaatcggccattttttaccgcggggatatccagaatcccggtgacctgaggcaaatttttgacaaccacgcgattgatgccgttatacatttcgcagggcttaaagccgttggtgagtctacccgtttacctgttgaatattataagaataatgtgtctggcagtttggtcctgcttgaggagatgcgcaacgccggcgtacataagctgatttttagttcttcggcgacggtgtacggtgaacattcgccgattccctatgtagagacgacaccgatcggtgggaccacgagcccctatggcacatcaaagctgatggttgaacagattttgcaggattttgccaaggctgaaccgagtttttccattattgccctgcggtatttcaacccggttggtgctcatgagtctggagagatcggggaagatcctcatggaatccccaataatctgctgccatatatttcacaggtggcgatcggcaaattgaaccaattgggtattttcggtggcgattatccgaccaaagatggtaccggagtccgtgattatattcacgttgttgacttggcggaaggccacctgatggcgatggatcatcttggtgatatccaagggttcaaggcttataatctggggtctggtgtaggttattccgtcttggaaatggtacaggctttcgagcgagctgccggtgtcacggtgcctttccaaatattgccgcgccgtgctggtgatttacctgcgttttgggccgatgcttctctcgcgaagaaggagctgggctgggagcctcgccgaggcgtcgatgaaatgatgagcgatacttggaaatggcaacataaaaacccaaatggttatcgttaa

SEQ ID NO: 454501 - DNA, 537 bp, Serratia marcescens
atggttattagaaccatctggaaacagctactttctacagtgttattgctaagttccatatcagtttatgcagatgataaatgtaaactaacagctccagacactggttcaggagttactggatttattgcatggatggagaatgttgattcacaaaaaaactgcagtaaagatgaaataaaaaaacatattgaaaaatatttctttcaaacgactgttggcgaactaaataaactatacagcaataatgaatatgctactcagaaaataataaatagtcattttgtatggattagaggccgtgttaataaagtaaggttagcagctctgtctgggagtgctgttgtggagttcaatgatggaggggggatgctaaactctaatttttacattgacccatttttaaatggtgagatggaaaaagagcaagatgcaactctatccagtttggataaaggaacttcggtagttatgcaatgtaaagagattgagtttgtaatgagtaggatagtagggaagcaatgtcaaatattataa

SEQ ID NO: 454502 - DNA, 327 bp, Serratia marcescens
atggaaaaagagcactttaaagcttccgcgcagtatgacgattggactggtagtgttgcagcggatggcgcagatcaggaggattttagcgactttctgagagctaaaggtattctcaaggaaggggaggttgttaagggtatttctttttactctggtgagcgcctcctgcttgtttcagcatatgttactgatgaggagtatgggatgcgtcgagaacgtgttgagatgacgctcgaagagtttttcaaaacattcaaacgcttttcaatcaagatttcccggcatggggaatttgacgatcaggaaattgagtttaaagaataa

SEQ ID NO: 454503 - DNA, 318 bp, Serratia marcescens
atgcagtttgaaaactgggtcaattcactggttaaaaatgaagagacggtggtttttgttggttttaatgcttcgtttgactggagttttatcaattattattttcactcatttctgggggagaatccctttggaattgcggctctggatatcaaatcgatgtacttcggaacagccaaggtttcctggaaagcgacacgttccagcgaaatcgcgaaagttgtcaagccagaaagctttggagaccatgatgcattgcatgatgcccgatatcaggctgagcttttccgcctaatttatgagttaaataaaaaatga

SEQ ID NO: 454504 - DNA, 267 bp, Serratia marcescens
atgagcagagataaaaaattcccaaaactgcttttagtctccccacagacattgcagggaaaagctgtcgccattgtcggcggctccagggggatgggtcgtgcattaagccagtattttgccgcccacaacgctaacgtcacggttgtggatcagactttccgtaccggaatttttgcagcacctgcccgccaggaaacagcagaagggctggtgcgtgacatggttgtcagttacctcagtcgcatggctatcctgcctgcgtga

SEQ ID NO: 454505 - DNA, 246 bp, Serratia marcescens
atgctgggcgctctgaatgcagagcgcaattaccgtacaatggaagttcatatgaataccgttgcaggcaatgaaattatggtgctggaatcgagttggcgatctccttccatggcgagtaagtctaccaacagaataagctatctggtcgcagtcaatctggtcgttgctgtacgcttacacccaaactatctgataaaaaacaaaaataactgtgtcgaatccatgggtctgttcaatatttga

SEQ ID NO: 454506 - DNA, 1068 bp, Serratia marcescens
atgaaagtaccgtcatcatttcgttttcctgagcgattaatgaatagtcttaaggctcgtgcagagtcacgcaataaatcactaacagaacatgtccagaccgttttggaagccagcctggataacgaagactttgaaaaaaagcattactttgagctgatggaaacgccagagaaaagcatatccgacatttacataaagctcttcagtgcaatcaatacgcaggctacacgactaagcctgtcagaaataaagtttatgatgcattattgtcatcaagcatacctttaccacagccatgctgtaagcaatgactacatcagaaccattattcatatctcccttgcccttgtcagaatctcgttacggcataaaatcacctttgataaacattatgtttatcgctgtttcgacctctctgatgaaaacctcgatgaaaccatgagcgccatagaggaaaccgtcaacaagtgtgtagacggtacttatgcggaataccttacccgcccattagaaagtggtgcatttaacttggcgctgtatccaaaagaagccatcgacctcatcttcaccaaggaaagattacaaaaacttttcccactggtcactcgaggaattattacaaccacaaaagaaacctggaggataaaagaccttgctcaaaagacaccttcacaccgggtcgaattcagtgtcgatgatttaaacttttctatagtctgccatggaaatgaaataaggcatgatgaccctgcttcagttttctttatcatagaagggaaacacttcatcaagccctataaattaaaacgattacttgcaatcatccgtttaataaatcgtgatgaactagaaggattttcgacttcatataatgactccgataaagtttccatttggccaccatcacaaatagccaaaaatggtacaattgacattgattcattcagattgctgtatgaaccagagctttacaatgaatttaaagtgaagttcatcgatgccattaaagacgagcaaatgtcggctatactagatgctatgaagataatgcacggggacatttaa

SEQ ID NO: 454507 - DNA, 777 bp, Serratia marcescens
atgaaggggataaaaaggacactatcggtgatattgtttttgccatttgtaacttatgcatcatctgtcaaaaataaacatgagataaccgttggaataggaacacagtatgcacctacgtatattggagccgataaatatgacgtgacaaacgcaccttattttgaatggaccaacgggagctggttcgtgagctcagaaaaaggtattgggattactcattcctttgataatggtttatacttggggcaggcattggggtatacatggggtcgaacaactgatggtgattcgtggttacagtctggctccgaccacctaaaaggaatggggaaaataaacacagcattaaactcaacaacaactctcggttggtggatgactccctggattggcgttgaaggaaccattatcgcccccctgactgaaagccaaggagttaattacaacatagatgttaatgctgttttatttaatgatgacagcaacacgctaacagccagtggcgtcatgcattatggcgacgctcgttataataacacctggtttggtgttaatgagaagcaaagccgaaattcagagttcaagagttttaactctacagggggcttatacagtgtcgattatagtattaactggcaacacttatttaatgaaaactggtctggttacgcggctctacactatactacactggctaaccatgtgaggcacagccccatcgtgcagaaggatgattatttcactttcacaataggtgcattttattctttctaa

SEQ ID NO: 454508 - DNA, 150 bp, Serratia marcescens
atgcttgttaacaactccggaagtatcgccacaaataataaagaaatcgacaagggtttatcaatgtttaatcaatgtgagtctgtgaaacatgtcttaatcattgaaggcgatccggacccggtgaatgatagtggatcaaccggataa

SEQ ID NO: 454509 - DNA, 960 bp, Serratia marcescens
atgtctcacatttcaaacaatcgtacagcagtttcacttcctgaatcaccgcttggactttacatggccttatctatcggtaatctgcagccgcaccggttctggaactctcctcactttcgatttaaatttttttctcgttctctgcttatgccggtgaaaacttatcagttactgagtcttcttacgagtcatccgctttattatgagcttttgcaaaatcagccccggttaccctgtcggatccaccgcccgtatgtaagcgcagccttatccagtggagaaaggatgcaagccatcctttaccattacagcatgctgacctctttcctggatgttgaagcgttcaagagccatctgtcgctcgacggactctgcttgtgtcagtttatggggaaagatgatcaactatttatccttcagtttgtttcgacatgtaggctggatcgagaaggggaagccagcatcattctgagagacggttccggacaaatgctggcggaaatcacgtttgtgctttgcttacgcgataacaaaaggtctgtaattataggtgggttacaggggcctaataatgacaacgctcaagaacttgtccagcaggcaacaaaaaatctgtatggtttgttcccaaagaggcttgttctggagtctctaattcaggttgccagtctgctcagcgtggataaaattttcgcagtatccaataaacttcatgtataccaggctgtcaggtataaaaacaggggtaaacatttgcatgctgattatgactccttctgggaaatgtctggcggaaatatagacagccatggttattattcgatacctattaatatcatcaggaaaaggttaggcgatgtgccgagtaaaaaacgtgctgtatatcggcggcgttatgaacttaccgatgccattagtgagcagacacgtcaagcacttacccgaaagtgttcttga

SEQ ID NO: 454510 - DNA, 516 bp, Serratia marcescens
atgcctttagccttgaatcatgtctttgagattatgcaatttgcggcctcaaagccaagtacagcgagggaggtgcgagggatattgactcacgcatataagagttcgctgaagcaattcaccctgttttcaggatttgtctcgatgggggtactgggtcacattgaagatggtatttacaaggggcacaccatagtgcgggaacatcaccggaagattcagagaagcctgactgcctacattaaggaacgcatggatggtgcaccatgggactacaccgagtttgaagagcgcgttaaatacctttcagaggtgcatctcaccagtgttgccgaaaactttgcactcaatcgtaagggcgcgacctatagtagcgtaggtattgaactgttgcgttgggattgcctaactctcacacagcaggcattacttcataaacatgtcttgcatggtcatgttgggaatgcctccgagtttaaacctataccaaatgaaagccatgagccaataatctga

SEQ ID NO: 454511 - DNA, 309 bp, Serratia marcescens
atgcgaaaaaaatcatttactcatgagttcaaacaagagtgcgtcaatctggttcttcagcataagtacccggtgactcaggctgctgaaacaatgaatattggcctttcaacattacaacgctggctacggcagtatcgcggagagatccgcgggaacacaccgatagccagtgctataacaccggaacaacggcgaatacaagaacttgaaaagcaggtacggcagttgcagagcgacaatgacctgttaaaaaaagcttcggccttcttcgccatggaaatgaacaacgacaaaaagtcgcggtaa

SEQ ID NO: 454512 - DNA, 729 bp, Serratia marcescens
atgttgtacgcggcggctaagcatgttcacgctgaaatggatgccacatatggcagccggcgtatgtgcatcgagttacgagaacaaggttttaacgtgggcagataccgcgttcggcagataatgaaaaccttattactggtagctaaacgccccgggcgccatcgttatccacgcggtggaaaacctgttgtcgttgccgctaatctgttgaatagacagtttaatccagagatattgaatacctggtggtcaggtgatattacctatctgcgtaccgctcagggttggttatatctggctatcgtcatggacttatgttcaagaaaaatagtgagttgggccttctcagacaaaccggacagcgacttgaccgtccgggccttaaggttggcagtaaataaacgacgaccaacagggtctgtggtgttccatagcgatcaaggggcgcaatataccagtactcagttccagtcctgccagcaagaacttgatgtgacgggcagtatgagccgcaagggcaactgtctggataatgccgttacggagaggtttttccgcagcctgaaagcagagagagttaactaccgtcgctatgaaatccgaagtcagggtattgcagacgttatcgattatatcgacagtttttataatctgaagcgtcggcattaccggctgggaaatatatcgccgaatgaatatgaacgccgattacaacaatgtgcctaa

SEQ ID NO: 454513 - DNA, 468 bp, Serratia marcescens
atgaaaaagaccgtcatttatatcgttagcctggtcgcgttgttctctgcgagtaatgtggcgatgcgcactattgaagttaaaaatgataaccagttcagttgtaccgctcgctatactactcagatgaatgacgtacagataaattcaatcattcgctttatatttaataatggtgacggtatcgctacccttgagggcagtatgattgatggtcctggcccgctaaaaaccgttagcaggaaggttctgtttaaatacgacagagaaaataccagctattttctaacgaccacgaatgccagcgtccagttggatgatgaaagtaataccgacgaaatgaaaaaaaacgttcctgacttttaccttataaaagacgccacaataaatttcggcatctatccgctgaagcaaaacagttacttatttacctcacgcgaaatcccttctttttactgtacaaagtaa

SEQ ID NO: 454514 - DNA, 819 bp, Serratia marcescens
atgagcaaaggctatttgattaataatgtcctcgaattctggccagaagaacactctttggtctcacgaggtgcagaacgcaagacaatttcaatcaatgtacctgcaagccggtgttttttgttactccttgaaagaagaagcgatcttgttccacagcatgattttttcaactttgtatggggtgatgcgggtgataccgtcccgccgaatacgctgtatcagaacatatccatactaaggagagggttaaaggctatcattgaacagcctgtcgatttggtggtgaccgtgcctaagcagggatttaagctaaatgaaggggctgaagttgttgagatagatagtgttaataaagctgtgccaaatgcaatactgccgttggaagataaagaatcaacggcaaataagtcttcaccacaactaaatgaagcgccccttcctgctgtcaccatacgggagggaaatttacgtagatggtacgccatgctcgcactattgctattagcgatcaccgccgcacattactacctgctgacgcgggaaaaagattttacgccctactttaattcttacactgcgcttaaaaatagtggacagtgtcatatctatgttaataacgatgctgaagattacactatccatcagaaagcgctgcaaatgattaatctgaactgtcgtctttacccctatgtttacgtcaccgcttaccagttcattccagttgtttcactgattacctgtaataagccattcgatgaacggaaaaagacgttacgctgtgcttcgtataatttgcgtggggtctattcctcatga

SEQ ID NO: 454515 - DNA, 402 bp, Serratia marcescens
atgagtaatactaataaacagatatttgggtacttcattcatcctaatgtacaggttgatgttattcatagcaggataatcaatatcaactctgtcgtcgcagaagggggtaaaggaattattaccctgagaacaaccatgatgcgtttgctgagttatttacttgaacacgctaatggcgaaattattctgaatgatgaaattttacttaacgtttgggataagcatgaactgagctcatcaactcaacgattgtggcaggttatgcaggcactcaaacagcggttaaatgtggtaggcattccggatgattttattatacgtgtggagacgaaaggattttttattcgtgagggcgttgttacgcctctctattataaaaagttattaagtattagttag

SEQ ID NO: 454516 - DNA, 540 bp, Serratia marcescens
atggcgaaactgcatgattactacaaagacgaggtagttaaacaactgatgtctcagtttaactacaattctgtcatgcaagtccctcgggtcgagaagatcaccctgaacatgggtgttggtgaagcgatcgctgacaagaaactgctggacaacgcagcagctgacctgacagcaatctccggccaaaagccgttgatcaccaaagctcgcaaatctgttgcaggcttcaaaatccgtcagggctatccaatcggctgcaaagtaactctgcgtggcgaacgcatgtgggagttctttgagcgtctgatttccattgctgttccacgtatccgtgacttccgtggcctgtccgccaagtcattcgatggccgtggcaactacagcatgggtgtgcgtgagcaaatcatcttcccagagatcgactacgataaagtcgatcgcgtacgtggtctggatattaccatcaccacgactgcgaactctgatgatgaaggccgcgcactgttggctgcttttaacttcccgttccgcaagtaa

SEQ ID NO: 454517 - DNA, 378 bp, Serratia marcescens
atgaacaatgacgtcactatctccacctttaactactcatatggatttgtattttcatattttaccatctccatagcgttgtttgttttacttttccatttaaataaatacgtcacaaaaaagcatagccattcactttttattttatcgacagttattgttgttatttgcggagccgtgcagttcattgtttttggtgacggcaattacttctttagtcttttctaccccgttgaacttatcaaataccaagtcgtgcagtacggtgggttattttttaccatcgcctactctgttctactgccacgaaacacgtattacaagaagctaaagagtgatagtaaaaaaaaccaacataaaaacaaaagacaaggctaa

SEQ ID NO: 454518 - DNA, 300 bp, Serratia marcescens
atgacaaaaccagcatcaaccactaaaaagccacgcaagcaacatacacctgaattctgcgacgaagccctgagactggctgaacgcattggtgtggctgcagccgcccgcgaactcagcctttatgagtcgcaaatttacacctggcgtagcaagcggcagcaacaggcaacgtcctctgaacgtgagagcgaactcgccgctgagaatgcccgcctcaaacgccaactggctgaacgggacgaggaactggccattctccaaaaggccgcgacatacttcgccaagcgccggaaatga

SEQ ID NO: 454519 - DNA, 2580 bp, Serratia marcescens
atgctgacctgtcattttcgtagtgggaaaaagtatactcgcccgctttccgtatgccagataacgccgaccataatcttgcaaaatgttttccttgagcgtaagggacgcgctgtaacatcccaggctgaacgagttattatctatggcgataaatatgcggccgtttactaccctgggaatagtaagccctacattatgaaaactatcggggttgattttcaggcatgttctgagtttacaaatcatgctgcgtttaactatttatttagtgtggctgaagaacgtgttattcgtgctaggggaaatgacaggaatattgctgaaaatgttcttcaacagataaaaaaaattgtttctcatccggatactgcgttgcatgcgtattgcgcaggactgagtaaagagcgtgaatccttggggagctttatttttccgtttggtcttaatgaaagtcagttgctggcggttgaacgagcatttgattcacaagtttcagtgattgaagctcctcccggtaccggtaaaacgcagaccatactcaatattgttgccaatatattggttcagaataaaacggtggcaattttgtctaataataatgctgcagttagtaatgtttatgaaaagatggacaagcaagggctggggtatctggtggcacgtctggggagtgcggagaataggaaacaatttttttccacacagctatcgccttctgatgaaatattgtcagactcaccttcagcaagtgaaattgatgatgtacttcaacaggtgaaaaaacatctgaatgccatcaaccaggttgctttgctaaaagcggaaattgacgagctgagtgttgaacataaatatctgcagcaatggcaggggaggaaccatcgagtggaggacagcggctatcgtttctcctctcgtaaaacaaccgacctgatggcttacattcattatctttctgatcgacggattgggctaagaaacagaattgatttactgctgaatttcaggatacttagggttaagccattggagaatagggaaaaaaggctggcgatatttatctcacttcagttatatttttatgaaaaaaccatccaggaaaaacaaaactctctgtctgaatataataaagtattagaattgtctgattttaattttttgttgggtaaactgacgtcgttatcaatgtgttatttgaaacatcatttgcgggaacatatatcaatagaaaaaacatttgtggcggaaacatatcggaatgatttcgatgactttataaaacgttttccggttatcggtagtagtactcattcgattattaattccatcggaaaaggtacgattcttgattatgtcattattgatgaagcttcacagcaggatattgtgcccggaatcctggggctgggatgcgcccgcaatgtgattgttgttggtgatcgcaagcagctcccacatgtaccggtaatacaccctagcacaccaccggcagatcactataactgcgtgaaatacagcctgcttgattctctctgcatgctattcgggaaaacggctccggtaacgcttcttaaagagcattaccgctgccatcctaaaattattcaattctgtaataagcagttttatgatgatgtactgatcccgctgacgagtgattcaggtgaagcttcattgtctttggtgaccacggcaaaaggaaatcatacccgcaatttttcaaaccttagggagcttgaatccatagaagggcattattgggatgaagaaagtaacagaggatacatagccccttataatgcgcaggttaaactggctgaaacggtgctgcctgctgattttgtgaaatcgacagtgcataaatttcaggggcgagagtgtgatgaaatcgtgttttccactgtgctggataaaaagcgtagtagccaacttagtcggaatatcacgtttgttgatgatcctaatttggtgaacgtagccgtttccagggccagaaacaaatttacgctggtgaccggcgatgatgttttcgaaagccacggcaggcatattgccgcactgattcgttacatcaaatattatgctaataatggggaggttttcgagagcccggtgatatccgcgtttgatttgttgtacagcgaatatgacaaatcactggagcggctgaatagccggctaaatctgaatgactcgcgttttaagtcagagcagattgctgccagactgttacgggatgcactgtcacaggataggtaccggagtatgatgtttcattcacagatagcgctgaaccagttggtatcgttggagtggggggatttttcccccagagaactgtcatttatgcgtaaccgggccagttgtgattttgttatttactataaggtcggaaaaaccccgttgggggttatcgaagtggatggaggctatcatctggaaattacccagattgaacgcgatgaacttaagaacagtatattgaagaaatgtgatctaccactgctcagactacgcacaatagatagcgatatagaagggaaactggatacgttcctgttaggtttgtcaggctaa

SEQ ID NO: 454520 - DNA, 297 bp, Serratia marcescens
atggacgaaagtaaactcaacgcactgacggccgaactggcaacgcttttgctgggccaaaaacctgacactgagcatggccagcatggcaactgttgggatactcgttctaatagactttcaaataccgaagcggactggcccgcgctctggcccacgccgatatcttcgactacattgaaaggttctgcaattgagcacaacgatgtggcagcctgggtcacgtcagtccgcgggcctttaaccggcctcggcgtgcggaaaagaaacgtttatggttgtgggggcagtccataa

SEQ ID NO: 454521 - DNA, 231 bp, Serratia marcescens
atgctcacgtccggtaaccagcaactgtgccaaatcagacgcctgatgaaagccaaaatgccagtactctttttcagcatcatcatcgctttcgtttttatgccgctttttgctctaaagaggtgttatatcgtgatgttgttgaacgccaccactctgacgttggcaagaaattgtggggagagtttttgtgtgatgggagtgcctaccatgcggtggtgcgctatctga

SEQ ID NO: 454522 - DNA, 1143 bp, Serratia marcescens
  misc_feature (38)..(47): n is a, c, g, or t
atgaaaacaaaacagttgaaactggtatctttactgannnnnnnnnncctcagcatcctcagcggttgtacggtgtttccaggtactcatctttcaacatcaggaaaagatgtagtaaagcaggaggatgccgacttcgatcttgataagctggttaatatctatcctatgacgccgaagttattggataagatgcgtccacagaaggtcgtcgcgcaatccaatcgtgagttggatgcagcgttacagaaatatgaatatcgtatcggcgttggcgatgtactgaatatcactatttgggatcatcctgagttaaccattcctgcggggcaatatcgtagcgctagcgataccggtaactgggttcatgccgacggcaatattttttatccttatatcggccaggtgaaggtggttggtaaaacggtgactcaggtacgtaatgagatctctcgtcgtttggtgaagtatatcgagagtccgcaggttgacgtgagcattgcggcattccgttcgcagaaagcctatatcaccggcgaggttgccaaatctgggcaacagccgatcaccaacgtgccattaaccgtaatggatgcgattaatgccgctgggggcctgacagagaatgcggactggcgtaacatcgtcttgacgcataatggtaaagagcagagtctgtcactgcagaaactgatgcaaaatggcgatctaacgcagaaccgtctgctatatcctggagatattctctatatcccacgtaacgacgatcttaaagtcttcgtgatgggagaagtgaaagcgccatcgacacttaagatggatcgcagcggcatgacgttaactgaagcgttaggcagtagccaaggtatttcacaaactgcagccgatgccactggcgtattcgtgattcggccgttacacggcagtcagggcagcaagcttgcggatatctaccaacttaatatgtctgatgccacggcactggtgatgggcgccgagttccagcttaagccgtatgatgtcgtttatgttacggctgcaccggttgctcgttggaaccgtttgattatgcaacttgctccgactattgatagtttcaataatcttaccgaaggttctctgcgtatccgtaattggccgtag

SEQ ID NO: 454523 - DNA, 1368 bp, Serratia marcescens
atgggaaaactgacgtgttttaaagcgtatgacgtgcgcggtaaactgggcgaagagctgaatgaggatatcgcttaccgtattggccgtgctttcggtgaatatctgaagcctaagaatatcgtattaggtagtgacgtacggttaaccagtgaaagcttgaaactggctttggccaaaggtttgcaggatgcgggtacggacgttatcgatattggtttgaccgggacggaagaggtttacttcgctacgtcgtaccttaagagcgatggtggtgtggaagtaacggctagccataatcctatcgactataacggtatgaagttggttcgtgaagggtcgcggccgattagcggcgacaccggattacgggctattcaggaactggccgagaacaatcagttttctgccccggtagccaatcgtggtggctacgtacgtgaaaatattcttgatgcttatgttcagcacattctttcctacgttaacctggataacttcaaaccgttgaagttggtgattaactctggcaatggtgctgcggggcatgtgattgacgcgattgaagctcggttgcaggcgcagggcatcccgctggaatttatcaagctgcatcatcaacctgatggtaccttcccgcatgggatccctaaccctttgttaccggagtgtcgtgccgacaccgcgaatgcggtacgccaacatcaggctgatatggggattgcattcgacggtgactttgaccgttgcttcctgtttgatgagaatggcgattttattgaaggctattatatcgttggtttgttggcggaagcctttctgcagaaacagccacaggcaaaaatcatccatgacccacgtctaagctggaataccgtcgatgtagtaaccgcagccggcggccagccggtgatgtccaagaccgggcatgcgtttattaaagagcgcatgcgtgccgaagatgcgatttatggtggtgaaatgagcgctcaccattacttccgtgattttgcctactgtgacagcggcatgatcccttggttgttggtagccgaactggttagcgtaaaagataagacgctcggtgaactcgtgcaaagccgtatcgctgcatacccatcatccggtgagatcaacatcaagttggctcagccggccgagtcgatcgagaaggtcaggcagcattacctggcccagggtgcagaagcggattataccgatggcatcagtatggcattccccgaatggcgctttaatttacgctcttccaatacggagccggtggttcgtctcaatgtcgagtcccgaggcatgccggccttgatgaaggaaaaaaccagcgaaatattaaacctgttgcagtgctaa

SEQ ID NO: 454524 - DNA, 1425 bp, Serratia marcescens
atgcctaagctaattcctgtgattatggcgggtggaacaggttctcgcctctggcctatgtcacgcgaatcatttcccaagcagtttttgtccttggataacagtgggtttagcctgttacagcaaacgttgcagcgtttgtctggcttggatggcgtagatgttgccgctcctttagtgatttgtaatgaagaacatcgttttttggttgccgaacagctgcgtgagttggacctgctggcaacgaatattattcttgagccggtaggccgtaataccgctccagcggtggcgcttgctgcgcatttggcggtcgaagaggatgccgataatattttattggtgttggctgccgatcatctgatcaaaaaagtagataatttccaccaggcaatcaatgaagcgctgcagtttgcggtgaatgagcaactggtgacgttcggcattattcctcagcaccctgagaccggctatggctacatcaagcgtggttcggcgctgtctgatagctgctttaacgtcgaaagtttcgtagaaaaaccttgtctggaaaaggccgttgaatacctagcgtccggtgattatagctggaatagcggtatgttcatgtttaaagccggcacgtttttacaagagcttgagcgtctgagcggggatattttcaccgccacacagcagtcgatggtggcgagtcagcgcgatatgaattttatacgcgtggaccgagagagcttcgacagatgccccagtgattccatcgactatgccgttatggaaaagacacaggctgcggtggtgatcccgattgatgcgggttggagcgacgttggctcctggtcttcactgtgggaagtctctgaaaaagacgggcagggcaacgtgaacatgggagaggttattgcgataaactccagcaataactatatctcttccgagggggcgttggttgcgaccattggtctggacaatgtggtggtgatcaataccaatgatgctttgctgatttcacacaaagaacatgtgcaagacgtcaagaaagtggttgatgagctgaaaaaacgcaatctacaccactatcggcaacactcttcctcctatcgtccgtgggggagtatctccgatattgactgtggtccgcgctatcaggtgaaaaaactcatcgttcaccccggacacggactgtcggttcaaagacacgtacatcgtgccgaacactgggtcgttgttagcggtacggcgaaggtcgacgttgatgatagcactttctacctgtcggaaaatcagtcaacctttatcccggctggtagtgtgcatacgctggaaaatacaggaaaaatcgacctggagatgatagaggttcgttctggctcctatcttgaagaggatgatattgaacgtttacatgacaggtatggacgggcttga

SEQ ID NO: 454525 - DNA, 1350 bp, Serratia marcescens
ttggcggccggttccctgctgctggcgttcgctacgccagcttattcactgggggtttgggacgtttatgccttggcgctggaaaaggacccgacttatctggcagcgctgaaagagaagcaggcgggagaggaaaatgaaaatatcggccgggcgggactgttgccgaaagttgctctgaattatcagaattcaccgcgcaactggcagacgcaaaagtatcagtcgcagaacatttttgggcaggtctcggatgtgacgaagcgtcagcagtatcgtagttattcgggctcggtaacgttgacccaaccgttgttcgattatgaagcctacgcacgctataaatccggtattgcccagacgttaatggcagatgaacgctaccgtagcaagctgtttgacctggccgtcagggtgataagcgcctatgttgaagtcgcctacgccaaggatcagatcgcgttggccgttgcccagaagactgcatataaggagcagttggcgctcaacgatcgtttgttgactgcgggtgagggaacggtaaccgatctgtccgaaacccaggcgcgttatagcctggcggtggcgcaggaaattgaagcgcgggatgctctggacgcggcgcagcgacagttggaagtcatgattggcgtgccgctggaccagttggatgaactgcaaagtattaaacccggaccgtttaaggttgcaccgttaattccgtcaaaatttgaagcgtggaaggcgctggcgataaagaataatcctgagttggcagcttcacgtcacggcgtggacgccgcccgctatgatgtggaacgcaaccgggccggctttatgccgcaggttcagctgtatgcctcacattcggagaacgattccagcagcgataacaccgttaaccagaaataccgaactgacagtatcggtatccaggtcagcatgcctatttactccggcggtggagtggcggcgtcaacccgtcaggcggcggcgcgctatggacaggcaatgtatgagatggatgcacaggttggctctacgcttatcgagctgcgcaagcagttcaacttgtgtgtcagcagccgcgccaaactagaagcgtatgaactggcagtgaagtcagcgaccacacaggtagaggctacacggaaaagtgtgttggccgggcagcgtgtcaatgttgacgtgttgaatgctgaacagcaactgtattcggcccaacgcgatttggcttcggccaagtatacctacctcaaggcctgggtcacgctgcagagcgagtccgggatgtttgacgaacgtgatattaagcgtatagcgcagtatttttcttccgctggccgttga

SEQ ID NO: 454526 - DNA, 3015 bp, Serratia marcescens
atggcttctttagcagcacagcaaactgcagcagcaatctactattccgttatgggtaaggatgcaacgtcagatgcttatgactattttggacaacaattagaaggtggaagcaaaaccctagatgaactcactgaatcacttttggcctcaccagaagcaagcgctcgttttgccagtaagtcactcgaacaaatcattacccaggtttataccagcgtacacggtgcagctccgacggcctctcaactgtctgaactgataacgggcaccacaacaacatcatccgtcatagctaaaatcgttgacggtctgttacattacgcgggaactgatgctactaccctggcccagcaaagcgcttttgaaaccaccattaacggcagcctgtaccctgcgaccaaaagcgcagctaccgaaggttctgccgatgtgcaggcgctctatcactcattaggtagaacacaggttcaagaagggattaactactggggtgaggtactggcgaacggcagcaaaagcttcaatgaagttgcaaacgccttcgttaacgcaacggctgcactgaaaggtctttccaacagcgactttgtgaactttattttccaaaatacctacaacagagccgcaaccagcagcgagttggatcagtatgtcaactcgctcagcaacgcttcaagtcgtggtgatgtgctggttgatgtcatcaccagtattcgcagcaatgttgcagcgggcgatacctcagcacaaaccagcttcaatgcagcgaccaaagtttaccagcagggcaccctgccagcgctgaacttccaggagcaggctgcatcagtttatctggcagtgcctggacgcggcatcgacgccgaagcactgaaccactggagtaaagaactggcagcagggaaaagtttctcttctttgaatgcttcgctgttaaaatccggcgaattccagaaaaaaggtgcgcagctcactggcgatgagttcattcaacacgtcttctctgcggtacacggtgtcgcagccactgctgcacagctggcgacctatgcctcattaagctccaaagaggcgattaccagtgcgattatccaagatctgcgtaactccaccgctactgacaatgccaccgtttcacaacagcacgcctttgaagccgacattggtgccagcctgctgtataacacctctgcaacgctgagtgctactgccggcggaggcaacgctaccggcaccgtaaataccggcaccagccacacgctgagcaatgcggaaacggcagtactacagtcagcagtgctaaatgctaattcagccaatgcggtcaacctgaagtttgccgataatctgcaaaacttgaccatcaacggtaccagtgcagccaccgtcagcctgtcggataatggcgtcaatcaaggtgtcgatatcaccgttaacaacggcaacgttatcctgaacgccggctctggtagtgacactgtcaacgtgacctcatcagcaaacattgccagcggcaccggtaaatttaacctgggcgcgggcaatgactcactgctgtggagcggtaacgccgccagcggcgcggccaacagcgtcggcagcggcatcagcgccaacggcggtgaaggtgttgataccatctctgctaactttattaccaaaaacgtcgccattaccggttcactgttgcgtactgcgacaatcacctcgaatgcttctcagttcagcaattttgaaaaaattgacctggcgggttacatcggcaaggccacggtaagcggcggcacttcaaccgcagcgaaccacactttcgactttggcgtactgaccggtaacgcgtcgacggaatccagcactaccgtcactaccactaaccaggctgcaacctctaatatcggctcgcaaggtttcgtgctgtcaggattagccgatgcggtcaaagtgatcaatgcagccggcggcaatgccgcgcagttggaaatcacgggtaacgccacggcagcaagcgacctgtcgattgctttccgccagaatgcgaccgaccacttcaatattaacttcaacgcagaaagcaccagcgacgtcaatgcgggttccctggccctgagcagcagcagcagcgcgctgatgggtaccgcgctcgctacggtcaatattgcctccggcggtactggcgactttgataacattctggctctgaccggtagcaactctcaggtaagaacgctcaacatcagtggcgatcacgcacttgatttaaacctgggcagcggctttagcaacgtacgaaccattgacgcctcaagcaatactggcggcttgaacctggataccagccatggtggtaccggtgacggcctgatcgtacagctgctgaacgctctgccgttaggtgcagtgactaccggcctgttggctccggttctgaccgcgctgggtttgaacggttaccaattgaaaattaccggtaccggtgcagctgataatttcgatatcgccgctaacaccagcgtcaccggcggtgctggcgcaaacaattatgagttgaaatccagtacttcgtctgccggggttactatcaacgactttgacagcgcaaaagataccattgttgacggactgtcgggtctgaaaatctccaacgatgcctctggcagcgctgttgccgactacggtacgcgttcagccgatgttctggatggcattctagggacgcttctgggcggcgtagttaactctgcagctggcctgctcggtgggatcttgggactcgggagtagcaatgcactgacctcaaaagtaggcatcgcctccgtggcctttgatggaactcacagcaactcatacgttattattgataacaataataacggcacgctggatagaaacgactccgttatctatctgactgaccagaaccaccagagcctgctggatagcctgcattacgcaccagaagtctccgttaacggcgttgctgataccgccgttacggatctggccgtcgcgtaa

SEQ ID NO: 454527 - DNA, 1392 bp, Serratia marcescens
atgggtgtttatcaacgtggcacaattcaggctaatgcctctttgacgtcgatgtttcagaggttttctgatatattcattatgtttttaggattgtacataagttgtgtcatttttaatgtgaaatttgatttaactcagttgctcacatttttgactgctttggttatttttcaaatgataggtgggatgactgatttttatcgttcatggcgtggtgtgaggggcgttttagagacgaaagccatcttcattaactggactataagctttattctatgcatatttatactttcaacgtttaatatcgtagacagcgaatacctcttccgctttagctggtattggatggtgttgattggattaattttgggacgtttttgcatcaggttagccttgggttatttgcgtaaggttggatacaacacgcggaatgtcgcggttatgggctcgctgcctatcggtattcacctggctgaaactttacatgaggctcactggatgggctttaacgtcctggggatttatagtgatgagcaagtttcctcaacacagatccccgtgtgcggtgatttggcccagttggtgaatgatgcagaacagggaaaaatcgatcgtatctatattgcaatgtcgatgtcggaagaaacaaaaattcgcgaaacggtagcaaaactgacagacactaaatgttctgtattgttgattccggatatgttcacttctaatatattacaatcgcggcatgaagaaattaatggagtgccggtgatttctctctttgatacgccaatgagtggcatcaatgcattgattaaacaggttgaggactttatcctttcgctattgattctgatgtttatttctcctgtgctgttgattattgctgcgttggtaaaattaacgtcggaaggacctattatcttcaaacagcagcgctacggtattgatggtaaagctattgaagtttggaaatttcgctcaatgaaagttatggagaatggcaatacggtgacacaggctaaaaaaggtgatacccgtgtgaccaaattgggctcctttcttcgccgaacttcgttggatgaactgccacagtttgtgaacgttctaaaaggggatatgtcgatagtcgggccacgtccacatgcggtggcacataatgaacaatatcgcaaattgatcaacggttatatgctacgtcataaaatgaagcctggtatcacgggatgggcgcagataaatggctggcgaggggaaactgatacgctggacaagatggagaagcgtgttgagtacgatctggagtacattcgcaactggtcactttggttcgatataaagattattttcttaacggtgttcaaagggtttattaacaaggccgcctactag

SEQ ID NO: 454528 - DNA, 726 bp, Serratia marcescens
atgcagggcacagaaaagaagaaaaaaatttatgcatttattgaacgattcttagctgtattcacggatgaaattatttgtgtcagccaatatgaaaaggatgaggctgtcaaatacggtttgccaaagaacaagctgaaagttgtctataacggtgttccggtaattgaacatgataaatcggcatatgcttcgccgtatcaaacggatgtaactaatcttctatttgttggacgttttgattatcagaaagggttcgatatcttagaaagactggtgaaaaagttggaggggaagcctttccaccttaccgccgttggtggagcggtgctgaatactgacgtacagccattacagtcgccgcagataacctataccggctggttgagcagtgcggagttagctccttatctggcccatgccgatctattgattattcccagccgctgggaagggttcgcgatggtgcctttggaagcgatgagctatggtttaccgattgtggcaagcgactcaacctcattgcctgaggttgtgatcgaagggaaaaccggccggctcttcccattggatcatgaagaggtgctgttggatattattacgtcaacgtcgaaatcagcatggcgtgctatggggcaagaggctcggcaactatttctggctaaatttacggccaacaatatgactaataccacggataaaatttatagtgatattattagttaa

SEQ ID NO: 454529 - DNA, 1053 bp, Serratia marcescens
atgctatatgtaaatgctcgttttcttactcaggaaatgaccggtgtacaacgatttgctgaggaaatcagcctggcgttaaaggatcaaataagtgacatagtatttatttcacctccagggatattgcgagaagaggtggctagaaagctagacgtcaaggttattggagagagaactgggcatctttgggaacaaatagacttaccgcgttatctaaagtcaaaaggctcaccattattacttaatctatgcagtaccgcgcctatcctgtataaaaataaaatagttactcatcacgatataacttacaaacgctatccacaaagcttctctaaaaaattccgcttgttttataatttatttactccgttaatgttaaagggaagtcgacaccttattaccgtaagtaacttctctaaaggagaggtttgccaggcgtacaggtttcctgaagataaagtttccgtcgtttataatgctgtgagtaactcattcaaacctggttctcagcgagaggacggtgccgaaaaataccttttagcagtctcttcgcctaattatcataagaatttccacggtatgatcgaggcctatgccaagttggcctcccctgatgtgacactgaaaattattggtaaggcatctggtgtgtttttaccgcaatcattagagagccaggctacgagcaacgataaagttaagtttcttggtcgggtggatgatagtgagttagtcgacctctacaataatgccttggcttttgtcttcccctctttttatgaaggttttggcataccgcctttggaggctcaggcttgtggttgtccggtaatttcgtcaaaaacggcgtcgatgccagaagtattggctgatagtgttttatatttcgatccggaaagcagtatggaaattgccgaggccatgaagaaagttattaatgatgccgagttgagagataatctcacccataaagggtttgagaatgttcgtcgtttttcttggcaagcatctgcagaagtgatatcaaaattggttactcagctaaaataa

SEQ ID NO: 454530 - DNA, 1188 bp, Serratia marcescens
atgtctttggaagccaagtcattgcttgattccgttgtcggtgttgaagctcaactgaatgagctgacgctgaaagaagctgaaatctctcagttgtataccaaagatcacccagcctatcgcgccttgatggataaacgtcaaacgctggtagcggaaagagagaagtttaataaacgcatcagcaagatgcctgcaactcagcaagagattctgcgtttgactcgtgatgtccaggcgagccaggaaatttacatgaccttgctgaataagcagcaagaattaagcattagcaaggcaagtactattggtaatgtgcgtattgttgatggcgccgtcaccatgcctaagcctatagctccgaagaagacgctgttggtggccttagttgtactcttggggggattcttctcggttggcctggtgttcttgaaggtattactgcataaagcactgcagagcccgagccaaattgaagagctgggggtcaatgtgtatgccagtattccaatttcggaagtgcagcagaaaaaagacctgttactgtatcggggtaaacatcgccagaaagagaacggtttgttgctggctgaggctaacccggccgatctggcaattgaagcgatccgtagcttacgtaccagcttacacttcgccatgatggaggcgaaaaacaaggtggtgatggtttccggcgcttccccggagattggtaagaccttcgtctgtgccaacttggctgtggtgattgctcaatcgggcgaaaaagtcctgttgatcgatggcgatatgcgtcggggccgtttgcatgaggtgcttaatagcaataataaaaaaggcctgtcggcggtgttgtccgcccagactaatatagaagacgctgtccgttcgaccagcgttgccggcttggattttttaccgcgtggccaggttccacctaatccttcagagttgttgatgggcgagtggtttaccaaattaatcgcgtgggcgaccgagcgttacgacatgattctgatcgacagcccgcctattctggcggtaactgatgcatcaattatcggtcgcatggctggtactaatatgctggttgcccgttgtaatgtaactaccttcaacgcgcaggaaaaacgtacttctggctactatggttacgattattatacctatgaaagtaagaaggattaa

SEQ ID NO: 454531 - DNA, 1059 bp, Serratia marcescens
atgaaaaccttcggctatgctgcgcaaaatgcgcagagtgggctcgctcccatgtcattcgaacgccgcgcgctccgtgacgacgatctagcaatcgaaattaactattgtggcgtctgccactctgaccttcatcaaatccgagatgattggaggagctggaatccaacggtgtacccgagtattccaggtcatgaaatcatcggtacggttatcgaagttggcccaaacgtcacgcactataaaatcggggatgcagtcgctgtcggaacaatcgttgacagctgccgggtctgcgatcagtgtcgtcgcggtgaagagcaaatgtgtcgggaattccctaccatgacctataacagcagtgaccggcatgacggcaagacaactcttggaggatattccaaacacattatcgttcgtgaggaatttgtgttgcggatgccagagggtctcgatgctgcgcgtgctgcgccactcttatgcgctggcatcacggtctactcaccattaaggacctggaatgtgggccctggcagtcgtgtcggtgtcatcggaataggtggtcttgggcacctggctgtgaaattcgctgctggccttggtgctcatgtgactgttatcacgcggacagaggccaagacggccgaggcacgtgcgttgggagccgatacaacccttatttctaactcggatgacgcaatgaaagcggcaacgtcttcgttcgacgtcatcattgacaccattccggttgagcatgatgtatctgcatatgttcaactgctcgacgtcgaaggagcattggtgatcgtcggcgcgcttggcaatatggccgggtttaattccctaccgttaattatgggacggcgctgtattaccggctcgccgtcaggaggcatcgcagaaacgcaggaaatgctggatttctgtgggaagacagggatattacccgaatgcgagatgattgctatagcggaaatcaatgaggctttcgagcgcatggagcgcggcgaagtacattatcgcttcgttattgatatggcaacgctatcggacgcctaa

SEQ ID NO: 454532 - DNA, 768 bp, Serratia marcescens
atggacatgagcacattaaaaacattgtctggttcggtagctttggttaccggtgcgtccagcggtattggtcaggcaaccgcattgaaattggccgacgcgggcgcccgtgtcgcccttattgcgcgtcgcgtcgatcgcctcgaagcattggccgagaaaatccgtggagccggtggacaagcgctgccgatcgaggcggatatcacattacccaacgttgcaagccagacaatcgagcaagtcatctcagagtacggccgcttggatacgctagtaaacgccgctggagtcatgcttaacgggccgtcgattgacgctccgctcgaagagtgggatcagatggttgacgtcaatctacgtggcttaatgtacgtcacaaaagcagctttgccgcaccttgtcgcctcagtcactacaagtccaagaaaggtcgttgatgttgtgaatatatcgtccgttgcaggtcgtgtggctgctgcacaggtcgcaatttacaacgcgacgaaatttgccgttactggtgctacggaagcttggcgacaagaatttaccaaacaatcagttcgtttctctgtcatcgagccaggagctacggagaccgaattgtggaaacaagaggggcaatgggagagcttcaaagtggcgttcggcgaggtcgagcgcctgtatgcggaggatatcgcaaaagctgttgaatttatcgtgacgaatccgaggcgcgtggcgatcaacgaaatcgtagttcgtccaacagaccaggcctga

SEQ ID NO: 454533 - DNA, 945 bp, Serratia marcescens
atgatttttgaaccagacgagactgatcggcttcgccgggccgagacttccgacattcgcaatcgactggcccgtcagatatcaatgtttgtgggcgatgaagatgagcgaatgacatcgctaccaggtttgagcttcgccaaggtcagaaaaccaatgccccgtagctcttatttgtatgagccaagcatctccatgattgtacgaggcagcaagcgtgtccagcttgggggaaccacctacctttatgatgagtctcgctttctactgacctccgttgacctgccgacagtaactgaggttttggaagccacagaggcgtctccttacctttcactacttatgcggctgaacctacctgttgcaagggaaatgattgccgaaatggggggacccgaagcgccgcttcctggtggaacaactgggatgtcgacgggaccggccaccgttgacttgtttgacgctattgagagattggtcagactgctcgatcatccgcaagaccttgagcatattggtgccctgatacagcgcgaaattatctatcgaattctcacaagcccagcaggggcaaggttccgtcaaaccgttatgttagggacaagaagccaacggactgccaaggctatctcatggcttcgggataactatgcacaatcaatgagtatcgcaaatttggctgagcacgcaggcatgggcatatcgacccttcaccatcattttcgcgaaatcacctccatgagccccttgcagtaccaaaagcatttgcgtttgcacgaagcgcgccgaattcttcgcagcgagaacgtagacgcggcgatagctgctttacgcgtaggttacgaaagccccacgcaattcaatcgtgagtatcgaagaatgtttggtgcgtcgccgattcaggatgtgacatcgttccggatgtcacaaagcggcctcgactaa

SEQ ID NO: 454534 - DNA, 150 bp, Serratia marcescens
atgacgctgaacgccacggttaagaaactgctcaacctcttcactaccatgagccgtatcactaagaacaataaattcagcatgtttaaacaattcggcattctcagcaaatttcccgtcatccaggttgtgggcataggtagcgagtaa

SEQ ID NO: 454535 - DNA, 747 bp, Serratia marcescens
atgaatcagacatttaagggaaagttcgccgttatcactggtggcggaagcggtattggtctggctatagcgaaagatctgagcgacgaaggcgcagatgtcattatcactggccggaatgcacaaacccttcaggaggcggtaaaggcgctggggaaaaatgtaaaaggtattgtggctgacgtcagcagcaaggttagtattgatgcgctttatgaacaggttaaaacggaattcggccacattgatattcttgtcgctaatgccggcggtggggtccatgctccgcttggtgaaatcactgaaaaacagatccacgatcagtttgccacaaatgttaaaggtgttgtgttgactgttcagcaggctatgcccctgcttggaaagggttcgagcgtgattatcattggttcgacggcgtcagcagacccgggacccaccatgagtatttatggtgcgaccaaagccgcagtcagaaacatggtgagaagctggattacagagctgcacgggacgggtatacgcataaacattgtcagcccgggtcctgtgaatacagcgtctctcagagccgcatttggcgataatgccgaagaggggatcgccttcctcaccgctaaaagtccgttgggacgtatcggagagccggaagaaatagcctctgtagtttcattcctggccagtgatgcctcaagttatgtgaatggtatagagctgttcgcagatgggggtgcctctcagacctga

SEQ ID NO: 454536 - DNA, 567 bp, Serratia marcescens
atgagcgtaaatgcacgggaagcgatactggccgaggcgaagtgtgcggctcagaagcatgggtataacgggataaactttcgcagtattgcaacggaggtgggcattaaaaatgccagtatctattatcactttgccagtaaggcgaagcttggcgctgcggttgctcaacgctactggcaggataccgcgcagcatcttgagactatacgcagtacgagtgccagcgcaggcgaagccttaaggcgttatcccgctattttccgtaaatcccttgaagatggtaataggctgtgtttatccagtttcatggccgctgaatatgaagatctgcctcaggaagttaaggccgaggtgcaggcttttgttgatgccaacgtctcgtggctgagccacatgctcagtgagaaatgtgcaggtgattctgaggattacaaaaagcaggctctcgctatttatacagccgttgcgggcgctcagctgatagcgcgtacccgtcagaacattgaattgtttgacgaactgatggtgacttatcagcaggcaggtctgatccccatcatctag

SEQ ID NO: 454537 - DNA, 663 bp, Serratia marcescens
atgaaaatctatgactggtatgacggcccatatcctgcacgtgttcgtatcgcgcttgccgaaaaagggatgctttccaaaacagaatttgtccctgttaacttaaggactggtgagcataaaaaaagcgaattcctcgccatcaactattcaggcacgctgcctgttctgaagcttgatgacggtacgctcattgcggagtgtacggctatcacgcagtatctggatgcgctggccccgccattcagtctgaccggtacaactccagcagataagggcatcattcatatgatgacgaagcgtgctgaaattgagttcctcgatgcagtaagcgtgtatttccatcacgccacaccagggttaggaccagaggttgaactgtatcagaatcctgagtggggcaaccgcatgcgtgacaaggctgtcagggggatgcattactttgaccgcgttctgcaaacgcaaccttatgttgctggtgatactttctcaatggcggatattgcggtaatcggggggatgatattttctacgttagtgaagcttcccttaccgtcagagtgtgccgcgttgcgtgagtggtataaccgaatgcaggcaaggcaatccgttcagcagtggaaggcgatggttgatgaagaacgtttgcagagaaaggcgtga

SEQ ID NO: 454538 - DNA, 546 bp, Serratia marcescens
atgatatcgaccggccgggcgataatgccggcggcggccgtggcggtcattagcgtgccgaaccggcaggcaactcgccccagcttattgatgccgggcgccttgctcagcattttcccgagcgcccccagtttgctggccgcaccgccgacgccgcctaccaaaccggcaaacagcagcgtcaggtcggaaatcttatacagccagtccggcacttccggttttatcggcaaggtggtgacggtgccgccgccgatgcgcacgttgggcgagccttccatcacctgggcgtcacagttggttttatcccccacgcgcgccgccggctggccgttgataaacaccttgtccgagccctgcgccatctgcatgctggggccgtcctggtcacaggcgaccagactgacggtggcgatggccgccggcttgccattgatgcgcacgtccggtgagccggtcactatcttgccggccggcgtcaggctccctgcgccggcctccgcaatgccgtcgcgtgccttggtcgccagctccccggtgagatag

SEQ ID NO: 454539 - DNA, 921 bp, Serratia marcescens
atgttgggtcagttgtccatgcacattccaggcaaaccgctcttcactgccgtccggattaaccagtctggccagccggccggcacgatcccaacagtaacgggtcaggtgaccttctgcgtcggtgcggtgcgtcagctggcccagcgcgtcataggcgtaggcggtgacgctaccggaacagtcggtatagcgcgtcagcagcccctgagcattccaggtcagtttcacctcgccgcccagcgcatcgatgatgctcgccggcaggctctcttcctcgtcgggatagtggtaacgggtaacattgcccagcgcatcaatctgctgcgtcgggcgtccctgggtgtcccagtgctgaaacgcctgactgccgtccgggtaggtgaccgagaacaggcgaccgctgttgcgggaatactggtaagtggtggtgcggcccagtgggtcggtctcgctcagcaggcggccgtaacggtcccactcgctctgacgctgcgccccgcccggcaacaccacaccacacagctcgccccgcgtatagatgaaggccgactgccggttatcaaagtcggtgaactgcgccacgttgtcgtcatcgtccaactgccacagcgcccgtttgccatcctcgcgcaccgcccatcgcgtgccgttggcaaaatcataatagagcgccagctgctcgccggcgccgttgcggtaggccactacacgcggcaggccgtcaatttcctgccagcggtactcgttcagcaggccattctggtcctgatggctgaccatcagcccgtcctgccagccaaagcgtcgggtgacttcgccggcgcggttgcggacggtaaccagttgcccctcgtcatcgtacccgtagtgcaccagcggcagctcgccgtccggggtaaacagcagcacgctctctag

SEQ ID NO: 454540 - DNA, 2214 bp, Serratia marcescens
atgagccaagcggtacccgcttacgcttacccatggaacgcaccgcgcccggcaatcgccgggccggtaagaccgcttacccgtgaggaacatgctcaggggcaagctgttttacgcaatatccattccctgccgcgctttcttagcgccattttcctgtcacgccatgattacctgctgaaatccaaagggctgcatgacgccaataaatggctggtgttccagtttgagcgccgcatatggccccgcattgaggctgtgaacgccaaaaacgggatgaaccttgcagcttcaccgcgctggatggcggagattgataattatgctggcttaccgggtatggatgacaaagagctgaaacgccttgcggatcgcgtggccggtcaactgttgtctatctatgagggccgttgtgaagaattcattgagcgcaatggtggagacaatacagggctgttggaagatagcactcaggccgatttttatggtcataccgcgccaatggttcgcgctttcaacatcaccccgatgcactggaacaaataccgcaatggcaaactagatgcccggtcagcaatcgcaagcctgtcacggttggttaatgccgaatggtgggagcgccagttaaaagcccagcgcacgcgctggcgcgaggcgctgttgattgctgtcggcaatgtgaaccgtggggcgtcgtcctatgccagcaagcaggcgatccgtgaagtgaaagcgcgtcgccaatctaactttgattacctcaacagccgcgagctggaaaacgtcgaaaccggcgaacgattcagcctgatcgataaagtaatggcgagtatctctaacccggagatccgccgcatggaactaatgacgatagttgccggggttcaacaggctgccgagattaaaggcgataaggggatgtttctcactatcaccacgccatccaaatatcacccaacacgcaccgtcggcaaaaacagcccgaaggtgcagtttaaccacaattgggatgaagaagcgtacacaccaaaagacggccagcgctaccttgtaaacctgtggagcaatatccgcacggcatttaaagataatgacctgcaggtctacggcgtgcgcgttgtcgagcctcaccacgatgcaacgccgcactggcatatgatgctgtttacctccaaagagcagcgccagccggtgatcgacatcatgcggcgctatgcgatggccgaagatggcgacgaacgcggcgcagctaagaatcgttttgactgcaagcacttgaacaaaggcggcgctgctggctatatcgccaaatacatcgccaaaaatatcgacggttacgcgctggatggcgagcgtgaccatgaaaccggcgagctgttgaccgagacggccgccgctgtcaccgcgtgggcgtcaacgtggcgtattcctcaatttcaattcattggcctgccgtcgcgtggtgcgtggcgcgagtgtcgtaaaattcgttctatcagtctggccgacgagtttgacgataacgtagaggcggtacgtgctgccgctgatgccggtgattttgccgcttacattctggcccagggcggcactaacgttgcccgcgacgatcagaccgtgcgtgttgcccgcagggttgccgacgaactcaacgcctatgacgaagaagtccagaaaattgcggggatttatgccccgcatattggcgcagatcgcatctatgaaacccggacaacacaatggcgcattgttgctaaagccgttgctgttgagcctttgattttaaaaagcacctctggtgcgcctcggagtcctgtcaataactgtgggttggccgatagcaaagcagctaccaatacgcagggtggtgagcctgtagagggcgtggcagtgttggaacacccgccggagacaccgattgactggaatgatatgaccgtgacacggtctgttatgagccgtatacgggctattccgtcacaggtaaagaaatcacaacgaagttttgacccttatcaggtaccagaagtggcaccgtcggcgagattgaccccggcagaacgtgatcggctgggtggagtccgggccgatttggtacggcacggcattgccgcccagcgctgggaactggaagcgctagcgcgtggtgctaaagtcaaatttggtgatatttcaatggagtatgagctggttaatgattgggcaggtttttaa

SEQ ID NO: 454541 - DNA, 279 bp, Serratia marcescens
gtggaaattaaaatcggtactgaatttgttatcaccagcgatagtctgcaattcattcttaatacggtgaaggttgggaaaaaaggaaaaaacgaaggccaagaacgttatgaggctattggttattacccaaccattaaccagttggtgaacggtctgattcatcatggtgtgcgtaattccagcgtaaccagcattgcctcactggcggctgaaattggtcgcattagcaacctatgccaagaagctttcgcagtatgcggggcccggaatggataa

SEQ ID NO: 454542 - DNA, 231 bp, Serratia marcescens
atggcggactcgatggattactcacaggagaatcaggcgctattgctggaggcgcagatcgctaatgcccgccagtgctcggcgttgccgtctgcgtttgtgtgtgaagaatgcgacgctccgatccccgccgcacgtcgtgtggctgttcccggcgtttatacctgcgtgggctgccagcatctccgcgaggtaaaaggccacctttttattttctcggggattgcatga

SEQ ID NO: 454543 - DNA, 231 bp, Serratia marcescens
atgaaacttgaaacggccaagagtattaaagaattttacgcgcagccattagatgccgtgttgctaaatgttcgtattgatgagcggaagaatcaagccgatctcgctgctgctcgtttggtgcgtttggctactcacattactaagaacggcttaacggctatcgaagctgtggaactgctgcgccaagaggcggaaaccatcgagcaccaagcacaggagctgcactga

SEQ ID NO: 454544 - DNA, 570 bp, Serratia marcescens
atgattaatcaggatacaaaagctgtaatcgaaagaatgctccttgcttacggcctcaagacaaagctggcgctttgtgaagcacttgatatcaccgctagcgcgttggctaacaggcaattgcgaaatgcgtttcctgcggaatacgtcctcaaatgtgctttagatactggggcatcattgcggtggctaacatacggacaaggtgagatgttcgagcagaacgtgattactgctccatctgctcttgcagtgccaagcaagagattacttgcccgacaactacatgatagcgagacactattgctagacaaaaacttccttccacaaggaataaaaaatccgcttgtagtgattgacaatgacattcagtacattgccactcagacttatgacgatatttatgatggcacatggattattgctatagataataacatcagtattagggagctaattcgaatacctaataatagagtcagtgtatctgacaaaagacattcttttgactgtcctatctcagatttaagcgtgcttgcaagaatagtattaatctgcgaaaaaatataa

SEQ ID NO: 454545 - DNA, 2052 bp, Serratia marcescens
atggagccactgcagctggtcgccctgcggcagcgtcagcgcctgcaggttggacaaggcatcccactggtactgcaactcgccgttgacgccctgctcgctcagcaggttaccggccttgtcgtagcgcagctgcacgctgtccggctcgatacccagtttgctgccggcagcggtcggggtgcgcatcaggcggttcatgcgcccggccgcatcatagtggtaatgccactcggcgctgtcgttggcgtgccaggtcagttggccggcttcgtcataacggaactgatgcaagcgttgtgcaggcggtgcctgcgggtcgagcggcccggtttcccgcaactcgctcaactgccccgcggggccgtaacgataatagcggtcggtgcggtccggacgccgttcggccgtcaaccgtccaacggcatcgtggctgaactggtagtccccgccgttgccattttccagtctcgtcagccagccgcggcagttgtagtgataatggcgtgtacgctggatgcggtcggtgatgctgaccggctgccccagcaggttgtactgccagcgcgtctcactgccgagcgggtcctggtgtcgggccagctggccctgcgcgctccagtcgaaacgttcttcgctgccgtcgggatgcagcagcgtctgcagccggccggctcggtcccagtggtagcgggtcaggtgaccttccgcgtcggtacggtgcgtcagttgccccagcgcgtcataggcgtaggcggtgacgctgccggaacagtcggtatagcgcgtcagcaatccctgtgcgttccaggtcagtttcacctcgccgcccagcgcatcgatgacgctcgccggcaggctctcctcctcatcgggatagtggtaacgggtaacattgcccagcgcatcaatctgctgtgtcgggcgtccctgggagtcccagtgctgaaacgcctgactgccgtccgggtaggtgaccgagaacagacggccgctgttgcgggaatactggtaagtggtggtgcgacccagcgggtcggtctcgctcagcagccggccgtaacggtcccactcgctctggcgctgcgcaccgcctggcagcaccacgccgcacagctcgccgcgcgcatagatgaaggccgactgccggttgtcaaagtcggtgaactgcgccacgttgtcgtcatcgtccaactgccacagcgcccgagtgccgtcgtcgcgcaccgcccaccgcgtgccgttggcaaagtcataatagagcgccagctgctcgccggcgctgttgtggtaggccgccacgcgcggcaggccgtcaatttcctgccagcggtactcgttcagcaggccgttctggtcctgatggctgaccatcagtccgtcctgccagccaaagcgccgggtgacttcgccggcgcggttgcggacggtaaccagctgcccctcgtcatcgtacccgtagtgcaccagcggcagctcgccgtccggggtaaacagcagcaccgagctcaggcgggacagcccgttggcggtggtcaggtagcggcatgccagccgttggccggcgctgtcgaccagttcggtcagtcggccgtggtcgtcgtggaacagggaaatcgtgttgccggtgaggtcagtcagcatctgcagccggctcggcgcatcactcaacgccgggtagtgccaggcctgctcgctgacgtcgaacacctgccagctgccatcgctgttgtgcatcagccagcacttttccgcttcgcagtaggttttatggcctctgggcaccatcgggaaggagacgtagtcgccggagggcgcacgccacaccagaccatcctggtagcgcttaaggctgctttcccagaacaggctccaaccgcgccccagcacgctctgtgccgggttgccgctgcgccagtagcgctgccactcaaccggcagccgcgacggcagcacaaagtccagctcgtcgtcgccggacaggaatttctggccgctgatgatatctatcggccgggcaataatgccggcggcggtcgtggcggtcattag

SEQ ID NO: 454546 - DNA, 288 bp, Serratia marcescens
atggcgtggtttgcccgcttcgataaagccagtgcggaactggataaggagaaggaggatgaaggcaaatcatttgagccggtgcgtatcacctgctggagcggcgtggttgctccgtttgccggacgctgggcgaccattgtcaacggtactatacagtacgctcaaatccgggtcgcgcaggttatgcctgattttgaagacaaacatggcaataaacaccgcgcctgctggtcgctgctggagcgcgatgatggcggagacgtcttcgttataagatcggaataa

SEQ ID NO: 454547 - DNA, 267 bp, Serratia marcescens
atgcgtaaagcccgatttaccgagcaccagatcatcactgttctgaagtctgttgaagccggacgtaccgtcaaagatgtctgccgcgaagcgggaatatctgaggcttcgtactataactggaaagcgaagtatggcggcatggaagcctctgatatcaaaaagatgaaggatcttgaggacgaaaaccgccgtctcaaacagatgtttgccgacctgagtctggaaaatcgcgcgttaaaagacgtcattgaaaaaaagctttaa

SEQ ID NO: 454548 - DNA, 1002 bp, Serratia marcescens
atgttcctcacgggatttgacagcccggccctcaatacgctttacgttgataaaaacctgcgttaccacgggctgatacaggcattctcccgaaccaaccgtattattaatgagaagaaaagccacggtaacatcgtctgcttccgcaacctcaagaaagccactgatgatgccatagcgttattctcgaacaaagacgcatcctcagtcgtgctggttaaaccttttgaggagtacctgagcgactatcaggctgctgtagataccctgttgaccctgacacctacagtggaaagcgtggacagcctcccggatgaaaaagctcagcttgcttttgtgacggctttccgtgacatgatgcgactgaagaatatcctggagagctttgctgattttgatgaagtgagtaagcctttatcggatcagactcttgccgattacaccagtaaatatcttgatatttatgacaaggtgaaaaaacgcactggcaaagataaagtctcgattctggatgaggtcgattttgaagtgtcactgattcatcgggatgaaattaatgtcggctatatcctgaggctactggctggcatcaaggctatgccacctgaagcgcagcaggaacagaagaagaaggtcatggatatcgttgacagtgacgtcacgctgcgcagcaaacgtgaactgattgataacttcatcgaagaaaatctgctgcatgtctcgcatgatgaagatatcacccagacctttgaaacctacgttgaacgtgaaaaacgtaaagcggttgcaacgctgtgtgctgaagaaagcctggatgaaagtaaagttgccgctttgctggataattacctgtttaccgatattaccccacgcgaggacgaggtagccaaggctctcacatggacgcccaagatccttgaaaggaagacggtgcttaaacgtgtatatgacaaggtttgtggcgtgattgatacttttatcaacggaatgcgtgggttctga

SEQ ID NO: 454549 - DNA, 954 bp, Serratia marcescens
  misc_feature (881)..(890): n is a, c, g, or t
atgacgacctgtattgatggacgtaagaaacgcgctttactctcacctgtaaaaaaagtgctattagctgcagggttagtgctgtcaagctcatatctgtatgcccaggactttgaagtcggtgttaatgttcacttgagaaagtatcctaagccgaccgataattacctgtctcttattgagaaagcgggtttcacttcgtatcgcgatggatttttatgggggatggtggagcctaaacctggaaaatttagcgttactggcgatgctaaaaaagaagataaggcttatcaaacagggaaatcagaatataacctaaatggtctgctggtgctgggtaatggcaatggccgtgccggttatactgctgacggtggatatccgcgtactcctgaagctatagatgcctttgccaagtatgcctattggacggccagccgctataaggggaaagtaaagtactacgaagtatggaacgaatggacggtgagaacgggaatcaggaataatgaatctgtcccttctccggaaatttatgcgcagctggttaagaaaacgtctgaagcagtaaaacgcgcagatcctaatgctatcgttatggctggttcgcttaacccgctgacaaaaaaggggctccagtggtttgatagcttaatgaaactggggattttggatagtcttgatggcatctcgttacacccttactcgtataaagataacgacctggccctgcgcaatccggaagataacctcgctgcaattgataggtttgagcaaagggttaagaaattcagcaataaatctgtacctatgtatataacggaaatcggcgtaccgacctatagcggtgttgggggcatgacgaacgatcaggctgcacnnnnnnnnnnacgcaataaaatacaccatgttagccaagtcgcgaccctatatccgcggagtctggtggtatga

SEQ ID NO: 454550 - DNA, 588 bp, Serratia marcescens
atgatgtcagcgcttgttgacgaggatttttttgaacagcaggttcgtcctgagttggtgaaaaaactgaaggacaagaaatttattacggtccaagcgtgtccatataaggtaaaattcactgctcaagagttggccagtgaattacaaaaggttaaggagcaacatggacttgagagcgttttgttacctatcggttatgccagcgggcatgatgacatagagtttcttgagaaagttaaagcttgctctgcttcagaaatgctgttgttggatgagctaaatgtctgggaaatcatgtatgtgatagcaaaatctaacggtttttacggcaccagtttgcacggcgtaattaccgcaatgtcctttggtattccgcacttttgcattaatgatgacattgaaaagctggtttcattcttgcaaacatggagcgtgtccccttacaacaatcctcttcaggtacagcaaatatcctcatcggttgcgttgaccacggctgtggaaaagtcgaatctggataaagcggtagaaaaagctcaacagcttattttcagcagcgttgatgagattgctgatatcctctaa

SEQ ID NO: 454551 - DNA, 522 bp, Serratia marcescens
gtgaagacactggctcaccgtctggcgaaaacgccagaaatagagctgctgccctataacagcggcattatcctcaaggccggagcactaccgccagcgctgggcgaaacgaaaactgaagaactgccgccattactggtaaaagtaaaccaaatgatcaaaccagtgcgttttaatggctcacgctcgctgcatttctactcagagcacaataactttcagtttgataaagaatcaacaatgaagtggtatagacgcttcgatgcggccagtgcggagctggataaggaagatgaaggcaaatcatttgagccggtgcgtatcacctgctggagcggcgtggttgctccgtttgccggacgctgggcgaccattgtcaacggtactatacagtacgctcaaatccgggtcgcacaggttatgcctgattttgaagacaagcatggcaataaacaccgcgcctgctggtcgctgctggagcgcgatgatggcggagacgtcttcgctataagatcggaataa

SEQ ID NO: 454552 - DNA, 246 bp, Serratia marcescens
atgaaagaagcgaataataaaaacgcaatgatttattggaagaaaacaccggtagctcaagcggaagaaccggagagtacggtgaaatcgttgatgaataaggtgattggcgacaaccctaaaaaagagcctattcagccaattgaagtcatgaattcagatgactatgtgttgaaaggcggtgtgcccgtactggtattttctgaaaaggcgttaaacaaagatgatatcaaagaaaaacgctaa

SEQ ID NO: 454553 - DNA, 327 bp, Serratia marcescens
atgcagagtctgccgatcgttccacgcctgatgactgacgtgcgtaccggcgcaaaacgccacaccatccgttggcaggagcgcacgatttcaccaggtctgatgcgctatgtcagcactgaggatccaaacagcacagccacggtgagggttagcgctgtcgtcaccatgccgctgtcatcagttgcgtgttatttgggtaaatcagatgaatggccggatgccgtgctgctggaaggcatgagagagcactatcctgatattcaactggattcgcgggtggaggtgatacaccattccgcgcctttgccggatgctgaaaaataa

SEQ ID NO: 454554 - DNA, 246 bp, Serratia marcescens
atggtaaggggtttgatgagttttgctgttagctatcgctacaggttagatggcagacccttgagacgttaccctatggaacaacaggcccagattatcgctgattactttatcctccataattacggctatccggtttggttgacactcaaacgaaggggcgacgtcacgttagatggcgacttctccgagtctgttatccgacgacagtatcaggaagcaatgcgttatttcccatggggatga

SEQ ID NO: 454555 - DNA, 894 bp, Serratia marcescens
atgaaaagacgctatgttattgcggatgtttttacggatcggccgtttctcggtaatcctgtcgcggtcgttttagacgccgaggggatgagcacggagcagatgcagcggattgccgttgaatttggttatagtgaaacaacgtttgtgcttcctccggaagagacgtccaatacggcacgcgtccgaattttcacgccatcgcgtgaaattccgttcgccgggcatcctaatgtcggcaccgcttttgtgctggcaagctatgccgcagtcaagggagaggcgcttcctgatactgtgcttttcgaggaaggcgccggtctggtgccggtcaggctgataaaagacaacggggcagtcaccggcgcagagcttctggcgccagaggcattgtcatgccgttccgaagtcagtctggaaaacgtggccgcctgcctttcactggcaacggaagatatccgcacacaagtgcataggccgcaggttgtttcggttggcttgccttttcttgtggtggagctggtgtcccgtggtgcgcttcgccgctgcgtgccaaatctgcagggatttcgtgccgttctgccgcttgatggtgcggtgtcaatctatgcgtatacgtcagacaccactcccgaagagcggtgcgacctgcaggcgcgcatgtttactccccgtatgacggaagatccggcgacaggcagtgcgaccgcggcggtgacggctctgttggcacagcgccatggtaaaacgctgctgtctctgcgcgtcagccagggggtagatatggggcgtgcaagtttactttgtgcaagctatgacgccacgtcgacaaggccgtgtatccgggtaggaggcaacagcgtcatcacgatggaagggacatttagcctgtga

SEQ ID NO: 454556 - DNA, 390 bp, Serratia marcescens
ttgaccgattattgcgggcttttgtcggtactccagtcattggagattcagctgcatctgccggcgatgcgtaacaacacagagatcgttggcgagttgctgcatgatgaatttgaagaagtcggtcgttcaggacggcgctatgacaaacggcaaaccgttgcggcgctggcaacggaaactgagcagctgcaaattttcgccgaagggttccagctgacgatgattagcgaaggcgtcgcattgctgaggtataaaagttttcagcgtgataccagtggcaaagttgtgcgtcacacggaacgttcgtcaatctggctgctatcatcatcagaaaaagaagctcgttggcagatgcgttttcatcagggcacgccgatcgatgattaa

SEQ ID NO: 454557 - DNA, 483 bp, Serratia marcescens
atgaagttaaaatgtacctttcatttgaataatcaatacatgtcttgtctctgtgttgatgggtttggctcctttgctgcttggtctggcattggtgaagggcgcaacaaccctaacatgacgcatgtccccagcattggcgcactcctcaacggtcgctactacatcgtagaaaggccaaccggcgggcggatggggccactacgtgatgctatgctcaaacacatttacagaactgatagaagtctatggtttggcctgttccgggacgatggaaagacagatgatgtgacgttcacacagggcgttatgcgtggtggattccggttgcatccagcggggccgcgtaagatttctgagggctgcatcactctgttcaatcagcgtgaattcaatgtgctccggtggcgtatcctcaactctccaaagttcaaaatccccggctcaaacctttacgcctacggtgaggtcagagtgatatga

SEQ ID NO: 454558 - DNA, 1134 bp, Serratia marcescens
gtgaagagattgcctggctgcttataccaaccgttccatggcgaacttgcacctgaactgtatgacaggatcatcataccatctcgtgcatggagcatggtttgccgtgactatacattcgatgataaaagtgccataggttttagtaattttggctcggatatcaaagaacgtgctgcctggaacaacgcccccgttgatgagcaaggttattatgccaagtcgatgaaacacaacatcgagcatggtgacgttgtttatatcgacaccaagtcgctatggaatcctttagacttcgcgttttacatcaatcaccaagggtttctagtatcaaattctggctacagcgcctttaagcttgatggtgccaatcgaattattcgctattacgaacaagccattacatcacgtcgtgggcaggagcgaccggcagccaccgttcgtcctcttccacagcagcctcaaaaggccaagcaacagctccatacgttaaacagcaaagcggttggacggttgttagccgcaggcgggatatataaccaaaatgtggaggggtttgctgaaacagcaaaacagctcggcggggaggcggctgatggttttagtcaggttgccaaccctcagtctattggttcgctgatcgcactctcatctatcgtagccgtagcaaaactgccaaacggtaacattgcgaatatcaaatcattagaagagttacaacattatttaggaacatacaaaaaacaaccaacacttctaaataacatagatgtattaaaaatgagctatataaaacgcccaatggaagagagaaatattctgcgtaaagagtttgataataaagtaaggagaaatttccttaaatcgatttctaatgacaaagggatgagcgaacgcttcaaccctattgaacgatcagacatagcttccggaaggccacctaaaggatggtctgttcaccataaattaccgttagatgatagtggaactaatgatttcagcaacctaacactaatatctaactctgagcatgccattttcacaacaactcaaagaaaaatcgttcgcggtatgtcacttgacgaatccaaagatattctatggccagtccccaagggaaaggtttacccatga

SEQ ID NO: 454559 - DNA, 489 bp, Serratia marcescens
atgaaaaaaattgaagagtcagttaatgatatcaaacgcctggtgcattcgcttggagtaaacaccagctatgttgttgaaccaggatatactggtgacattccatccatcagttttacaggaaaacaaataactttaatagctaatttctggaatgaataccatccatttttaaaattaatggatgggtttgacatagatggatatgaactgtatggaatcagcaacaaatcggcggatggaaataaaaaaataaatatagaatccgcgaacagcttatcaaatgaattatcaagtgattatgatgaacaacttgaaaacctcgtaatcattggcggaaatggcacagatatttttgtatgtgaccttcagtccaaaaaatgggatatgcgggacagcattgccattgatgaggcttacgagtcccacgactcatttgaaagttttctgtcctcagtagtaaacacgattatagaaaacaattcctaa

SEQ ID NO: 454560 - DNA, 171 bp, Serratia marcescens
atgttcgcggtattgctccggcgcttcttcaatcgccaccagcacttttgtgcgggtgattttccgtgcgtacaggtcaaggatcaggccgcaggcgcgcaggtcgtactgctccaagtcgcgttgttcctgcgtctaagctcctcgattgaatggcaggccgggcggtaa

SEQ ID NO: 454561 - DNA, 423 bp, Serratia marcescens
atgaaaagatatggcattatcattttggcctgtatgccggttttttccggtgccggggccgtttccgacattgaagggttgatatccaaggatcctgcggcatgccggaagataaatgttaataaaaactatccggcattattggcgtgcgtcacgcgtttatctgcacgttctgagcagaggcttaacgcgcggttggcggaaataagaaaggatctggcggtactcggggatgttgagtatcgcgccgcttttgaaactgcgcagacatcctgggagggttatagaaccgattattgcgcttacatcactatgggaatggacaggcgcggcagcgcttttaaatatcaatctgacttctgtagcgcgtcagagaactaccggcgcttagatacgctggaaggagagccgtcagctagctaa

SEQ ID NO: 454562 - DNA, 1221 bp, Serratia marcescens
atgcctgtggacctttctgctattcctgatgtcgctcaccgcaagcggcccccgtcattaaaacgctggttgatggttttattgttcttcctgattgccggcggcttcctgacgttctggctatggcctgccgatgaatccgttcagggagcgttgttctggcactgctttatcagcataccgcttgccgcgtggatagtcgcccttggcgtgcgctggctgatctggttagccggcgagtggcctgcggaagggtgggataatgcgcgtgaacaggatatcgcacatgaaattcagcgcggccagcgttttctggcgctggggggaatgagcgtgcatttaccgcatacggtgacgtcaggtgtacttacccagcaattcttattaccgcgggggattaccttgcctgcggtagtggatacaccgtcgcaggccgtcagctatcaggctgcttttagcgatgtcgggcagtctccctgtcagcgcgtcagccggcggctgaaagcactgttggaagatagcgccatccggcgtgcattatcacagcgctatgccgtatgcccgttaacggtggttatccagagcggggacgatagcctgctgagcacagaagatagggagagtattaaaaatagcatttcaccgctgttgccggtttctgcccggataaattttttagtccattttggtctggctgcaattgataactggctggatgaccccggctcgattgaggcgctgttgatcctgtcggtcaatttgcccgcggtgatctcggcaggggaaggtgaagcggcagtggcgttacttcttcatttcgggaaagatgagtgcgatgatttttcaatcgcccgcatccaccggccggaacactccagtaagatgaggacgctccatacttcggcgatgcaggcactgcagtggggaaaaacgcgcactgaagatgttgccgcgctatggctggcaggaatgggaacggaaaataaggctcaggcgttgcttgccaacaacaaccttatatttccgcgcgttgaagaaaatgcacggttgacggatattgatctaaaaagcggctataccggagcggtatcgccttggctggcgattgcgcttgctgccggctccgccggaaaaacgccgtctcctcagctgattatgagtatgccagaaaaaagtgcgctaccctggtggctgattgtccatcccgtacctgcttcataa

SEQ ID NO: 454563 - DNA, 1029 bp, Serratia marcescens
atggattataatggattaataataaaatataagaatagggcgtcgtctgttcttgtcgccgatgagctgaattatcagctctgtcagcatcaggcaattgaccttaacggtcgaggcgtgatggatgatgcggcggttattcattttagctccggttatatggagattgtggataaatggtattcaattaaaggttttctgacattttctgcattgttatcgttcttgctttgtagctggggagttctggatttttcctcttcaatgatatacgagtatttatctggtaataaaagggatacttttttctggggatttggcataggcgtcgtcattgtttgttttcttctggcatggctgttttctaaattgttgcgagtagagtgtttccgctggacgcattatcccgtcaggtttgacagaaaaaacaggctggtgcatgtattttctgtcgacggtgaggtgtacagcgcgccctgggacaagattttttttaccaccggtgactgcgttgaatataagtatgagaaacgaaagtatcacgatatacgcgggcacgtgctggcagaggacggtaaaacggtattgaaaacttttacgctgccggtgtcggcggcgcggcgtgaagagctttaccccaactgggagtttgtccggcgctatatggaagagggtccggaggcggttgccgatgtcctgcaactgatgccgccggtggaaggacggcgtgaggggataggcttcggctactggtatctgatgttcagcgccagctatggcgcgccgctgccggtggtgccgtttctgatggcgctgtatctgacggcgtggccgttcagggtatttgccatgtacagctgtaaaattccgcgctggagcaaagaggtggatgcgcagtgtgtgatagcggcggatgacccgtgggatatcagcgcggcgcaaaacccgcgctcaatctggcgctggatgctgtggatggacaaatcgcacagtatggtgagtaagaagcgagcgatgatgggggagtaa

SEQ ID NO: 454564 - DNA, 2625 bp, Serratia marcescens
atggatggaaagacgttggggtgtggtttttgtagtcgttatggcttaccgattcttcccgtacgtcctggcgtgatggatagccaggatcgccttccgcacttgccggaaagcttcacgccggacatagcgtctcgggaatattcatcttataccggccgtctactgagggaagggtatcttcatatttatgatgaaatgatcggtcgttggcaggattactatgtcacggacaaaggatactattatcctctccccggtagtggagaaataccgcccggtctgcgtaatggtgaaatgaaaccctgcttttccaaaccacaagatctggccagagcatcattaattaccttgcctgttatgccgccgccaatgaaaaacggcgtgttctggtttggttggtcagaaaataaatggacgacggcggtcaggaaaatgcatgaagatcccgcagttcgccgaaaagtgatgcagaagtttgatatggaaagttggctgaatagcggtaacggtgaagcaatcactacgctatatcaactgaccgatgtcgtcgcggaatacagccctatggccgcgtttgcggaaattaaatattattctgcatccggtttccagccaaagctgaatgccggtgttcagattatcaatgaggcggaaagactgttgcctggcaaaggtgcgattcttgttctccaggatccggtagcggttttacaggaattatcatccctgttgtcatatatgataaatcgcgatctttatggcaatgaaaaatatatgtggaaactggcgttatcgtctacgttgacggggcttaaagagtcaatgacgcgtcaaatggcacgggatatgatcgccgacacagagtttttgtcgatgagtgaaaaactcggagtgaaaacgtatggcggtctcgatatgttgccttctccggagttggctaaaaaacgcaacgaggatttggacagtaatctgcagcggcgcgttgatgagaaatggcagtcttatgcggcatattatgatgaacggcagcagacgcaatttgctgaggagtttaatcaagagctcaatcgttacgatcggcaggtcgttgtccccataacggagatgtatttggcatggtttaagagcgaacgtttgacaaactactttcgttataattttgatacggcggatattcagagtggatttgattatattcagactgtgaattactgcgttgcaggtatgcaggataaggcgctggcgtcgcgttatttcaccacgcaattgcagatgaaatccaacgatgatcgcaatattttaatgcgggcgctggtgcttaatcaggatgaaatgtcaaatcatcttatggcactgtttaaagaggggggcagtctgtgggcgcagccgtggtacgggatagtcgatgcatttaaaaacacgttcggcaaaatgcaggaggcggcggcgggttatctgggcggattattagggctacttaccggcagtatttcccgtatattacagttagcagccaacagtcgtttaagttatcaaatattttgtatgatggcggcgagcagtcagcgggcctttatttcgctgagcctggttggcactgaggcggaatttgttgagcatgtggtgcgggtgatggggcgtaatgccggtattgccggaggacatgcggaagatgtgctgcgtatgtatactcgctgggaactgaggcggttgaaaattgacggtatgccgttggccggaaccggtgaacgccaatttgttgtcgccatcgatcttgaacggttttaccaattggtgtcattgcctgaaaatcaacgtatatatcatttaaatgagtcgttacgtacggaagcggatgttgaccgcttgctgtttccacgttggcagaacgcaatcagtgaaggtttcagcacggtcagatcaggcgtgccattggcgctcggcgtggtttccatggcgctgcaaaccgcagccttgtgggtcagtatggatttcagcaataagccggccactgccagtcagcaggaggcacgcaaccgcttttgggccggcaccctttccctgaccggcaccactgcgggcaccattgagtcggcaatcattcattttaacagaatgaatgcggcatatcctggctcgtcggcggccaaaatcgccggctggtttgctgccgcagggcggtttctgggcgccgccgggggattagtcacggcatattatgattatgcgcatatgcaagaggagtggcagagccagcggaaggggctgtcctttgcctatggggcatcggcaatatcgggattttatttgtcagtggcgccatttattgactggcactggctgggaagaacattgcaggctataggaaggcatgcaggtagtcgtgccctggttacgatagggataaatgccagcgtgacagggttgactctgggatggattatggccggtgtatttttagctgcggcattctatatctcctggaagcaaaccaacgagttgcaaaagtggctggaaaaaaccatgtgggggcggacgccagaggggcttcctgcagaaaaacatcctactttgcaaattgagatgcagagcctgaaagatattatgcatttggagagttga

SEQ ID NO: 454565 - DNA, 822 bp, Serratia marcescens
atgcaatacgaatacctgaataaggcgctaatgccgggagagcatgattttgcgattattgacaggggacgatatccatcggtctgtgaatcatggccagtgcttgagttggtgtcaccgatgttgcaaccgcaggctcatctatatccctggctcttgccgctgaaagatatgagatcgaacgactggaatatgttaatacgcgagcttgggcaggctatatcgccggcagtatcaccagcctcctgccttttactgcgtagcgataagccgataccggaagtgcgtagtcagcttatcagggcgttgtactttaccgatgaaaatcatcaggggcacattctccgctggtatgaccccagggttctgttccatttattctggatgttttctgccgaacagctaatgacgctgcttcctgttggtctggcctcttgctggactttgtggcttgaggggaagtggtactctttagtaacgcggcctttaccagggacgactgcgatgcctgaatatgtcctctggacaatgaggatgcgtttacaaaatatttctttaataaatggcgtattaacggataggccgccagtaagcaatgtcattgaacgattacatacctgccggcaaattgagacattattaattcaggcgcgagagttcggcctggagcaacgtagtgatttgatggcatttgccagtagtgtattagagcatggcgataaattctggcaggcgcctgacgttcaggaaatattaaggctatctgtcagtacgccaggatatttttcccgctgggtaaatagtttgagatatagggagtag

SEQ ID NO: 454566 - DNA, 978 bp, Serratia marcescens
atggattattacgggcttttccctaaattcaaactgaaccggccgcttaatcaagaggagaggggatatcagctgcatcagggacagccggttgaactggccggtcaatcactggtgccggatgccaaggtgatttcaattaattctcactatctggagttggtggataaatactttgcttcaaaaggccttgttagtcttataactgcattcgggactgttattcttcttactggatttttatttgtgatcataataactccttttaaaggtgggtggccacttattgcggttattagtttgacaaatttacctatgggtttatggatgctttatcttcttaaaatcgaatggtttgcctggacgcattacccggtgcgttttgacagaaaaaaccggctggtgcatgtatttcggctggacggcagcagctacagcgtggcgtgggacagcgtgttcttcaccaccgggctgaaccaccggaaagattccaataaagactactacatcagcggccatgtactggcggaagataaggtaacggtgctggacaccttctgcctgccggcgacgcacggcgacagaaagcagctggagcggcactgggagtttgtgcgccgctatatggaggaggggccggagccggtcatcggggtggtggatttctgcctgccgatagcggagaagcgtgaggggtttggctttgggctgctctatttaatgtccggttttaacggcgcgccgctatttttattaccgctgttttttgtgctggcatccctttttgccctgccgcgctatatcgctatgctgaccagccggcatccgcgctggccggcgagcatcgagtcccggtgccggattgccgaagatgacccttaccgacgggatgcgtccgataactccccgcacccatggcgggatatttttatccggtcaggccggaaagataaaaataacgatgccaacctgaactaa

SEQ ID NO: 454567 - DNA, 591 bp, Serratia marcescens
gtgcgttttgacagaaaaaaccggctggtgcatgtatttcggctggacggcagcagctacagcgtggcgtgggacagcgtgttcttcaccaccgggctgaaccaccggaaagattccaataaagactactacatcagcggccatgtgctggcggaagataaggtaacggtgctggacaccttctgcctgccggcgacgcacggcgacagaaagcagctggagcggcactgggagtttgtacgccgctatatggaggaggggccggagtcggtcatcggggtggtggatttctgcctgccgatagcggaaaagcgtgaggggtttggctttgggctgctctatttaatgtccggctttaacggcgcgccgctatttttattgccgctgttttttgttttggcatctctttttgccctgccgcgctatatcgccatgctgaccagccggcatccgcgctggccggcgagtatcgagtcccggtgccggattgccggggatgacccttaccgacgggatgcgtccgataactccccgcacccgtggcgggatatttttatccggccaggccggaaagagaagagccaacaataa

SEQ ID NO: 454568 - DNA, 2589 bp, Serratia marcescens
atgagcgcacaaaaaggttgtaaattctgcattcgccgggggctgccgatacttcccgcccgtccggccattatgacgcaggacgatacgctgcctcgcctgcccgccaccgtcacgcccccgatgatggcgcagggagaaatcgcctggacggcgcgtctgttgcgagagggtttcttatatatctgggcggaatcggcgcaacgctggattagctacttcgccacgagcgccggttactactacccgttgcctgaacagggtgaagcgccgcccgatattctcagcggcgagcttaagccctgtattacccaacctgaggaactggcgagcgcatcactgattactctgccggtaaagccggcgggcatgaaaaatggccgtttctggtttggctggtctgaggttgagtggacggcggcagtgcgtaaaaagcatgaggatgcggcgtaccgtagtcagtacatgcagcctttcgatatggacgcatggctcggcggcgaccaggcgcagcaggcggtaccgatcgccggggtgagtgacacgctggcggaatacagtcacggcgccgccggatgcaaggccagagcgtggtccccggcgccctggaaaccgttgcctcctctggcggcagaacagcttaaacaggcggcagacgctttgtatgccggaaaaggggctatcctgctgctggaggatcctccggctattcttcaagagctttccgccgttattaattatgacttacaggagcaggtgtacaaaaagccggaatatcagcgcgaactggcgctggcctccgccattaccgcactgaaagagtcgatggtgcggcagtttgaacgcgatcacattgagaacagtgaacatttggaacggctggcgatccatggtccttttggctatgccgtaaatgatgaaattgcggacaacatgtacagcccggctcacgacaaacagctgcgacctgccgtggctaagaaatgggcggaatatgaacagtactatcatccagaaaaagtggcggcgtttcagcagacctttaatcaggttttaacgcgttacaacgacagcatcgtcagtccgcgcactgacatgtatctggagtggctgcggggcaaggcgttgctggcgtattttcagcataactttgacagtgaggaactgaaaagtggcattgaatatgtgcagacgctgaactattgcattgccggcatgcaggataagctgggtgtcttccgtcatttcaccgatttactgtccggcacgccaaccgatgccaccaacatcctggcgcgggcgctggtgtggaaccaggatgtgctggcgaagaaattagccaatgccacaacgttttcgcctgactggctgatgatcccctggagcgggttggccaatgcctttaaagagggcattgagaaaatgcgcgatgatgcggcgggggtggcggggatctttatcggcctgctgtctggagtgctgacgaggaaaatcgctcaggcgcttgagtccaaacagatattcagctgtttggtggcgatgggggcgatcaccaacaaggcgttaatcccgctggaaaaaaccgggagctataaacagtttgtcagtgaggttgtcacacagctggcgaaagagagcgggctggatagtcgtgtgaacaaggatcgtctgcgccactacattcgtcaggagcttaggcgactccgggttgacggattgccgatggacgttaaggagacaaagcgcttcctggtgctggttgatatcgatagggtttcggagctgttgcacttaccgcctaaagagcgtgcgcgcgccgtaagtaaactgttgcgcaacgttgccgatgtcgaggcccaacagtttagccgttggcagggggccgttcgccgtggcgtaagaaacgtcggtgaggccatgccgtttaccttgggcattgtttccggggtgctgcaggtggctgcgctctatatcagcgccgatattaaaggtaagaaaacgctgaccgccgatcagaaagaggcgcatgggcgctttgcggcgggcgtggccggcctggccagtacgacgctgaatacgattgaaaccgggattaaacagtttcggctgtttaccgatgcttcgtcaaagctgcgcatttttggctcagagacatttttacggtggattgaatttggcggaaaattcctcggcgcagtaggcggggggattgttgcgggatttgatctttatcatggagtagatgaagcttctaaggggcatggtgggcttgctgttgcttatttcttgtcttcagtagctggagcatggctgagtgtagcccttgtggttgcttcaattccagtttttggctcttttattgctgttgccattctgatcggtactgctatttatctggcgtttaactgtcgtgacaagattcaaaaatggttgctgcaatgtaagtggcgccggatacccgtgaatgtagctcattcaaaagaaaaacaagaggaatataggcggagagaggaagccgatctaccaatctggcccaccatgcagatggaaatggatgagttgaaattggctctggactcaggagtatag

SEQ ID NO: 454569 - DNA, 858 bp, Serratia marcescens
atgacgattgactatgcgacacggcctttgccgctgtcagcacaccaatatgcggtggtggatcgccggcgggtgtccgaactgccggacggctggccgctgatcgaattggtttcgccgatgctggcgccgcaggcgcatctttacccgtggctggtgccgttacatgaattagcggccggtgagtggcgtatgtttacggagcaattggcgcagtacccagatcgggatctgccgccgcgctgttccctgctgctttccagtccccaaccgcctcaggtggtgcgtagcgctctggtcagcgctttatattttcaggatgaacatcgccaggggcacatcctgcgctattacgatccccgtgtcctgtttcacttgcactggatgttgacgccatggcagttgttcagcctgctttcggcgcaagacattccgcactggacattctggctggacggggggtggcatacgctggcgtttcctgaacgcattgcttaccggccaggtgataccgaggaaatgtcgctgcagcagttacagcgctgcgggctgataaaccaggttttggcgacgttgccgcacagcgccgatttgtcgcagcgccggcagataagccgccggatagcggccctgttggaacaggcgctaggctgtgggttatccgctgaggaagatcgcatcgcgtttgcgcgacacggcctgaagctgcgggatgaattttgggcgatgccgaaaatggcggcatttctggcgcaggccagccagaatcctgacttataccgtgatgaaaccaataactgggatgacaagcgctggctggatatgacccggccgagtaataacggatggaacgattaa

SEQ ID NO: 454570 - DNA, 2376 bp, Serratia marcescens
atgatggcaaatccgcttgcggtgattttcagccacagccaccacctgctgcaggtggcggactgcgacgcgctgctggacgtgctggcctttgaggggcaggaggaactaagtaaaccgttcagctaccggattgaatttaccagcgccgaccacggcatccatcgggaggcgatgctgatgaaggcggcgtcgctgacgctgcaggcgccgctcaatcagggcgccgcgattaaactgcagcagccgctgcgggtgatccagggcgtggttaccggcttcgagcgtctgggcaccaccaacgatgagagtcgctacgcgctgactctggcgccgcggctggcgctgctggcccacagccggcagaacgccatctatcaggatatgtctgcgccgcagatcgtggagaaaatcctgcgcgagcgccacggcatgcgcggtcaggatttcctgttctcgttgacgcaggactacccgcggcgcgagcaggtgatgcagtacggcgaggacgacctgcgttttatcacccggctgctgggggagctgggcatctggttccgctttaccgccgacacccggctgaatatcgacgtggtggagttttgcgacggccgtcagggctacggcgcggggctgacgctgccgtcggtgccgccctccggtcaacatgacgagggcgttgagtcgtgctggggcctggagagccgccatcaggtggtggaaaaacaggtcagcctgcgggattacaactatcggcaggcgctggaggcgatggatgcgcaggcggagattggcgccggcgacggcactacctacggtgatgcctatcactacgcggataactacctgacggtcggcagcggcgaagaacgtaacccgacggcggaaagcggcgcgttttatgcccgcatccgccatgaacgctacctgaaccgccagggccggctgttcggcgttagcagcagcgtggcgctggtgccgggcgaagtggtcagggtgagcggcggtgcggaggtgacggaggtgttccgccggggcgtggcgatcgtgcggacgatcagtacggcacggcgcgataaaagtctggaaatcggctttgaggcgatcccggacggtgcggattacgcctaccggccgggcgtgccgctgcggccggtgatggccggcacgctgccggcgcgggtgaccagcaccaccgagaacgacagctacggccatatcgaccgcgacggccgctaccgggtcaacatgctgtttgaccggtcgaactgggaaaccggctttgaaagcctgtgggtgcgccagtcgcggccttacgccggggagacctacggcctgcacctgccgctgctggcgggcaccgaggtggcgatcggctttgaggacggcaacccggaccgcccgtacattgccggcgtgctgcatgattcggcgcacccggacccggtcaccatccgcaactacaaacgcaacgtgctgcgcacgccggcgaacaacaaaatccgcctggacgacagccggggccaggagcatatcaaggtctccaccgagtacggcggcaagagccagctgaatcttggccatttggtcgatgcggaaaagcagaagcgcggtgagggggttgaactacgtaccgatgaatgggcggcggttcgcgcaggaaaaggattgttgctgacatctcaggcgcaaccgaaggcgatggcgcaacagttgagtatggatgagatcaagcgccagttgtcagatgcattgtcgctggcggagtcattatcggaggtgttgcagacagcgcagattgaggggctggacaacgctacccagcagcagtttctacagcagcatgtggatcggttacagcagccggttattgtcgctggcgcgcctggcggcatcgcattatccacgccgcagcatattcaactgagtgcaaaccgtaaccagatcataaccgccggcggaactaccgaaatcagtgcgcttaagcgtatggtgctggcggctaaaaccgggtttgtggcttttgtacaggaactggggatgaagttggtggctgcgaagggaaaagttgatattcaggcgcagagcgacggcatggatattattgccaataaagcgctgtctatcaccagtacggatgatgaaatcatcattgcggcaaagaaaaaaatcaccctgcagtgtggtggttcatatctgacccttgacccgaccaaaattgaaaatggcaccggcggacatttttatgtgaagagtgcggggtttgattatgccggatcggcaacgctgaatgcgacatatcccggctttacagcctgtgagaatgccgcctcggaagcggccgctcagggcgatgccaccgtgcctctgacctag

SEQ ID NO: 454571 - DNA, 1743 bp, Serratia marcescens
atggacaagcaaacgccggttacttatgaagatgtgatgagccgcggtggatatacccccgttggttattttaaagacggcttttatattgaatcacataatcaggcgctgtatttagaaagtagtgataaatatgtcgcttggcggggcaatttgccacatgaattgaaatcaggtttgacgccagaaaccgatgggggttatggcccgactgcttgggcagatgtgagcaacctggaaccatcgatccgttcggataatatggtgctggtggaagatttcttccatttggtcactgacgatggcgactggacgccggcggcccaggccgcgcttaagcatgcgtttgataataagcttaataaagtttggtcatttcaaaggatggcgtttaaatcaccgttgcgcattgataattggggccggggattggaagtacgttttgcaaatgtagaagcgcataaaaatttccctgtttacacggactggaaaaacgcaacgccactgattctgattggcggaagttccgggggtgggatggttgctcttgaaatccatattggctatatgaacggtaagacagttgcaaatggcatatctgtgcaagggccaggctgcggcggttcgcggattcatattggtcgagcgattgactgtaatattgtgtatgactgcagtcggcaaacgcatccttcagcctctaactttattaccggcgattattggcatcggggaaatatgggagcttacttcgccagggggacgtccggcaagcaacctgttgcagaagggcataaactttccgtcggttttattaccgggatgatttatggcggttctctgtggagaaatggttcgcagtatgggcagatttccggcgatgcagacttcaatggccgatatttatcggaagtgaccctatccggtaattcatttactgggctggagcgcggcgccgaaatttctaacggtacagcaagcggtgaagtgttggccttctatgcacaaaccgcgggcgtctataaagttttgattatcgagaaagttaacgtgtccggcggtaatagttcctttgccacgggcgataagttgacctccggttcatggagcggtgaagtgtctgctgtacgcaccgcagagcaggggcagcagttctattttgatatcatcctcgatttttatggcagcgcctttgccaaaattgatgtggactgtggctatctgggcggtattgttggccattctctgcatagttgctccctgaactataagagttcgtactcggcatataccaactcgatgaatggcgcgcagtgggtgcattccggttcaacgatgacgctgcgggacagttacctgaataaaaacgtcttggacagcaccgctgattttgtggcaccgggcggccatctgtttatgcgtaattatcggacctatggttccgagtttgcagtgagttttgccccagcgcaggagcgtacgattcgtaccttcagttacattggcagcacgaatgcgccgggagtcaaagatatttatgaagtacaggtgtttgggccaaccggcttaagcgggatttgctcaagctttaaagttgctgtatcgccaagtggcctggaaatttacgacagtaccattaaggacacgtccaaactgcagattactgctgacaagctgtcactgaaggcacggcaagattcgccgcataccttcacactctactttaccttcaacagaaagtaa

SEQ ID NO: 454572 - DNA, 1059 bp, Serratia marcescens; identical to SEQ ID NO: 219943

SEQ ID NO: 454573 - DNA, 210 bp, Serratia marcescens; identical to SEQ ID NO: 219927

SEQ ID NO: 454574 - DNA, 588 bp, Serratia marcescens; identical to SEQ ID NO: 219926

SEQ ID NO: 454575 - DNA, 927 bp, Serratia marcescens; identical to SEQ ID NO: 219924

SEQ ID NO: 454576 - DNA, 720 bp, Serratia marcescens; identical to SEQ ID NO: 219923

SEQ ID NO: 454577 - DNA, 1275 bp, Serratia marcescens
atggccttcggcgatacgcagcttaaccagctgatgagtgaagccaccgcgcattcaccttctctggcacaggcagaagcccgggtgcgtgaagccacggccagaaccggtgtcgcccgttcccggttatacccgtcaatggacgccagcgcgtccattgataaagagaagctcagctacaactacatctaccctaaaacagccgtgccgcacggatggaatgatatggggcaggccagcctcaactttagctgggaactggatttctggggtaaaaaccgggatgcgctgcgtgccgcgacatccgaagccagcgctgctgaggcagatgccgccgccgcgaaactgatgctgacgacgatgctcgcggacgcttatatccgtctgcagtaccagtatgacagtcgtgacattgcggcccgacaactgcgtaaccggacggataccgtcaggctggtgcagttacgccatgctcagggacttgattccagagtctccgtggaagaaagcggtgcccggctggatgtcgccagagcggcgctggctgaagccgatgagcaaatcaaattaacccaaaacggcatcgcggctttactgggccgggggccggacagagggctggatatcctcagaccccggttgcagatgcgccgccctgtcggattacctgatgcgctgaacgcaaacctgctcggacgcaatccggaagtggtggccgcacggtggcgggttgaagccgccgccagcaatatcggtgttgccagagcgcagttttacccgaacgtgaacctgatggccttcgtcggataccagtcactggggctgaataacctgttcagctcgggctctgatatcgggagcgtcgggcctgccatcagcttacccctttttgaaggcgggcgtttacgcgctaactataaaggtgcgagagcggaatatgaatatgcggtggcgtcgtataacgaggcgctgacacaggcattacgtgaaacagctgatgttacacggagccttgctgctctggtgggcaggtcagaagcaaccgcatctgctttgtcccacagcgaggaagcttatcagctggcaaaagcccggtatcagggtgggctggccgattatcaggaagttctcatttctgaagatgcgttactccaggctgagctggcgaatacagccatgcattcccggggttatgtcttggatgtgtcactcgtcaaagcccttgggggcggatttgaatccagttcaacatttgatgcgcaggtgaaaccgtaa

SEQ ID NO: 454578 - DNA, 1200 bp, Serratia marcescens; identical to SEQ ID NO: 219921

SEQ ID NO: 454579 - DNA, 1533 bp, Serratia marcescens
atgtctggttcagcatttccacctctgtccggattcaaactggtggttgcggcaatcgtgctctcgctcgggaattttatggtggtactcgataccaccattgctaacgtcgcgatgcccacaatatccggttacctgggcgtgtcgacaacagaaggaatctggatcatcaccgcctatgcggtggctgaagccatcacggtgccgctgaccggctggttggcgatgcagttcggtcaggtgcgcgtattccttttttctgttgttgcatttgtgattttttctgtctgctgcggtctttcctggtcactaccgagcctggccattttccgtgtgctacaggggcttgccggtggcccgctgatcccgctttctgccacgttactgcttgcagccttcccgaagaaacaggccaacattgccgtggcgctctggggaatgatgacggtagtagcgcctatattcggtccgatactgggtgggcttatctcggataactggagctggcagtgggtattttacatcaatatcggctttggtctgattgtggggtttgggacctggtgggtgctgaaggggaaagaaacacatatcagccgttcccggctggacagcgtggggctgggtctgctcgtcatctttgtggcagcctttcagatcatgctggataaagggcgtgaactggactggttttcctcggatatcatcattgtctgcgccattgtggccgctattgccctgatctcgctgattatctgggagctcaccgctgagcaaccggtgctggatctgagcgtgtttaagtcacgtaactgggtggtatcaaccgtcacgctctgtctgatgttcggtattttcttcgggaatattgtgctgacccccctctggttacagcaatggatggggtacacggcaacctgggccgggtatgcgacgggccccatagggatcctggccgtcctgagctcgcccataattggtcgtctgctgccgaaggtcgatccccgtctgctggtgagctatggcatgggggtgctggcggtctcctttgtgatgcgtgccctgctgacgtcgcaggctgactttatgtcagttgccgttcccatgttcgttctgggggccggagttcccgcctgccttatcacgctcacctcgctgggcgtgtccgaactgccgccggagaaagtggcagccggttccgggctgcagaacttcctgcgtgtcatgtgcatggcggtaggctcttccctgacccagacctactgggaacatatgacaaaatttaaccgggcggagctggtgacggcaatcaatcctgacgtgccagggattgtcagcaacacgctgggcgcgaccggtattccggcagacacgtcagcggccctgttttcgagaatgatcgatagtcaggccatcatgctggcaacgaacgatttctatcagtcggctaccgttctgatgctggggtccataggcattatctggctaatcaaaaaaccgaaagggccgcttcagaagatgtcgggccattaa

SEQ ID NO: 454580 - DNA, 927 bp, Serratia marcescens
atgcgacatcataaatataagaccattgtgaagtgcctgccggtaataacagggacgttattactgagcggatgtcatgccgttttacttgatcccaaagggcaaatcgctattgaacaacgggcgctaatcattacggcattttgtctgatgttagtggtcgttattcctgtggttctgatggcagttgtgtttacctggaaataccgggccacgaataccacggcgaaatatacgcctgactggtcccactccaataaagtggaggcggtggtctggacggtgcccgtcctgattattctgtttctggccgtgctgacatggaagtctacccatgagctggacccatccaggccactgacctctgcggtgaaacccatcgatatcgaagtcatctccctggactggaaatggttgtttatttatccccaacagggtattgccaccgtcaatcagattgtattcccgataaatacccccttgaatttgcgtattacatccaattccgtgatgaacggcttttttattccggcactcggcagccagatttatgcgatgccgggcatgcagacccggctgcatctgatcgccggtgaaacgggaaccttcaacggaatctcgtccagttacagcggcaggggcttttccggcatgaaatttaaagcgactgccgtaccggataataccgcgtttgaacagtggatcgctgatgtgaagaaatcaccggatatgctgctcggtccggctgattttgaaaaactggctgagcctgacgaaaaccacccggttgaattcttctctgtcatcgatccgacgttgttcagatacgtgactgaaaaatttaaagcacacgatcacgataaggagacgggaatgactgggtcagagccggaacaacacctctcacacagagcgcggggaaattaa

SEQ ID NO: 454581 - DNA, 1998 bp, Serratia marcescens; identical to SEQ ID NO: 83369

SEQ ID NO: 454582 - DNA, 618 bp, Serratia marcescens; identical to SEQ ID NO: 83370

SEQ ID NO: 454583 - DNA, 324 bp, Serratia marcescens
atgagacattctgcagacgcacagggcgtagcttacggcaatacgatgtcttatataaccggctttctcctgtcggtcattctgacggtgatcccgttctggctggttatggacagtggtgtttccgcagggatcatcgcaggcggggtcatgacgtgtgccgttgttcaggtgctggtacatctggtttattttcttcacctgaatgcttcttctgaaatgcgctggaacctcgtaaccattgtcttttccgctgtcattatctttatcattattaccgggtcgttgtggatcatgtggaatctcaatcatcagatgatgtga

SEQ ID NO: 454584 - DNA, 1017 bp, Serratia marcescens
atgcgagtattggctttattattggggggactgacggcgttatccgttcatgctgagccggataatacctgctggtctgatccggttaatgttgcttcggtagatattgcgttggcatctttttccagtaatcaggctggtgcagaggcacagatgacatatgcaaccaatccgcagcggttcaacgctatttgcaacagaagtgctgccggttatacgatgacgcattacgttgatatggggccgagtttgataccgtctggtatcaatcccggttattttaagttgagtgatgacattgatataaaaattggtagcgagggaatgggtcatccaggatatcagtatttccctttgactcctcccaactcattattagcaaccggtaggccgtctgtcggacaaggcgtcagagtggatgatttctatgtcgccggcagtggaataatagatttaaaattaaggcgggatattattggcggggcgattgtggtgccgtctaataccgagttgttttccgcctaccggattatgaattctcggccttttgctccacgggccagtcgcccggtagtccaggcacgtacgcgttctggtgggcaggtgataccggtgacgccgaagtgttcgataaaccaggggaatgttatagaagtgaatttcaatacattgcaaacaaaaaaaatccccgcgtccagcagcctcgatggaggttacagtaaaaatattgcgttgcatttaagctgtactaccaacctgacgcaggatattcaggtacagctggtggcagacagcgcggacttctcctcagatcttatccgctctgataattatcaactggggttcgcgctaaaacataacggagttttgatcagacccatggagtcattttctgcccgattggaaaacggagtggataatgagaatattactttatcgccggtaaaagatgcttatcgtgagctaaaaggcggtaggtttaacgcttcggctacgttagttattttgtctatttga

SEQ ID NO: 454585 - DNA, 1683 bp, Serratia marcescens
ttgcgtatcaaacagggatgttggtttatttttttgtggctgttcgtcggttgtgctgtgttggcgcaggctgctccactggcgatcagcccggcggatcaggatgctattgaacggcagcaaaaggcgttattggaacaggctcagcaacagcgcatattattacgggatacggctgtgttgccgacgctgcctctgcctgcggcagatgcggttgtaaatacttgtcaatccgtacggcgtattgtatttcaaggagcggaacacctctcctggtcggttaaagagacgctgagccgcccgtatcagggacgttgcttaaccttggcgcatattaatcgtctggtgcgccagactaccaatgcttatttacaacgtgggtatgtgacctcccaagcctatctgcaggcacaggatatctcaaccggtatcctgactattagcgtcagcgaagggcgaattgcatccattagccttgatggtgaaaaaacgctggcgctaaatatggtgttccccggtatggttggcgatgtgctgaatttgcgggatattgaacaggggatggagcagcttaaccggttgccatcgcagcaggtgggcattgatattcaacccgcctccgaggccggttattcaaatgtggtgctacaacgtacgacagcgcgttggccgcttgcacttaccgtgagtgcagataacagtgggcaaaaaagcacgggcagcgggcagataaatgccagcgtaacgatcgataatccgttacatttggccgatcaatggtcgtttgctgcttctcacgataatgatttcagtcatagccatcgcagccgtagtttcagcggcaatctgaccgtgccctacggctactggttgtttagttatcagtatgccaggaatgattttttccagaacgtgccgttcaatggtgatgcctatcgttaccaaggttatagccagacgcaaagagtgggcgtgaaccgtacattgttgcgagatggttcgcataaattcgctgttgatatcggactgactcagcggaataccgagaaccgactggcgggccaacgcttggatgtcagcagcccgcgtctgagcatactcagtttgggggggagttacagcacggtagccggaagcggttatctgacgctaaatccgcaggtaagccatgggttgcatatgctcggagccaacgaggacgatccgcaataccgtaatgcgccacggagtgaattccgcaagttcagcatcagtgccagctatttttaccctctgacctcttcactgtattacctgacctctgcttatgggcaaaccagtgcggacaatctgtattccagcgagcgtgtctccgttggcggacaatattcagtgcgcggttttaaggagcaatatctgctcggtaatcgcggcgcttattggcgtaacgagctgaactggcagccagacagcagcggttctgcgcttggcgcactctcttttaccggagcgctggatgctggctgggtgcaaggtaaaaccgagcagatcgagggggggaatgttaccggtattgccgtggggatgactgttaatcatcgttggttcaatcagtcgattaccgttggcaagccattgatctatccggacagtctgcatccggaccaatgggtggcctattggcaggccgccgtcacgctatag

SEQ ID NO: 454586 - DNA, 324 bp, Serratia marcescens
gtgcgcggccagataacctgcgccgtcgacccggccggcatcgagacacgctatcagtacgaccgcttcggccgtctcaccgcgctcgtcaaccccaacaacgagcgctggcagtttgactacgacgccggccaccgcctgctggcccagagcgactttgccggccgacgcaggcagtaccgttacaacccgctgggacaggtcagcgccataaccgagtacccgctggcgcaagttgatatatttgattacgaagacaatgatattgtctccgatccagaagaaaaagttacatactggaaaaactggctctcttctttatag

SEQ ID NO: 454587 - DNA, 1020 bp, Serratia marcescens
atgacggcttcggccggctcagctggcgccgcgacggcaacaccggcgtcaagcagcgttttcagtacgaccgccgaacaccgactgaccgccgtcaccttcgacggcgacagccgctaccagcgtgccgaataccgttacgacgcgctggggcgccgcacccggaaaaccctctacccgcaccacggcgagccgcagaccaccctgttccactggaacggcctgcagatggtcggcgagcacagtcccgaccagccgctgcgcagcacccagtatctgtacaaggaagacagctacgagccactggcccgcgtcgaccgccacggcgacagcagcgaggtgtactggtaccacagcgaactcaacggcctgccggagcgcatgaccgacgcgcagggtaaagtcgtctggcacggccgtttctccgcctggggcgccaccgacgccgagagcggcaccctcgccacacagcagaacctgcgctatcagggccagtatctggacagggaaaccgggcttcactacaatctgttccgctactacgatccgaactgcggcaggtttacccagtcagatccgatcggactggcaggcggggagaatacctacgcgtataccccggatccgattagctgggtggatccgttggggttgatgagttgtggcagtacgaatatgctgtatcgtggtgtcagtgccaagcatcctgaaattgaaaatgccaagaaaggtatagtgaaaccagcaagacctgacgcagatataaccccagaacaacatgcggaagggggattaactggagaaagtcagtatgtatcatggacaccagataagaatatggccttagggcatgcaaataaagacggtcctggtggagtgttattaagtgtacctgccggagcaccaccaaatggtgccacgtggtcatggggctggactcatataaatgactggggagaggtggaaatgctgcagctaggacgaagaaccggagtatctgtcgaaatgttagggaaatga

SEQ ID NO: 454588 - DNA, 315 bp, Serratia marcescens
atgaaatattacattgatgaacatggttattcatgtgccgaagttgaaactgaacatcatctaatagcctggtttttaaaggatgatattcaaggtagtttaaatagtgtaaatgaataccttgaattatgtgagtcggttaaaaatggtgatttgctagaatgggaatgcacaggcaatgctcatactgtcaccatcaaaccggatggcgtcgagatttttaatgagtacaccgaagaacacttaacaatctcgacaatagatgagttcaaaggttatcttgaaaagtggaaagaattaatcctgagtaaataa

SEQ ID NO: 454589 - DNA, 450 bp, Serratia marcescens
atgaaagaaatcgatgacttaataaataaactatcgtcaacaaaaaagcatgaggtgatgtggcttggtgctgcagataaagagcaaatatctaggctagaacactatttatccctaaagttacctgaggattttaaatctttcttagaaaaaacagggggggggggggttatagaacaagagatatctggcattgaagataatgatgcattggcggatttcggagggacagtatattatgataccatatattgccggagtgaatatcaactgccttcggacttagctgtaatctacttcaaagatgatgaaatttgctggtgcattgacacatccccaaatagctttggtgaaatagttagctacgatttattttcaatgaataaaaataaaaaattgcatagctcattcaaatccttcctacaagaatatgtaaacttacgatgttag

SEQ ID NO: 454590 - DNA, 330 bp, Serratia marcescens
atgaacaatgacgttaccatttccacctttaactactcatatggatttgtattttcatactttatcatatccatattaacattcctttcactcttctacttgaagaaatacgtcacaaaaaagcatagctattttctttttattctatctactattattgttgttatttgtggcgcagtgcaatttattatttttggtgaaggcgagtacttctttagtcttttctatcctattgaattcatcaggtaccaagttgttcaatacggggggttgttttttactatcgcctactcttttttactaccacaaaacacatataataaaagatag

SEQ ID NO: 454591 - DNA, 780 bp, Serratia marcescens
atgcaatataaaacaaaaaaagatgttgatgaagcaatcaagaaattgcgagaactagctttctcgttttcaaggcaatacctttacagcaatgatagcaaagcaaacttttctttagagattgacaaactgattagttatgcagagtcagaaagcagaacttattgcatatcatataatgtggcttactctactatcgatgaagagataaaatatttagaaagacaagctttcgacatagagtcaaaaaaaacaaagttatttatagaaatagagaaaaaaagaaaaacagaagaaaataaaaacataacgacattaatagctaaaaacattggtttcgtaagtggtgggatgcaggtttctgctggaattggtgcttgtgcggcctcttttggtttggcatgtatcagcgtcggtatgccacttatcctgcaaggttcgaataatgtttacgaaaatggcaactatatcctattccgcgaagagaaaaatggcattgttagagacgcataccatttcgcagcaaactccttaggttataatgagaatactgccgatatcgtttatggctccgttgacattgctctttccgggtatggattagccagcaacactgtcaggccaaatgcctggcgcttataccgccatatagaaagtgactttgtgcggggatggaaacaaatggggacacttcctcttttttatgaaaccgcatccaatgctttaacaggattctcaatgtataaaagttataaaaaagagagcagcaatgaacaatga

SEQ ID NO: 454592 - DNA, 366 bp, Serratia marcescens
atggcaattaaagtaacaacattctgcctagccattctcctattaatcggcggcaatacagtgcatgcgaaagaaaaatacaatccggagcaatatctaaaaaactatgcactcagcgtttgtgtagcaaagggttattctgcactggaagtcaaaaacgatgcggccgcagccgcacgaggctacaacgaattcggtgattatccaattgaagcatatactgccgtgcgtaatttggctaaaaccttccttacaaggcactatgacagtatgtcaggggaaccaatgacgctggctaaatgtatagacttttatcatagccgggaactcgataacatcatagccgaatataaagataaaaattaa

SEQ ID NO: 454593 - DNA, 543 bp, Serratia marcescens
atgactgttaatgcttctattgatcctcttgaaaaatttgaagtgcaactacaggacccgctgagtcaggtgttgctaggaggagttgatgcaaggaaagtggtgagattattttctttgttttctagattcgaacatgctttgaagtgtgacggatttcataaaggtacccgtatggggcacatagagccagattggggagctttttgttcgttcatggtgggagcattcagcaacatatgttctcagaggttgaattcatcgattcaatacttattgaacaatccgccaaaaaagcaaaagcagaatcattcttgggaggatgctcaagaccccgcatggtgtacagatgatagctcaaaggttatctggcgagcaaaaaatgtcaggaacaatctattccatggcggtaagtttcgtaatgtctcgaaagaaagagatgagcgtttaattgatgccgcgtgtgatatagttctggcatcgttgatggccaatgcgtcattgaggcagtggttcgagatgccaccacaaacagcgccatag

SEQ ID NO: 454594 - DNA, 351 bp, Serratia marcescens
atgatagtcagttctggaaatttacgagatggttcccagtggttagctagagagctaacacgcctggagcaactgaatagaccattaaccattgatgagttctttaaatggtcagaggaagggcttttcataaagaaaattttcaaaaaatacgggaattttatgcttggactgcatatccttaaccctgaccacgagcactgcaatcatgaattgttgagatacattgaaaacgccctctcccgccatgcaaatgttattagtggtgggacatatggagtggttgacaatgcctacctgcttgcaattaacgttttgttcacaatatctcgtgaagctgacgaattgtaa

SEQ ID NO: 454595 - DNA, 582 bp, Serratia marcescens
atgtctgcccactcccatagcgttgaaggtccgctgtttgttgccgaccacggcgcgctcgatttcttaaatacggtagcgcagttggacgggcagccttatgacttttggcagtctgatgatgacgtccaccactggctggcgctggccgggttggccgctgcgccggacacgccgacgtttgccgaaggtgctttgctgcatgaagcgcgccggctgcgggacaccgtcaggcaactggtcaggcagagaaaagccggagaaacgccggatccggcggcgctgaaccgctacctgagcgccgtcgtcagccatcagcaactggtggcggatcggcaaggcgggctgagtattaaacgcatctatagcaatcagacgccgaggcaactgctggcgccggtggcggagctggcggcgtctctgttggtcgagacgcattttgagctggtgcgtgaatgtgaacaccccgactgcacgctgtggttttatgatcgtaccaagtcgcaccgtcgccgctggtgcagcatggcgctatgtggcaaccgggcgaaggtcgccagatttcgccagcagaggaagtaa

SEQ ID NO: 454596 - DNA, 714 bp, Serratia marcescens
atggaagaaatagagcattttaccgatgatcggcacaaagcctggtgtatccattgcggttcgcccattattgaccgtcaaaccaacagagatcacgttccgacaaaagggttactagaaagacctctgccgccccatgtaccacaagtcgaagtatgcaaggagtgtaataccagcttctcattggatgaagagtacttcgttacttttctgagttgcgtggaggcaggaagcacagacccttcagcgcaaagaaatccaaaaatcgtgagggcacttacacgtaacccatcccttgctactcgactacaggcagctaagcagattacagtgaatgaatatggcagacagcagattctttggctacctgagatagaacgcatacatcgggttattttgaaaaatgccagaggccatgctttctacgagtacggagagccaatgttggacgatccagtctctgtaagtgccgttccactgatatcaatgaatcaaaaccaacgtaacgacttcgaagaagccagtgggccttttgcttgctggccagaagttggaagtagaatgttgactcgcgtcatgacaggtcaagacttagatgatggttggattaatgttcaagatgacatctatcgatatgtggtatttcaacaaggcacactgacagtccgctcagtcatacataactatctcgcaacggaggtagtttgggaataa

SEQ ID NO: 454597 - DNA, 1212 bp, Serratia marcescens
ttgaaagctattgatttatttgctggtgcgggaggtttttcgctagcagcctttgaggttggcattgatgttcaagcagcaattgaacttgataagcaagcctctgatacttattaccacaaccttgttgagaagcttggcgcacaaactcaggtgttttcccaagacatcaatgatgttgatattggctctatgatgaagtttcagggcatcaagcagggtcagcttgacattttgcttggtggtccgccatgtcaagggttttcatcacatcgcattaatgatgcaggaaaagatgacccaagaaacgctctattgatacgttactttgatttcgttaagaatctaagaccaaaagtatttctggttgaaaatgtgccgggtctcctttggcctcgccatgcagagtatttgaacaattttatcgctctcacgagagcacatgactatcaaatcgttggtgatcaacccttcattcttaatgcgagagattatggtgttccacagagccgtaagcgtgctttcatactcgcagtgagaaaagacatatgcactgatggttttgaatggcctcctaaagcgactcataccaaatcgggttcaagggcgtgggcaacatcttctactgtgtttgaacgtcctcctcaatcagtattgattgagctgaaagatagacttattgagaaatttgatttcacaatggaagatgctgaaacttgcattaaatcgttaaattggggcaaactcgtagattccaatgatccatgtcatgttcatatgatgcattctcctgaactgactactctgttcgaaaatacccctcttttaggggacagaactgaatcgggaaggatattggattgtcataaaaattacagtggccatctggatgtatatggaagaatttatccccatataccatcaaacacagtgactacgggttgtaacaacccttcgaaaggccgtttcgttcatccgtggctaccacaggggatttctctcaggcatgctgcgcgtttacagacattccctgacgattatgcctttttggggggatcaatgtctgttgctaaacaaattggaaatgctgtccctgtggagcttggtaaagtgctgctgggaacaataatgaaactactatcaacacagccttcccatgaggttaaaaataattttagggaagtaaattatggtaaggaatgtacaaaatga

SEQ ID NO: 454598 - DNA, 156 bp, Serratia marcescens
atggtttctctattcctgaaaatgatcgagatggtttaccagagcgtccaaagcaaggtcaaaaagggattggtcgcctgtcatcggcagctttgggaccactgttactacttatctcaaaacgaaaagatagtgattatgttgcggctcttatag

SEQ ID NO: 454599 - DNA, 465 bp, Serratia marcescens
atgacagaaattaataaagcagtaagtttgtttaatgatatttgccagcgattggggggcgcgcttaacccaccctaccgaggcgaaatcaataattatcactttagtcggggtattgaagacgaacagccggatttttggaggcaatacggcgagttttcccgtatcagtgatggaattaattttgatgggataatatttcatcctttggatgaaaatgataaaaataacattttcttgaataatgatattttatctaaagagaaagggttttatgatgaatccctagatggttttattgttattggctcggatgatactgatatttttgtttttaatactgaaaataaaaagtgggaagccagagaccgtatagcgagcgattatgtttatgattcttgcgatacgttaagcgatttgattatggttaaaacaaaagaactaaaagagcgtcatgggttgtag

SEQ ID NO: 454600 - DNA, 468 bp, Serratia marcescens
atgaataaaataacattcgctgtagtcattctttcctcaatgcttctgggtggttgtgcgtcggttcctctggccagtaatgctgaaaacacgacggctaaatctttcccggccccggaaaatggcaaagccggtctttatgtgtacagagacagctttgccgggaaagcgttaaaaaaggatgtgtatcttgacgggcgctgccttggtgaaacagccgacagagtctttttctatcagcaaatatcgaccagccaaccacatacgctgggaactgaatccgagttttcacctaataatctgacactcaatgtcacgtccggtaaaaactactttgttcgccagtacatcaaaatgggcgtttttgttggtggcgctggacttgagcaggtttccgaaaacgaagggatgcgcgtcgtttctaaatctgaagttaagctagctgtaccaggtcattgcgataactga

SEQ ID NO: 454601 - DNA, 405 bp, Serratia marcescens
atgataatagatgatgctatttgtgaactgaaagaaaagttctctatttttaatgaaacatatgacggggatgatgatgtttatctaatgtatggggcttttgggatgtttaccttggatgtgattaacttgtacatgtcaggttgtaattcacctcaaaactatttttattctgatttgaaaacattatataaaaccagtgagttaaggctgtctgaggtcgaaaatatattttcatatgtcgataagatttttattgagtataaggtagaaatgaatgatgttttaaatacttgcatttttgaagcatggatgggtaatgactatagttataatttggctagaaaatatctcagtaaagagacatgcaatcattatctagatataacaaaaagagtgatttga

SEQ ID NO: 454602 - DNA, 1128 bp, Serratia marcescens
atgacacaatcagcatcaagcaaaaagcagtcccgcaaacagtacacacccgaatttcgccaagaacccctcaaactggctgaacgtatcggcgtggctgccgctgcccgcgaactcagcttgtacgaatcgcagatttatacctgccgcagcaaactgcaacagcagcactcttcatctggatgcgagcaggaaatgtccgccgaaattgcccgtctgaaacgccaaccagctgaaaagtatgaagagttggtcattctccaaaaggctgcgacatacttcgcgaagcgcctgaaacgaagtatgtctttatcgaaaaacatcaggctgatttcagtatcaaagccatgtgtcgggtgctccgtatcacacgcagcggctggtatgcctggcgtctgtaccgtcatcaaatggccccgcgtcagcagttccgtcttgcctgcgataacgctgttcgaaaggcattcagtgacgcaaaacagcggtatgacgcatcgcgtcttgctgatgggcttccggagtacaacgtcaaaaccattgccgccagggctgcgcgcaaagaccccattccggttcagcccggtcagttatcgtgaacatggtctgccggtgtctaaaaacctgctgaagcaagacttttacgcctgtgaaccgaatcagaaatgggtgggaaacatcacctatcttcgcactgatgagggttggctttacctggaagtggccattgacctgtggtcgcgagccgtcatcgactggtcgatgtcatcgcggatgatggcacaactggcgtgcgatgcgttgcaggtgacgttgtggcggcataaacgcccagaaaatgtcattgttcatactgacagaggcggccagtactgttcagggggttatcagggcttactgaaacgtcataatctgcgtggcagtatgagcgccaaaggttgttgttacgacaatgcctgtgtggaaagcttcttccactcgctgaaggtggaatgtatccacggcgagcactttgccccccgtgaaataatgcgaacagcggtgtttaattatatcgagtgcgattacaaccgctggcgtcgccacagtgccagtggcagtgatctcttccccaaatcagcgccagactaa

SEQ ID NO: 454603 - DNA, 3204 bp, Serratia marcescens
atgaagcaatccgcatacacatcgattcaagaaaaacgtcttcagccttggaagggtgaagaagaagtccggtttgcctggaacaaggccctagaagacgcaacgggtttacatctttttgcagaacgtgatcgtaatgatgctagttacaatcacgtcataattgaatacaaagcgcctggatattttaaaggcaagaaagatagtcctgcgttcctgaatgccacaaaagagcgactgctaccttatatagtaaaaaaagcaacagagacaaaaatccctgagtcagactttatcggtattgcgatagatggagaacatatttgttttgctcaagtcattaatggtgagatcaatacccaacacttgatgccattttctcccgaatccgtagaaatggtagttgatgctcttcgatcggatactcgtaaagggcttactacagaaaatttactcgctgattttggtcatggttctgctaacgcgagagccttcatgcagcagctctccgatggactcgctcagcaacttgctatcagcggaaataacaaaataaaaatgctctttgccgaatggcgcactttgtacggccaggttgctgacctctccatagtgcaagctgaagccattacaaaagagctaaaatttacttggtctggatcaccatcagattcaatttctgctcggctctttgttcttcatacctacaactcaatgctgatcaaactgctggcagctgagataatctcagcacatgggctgacctcaatagaacaaccagcgcaaagcatggcagcattgaagaatgacgctcagatgctcgattttctcggctcagcgatagaacgctccactcttttccaagaagcaggaattaatggcttcgttgaggaggctattttcagttggtatctcgatgttgctagcttgaatacggtccctgaattgctaccaaccttaagacgcttactttccgttttatcactttaccgtcttgaccagctctctcaaacacgtgatgtattacgtgatttatatcaaggattggtgccaggtaaattgcgtcagagtttgggggagttttatacacctgactggttagttgacttcaccttgaataaagtcagcgagccaagccttatgacaaaaagagtccttgacccaacttgtgggtcaggagcttttttactggctgtcattcgcaagaagcgtcaattggcaaaagagaaaaatctcagcgtcaaggaaacattgaaacttatctgtgacactgtatggggttttgatctcaacccactggctgtacagacagcaagagtaaactttcttattgaagtcgctgatttattatcgcaatgcccaggccaagagttggaggttccagttctaatggcagacgcgatatattctccagcttcgacaccaaaaacatctgatgccatcattcagtatcgtattggtagccagtttgcaaagctagatattcacttgccagctgcactggcacttgatcgcatcaaccttgatgtcatgtttaatcgcatgggtaaagatgtcgagctgggactcgattttgatgagtccatggataaagttaggaaagcacattacttttccgatgatcagctcaaagaatgggatgtacctctgcgttacacatacaatcaaatcttgaatctgcatcgccaaaattggaatggaatatggttcagaattgtcagaaattttttctggtcagctaccgcagggcaattcgacttagtgatcggtaatccaccgtgggtgagatggtctaaattaccagatttatatcgtgagcgcgtaaaaccgacatgtgagcaatacgggattttctcgaatactcgaatgcacggtggtaatgaactcgatatttccgcaatgatcacctatacagtcgcagataaatggcttaataccggtgggcatctggcatttgttatcacaggcacgctgtttaaaaatccatcatccgcaggtttcagaacattcaaaattgagccttcacgcgaggattcattatacattcaaccgatatcagttgatgatatgaaagggctcaagccttttgaagatgccagtaaccacacgacgattgctgtattcgaaaagtcaaaaaatacgccagaatatcccgtctcatatcaggtttggagtcctagtatcggtaaaaaacgggctataaaatcttcgcagactcttgaagaggtcttggacactattcaatatgaagaaaaagaggcctttcctgttaatgaacctggttcaccatgggcgatattagcaccaaaccgatttgaagcgataaaatatctatctcgtcaatgctcatggaccaaaggtagaaaaggaattacgaccgaccttaacggtgttttcttcgtacctatcctgaaggtgaatgaaacttatgttcaaattcgaagtcggcctgaggctggtaaaaaagacataggcccagttaagcaagcttgggtagaggctacagatctttaccctctaattaagggggcaagcgattttgatgagtgctatctcaaaatcaatgcacctgattttgacaataaagaccgtcttttcacatttgttcccaataccgggatatcaaccgccgattatgcagaagcagaagaacgtctaaataggcatgagcttagaaagactgcagcttggttcgattcatttgaatcagttctgcaagcacgttcaacttatcgcagacaaatgaaaggtgcacctttccatgccgtatataatgttggtgattatacatttaaaccatggaaggtcatttggcctgaaatgtcttcgtcattctatgctgctgtggccggaagtgctgatgtccccttagtaggaacacgcccctacatacctgatcataaggtctatttttcagcctttgatgacaaagaaacagcctattatctgtgtggactattgaattctcaaactgttcaggaatggattgatgcacataatgtttcaatacaggttgctgacgtgtttaagcatttagatttacctaaattccaaagtgataacaacctacatgttcgtctctctgaacaagtcatgtctgctcaccaagagcataacaaagacacacgcaaatctatcatcagcgaaatcaaaatattggcggaagatatactgacaaaatggagtaaacaacttccgggataa

SEQ ID NO: 454604 - DNA, 144 bp, Serratia marcescens
atgatttcgattttactggatgtcggcacaatactctcttttctggctatttttatcggctttctcaccatgattttttttgggataaaccgtaaaaatataagcgcattatctccctatatgaaagggagggtttatacatga

SEQ ID NO: 454605 - DNA, 279 bp, Serratia marcescens
atgaatgacttcaatcaactcgctgtatattttggctattttggcagctatttcccaacggattttttcaataaacttttaaaaaacaaaaagataaaaacaggaaaggatacctttgtgccatcggacgcgtatacattcctgcaatatcttccccgcgaattaacggggtggattacggtatatcatcgaatgcatatcatctggtcgaccctatttttgataggttgcaccatgttggggattgtcaaagtattcgtgggatacccaattgattaa

SEQ ID NO: 454606 - DNA, 279 bp, Serratia marcescens
atgaatgatttcaatcaactcgctgtatattttggttatctcggtagctactttccaaccgtttttttcaaaaatttattgaaaaataaaaagataaaaacaggaaaagatacctttgtaccatcggaggcgtatacatttctgcaatcccttccccgcgagctgacgggatggatcacggtgtattatcggatgcatattatctggtcgaccatcttcgcaagcggtggggtgcttgtagccattggcagagcgcttggcagatatcctattgattaa

SEQ ID NO: 454607 - DNA, 1200 bp, Serratia marcescens
atgggaggccgcccgcgccggcgggaaaaccggcatttacccgacttcctttatttcgatagggatgctggcgtgtatcgcttcactctgatcaatggggtgagaaaatcattggttgatgcggctacccgtaagccgctcgatcgcagcactgccatttccatcgctcgggaatataacaatcggatgcgaccagagagcacagtatcaatcgactctctgatccgtgagtctggaggtgttcagggggaagcacgaccattttccgagcacgttgatcatataatggcccgcgccataaaagacgaacagccgtcagaaagcacccaagacgattggaataatgatgcgctccgcgtgaaagagtttttcaaagaaatacctgcttgcgatatagaactggaacacgtcaatgcctatataaaggagtatcacgccgagtcatcagccaacgtccagaataggaaagtcagctttcttaaaaaactgttcagctacgccgttgatgagtccttaatgattgataacccagcaacacgtaagaagatgcgtagaacagaagagaaagtcaggcaacgattatctctggaaaactttatggctatccgcagagcggccgagccatggttaaggacagcaatggacttagccctgcagacaactcatgcgcgccttgaggtttccaggatccgctactctatccaagagcctaaaaatggggtatgcggctgtgtatggctggatctgccagagaacggcatctatgggacgttatacatccaccggcaaaaggttcagaagaaagaggcgtctcacgttgctatcccgattggggcagaactaaagcgcattatcgatgacagccgggacaacgtggccagcccgtatgtcgtccacagaattccagaaaggaatgtgaaacgcagcaaagaagtagctcaccctacccaagtggcgcccgattaccttagccgtaaattttccgccttacgcgataagctgggactctgtaaccatttgaccatggaggaacggccaaccttccatgagataagggcgctggctgcttacttattcgataatcagggcatagatcctcaaggccggatggcgcacagcgatgctaaatccacgaaaatttacacccaaaatcatatcgattgggtggtcgttccgcacggggaaatcaaaacaggctga

SEQ ID NO: 454608 - DNA, 579 bp, Serratia marcescens
atgaataatgcaatgctcgatctggaaaccatgggaacaaaaaataatgccccgatcgttgcaataggcgcggtgtttttcaacccaacgacaggagagatcggccaacaattctataccgcagtaacacttagcagtgaactgtcggccggtgccgttccagatggagatacgattacttggtggctcatgcaaagcagtgaggcccgggcagcaatagccagcgatgaagcaatgccaatctctcatgcacttaatgccctgacaagctttgtcgccaggcactgcgataacccaaaatatttgaaggtatggggaaacggagccgcatttgacaatgtaattttacgctctgcatatgagcgctgcggcctgcagccatgctggaactggttcaatgatctggacgttcgcacagtggtaaacctcggccggcagattgggttcgaccctaaacgcgaacttccatttgaaggtgatcggcataacgcgcttgctgacgcgatacatcaagcaaaatacgtgtcagcaatccaccagcgcttactggcaccacataaccaacagaacaacctgtaa

SEQ ID NO: 454609 - DNA, 237 bp, Serratia marcescens
atgacgacgacaccgctattaagcgatgccgccattatcgaagatctgatcggcacactgaaaaagtacgggtggaacgttgaccgccgatccttaagcccagtaatggcgatgatcctcacgcaacacaaggcacatcagaaggttgccgaaatgtgcagatattaccttgaagaacctgaacgtctgcttatcgagcaggcgtttgaaaagagaaaggaacaagacaatgaataa

SEQ ID NO: 454610 - DNA, 627 bp, Serratia marcescens
atgtcagagaatgtgaagtactacgactatttcaaagtagaaggcccggccgtaaaagcactgattaagagctttgaagccatcggcaaccagcgtaaagacatcatcaacaagctgcaggatgaattcggtgccattggacacaccacatccgcgggcttcggggataagggtagccgcgtccaaaacctggcttgggatgcagagtatgaatttccatgccaggtaacgattaaacgcaatgactatgtggacggaaaatgcatcaccatcgccagggggaaagggaataccaaagacgggcgagagtttaataaaaagctggatgcggcaatagccaaagcaaataaggcactttcagacctgccaccttggcaaaaattcatcatcgaccattacggcattatgcgcaccggcttcgggcctggaacatccagaggtattccaatgcttagtacttatggtggcagctgcccaggtcgcgatgattgcctgctgtttgcagtccccaacacgaaagatcgtgagggtgaagcaaggcatggtgatgtcgtcatccctggcgactttcaaaagctgacttacggacaattctacgacttggcacacagcgagggggatgcgtga

SEQ ID NO: 454611 - DNA, 792 bp, Serratia marcescens
gtggctaaaaactctaccgatgcctatggggcaagcggaaaaaccaacgtgctgaattttgagcctgaaaaactgcacttggtaactgacaaagatcaccctctatacgacgagcgccttcacttgccgctagatgaatccatgattttaaacattatggatcagggagttcttgagccaataatcatctggaaagacccagaaaccggtctgtcatgtgttgttgatggccgtcaacgtgtccgccatacccttgaggctaataagcgcttagtaaaaggcggcgaaaaaccactattagttccggcagtcgctaaacgtggctctgctattcgcatggcgcaggcaatgataagcgctaacgaaatccgtcgcgcagatactccgctgggacgagctaagaaaatggctgatgcactggaacgtgggcatgacgagcatgatctttcactgatgtttggtgttggcgtacagacagtgcgcgcaaccttggctctcctggacgcaactcaggcggtcaaagatgcagtggaatcaggaaccgtcactgttacccaagcgcgccagctcagcactcttccgcctgaagaacagcggcaaaaagtgtcggctcttgaggtggcgacagccggcaccaaaggtcacgaaaaagcacgccgccagcgccaggttcttggtgaaagcaagccaaggctcaaatctcgaaaagaaataactaaagcgctggacggtgcgagcggtgattacgctcaggctctccgttgggtacttggggaggtagagcgtgactga

SEQ ID NO: 454612 - DNA, 537 bp, Serratia marcescens
atgtcgtggattaatacttttacaggcaagcattttaattacgcgaaacctacaactgatacaatttgtattgaagatattgctcaggctctttcccatgaatgtcgttttgcaggacacattcctgagttttacagcgtcgcgcagcatagctatttgatcagcaccattgtgccagaagaatatgcacttgaagccctattacatgatgcgcatgaagcatattgcaaagatattccgtcaccactgaaaagtttaattccagattaccgtgggattgaaaagaatattgactttgtcattcgtcataaattcggattaccagcagaaaacagccaggtaattaaacatgctgatctggtgatgctcgcaacagaacgccgtgatcttgacattgacgatggcattccgtggccaatgctcgaaggtatatccccgtcagatagcctgatggttaccccgttaaatgcaatccaagcacgcactatgtttatgcatcgtttccaccagctgacctctccccagggaggtaaatag

SEQ ID NO: 454613 - DNA, 828 bp, Serratia marcescens
atgtcacaagtagatagttcagccatcgagcagattaaaaatttaaccctcgcggcgtcacacctgaaagaagtagagcgtaccgactgcccggttaccgttttacctaacgatgttcgggtgcacagcttggaaggctataacctgtcgcgatatcgattccgcggcaagatgagcacaaccagtattgaagacttcgtgcgctattccactggttacgcatcatccgaagtcccggcacgatgctttatcgatgcagaaaaaatgcgcgccagctctatcttcaatattggctctctggaaaatcctggccatgcagataacgtcgctgcaatcagcctgaaaaaaaccgcgccattccgcgcgctgttggacattgatggaaccaagcttcgtcagaaaaatatcgctgaatggctggaagactggagtgactatctaaaagctttcgacgcggaaggtaaatcgatgaccatcgccagtgcggccggcgctgtacgtcgtatcagtattaaacaaatgtctgaatctgatcacgaagacagcgacttccacggcaaaaagtcgcttatgcaaagcattgaagccagcagtaaagacgtaatgccggttgcgtttgaattttcctgcatcccgtatgagggacttaaagaacgcaaattcagcctgcgcaacagcttgctgaaaagtgatgaacctttcttcgtattacgcattgttcagcttgaagcacaggaagaagatatcgcaaacgaatttcgcgatctgctgatcgggaaattcgacggtgactcggtagagactttcatcggtaatttcgacgcctga

SEQ ID NO: 454614 - DNA, 348 bp, Serratia marcescens
atgggctacttaccaattatcggcgggtttactgataccaacggcctgcgttgggcattcgacaaatacggcattttcgctatcgagaatggccacgaattgcacctctatcgcgagcatgacttcgatatcccaaccgccgatctctgcgcacaactgcttggcctgaaaattcaatcggcagaaacctacgcgccagtttccagagatttcgacattgcgcattccgaagcgctggcaatcaacgcggtgctcgacgccaacggtaaagatccgaacggcaatgaggtgatcaaggcgattcgggaagtgtgtggctggcgagatgccattgcagcaacgaaatag

SEQ ID NO: 454615 - DNA, 264 bp, Serratia marcescens
atgacaaccaacagcattaccgaactggctgttaaagccgcggggccatcaatttccgaggtggctcgaaagtttggatttaagtcacctcaatcagtagcgaactgggttatccaccagcaggtaccttcggagcgggtgatccacctttgctctatgggagactggaaggttactccccaccaactacgtcctgacatctatccaaacccgaacgacggacttccatccgacgatgttagtaaaacccgcgccaaggcgtaa

SEQ ID NO: 454616 - DNA, 474 bp, Serratia marcescens
atggtagagcagagtttgaaagaggtcgtgaaggggatgtgtaaggcggtagctggtggacgttcggcgatggccggcgccctgggtatgtctgaaacagccttcaacaacaacctgtatgagaagaacggctgccgtttctttgaggttagcgaactggaagcgatggaggatatttctggaaccagcctactgactgaatatttcgcgaaccgtcgcgggctgatggttatcgatctgcctgattttgaggaactggatcaggtcgagttattcagcagaagtattcgtaccgcagcgcaccgcgggcatgttgatcagatcatccaagaagcattggccgatggggttatcgatgaaaaggaggctgaagaaatcatgcgccatcaccgcaatcacatacaaagtcgtgaggaagaagtccgtgcggttttggccttatttggcaagaaatcgaagaagcaaaaagggtga

SEQ ID NO: 454617 - DNA, 186 bp, Serratia marcescens
atgggcaatttaaccagaaatactatggtgccgcaaattcgttgccgggctatgcctggtggtaaatctgccacgccgttccggtatgaggtaaatgtactgggcaagtgggaagccagcaactaccagtttgcgcgctgggtggtagatggcggcgctcggttatgtgaggtaggccatgaataa

SEQ ID NO: 454618 - DNA, 822 bp, Serratia marcescens
atgaataattttccagctaccgaaatgaccatgaccagcctcgagctggtggcgttcattaatgccgagcgagaatcaaaggctatcgcagcaggcgtatcttttccgagcaagggctttacccggttgcgtcatgccgattttatggcgaaagcgccgaaggttttgggggacgattactcagcgaaatttttcgctcagtacaccgacagcactggccgtcttttgccatgcatggcgttacctaaacgagaagcctgcctgatggccatgagttacagctatgagattcaggccaaagtattcgaccgcatgactgcactggaacaggctaacgttccggcaccgcagctgcctgccaacaaaacagaccaggtacaggctggattgctgatcgtagagtcagcaaccaagctgctgaatctttcccaatcttcccgtcttggcgcgctgcagaaactgcaagaaatggctggtctgccagcactgatgccggtttatgccgttgacgctccctcagatgctgtagacggttccagccggccgacggcggcgatcaccacgctgctcaagttaaacggtagcacaatgagtgcgccggtagcctaccgcattctggagcgcctgcggatcgttgaacgcaagagtcgaccaagtacccgacatggtgaaaagcaattctggtctatcacggctgccggcctgcggttcgggaagaatatgaccgcgccgaataacccgcgggaaacccagcctcacttttatgaatcgcgcttttcagaactgctgcagcgcatccatgaggaatgggggcgtagctga

SEQ ID NO: 454619 - DNA, 159 bp, Serratia marcescens
atgaatcgtctctttcgggatcaccacggggtgattgtgaacgttatcgcttacgagcgggagacacagaaagttatttatcgccgcccgggatatgaatgggagtgcgcctgcccgttaattatcttccggtcacggttcaccgaggttgttgtatga

SEQ ID NO: 454620 - DNA, 1104 bp, Serratia marcescens
atgagcaggatatttgaggttgttcaggctatgtctggacagaaaaactgcatcgtgatccccggcccttatttggactttttcgccagtgatcagcaggcgtttgctttggctgctgtgctcaaccagttggtgttctggacggggaaatccacgcaggaagatggctggttttataagacacatgaagaactggcgggcgagttgcggggtatcagtgaggatcaggttcagcgtgttgtcggtaagcttcgtaagaagtatttgcccggcatcattgaagtatcgacccgcaaggtaaatggcactccaaagaaccattaccggattgatggagacaagcttattgccaaaatattcccgctggatgctgactccgcagaatcacggaatggaaaacgcaaaaacacggaatcaaaaacgcagaatcacgtaatggactccgcagaatctgaaggtcaatgccgcgaaactgcggaatcttatctctatacagatcattacacagatcagaacaaacagatcatagaacctactggtcagccagctgcgccggcagaccctgagattgaaattactgatctagctaaacaggttcttaaacatttgaacctggtaacggggtcgcgctaccagccagcaaaagggactttggagaacattcgggctcgtcttcgtgaaggacacaaggtggctgacctgtgcttggttgctgagtacaagcaggttaattggggtgaagatccgaaaatggctgaatacctgcgccctgcgaccctataccaaccaagtaagttcgagggatacctactgagcgccagcaaatgggataagtgcggtcgccctccattcataaacggaaagtgggttcgtcctggagaacaagttgacgcaggggatcatgccgatcgcgatgccgcttatctgcgctttcttggccgaaaactgccgatcaaaacaccaagcgagctggagactttggttcgtggcgaggccagtactgctggcgtccgggcaattcgaaaccctgactatgccaaatcaacatggaaccgcatttgggccgattgcgcccagcgcctgaatggaggaaatgcagcgtga

SEQ ID NO: 454621 - DNA, 861 bp, Serratia marcescens
gtgaatccatatagccagaaacttgaggcgctgcgcgctaaaccagcccatgagctgaaagaagtcggcgatcagtggaggactcctgacgcattattctggggtattaactcaatgtttggcccgttagttctcgatctgtttacggatggggaaaacagcaaatgtcctgcgttttatacagtggaagataacgcattaacacaagattggtctgaacgcctgaaagacctgaacggcgccgcctttgctaacccaccatattcccgcgcctgccagcatgatcgccagtacatcaccggtatgacccacatcatggcccatacgatggaaatgcgtgaacgcggcggacggtatgttttcttgatcaaagctgccacatcagagacttggtggcctgagcatgccgatcacgtagcgttcatccgtggtcgcgtggggttcgatttaccagagtggtttatccccgccgatgagaagcaggtacctgctggggcgttcttcgctggtgcaattgcggtgtttgacaagacatggcaagggccggcaaccagctatgtaagccgctctcagttggagggcgtcggtgctgcatttttggcacagatacaccgtgaggctgatcggctggcactacagcaacaaccacaaacggttcctgaatacaccagaacagtgcgtccagtatggccggcagaagtcgagtttctgttttctcaatgtgaagctgatccactgccagatcacctgcaggacaaactgcgccaccacataaaccgcttgaaactggaagggtttccggaacaggaaatcatcgagaaagcaaaaacgttaactgcagcgatgagggcaatgccatga

SEQ ID NO: 454622 - DNA, 2112 bp, Serratia marcescens
atgatccgagaactaatgatcgataacttcgccggcggcggcggtgcgagcacaggtattgaactggcgactggccgtagcgtggacattgcgattaatcacgatgttaatgcgatagcgatgcacaccacgaatcacccggagacgctgcattactgtgaatcggtgtttgatattgacccggtggccgcgaccgccggtcggccggtcggtttggcgtggttcagcccggattgccggcatttcagtaaagcgaaaggctccgcaccggtgaagaaagaaatccgggggttggcgtggatcgtcattcgctgggcgctgcgcactcaattccgctgtggctatctcgaaaatgtcgaagagttcaagacctgggggccgcttgtcgcggatgctgatggtaatgagcgaccatgcccggcccgggcgggagagacgtttgaggcattcgtcgcgatgctttcgacgggcatcaatgcagatcacccggcgctggccgaatgctgcgaaaccctgggtattgaggctggtagtgatgaccatcagcgcctgatccgcgggctcgggtatgccgtggactttcgtgagctacgggcctgcgactacggcgcgccaactatccgccggcgttttttcatggtgatgcgctgcgatggcaaacctgtcgtgtggccagagccaacgcatggcgatccgaaatctctggaagtgcaaagtggcaagctgcagccgtggcgcactgcagcagaatgtattgactggtcaattccatgcccgagcattttcgagcgcaagcgcccgctggcggagaacacattgcgacgcatagcgcgtggtctgcagcgctttgtcctggactcaccggcgccattcatcgtgaagtgcaatcacaccagcacaaagaccacttacgactgcttccgcgggcaatcgctgggggaaccactccagacgatcacaaaaacacctggctatacgctggtggctccgcacattacaaaattccgcaccggtgccactgggcaggaatgtgatgcaccgatttcaaccatcaccgcggggagttctgatcgcccaggcggtaatgggcacgccatgggaatggttgaggcaacactgacgccgttcattgctggtgctggtggctcggaatatcaggcgaagccacgtagtgctgatatgccgatgcacacgattctgaaagagtcccgcgctgcactggtaacgccatacattgcgcgcatcgggcaaacaggatttggcggtgaccgcatggcgtataacgctcaggatccgctgacgactgtcacaagcaaagctgaacacctgttagtggcgccgatcatcgcccggcaattcggcgcaagcgtcggtcatcgagccgatgaaccaagcgcaactatcaccgcaggtggcggcggtaaatcgcagctggtagcgccaacgttaatccaggttggttacggtgaagggccggggcaggcaccgcgcgcccttgatcttggtaagtcgctggggacggtaaccgccggcggcaataagtttgccattgctgcagcgcacctgattaaacactacggcgggaactacaccggtgctggcgccgggttggatgagccgacgcacacggtaacgaccacagaccaccatgcgctcgtatcctcgcacctggtcaagttgcgcggaacctgcaaagacggccaagccgttacggagccaatgccgacgattacggctggcggcctgcatattggtgaggtgagggcgttcctgctgaagtattacggcaacgagaaagagggactgaacatcgaagacccgctgcacacggtaacaagccgcgatcgattcggttttgtgactgttgctggcgttgactatcagatagtcgacatcggtatgcgtatgctgcagccgcatgagctgtatgcggctcagggtttccctggctggtacatcattgaccaagactaccgcggtgtaaaatacgcgaaagataagcaggtggcgcgttgtggcaatgctgtaccgccgccgttcgctgaagcactggtgagagctaatcagccagaattatgcaccgctggtgatgatcaggaggtggctgcgtga

SEQ ID NO: 454623 - DNA, 1038 bp, Serratia marcescens
gtgaggatgttactcaccccttacctgcagcgtgatttgggcgtggtgatactgcgccccggtcgcgaactcctgggatacttcagcagctgcgcgcggctattgattgaaccagaacctaaagaaatgaagcatctatgctcgggtctgcttccggcggccagtcaaaccctagccgatgatccgcgtttgtcttcatttttccaagagaaacgcgttatcaacgctgctggtgggctggaagcaatgcaagcatggctgatgcgtggtaaaggttgtcaatggaatggtggtgatgattatcaccaccgcaacatggatacgcttgattatgccggattgccgatccggctttgttggcaccatgagcataagctgagggatcagtccttaccagagctggaagcattagcctcacggaatgccgctgaatttgtgttgtatcgcgcgagaagtcatttcctctttggtgaggatcatcaactaaccataccagagctctgctggtgggcagtaattgagggcgtctctgacctgttgccagatagtgtggccaggttgtctctgcgactgccggaagcgaagattaaaaccggcggaacgaaagaagccgatattgtatgggagaaagcgccagccgcgatcattaacgaacgcgtcgaaaaggttaagccagcactctccgtggatgtagacccagcaccgccggcgggattcatgctacggcctaagcagcaacgctgggaatgcgaaaagtacacccaatgggttaagtcccagccgtgctgctgtggttgtggactgccggcagacgacccgcatcacatcatcgatcatggcttgggcggtactggcaccaagccacacgatattttcaccattcctctgacccgcaaatgccataacgaactacatgatgatgtagcggcatgggaggccaagcatggcagccagctgtttcacctggtgcgcacattgaataaggcttttggtattggcgcggtcacaacggcgaataaacgcggagaaaagcgatga

SEQ ID NO: 454624 - DNA, 405 bp, Serratia marcescens
atgaaccagaattatctcgattatgtccgcggtgagttgtcagtcgcgttggcagacattcagcgcagtgggaaagggcagctggccgcctttgaagatacggcaatggcgaatacaacccggttcaaacgcaaacgcatccggaacgttgaagttggtggccgtaaagtcagccaggctgccgacccgatgcactgcccagaaacccgaaccagaaaaaaaccgttcccaccgctcgaaaatttatcgtatgtaactagctcatggcgccgggctattgggacgctggataagcctcaagaagcatggttgcgctactgctacgcgaacgatatcagctttgacgggcaggttgctatttgccaattcgtgtggggagaactgagccgcggccttaaagggtag

SEQ ID NO: 454625 - DNA, 1038 bp, Serratia marcescens
atgaaaaatactgtaaatttaaacagtataaatctggtcaatgccgacacaacggaatttatcaaaacccttcccgatgacagtattgacctgatcgccaccgacccgccgtattaccgcgtaaagtcatgcagctgggacaaccagtggaaaagccaggatgagtatttgtcatggctggatgcgttgctggtggaattctggcgggttctaaaacccaatggaagcctgtacatgttttgcggtagccggcttgctgcagataccgagttgcttgttcggcagcggtttgacgtactcaaccatattatttgggccaagccatccgggccatggcgccggatgaataaagaaagcctgcggtcattttttccatcaacagaacgcattatctttgctggccattaccccggcccatatcaggctaaatcagacggctacgcagccaaatgcatggagctaaagcaaaacgtatttcggccacttatcgactatttccgatcagcacgtgaatcgctgggtgtatcgtcgaaagacattaacgcagcgaccggacggcaaatggccagccactggttttctgacagccagtggcagcttccgagcgaggaacaatatcgaaagttgcaggcactgtttgatcaggtcgcggcggaagggcatatggaaggaaggttgagaaaaccacatcacgatttagtgagagaatataagacgctgagccgggaatataacgatttgtgccaggagtataaatctttgcggcgtcatttctcagttacagcggatgtaccgtatacagacgtctggaactatcccccggttgcgtattatcccggcaaacacccgtgtgaaaagccagcagcgttgatggaacatatcatcagcacaagcagccggcccggcgatctggttgccgacttctttatgggatcgggggcaacaatcaaagctgcggcggctctgggacgtcgaagtctcggagttgaactggaggaagaacggttccagcagacaaagtcagagattctcttttaa

SEQ ID NO: 454626 - DNA, 297 bp, Serratia marcescens
atgaaaatgcacacagataacccaaacctgccgtactggtggtcggcgatgcttggtttcttctcgttactgtcgctacaggattatgtgttcattatcggtgcgctgatctcggcattttttacgatcaaaacgtactacgcaaaacgccgagaagggagagagcatttggcagaggaacggcgccggacacaaatattggaagactacctaaaagggcagtcagataaaccgggaaaggaacggccagcggcagtcgaggtagtggcagaagcgatgcgcaaggttgagggataa

SEQ ID NO: 454627 - DNA, 531 bp, Serratia marcescens
atggcgattagtaaatcaaaactgagcgccgtgatgttggctttgattactgcgggcgcatctgcaccggtgatgatggcgcaatttcagaaagaaaaagaaggccagcggctgagtgcatatcaggacggcgtcggcatctggacaatctgcggcggcgtaaccgtggtcaacggcaaaaaggtgacgaaggggatgcgcctgagcgctgaacagtgccagaagatcgatgcagctgaacagaaaaaggctcttgcctgggtagatcgcaacgtcaaggtaacgctgaccgaaccacagaaggttggtatcgcctctttttgcccgtggaacatcggccccggtaaatgcttcacctccacgttttataaaaagctgaatgctggtgaccgtataggagcgtgccgagaaattcggcgctggatctacgacggtggccgcgattgccggaaccgtgcaaataactgtttcggtcaagtgctgaggcgtgaccaagaatctgagctggcttgctggggattggataaatga

SEQ ID NO: 454628 - DNA, 375 bp, Serratia marcescens
atgaaccgctacgggatattggctggaatatttgttgcgtgtctcgctggtggcctcatttggagtgccaaccattattacggcaaataccgatccgcacagaagctggtggatgaacagaaaaagacgctgacgcagcaggccgggctgattaccaccttgcgcgcggatgacgcccgtaatcgcacaatgatggcagaacagcgacgcagagagcagctgctgcgccagcagggcgaaatttaccagaggaaactgcgtgatgcacttaaaggtgataagtgcggcaatagccctatgcctgccgctgttgttgagctcctgcagcagaacaccgcagccggcaccagagcaggtgataagcctgccccctga

SEQ ID NO: 454629 - DNA, 366 bp, Serratia marcescens
atgagcgacaaagaacttgagcaggaaatccaggacaaaggcaaaaccgcgctacgcgtgacgcctgagcacattgaaagcatcatcaccagtgaacattacttcactgctggcgatggttatgcaggtgctgcagcattaggcgttaaggagggagatattatttgtgcccccgaaccgctggacttgctcaccttctgcgttctggtgctgcgcaacggtttcacagtcaccggtgaatcttcctgcgttagcccggagaacttcgacgcggagatcggccgtaaggttgcccgcgccaatgctgtgcagaaaatttgggcgctggaaggttatttgctcaaacaacagttacacgatgcgtaa

SEQ ID NO: 454630 - DNA, 264 bp, Serratia marcescens
atgacctcgctccttacgtatctgaactccgtaatcatcactttttttcttatcgctggcgggtgggtaaagatccgcaattacttccgcgcaaaggcccaggctaaagagcaagccaaggctaaagcccgggaggcggaagaaaaggcgaaggctgatgaaattgaggccgcggtgcaggcccggatgaatgccattcaggcggactcttcaccggtaaataacgctgaaagcactgaagacatttctcagccggtaggttaa

SEQ ID NO: 454631 - DNA, 222 bp, Serratia marcescens
atgtttaaaaaagtagtctgcatattgccacatggtgaaactaagattattgacgtcgcccttgataaagttgatgttacttttaaaggtgataatgggtcattgcttacgatgccaatagagacatttgtcaatgatggagatgaataccttattgcaaggtattccgccactgttgaaagtgaagagattacttctgcgataaaaaaacacttcccataa

SEQ ID NO: 454632 - DNA, 210 bp, Serratia marcescens
atgtatacagtaaagattgtcacagctaaccagaacgaaatcattcacgcggctaaaagcctcgaatggaaagctgccgagaagaccatttatgccgatgaacataccggcgaatcgctgacgatagcattgctacccggtgataccgcttatgtggtaaacggcaacaaccggacggtggccacgtacaccaatcctgcagatcattaa

SEQ ID NO: 454633 - DNA, 1458 bp, Serratia marcescens
atgcaggtgattatcgacggtattcaatatgagcctgcacagcagcagggatcatcacggattggcattgctatcacgacccaccagcggcccgatgttctgaagcaggccattgaccagcatattaagcatcttcctgccgatgcgctggtggttattgttgatgatggctcgatgccagcagcagtggctccagcggatattaaaattatcaggcatgaaaagtcgctggggattgttgcatcaaagaacgcgagcctcgaagcgttaatgaacgccggctgtgagcacatatttttgtttgacgacgacgcatggcctatttctgatggctggcatgttccatatatcgagtctcctgaaccccacctggcgtatcagttcctcgatctatccggccctcgcaagctgaaagatattgccgtgctttatcgtgatgatcagcatgtgtcttataccggtcagcgaggtgtaatgctgtattaccaccggagcgctattgaagcggttggtggatttgacccaatttatggccgcggtatgtacgagcattctgatcttgctttacgcatccataatgccgggatgacgacgtgggcgtatgccgatgttacgggttctgagaagctgatctattcgctcgatgagcatgatgccgttgttcgttcagttcccaagaccgacaggcggctgctggtggagcgtaacgtcaagattcacaacggtcgccgtgattccggctacaccgggtatgcggaataccggcagagggatgttgtgatcacgtcattacttaccagtgagcccgattctcagcgcggaacgcgtatgactccagacccgttggtgttatcggcgtgggctaagtcaatctccggcgctgcagcggtggtgctggccgaccagctgacaacgccaccagctggcgccatgctggtttctgtgcctgatgtggccatgaacgtatattaccggcgctggctccacatctatcaatacctgcgcgctcacccggagtaccggtttgtgtggtgcacagatggaactgacgtcgaaatgctgcgcgaaccatgggatgacatggagcctggctatgtatatgtcggctccgaaccaaaaacctatggtgatacgtgggcaaaggcaaaacatcccgagcgtctctaccaagactttatcgaaaataaccgcggcagcatgatgtttaatgctggattgctgggtggctgccgcgaagacgtgatggcattcgctcacggtattgtgcgtctgtattaccgcatcgaaagttatcgcttctggaaggtggagcaaggtgccagcgcggtcggagatatgatggcctttggcatggttgccaagtcttttggcgaccgcgtcgtaaccgggcctcgcgtccataccgtctttaaaatgaacggattggggaaggagtacgcctggtggaaacacaaatag

SEQ ID NO: 454634 - DNA, 447 bp, Serratia marcescens
atgatcaacaagcgactggcacgggtagataacctgtccgccatacgcatcgccgacagcataatccgcagctttcttgctatcccattttgcaagaactttgggtatatgctggcgcggcatgctgtaacagacaccgtggatcaggcgatgcatttcgatgtagtcgtgccttgccctgtcggccgcaatcaacttaacggctatctccatctgatactgtggcggccggccggtgccaagatagaaactgatcagatgctcgggaaacatagccagccattgaccaaccatgcagcggaaaccagcaaccggaacggcgtcatcctcaagaacaacgacacggtgactctgctgggctgcatattccatcgcgcgccggtggttccaattggcgccgtggtgttcttcatcaaccagcaggtgagccccaagagcgccagctaa

SEQ ID NO: 454635 - DNA, 456 bp, Serratia marcescens
atgttaacaggacagaagcgcaagtttgccttggcgctgatgtccggctccactcagaccgccgcagccattgatgctgggtattctgagaaatcagctcggtcgaagggctcgcagctggctaaagacccgggcgtcatcgcatttatggaagagcagcgaggaaaaagcgctcacgcgtcgccggtttctgatagtgccgctgctaaaaagcaatccaccgaaaacgtcacctacgacgatccgctcgattttctcaagtcagtaatgaacgacccagcaaaagacatcgacacccgcaaagatgccgcaaaggcgatgttgccttatatccatccgaaaaaaggcgagggcggcaagaaagatgcccgcaatgctgcggcaaaagtggcggcaacagccagcaaatttggcgcgatggcgccgccaaagctggttgtcaataacaaggggtaa

SEQ ID NO: 454636 - DNA, 1359 bp, Serratia marcescens
atgctcaccgcgctgatcttatgctggcgtgaggatgaggagcatttgatcctggcgccgacaaaagaggttgctgataacagctttaaacctgccgcggggatgattcgtgctgatgaagaactctctgacatgtttcagattcaggatcatatcaggacgattacgcaccgcgtttcacgtaacacgctgaaggttgtggcggctgatactgacaccgtttctggcaagaagtccgggaggatcttggttgatgaactctgggtatttggcaaacgacagaacgcagaggcgatgttcatggaggctttgggcgggcaggtttctcgtaatgagggatgggtaattttcctgacaacccagagtgacgagccgccggcgggggttttcaaagagcgacttgactattggcgtgatgtgcgcgatgggaaaattaaggatccaaaaacgctcggtattttgtacgaattcccggagcgaatggtcgaaaacaaagactatctgctgccggaaaacttctatatcacgaacccgaatatcgggcgttctgtcagtgctgagtggattgaagataacctgcggaaaaatcagacaaagacagacggaacgctacaacaattcctggctaaacacctcaatatcgaaattggattgaacctgcgcaccgaccgatgggctggtgttgatgtctgggagcaacagacccggcttgttacgttggatgacattattacgcgctctgaggtggtgacgattggtattgatggcggtggccttgatgacctgctggggtttgctgttattgggcgcgacaaagaaacgcgagagtggctgtgctggtgccatgcatgggcgcataagattgtttttgaacgccgtaaaagtgaagcctcaaggctccatgacctgaaaaaagccggcgacctcacgatagttgagtttattggccaggataccgacgaactggcatctatcgtcgctcgtattcatgaggctggtttgctcgacaaagtcggcgttgacccatctggcgttggctcaatacttgacgcgttgaccgttgaggaaatcccagcagaggatgtagttggcatcagccagggctggcggttggggggagctatcaaaaccaccgagaggaagcttgccgaaggcgtccttatacatggtggccagccattaatgacatggtgtgtgagtaatgcacgggttgagccaaaaggcaacgccatcctcataacaaaacaggccagcgggaagggaaagatagacccgctgatggccatgttcaatgcagtctcgctgatggctctcaatccagaagcgaaaaaaagagactaccaagtatttttcatatga

SEQ ID NO: 454637 - DNA, 1944 bp, Serratia marcescens
atgacgcttaatcgcgcatgcaccctcatgaaagtgaaagcgatcaacgaggatgaacgggttattaccggcatcgcgtctacgccttcacctgatcgagacggtgacattatggagccagacggcgccaaattccgcagcgataccccatttctttggcagcatgaccggtcacagccgatcggcagctgcacaccaagaatggtgaaagagggattggaaatcaccgcgaagctggtgaaaccgactccggatatgccttcgctgcttattgcccgtctcgatgaggcctgggcgtcgatcaagtcaggtctggttaaaggcctttctatcggattcaggcctattgaatacgcctttattgatgacggcggtatccgttttctttcctgggatctgctggaggtgtcagcagtcactattccggcaaatgccgaatgttctatccaaaccgttaagtcctatgaccgccagttactcgccgcgtccggcaaagagaaaccggtggttaaggctaatgctaccgctggcgctacagcaaaaaaatcaactgaaattaaaggaaaaactatgaatatcgcagagcagattaaaagctttgaaagtaagcgttcggcgctggcggcatccttggaagatatcatgtccaaggctgcagaagagggccgtacactggacgttgaagaagaagagcagtatgacaacacgtcagcagaggttaaatctgttgatgcccacctgaagcgcctgcgtgatatggaggcttcttatgcagcaacggctaaaccggtgcatgcgaaggctgctgccagtggcaccgttaatactgtgatcaacaatgcacccggtattatccgtgttgagcagaagctggaaaaaggtattgcgtttgcgcgcttcgctaaatctttggcagccgccaatggtagtcgctcagaagcgctggagattgcccgcaagcaataccctgatgatgcaaaactccatcatgtgttgaaagcggccgtaggtgcgggtactactaccgatccggcatgggccggcgcgttggttgagtaccaggaatatgcgcaggattttgttgaatacctgcgtcctcagaccatcatcggccgatttggccaaggtaatatcccggcgctgcgtaatgttccatttaatgtgcgcattcctgcacaaacttcgggcggttccgcaaactgggttggtcagggtaaggcgaagccactgaccaagtttgattttgcatccattactttcggttttgccaaagtagcggcgattgcggttctgactgatgaactgatccgcttctccaatccggcagctgatgcgttggtgcgtaacgcactggccgaagctgttattgcccgtttggatactgacttcatcgatccaaacaaagctgaagtagccaacgtttctccgtcgtctattactaacggcatcgcagcaacaccttctactggcaatccagacgacgatgccgccgccgccttcggtcagtttattactgcaaacctgcagccgacaggtgccgtctggctaatgtcaggcactaccgctttggctctttcacagcgtaagaacgcgctcggtcagaaagagtatccagaaatgacactgctgggcggtaatttccagggcctgcctgtcattgtttctcaatacgtcggtgacctgctggtactggttaatgcaccggatgtctatttggctgacgacggtggcgtagctgttgatatgtcgcgtgaggcttctcttgaaatgcagagtgagccaactggcgatagcactacgccgacgccggttgaactggtatcgatgttccagaccaacagtgttgcggttcgtgccgaacgttggattaactggaagcgtcgtcgcacagctgcagtagccgttattactggtgttaactacagctcaattccatccagctaa

SEQ ID NO: 454638 - DNA, 1353 bp, Serratia marcescens
atgtggaatccttttcgtcgcaaagaaaaatcgctgcagcagccatccgggcagggaaattggcagagaattttctcgtttgttcatgagccgttttccggtgcctggcaaaaaaaccttgaaataaatgacaaaaccgtcacttcgttctatgcggtcttctcctgtatttcattgatagcaagtgatattgcaaagatgccggcaggccaccaacgccgggattctaaaggggtgtggcaagaacaacgaacaggccgtgtgtcagccctgcttaaaaagccgaatgcattccagaacagtatccagtttttcgaaagctgggtgaactcaaaactgtgccatggcaatacctacgtcatgaagatccgtaactctgctggctccattgaagagctcaggattttggatccgcacaaggttaccccgttggttgcggacgacggttcagttttttatcagatcagccctgaaaatattagtggcctaaccgaacaggtcactgtgccggcccgggaaattattcacgaccgctttaattgcttatttcaccccctagttgggctgtcgccgatctatgctgctggtttagcggcgatgcaagggcaccatatccttgagaattcgacattctttttcaaaaatggtggtaagccgagcggtgtgattgaggtaccaggcacactgagtgaggagaatgcaaaaaaaataaaacaggcttgggatagcggttataccggtgaaaacgccggtaaaacggggatactgagcaatggcgccaaatatgttaccactgttgtctcagcggctgatgctcagatggttgagcagttgaaaatggcagcagaaattatctgttcaacgttccatgtcccggcgtacaaagtgggtgtaggggaacccccatcattcaacaacattgaggcacttgagcagcagtattactcacaatgtttgcagatcctcattgagtccatagaagttctgctggatgaagcgcttgagcttgaaggagatgcagaaacagagtttgacgttaacgcattactccgtatggacactgagcgccggatcaaaacattaggcgaggcggtgaaaaataccattatgtcgcccaatgaagcgcgcaaaaaagagaatttaccccctgttcctggaggtgattctctttacttgcagcagcaaaatttcagtctggaagcgctggcacggcgtgatgcttcagaaaatccatttgatagcccctcaaagcaacctagcagtgagccgccggctgatgacggtaaatccttgtctcctgctgagatggtggcggcaaaagcgatgatcaggggaattatgaaatatgaatga

SEQ ID NO: 454639 - DNA, 1053 bp, Serratia marcescens
atgaatgaacgtgaattatctctgataaaggccatcagcgaggagtttggggcggtaattaagtctatgcgtcaggagtttacgagtgaattatccgctcaacagctggcgtttgaagagaaaattaccgaactcaccctatctatcgcagaactgaaagaggctcccgatattgagacgcggatcggtgaggtcgttggccggctggaaattcccgcgccaccggaactgccggacattaaatcaatggtggatgaggctgttaccgcggcgatgcctccgccggcacaggatggaaagagcatcaccgttgacgatgtacggccgatgctcaaagagctggtgagcactgcggttgcagaaattcctgtaccggtggcaccggaactgccggacattaaatcaatggtggatgaggctgttaccgcggcgatgcctccgccggcacaggatggaaagagcgtcaccgttgacgatgtacggccgatgctcaaagagctggtaagcactgcggttgcagaaattccggtaccggtggcgccggagctgccggacataaagtcgatggttgatgaggcagttaccgcggcgatgcctccaccggcgcgcgatggtgaagatggtcgtgatgccctgcagattgaaataatgccagacattgacgcggaaaagagctatccgcgcggaacctatgccacccataacggcgggctttggcggtcatttgaaaagaccgccggcatgcgtgggtgggaatgtctggtggatggcataactacagttgatattgagcaggacgaacaccgccactttactgtaattgttgaaagatcctccggcgcaagcacaagtaaatctttcgatgttcccgttatgatttaccgcggggtgtttaaatcaggtactgattatcgcccgggagatacggtgacgtggggcggttcattgtggcattgcgatgaaactacatctgataaacccggtgaaactggctccaaagggtggacattatcagtgaagcgaggccgtaatgcgtccgctggcgggagataa

SEQ ID NO: 454640 - DNA, 327 bp, Serratia marcescens
atgattgaactggtagcccttgaagaagcgaaaatgcatctgcggattgatgaggattattccgatgccgatctgacgttgaagattcaggccggtagtgctgcgctgctcgcatatctgaaagacaacaggaaattggttgtttcggatgatggcaagctgattgatggtgagcctttgtaccgggttaagacggcgctgttggtattgctcgggtatcttgaccgtaaccgtggtggtgaagaagaagataagctgaaacagggagaactgccgttctctgtttcgatgcttatttacgatctgcactgcccaacaattatgtga

SEQ ID NO: 454641 - DNA, 210 bp, Serratia marcescens
atgaacgagcaacaggtaagcgaattgatagtagcgctgcgggaacaaacgcaggcgcacaaggagcagaccgcagcgttaaacctcctggctgaatctaataatgcactctgcaatctaattttgcagacgttgatggaggaaggggagccgtcagaacttgttagcgatctgcgtccaacttatctcaatgggaaaccgatagggtaa

SEQ ID NO: 454642 - DNA, 489 bp, Serratia marcescens
atgatggttgaccgcattaattatcgccttactggtatcgacgaatttcttggaaagcttgattctgttagctatgacttgaaacgaaaaggcggccgggctgctttgcgcaaggctgcaaatgtgatcgtcaataaggcgaaagataatgcggcgcgtgttgatgatcctgaaaccggccggcgtattgctgacaacatagcattgcgctggaacggtcgggaattcaagcgaaccggtaacttggcttttcgaattggtgttctccatggcgccgtcttgaaaaatcacccggacaaagccaggaatgcaccgacccctcactggcggctccttgagtttggtacggagaatatgcgggcgcaacctattatgcggccggcggccgaagagggggccgttccggcgataaatacgtttgctgttgagtatgagaaatccattgatcgaggcattgctcgagcgaagaagcgaggtgtaaaaccatga

SEQ ID NO: 454643 - DNA, 366 bp, Serratia marcescens
atgatggcaccgatcttcgctatatgttccggtagtgatgaagtaagggcattgctgggtagtgaacccgtccgtttatatccgttcgggttgcatgacgatgcagtaatctatccctatgccgtgtggcaaaacatttccggtgatccagagaactatcttaaccagcgtccagatgctgatcgctactccctgcaggtggatatctacgcggatactgccgcggggtgtgtagccgttgcccgggcattacgtgatgcgattgaacctcatgcatacattacccgctggggtggccagacgcgtgatgcaaccacaaagcggtatcgctattcattcgatgttgattggatagtcagacgctga

SEQ ID NO: 454644 - DNA, 498 bp, Serratia marcescens
atgtctgttctgacacaaggcacgcagttctacgttctcgcgaatggcgttgtcagcgaggttgaatgtattacatctttcacgccgggtggaaaccccgcggatcagattgaagatacttgtttaagtgagcgtaaaagccgcacttacaaaaaaggtctgcagactccagggcaagcgtcggtgactttgaacgccgatcctgacaatgccagccacttaatgttgcatcagctggctgagtctgacgatgaatcactgctgactttcgctctgggatggtctgacggcgagtcttcaccacttattgcggaacctggcgatcctgacgcggtggatggtctactgcttccttctgaccggacgtggtttgtttttcagggatatgtcagcgacttcccgtttgattttcaagccaacgcggtggtcaccaccactgcaactatccagcgttctggccctgctgtgtggatccccaaagcagagcaaaccagttaa

SEQ ID NO: 454645 - DNA, 219 bp, Serratia marcescens
atgagtattaacgagttctggctatgggtgaagtatcgcgataagtatggtggtcttaacccgatcatgcgtactgagtgggctgctgcactggtttcaagcacgattgccaatgtgaacaagggcaaggatacgccggcgtttaaagtcactgattttgctcctcacattaatgagaagccggtaacgcttgatgatgctatggatgaatggcggtag

SEQ ID NO: 454646 - DNA, 2568 bp, Serratia marcescens
atggccagcaaatctcttggtactttgactattgatcttgtcgccaaggttggtgggtttgtttctggcatggataaggcggagcgggcttccgacaagtggcgtaaacaagtacaaaaaaatgtcgagggggcgagcaaggcattagcagggatggcggctggtgttgcggcagcaggaacagccgttggcattgctggatatcagctattgaaatccacctcacagcagattactgaaacggatcgctgggcaaagtcgctgaacatgtctacccaggagctgcttgcttggcaatttgctgcagagaaagcagggttatctgcggataacatggccgatatattcaaagacttaggtgataaaattggtgatgctgtattaaaccaatctggtgaggctgttgatgctctcaacgctttggggctttctgcggagaagctatcaaaggtatcgccagataaacaaatgttggcaataggtgaagcgttaggaaaaataagtaccaatgccggaaaaataaccatacttgaaagtatggggaatgacctttcaaaaatgcttccgctgtttgaaaataataatgagaaattaaaacagtttatccagctgtctaaagattatggtgttgcccctgaccctgattcaattgatgacctagtgaaagtaaatactcttttcgagaatatggagtctcaggtcaaagggttgaaaatagagattgcggccgggttagccaaagttgatttatctccgctgcagggttctcttgataaacttcaaaaagttctgaccgatccgcaggttctacagggtattgtgaatctcgtcagcgaagtcgcagaactggctggttggttggtgagagctgcagcgtctgcaggcgatctagctgttaaggtatcagcgcgacatcaaggtgtatttggtactttttctgatagcaacgttccggcgatgcaagaacgtataaaatttttgcagatgcaggcggataacgctaaatcaggcgggacgtggcttggcaatctccttggtagtgatgacagtttagagcattaccagacagagattgcaaagttgcaaggacaaatcgaaaaggtaaacaatagtgctaaaggggccgttaaattgcctttggggcaagctacagtaactgtcggcggtggcgagttctcacttggtgtcggggagtcaaacggtaagccgagtaagccaaaggtaccgaaggtatctggttcagcgaaatccctcgacagcgctttccaatcaacagagaaaaattatcttcggcaaattgctctgattgatattacagggaagaaatcagagaaagtcagcgaggccgaatcacttaggtttgatctggcgagtggcaagcttgttggtataaacgaaaagcaacaaaagcgtttattacaattagccaatgaactggataaacttaatgctttaaaaaaagcaaatgaagaaaatataaaattagctgagttctctgctaaccttcgctcagcgaatgataatgatcggctttccttaagctccgattttgtcggtgctggcatggggcagaaaacaagagataggatgaaagaagttctgggtatccagcaagacttcctaaatcagcaacgtgatctgcagtcgcaatatcaatccggagatataacaaagtcactttatgacaaggaaacggaggcattaaagcgggcgctatctgaacgtttaaaaatacaggaagattattataaacagtcagatgagcaaaaaaatgattggagctcagggctgtctgatgcgttaacagatttcgctgatcacgcaagtgattattatcagcaagcagccgatgccatgacttcaattatggaggcagcaacagactcaatttcatctcacctctacgatgttctcagcggtaccgagtcattgggtgaagcaatgaaaggtgtgtttgctgatctcggtcaggctgtaataaaagcgctggttgatatggctgcgcaatggttggcatatcaagcggtgcagttgcttgttgataaaaccacccaggcttcggctgttcctgccatgattgctaacgcacaggcaactgcgttgcaggcgcaacttgcggcgtttgcatccactgcggctgttcctattgttggccccgctatggcaccggccgctatggcggctgcggcggcggtaactacaccgatggtcgcggcgatcggtgcttccgcactttcgggtatggctcacgatggtattgaatctgttccagaaacaggtacctggttactgcaaaaaggtgagcgtgttaccactgccaagaccagcgcaaagctggatgccacgcttgatcgagtcggcaaacaatccgtttctggtgtaatgcccgttaataatatcgtggtgaatggtgatcctgataaaagcactattcgcgcgatagaagaagctgttgcccggggagaaaaacgggtttatggccgggttaccggggatgtagcaacagggcgaggtgatatgtcaaaagctcttatggcgggatggaacaccaaacggagggccagctga

SEQ ID NO: 454647 - DNA, 498 bp, Serratia marcescens
atggaacaccaaacggagggccagctgatggctttaacatccaatatcaattacccgcatgactatttacccatggctttacaggaagggtatgcgttaaagccaatcagtccgttgctacgtacagatatggtaactggtcgcgctcggcagcgccggcgatacacatcaacgccgacacaaacgacagtctcctggttgatgaatgatgtacagggaatgacgtttgaagcatggtttagggatgcgttatctgatggttctgcatggttcaatatggtgctccgtaccccgatcggggttaaaccgtatctgtgtcggttcaccgacatttatgatggcccggtattgactggcggtaaatactggcagtacagcgccacgcttgaactatgggaacggccaattcctgatgcgggatggggtaacttccctgaatttttagcggggcaaagtatcatcgacatggcattgaatcgggagtggccaaaagcatga

SEQ ID NO: 454648 - DNA, 381 bp, Serratia marcescens
atgtttgatcctgataaatacctttcagttacctggctgaagggcggtcgtacttttcctaatctcgactgctttggcatcgttaatgaaatcaggcgtgacctggggctcactgtttggcctgatttcgctggtatcactaaggatgataatggcctcgaccgagccgcgcgatcttttatgggtgatcttaatagatgtgaaccttgcgagggagccggcatcgcctgttactcagggagtgtggtaacgcatgtggcgatcatcgtcaatatcgatggtgtgttgcatgctgcggaatgtaatccgaactcaaacgtaacgtttttgccgttaacacgtttcatgcgccgttttgtaaaagtggagtattaccagtga

SEQ ID NO: 454649 - DNA, 3084 bp, Serratia marcescens
gtgacgatacgcgtttacccttccagacttcctggtgatccgctagagactcatgagcataaggccatgacgttgcaccaatggctggtgggcaacgtgtcggggtatgaggcggatatgcgtcatccgatcgttgttgaagtgaatcataaatccatccctgcagcagaatggccgctttgctacgttaagccagacgacgatgttcgtatctatccagttccgtatggtactggattggaaatcgctgtgtgggcagctgtagcagtcgctgtggcatcggcagcttattcattgatcatgatgtcgcagttaagtaaagacggcatgtcttcgacggcaaacggggattcacttgatctgacgccggcaaaggcgaactcggcaaagttgggggatccgatacgagaagtgttagggcggactcgagtctttcctgattaccttgtgcagccagtcagccgttttgacaaggaaaacccgcagatctacaggacagaaatgttcctgtgtattggcgtcggcaatttcgttatcaaccagtcatcgataaaaatcggcaataccccggtaggaagctttggcgatgacgtcagttttacgatatacccgccgggagcggatgtcagcgctgatcgtcgtactgaaaattggtattcatcaacagaagttggcggaacaacgtcaggaactgccggccttgatctagcatcaaccgggcctgattcggtaagcatcaccgccgacgctatcagcgtatccggcaacagcctgacagtagtcggcggaacgactgatgataatggcgatgcggtgatccccgactcctgggttgttggtactgatcttactattcaggttccagatacctataccgtggcaatagagggcggcagcaacgttatttatggtgattttgcggagctaaaaccttctgttggtcagtccgtctctgttacgtggaatgccaccaggctggatttgttcatttctgcccatgagcctggcaagcctgcaataccgggtgaaggggggaatgccgccagtattaccgcatctgcggcgccaacgacttatgacttcagcactacgccattgtcctttacgttgacttggggaggggcgagttacgtaatttcgttgtcggcaaactatgtgaccatgtcaggcttgactgatgaaattgcagatcagctttctggttctggtctagacgtcgttgccgtagataccaagattgttatcagggagaaagaaagcccattcagcggtaacagcattggatataccgttttgccggaggtgctcttcggcagtgagccagcagttgttgccggcaccgcatcaacgggaggaacgccggcagtcagcgagcatatctcgctagcatggggaagtgccggtggcgatccatttgttggtatccctacggggctacagcggattgccattggtttaaaagggtaccatttccgtattacggagattgatggtctgacgctaagcgttgaacgtctgatagaaaattcagatggttcgaaaaccgttgatagtggatggccaggatttaccagccgaacgttactcgattccacggttaccggccttaatgataagtatgactggatggggcctttcttgtgctgccctgatagtgagaaaaccagtgaaattgaactgaacttcgtctacccgcagggactttgtgacgtaggaagtaaggacggcgctattcactggcatgacattgaaatgacggttcagtaccggctatccagctctgaagagtggacaagcgtcaaactgaagcacggcaacaatactgttaatgaagtcggttataccgaaacaatcacgttcccgactgccggtaattatgaagtgcgcatgaaacgtgatacgccagtctggggagggacaacgcgagagtccgttcaatggcagtctatgagggcgaagctatcagaacgcccgacaagctaccgagacgttacaactatagcgttaacgatccgcactggtaaccggctggcttcccaatctgatcggcgagtgaatatggtggctactcgcctctatgatgggcatacatcgaggagtatcagtggagccatcttccacgtattgaaaagtttgggatataccgatgaccagatcgattaccagacaatcaatacgctggaaagcacatactggacaccccgtggagaaacgtttgactgggcggccggcgctgactcaaccagcgctctggaagttttgcagaagatagcaactgcagggatgggctattttcttctcagtgatggtttggcatccgtagggcgtgaaggtgtaaaaagctggtctggggttatcagcccacaggaacaaacagaggaactgcagaccagttttaaagcgctttcacaagatgactttgacggggttgatgtcacttacgttaatgggacgacttgggcggaagaaactatccaatgccggtttgccgataaccctacagcgttaaaagtagagagctataagctggatggggtcagtgatcctgacaaagcatatcgcatcggcatgcgtcgtttaatgaaataccggtaccagcgacttaaccattcgacgagcacggaaatggatgcgttgtgctacaactatggcgatcggattgtgctgactgatgacattcccggaagccagacaatcagcagcctgatcgtcgaagagcagcatgacgaaaatacggtgcatattcacgtcagtgagaagcttgattgggcttttaataacccccgttgcatcatacgtttccaggatggctctgcctcatcgctgctggtggcatcacgcgttgatgattatacgctggccgtggataacacggatgacgtacgccttgatgagtggattatggatgatccagcgatagagcctccgcggcttatcttctgctcatcaagtcgcgtcggctacgacggtattttcgactcaatagagccaggatcagatggaacaactcagatcaaagccctgcaatacacccccctgatttatcaatatgacgacgccacttatccgggcaacgtccagtaa

SEQ ID NO: 454650 - DNA, 1788 bp, Serratia marcescens
atgacaacttacaaaaccggcaacccggtaggttctgcggatcctcgtgacctttatgacaacgcagaaaattttgatgtagcgatgctcgctccgggcgcggtgtgggtagaccgcctgggtaatgaccgagtctcctgggaaggattaagaagtcttgtagctccattaggcaaggcaatgactatggaacaagctgtcgaagctgtcagttcgggggaaatacaagagggtggctatgttttcgtttatgccgaatatccgaagatagcggaacagtacaagaatgttggcgggaaactggtgaagcaagggccattcattgccgacggaaattatatcagggagatcagcaaccggacaggcggtatctataccgtcaacgcggaagatggtcgccatatttttgcggatccaaaagggcgtatggccttggagatccaggccgatggggcaaaaaatctctacggcaattcactggcgtacacgatggcaattgcggagaaaatgacgatgggcagcgtagatcagataccggctgacgactctgattatgtgtggggtattgcggggaaaaatcagcacacggctgtagggtttcgccgctcaaaaaaaacgtttgagctttatggtgtacccatcacgactcagcgcgggctgatgccaaatgatgtgttcagtattggcgactcgattaccgcgttcgggcaggcgtcatccggcagcaacgcaaccggaaccatttatcgaccgttgataaatgcccaatgttgggccggctgggcaatgttaatgactggcggtcgttatcgattcgtgggaatgtctgcgaccggtggttacacagcgtcacagatcctggcaacgcatgtgccgaaagccattgctgcgaagccaacattttgcatcgtccttgccggacgaaacgatgtcgtgaagcatatcgatatcgagaatgtgacaatccccgcgatgacccaaatttatcagcagctgcgatacgccgggatcatcccaattgtctgcacaatgtctgctcagtccgggaatacggatgagatgaatattgcgcgctacaaaattaacgcgttttgccgggcgtatgccacgaagtatggattgccgttggtagatctgcacgccgccacaactgacccgctgacgggggaatggattgatggctataaccaggatgtttctcacccgtggcccatcggtgctaaagcgatgggtaaagccgttgcggatgcaatggtcgagtggcaggcacctaataccccgcgtaaggcggtatcggtaacaacgccagataacagcgacaacattctcccaaacccgttgttcattgatcatacggatggggttcctgatggttgggaggttgatgagtcaggaacgtatagcgttgttgatgatccggacatcctggggaacgcatttgtcatgaccggtagtggctcttcaattgccgcaggccgccggacggtgccggtcattgaggggcaaaaatacgggtttggggtagaagtcaaaatggcggctaactcttctagctgggtgtcatgctatgttgttgccggcgcctccgctgaggatacagcagatactgtctaccttgctggattccggaactggaaattatcaaccgatgggtatggatatttttactttgatttcacggcacccagcgggtttgacgaagtcaccatcgtaactaaagcacaagacggcactctgcagatcgcgcagggtggactgttcaccattgcagatacaacagaggtttaa

SEQ ID NO: 454651 - DNA, 711 bp, Serratia marcescens
atgccgctctatattgaccaaagtgcagactatgatgtgaagtacccaccggcgtttcctgttatgtcgatgaatgaccccgcgagcttcggtacctactccatggcatcgcggcgcgacttcagcggccgcgggaatgatctgatcactgccgcttcgtttaatgctcaaggcatggtgggaacgaaggttggctccgctgctgagattccctttttggaaccggacgctctcaccgttgttatggcaattaacctgccggccaatccggcagaagccaggaacatcatttctacgctatcaccagccgtcgcaccgtgggtaggtttccgattaactcagggaaccagcggcgtgggaactatccgtgttgctactggtgtgactgatccggcttccacgaccgggctggatattggtgggattactggtggatggacggcgtttgccttcaccatctctgattcgaaaattgcatttctacgtggttcaggtgctaatggcacggcagacattacagccggccgggcaaaaagcggtaacactatcttcctgaatggtgcgccggctggcagccagatcaccgatggtgccgatggaacgtatggtggcgtggcgatttatgaaagggaaatgacgctgcaggaaatggccgcacagattaacaatatgcgcgtgttcatggccacaaagggcgtggtcgtgccataa

SEQ ID NO: 454652 - DNA, 642 bp, Serratia marcescens
atggatgcaaaaatgactgctcaggccattgcctcgggcttgatatctataccgatggacatttaccttggcattgagagaacccttcaggatctcgctttggcggacggaaggactgctgttcaacggaggaatatgaacgatgacctccgtgttatgcgtgccgttgggaaattgttccgcgatagaaatacaataaaaaaagttgctgaaatcatcattaatgatgtgcttgaccacctgccccaacccgtgctgcagaaaatccacgatgccttaatcggtggcgccataaccttcacatcacgtagcgcgttacaaatcgccatatcgacctacttgggttccaaaattttagcgggaatggcggtacccataatgaccaagctggccgttcgtgggacaacaggaattgcccttggcggcatagtcacccaggggcttatctcacgggcatgttccgcatcacgccgcctgcagcatgaaaacccttcgttatggcgaaagttatctgttcacgacttcgatatgctgtatttcctttttgaagagcctctgaagccttatatcgcgctgggacgcgaactgcgcaccaaccccatgaatgcggagaaaattatcagtgctatcgaaaatctttag

SEQ ID NO: 454653 - DNA, 222 bp, Serratia marcescens
atggggcaatttttcaatacagcaccggtgcccgccggtttccgctgcacccgcggcgattacggaccagcagccaaggtttccttgatgcatatcccggctccccttacccctcttttagaattaagtcgcctgttgcgaagtttccccgcaaccttgagtcttagcgtgtctactctccgcaagtctgaaggtaagggggggctgaacaatgtccgataa

SEQ ID NO: 454654 - DNA, 858 bp, Serratia marcescens
atgccaaacaatgaatccaatgttgaaatttttgggtggtcggatgaggctgaaaatgtcattagcatgttctataacgccgacataatggtttatgttgaaggagtagatgatattggtttttgggaaataattttcaaaaaaaatggaaaatttaatgttgaagtccaagatgttggtggatgcgatgctctaataccttatatggaaaaaattgcctctgggcaaataaatgccattgttgctagagatacagatctcaatgccttctcatcaaaaataataaatcacaccaatgtgatttacacaagaggttattctatagagaattgcattcttgatgaaaaagtaatatccaggattttaaaaaatatcggtaaatataacgaaagagaaatccaaaatatagatgtaagctcatggcttagtgatctttacaataacactgaggatttaattgcccttgacatttacaaccatgtaaatcttcgtggacaatctgttgttggcgactcatgcgaaagatttatgcaatctaaaacgtcatattccacatctatagaaaaaataaatacctacattcaaggtttacctgatgatttcaaagagcaaggattaaaaataaaagagggccttaaattccctaacgaaaccacaataaatcattggcttcgaggacattttcttttctcagcatcacttagatttataacaaactatctatctaaagatgaaagaaaaaaatcaatatcaaaagatagcttttatgccaatatgttaacagcattcgaattatatttcacagaagaacataatgactatgaatattacaaccaaaaaatagcactaatagcctaa

SEQ ID NO: 454655 - DNA, 336 bp, Serratia marcescens
atgtccggcggcaacattgctaacatgaagtcgttagaggaacttcagcattttctagggacttacaagggcgataaaaaattactcaacaatattgatattattaaaatggattatattcagaggtcgggaggtgagttagtggcgttacgctctgaattcaaaagcaaagcaaagggtaatttactgcaggatattgcaagtcatgatgatattgtcacgaggtttgactcagtgagtaggaaaagaatgctaaaagggcttaaccctgaaggatgggaggtacaccataaattaccattggatgatagcggaactaacagctttgataaataa

SEQ ID NO: 454656 - DNA, 480 bp, Serratia marcescens
atgcttaatattaaaagtgtagtacaggagtttcaggagaacagtgctaagcttggtaattcactttttcctgcttacccggacgaagttttatatcgtgactttggccgcagtattgataaaaaccaagataagttttggcttgagtatatcgagtttgcgcgattgagtgatggtcttttagctgattcggtgagtttttttggattgggatattacgattgggctgattttaataacctctgtgagaataatgatattttcacaaaagagaaaggtatgcatcatgaaggtcttgatggtttaattgttgttgggtccaatgatacggatatattggtttacgatacaaaaaattttcagtgggaagttcgagaccgtattgcaattgacttttcaaccgattcatttagtacgcttgcggaactaatcaacgcccaaatactggaactaaaaaatatgcatggtgatttattatga

SEQ ID NO: 454657 - DNA, 279 bp, Serratia marcescens
atgagcgtcaacattaacgttgaaaattttgaaaatgatttgcccaaggtaagtgtttatatttcaaccttcaatagacttgagcgattgaagagggcaattagctcggttaaggctcaagactacgccaatatagaactcctcgtttgtgatgatgcatctacggatggaacacaggattttatgaatgacctagtgaaaaatgatactagtgtcatttatttgcgtaacgagagtaataactgtctcttatacacatctccgagcccacgagactag

SEQ ID NO: 454658 - DNA, 864 bp, Serratia marcescens
atgaaagtattgctaaccggttcgaaggggcagttggggagctgttttcaagaccgtttgcctcaggggtgggaggtttgggcgacagactcagagcaactggatatcactgacggtgtgaaagtccacgaggctgtattacgttttaagcccgatgttattgtgaatgcagcagcttataccgctgttgataaagccgaatctgaacatgagctggcggctttaattaacgagattgggccgtgtaatctggctttggcggcaaaagaggctggggcgcgtttaattcacgtatctactgattatgtctttgatggttcggcaaagacaccctatgttgaaagtgcggcaaccaaccctcttggtgtttatggcaaaaccaagttagcaggtgaacaggccgtgatagctgctctaccggacgcaattatcattcgtacggcttgggtctatagcgagtacggaaataactttgttaagaccatgctgcgtttgggtcaggaacgggactccttgggggttgtttcagatcaatatggttgccctacttacgcgggggatattgctgccgcaattattgagcttttaaagaataatgttaaaggtggtatttaccattattgtggttcagaggatatgagttggtttgactttgccaagaaaattttcgaattggctagtgaaactcagcttctaaataaaaatgtcattgttaatagtataggcacaaaagattttaaaactttagctgcaaggccccaatattctgtcttatcaaatgaaaagattggtaaggttggcgtgcatggagttagtttatccacaagtctcatattcgttttgcatagaatcaaaaataaatga

SEQ ID NO: 454659 - DNA, 1404 bp, Serratia marcescens
atgaatgaatcaactagaagcatgacgcactccaacgcttcaattatctcaatgctacagcgtttttccgatatattcagtatgctggttggtatgacgttggtaggttatatttctcatcagaagatcgaccttgcccacggtattgtagctttggtttgcttggttatttttcaaatgatcggggggatgaccgacttttatcgttcgtggcgtggcgttagtttcagattggagttgcagtttttattaaggaactggttgttaagtgttatctttacagtttgtattatcacgtttatcaaagaaattgatatcgcactgaaattttatgttttgtggttctttttatcgttagtactatttgtatttttccgtacatttattcgtgttattcttggacacctgcgaaaaatgggttacaacaaccgtgaggttgtcatggttggtgatctagcttctggtatacatttagctgagagtatcaagaatgcaccttggcttggcctgaatctggtgggatatttctccacaaatgggaaggttcagggatacgacaaattggaaatgaatcatttgggaaatattgatgaattgattgcccaggtgaataaaaataatatagatcgagtctatatagcattgccgatggagaagtcaaaagaaattaactatattctttctgcattgtccgatagcacatgtacggtgatgttgattccagatattttcacctttaatgtattacactccagaagcgaaatgatttacggtgtgcctgtcatttctctgtatgatacgccgatgagcggtgtaaacatggtgctgaaacgtatcgaggatatcatattctctacttgtattcttttgtttatttctccggtattgttgaccattgctcttatcattaaggtaacatcacccggacctatcttgttcaagcagttgcgctacggtattgatgggcgggcgattaaggtatggaaatttcgtagtatgactgtgatggaaaatggtgacaaagtcgttcaggcgaaaaaaggcgatagtcgcatcacgccatttggtagtctgttgcgccgcacttcattggatgaactacctcagttttttaacgtgattactggggatatgtcgattgttggccctcgccctcatgccgtagctcacaatgaacaataccgcaaattaatcaagggttatatgcttcgtcataagatgaaaccaggtattactggatgggcacaaattaatggctggcgcggtgaaacggacgtattggagaaaatggaaaaacgggttgaatatgatctctactatattcagaactggagtttgtggatggatctgaaaattatattcttgaccgtttttaaaggttttatcaacaagtcagcgtattaa

SEQ ID NO: 454660 - DNA, 465 bp, Serratia marcescens
atgaaaataaaaaataaaagagcaaagaaaatcactttaattataagttgtgtttttctcggttatgttctctggttgcttctgtgcccggttgaaatcgttgcggttcatgaaaataggcactttagctctgttttggtcaataacttcccgcttactactaagggtaaaatagactggtggttgcagaataaagagatgttaaaagagcgctatgacatccccaaaccggcatcttatggtgattttagcgtgaatttttggttgtttggtgacggctataaagaggagggtaagtacgacagacgctgctttgatgatatgaaaaccaaggtgaactgtattgaaaaaaatatcgttttctctgtaagtaaaagtgagaatctgggtgttatttttgttgtggaaaacgggatataccgaatcgataaaaacggtaagatagcaaaggtaaatatagactaa

SEQ ID NO: 454661 - DNA, 861 bp, Serratia marcescens
atgatggctgcactgcagttcccctgcacgatatttaaaacgcaaaagcgcatggacgattacggagcgagcgatatgcgttgtggagacctgtccgcatcacagctaaaaacgcattttcgactggcggacgtttccgccaccgtagacccgtggacgctgaccagaaaacgtcttcaccagacgcacccgcgcgcctatgcgatggtcagccgcctgtccgccccgcaacagacgctgacccgccgggagtgcgccgccatactatttgatgagctgcgccagctgtcgcggatgtttgccctttatggcccctacaagtacctgatcggcaaaatgatcgaccatctgcaatacggcaacggcacaccgtttgccagcccgcatctggacagggcgttgagggaacatattttgggggataaaacggaaaacagttcgttattaaaaataaagcgtgttttaattgaaagaattgattggaagaacaggatctatccatcgaagaagcgagaggatcttactgactcagttcttgatagtaaactgcctaaatttgaccggtttcaggatagttttaatggtatggggatcactgtacatgatacctgggcaacccatatagctataaaatcattacatgttgagaaagaccgttatcgtgcgttaattaattacaaaattcaggaccattttggattggatgacggtgatatttcaaagtttaagtttagccaattcaggttttttcgcatttggtttgtactgcaacgatacaatcaacttggatttaaaccttttatgactaatatggatgctactgtagagattaccgggagtgtagatgaaaataaaaaataa

SEQ ID NO: 454662 - DNA, 2271 bp, Serratia marcescens
atggataataatattctatttatttcatcaattgagcggtttaatgatttcgaagaggttgtcagacggtttttacagcgaatgttcaatgcagatgcttatattacaaatggcccttatgacggaggaaaggacgtcgtttactcagtaagaggtcgtgaaataagagaggtaatacaggtatctattataaaaaaaggtttggaagataaacttgaagaagacttaatcaaaacagataatttaattcaaaaatataattaccctcctgtattgaatttcttttggagccacaaaatatctgaaagcaagcttgagactttaaaaagcaatgccagaaaaaattatgggataaccctagagttttatgacgcaaatagaatatctcaaaaaattaccaacgattatccggagatattaacctttcttcttgaggatgtacacaattatcaatcgtctaaaaaggatgagttggacataaaagaaatagcattttacgaatatctggtgttaagtaaagatgctgccaatttaaagaatgtaattattgattcatacatagtttcattacttacagtccaagggaaatcagagcatgatttaatcaatgaaactcaaattcttgggctacacaatgaaactcttaaaaatagattgtatcttttaaaacgagacaatcgaattattcttgatgaagatttatacagtctgtctgaggttgaaagtaagagaatcagaaaccttgagttaaaagaaatagccaaaaggaatgaggttttaacaataattggcaatgcgacctcaaaatatttcagtgaaaatatatccaccgaggttcttgacctaattaaggaggcttatgctgagtcagtcaatctacagcttaatgaattaaacttcgaatccccaagaaatcaaattgtgaaaggagttattaagcaactggaaaagttgataactgaaaaaggaaaaacaagcaactcattgtcttcaaaattagctaatgagcttgttgaattatctgggagaaatgaatatctttcagactattgctcatcaaggctatgcataactctcttaaaccaaaagaaacttgaaagatatattgacaataaaacgttttttttatacctagatgcgccagtattgattccatatcttgttgcattaagatacgataaaatttctaacagtgaaaaatcgataagcaccgttaaaacgttaaagaaaatagtatttaaccttaaaaatagatacattcgcgtaacccaagaacatcttgaagaaacagcacgacatttagtgaatgcaatgaaaattagttcttttgccaatgatgaattagttgggaagatcggtaattctaaaaacgtattttttaatacatacataaatattaaaaaaagccagcctggcagttacaatttcgaaagcttcttagaagattttattggttatgaagatacatctggctctatcgaagcaaagttttataaactaagtcgttcagtctcccagtatttaaatctaaatagaattgaagttatttcaacatcagtttatcaagaagatagaatcattgaggaagttgccaagaagttttctaggcaaatatcaggttcaaaaaaaagaaatcaacgaactgttaataatgatatttatgctgcattaaccttatctgatgacagcatacactgcgatgaaaagggagtcggtcaaatccctatgttaattacatgggatgcaactcagcacacactcaggaatatagtaagacaaaaagacaaatataaagaatggttggtttacactccccagagagcaattgaaagactttcaatgttagaaatgaaaattgagagctccgcaattaaagatggtgttttagcaattattgatgaggattatttcttcaaggataacgattcaaatttaatcgacactctggcattgctagtgaaagatgatgaccctgatgctggcgcattaacaactttgataaataaactatcgcaaagggtaacagaggagtctttagattctcaagatattgaaaaagaggcgttcaatactttaaacgagattttagtatttacttatactgagtttaaagataattttagccaggtaaaaattgttttcagtgatgaaaaatataccgactctatctttgagatactaacctcaacacttaagcgacctttcgatgattcttctagaaaagagtataaaaataaaatagacaaaataatctcagttcactttggttga

SEQ ID NO: 454663 - DNA, 543 bp, Serratia marcescens
atgctgtcattacaggaagttggcgagcaaacccgcaatgcgctacagttgttaatcgatagaatggggttgggattagccgttggcccgctcagggaaacggattaccgcctgctctcatcaggaatgtttggtgagttaaattgggagtgggggataagccagtatacagggagctcaaacagcatcgagctttgtttcaaaatattagcggagcaagagggttaccccgcaggtattgccctatgtgcattccacatagacacgggatttttcgaaatctatatgattgaaaattttgtcagagatgatgaaactcatcctctttataagcggatggccttatttacctttatgggggccttcatcttcactgacgcggttaagggaacgcatatcgttattgtagagccagacgctgatttacgtggtttctattcgaagtttggatttactgatgaccctgaatgttcttaccgtatggtatgcacgattgaagcattaagggatgtgataactaccccggaaatttgggggcggtag

SEQ ID NO: 454664 - DNA, 2013 bp, Serratia marcescens
atggcaacacccgcatattacctcaatggcataccgcatgatgccggaggccgccctattatcaccatcaccggtggcccaaacagccccgtaggaaacggcggaatctatcccggaatatctttccctgtttatgttccctggccaggtatcggcagcagaccgaatagcggcggcagcatagcttatgacccgaacaaattaacatttaccggcttatattatctgcgagagagccagaaacaaataaataaaatcctggaacaggccagcaatgcgtacccactgcatgcagatcaaaccagagatgaggccaatgcgttacttgctgacttaaaaaatagcggattgattaatcatcctgaaattaacccgctggctaatgctctacaggattctgttaatgcattacagattaatatcgatttaaaaaatcgagacggaaatattgccaatcggaaaacacaggaggctgaagacacgtttaaggacttcatgcatcgctataaactcgcgaactttatcgacaaatctgccgccatgattgatgtggcgatatcaacaacgggtccatggttcatcaagttatggaatgaaactgtcccccctaaaatcagcgaagagattgaggtaaaaaataagctcatttcatatctcgatcgggtaaaaacaattacagaagatgcaaataataagaaaaacaccctgactgagataaaaaacaggatagagattgaacaagcccgtaaggcggaagaagccagaaaagcggaggaggcccgccaagcgctgtttgccacagcgggggtgcgggatacccccacctacacgccggaaaaagccaacgccgccactgccgccttgatgacggccggtaccatggtgctgaaccgcgcgcccggtatggtgcagttgtcaacggtggcaaacggcgtaatgacaacggccagcgagctggctggctgggtatccagcgcgatgtggcgaggcgcggtcgccgtagccgaggtggcaacggtcagtagcgtcggtgcgacggtcggcgcctttgtggtcggtttttggccgggcaaggccggggaaggcagcgaccacgttcccggccgcgatattaagatgtttgccacgcaggcaggtttgttcgctgccggtaaaaccgccgttcagccggaaatggatgtggtcgatttgccggtccgtggctttatcgcaacggatgatcatgggcagcagaatgtgtatcttgtcaaaaccggggccggcggcgtatctgccagcgtgccggtgtaccgaccggtgcgtgatgaacagaccggcctggacaggataacgctgccggcaatgaccggggcgccgtcgcgaaccattttggtcaacccggtgccggtcggccctaccgcaccatcccacaccggtaacgatgcaccggtgccggtgacgccggtgcataccagcacggaggtgcggcaggcggacagtatcgtcaccaccacctttccggccggtgatatcccgccgctgcaggatttcatctattggcagccggatgccaccggcagcggcgttgagccgatttatgtgatactgagcggaatttatggagaaactaatgccaaaggaaaatacagcggacgtgactacaataccgaccaagccggtggccctatccagaatctggactggaaaacggccaacatcgaccgggctggcgtggataaggtgaagttgcataccgggcggtttatggaatctcccgaaaacaaggtgatgattgaccgactggagaaaattttgcagggtaagctacaggcaacggataccgataagcgtttttacacccatgaaattagggagttggaacgttaccgagcgttgggtattcctgatggtacggttccagaaaatgaaggcgaagtctggaacaacactcatacaacaacattagaagattaccagcttagttctgatgaaagcctgttatacacaccagaggctctcaacgcacataactaa

SEQ ID NO: 454665 - DNA, 690 bp, Serratia marcescens
atgaaaaaaattgaaccggaagactactttaccggccaacagctgatattggccaaggccattgaggcgggggacctgggcagggtaaaacaactggcgccggaaacggatttaaacaccccgggtgaacaggatttaaccttattattcttcgccttgaatgagacgtactacaataataatcccaaaccacgtttgcaaattgtgaccgtgctggttaaagcgggagctgatcctttgcaaccactccccagagggatggccagcccggcggaaatggtctcaatgggggataaggatatctggctaaaggcattgctagatggtggtttggatccgaatgccagagacagaaatcataatgaagcgattatttataatacgttacaagccaagaatacggatacgctagcattattgatcatgcgcggggttgatgtcgatgcgcgagactctttaggtgaaacaccgctaatggcagccttttttagcaaccgttttgagcatgttaattacctgctggatcacggtgcggatcctaatccggtaaataaattgggctgggtatttgcttctctggtgcaagacggcatcaaggacagccggccggaaactgaataccaccagaactgtctgcagctgcgcgacaagatgatcgcgttgggcgtaaagtggccgccggaggcataa

SEQ ID NO: 454666 - DNA, 336 bp, Serratia marcescens
atgcagcccgctttcttcatcctggtactggccggcataacgcagcggctgatcgacgagtgtgcccttgcgtcgttcggcgccggtgaccgtctgcccctgcagtttgccgaaggtatcgtagttgccggaccagcgcaggttgccctcggcgtcggtcacctccagcggcgcgctgttaagatcggtatgcagccagtagatatctgcctgctggccgtcgcccaccagttcgagggcagccagcggcgtccaggcgttggccgggtcatagctccaggtgcggcgcgtgccgttgtcccgctgcgcctgcagcagtcggtacccttcccataa

SEQ ID NO: 454667 - DNA, 357 bp, Serratia marcescens
atgaaagagttagaatatatgacgccttacagcctagacaatttgattactaaaatcgttcaagagggttatacaaaggataacttctgcctttataccaaagagtacgagacaacagctactcctagtctgacatgctatcttgaatgttatccggaagttagtgatgatgatgatgaagtgtatcctgactatgtagagcaaaatgagttggagctatttttttatggtgaccaattcatggatgttttaagaagtgcgctgaatcaaaagcctaatgcaactgtggatgagcttatatctgggttgaactattatctggagaatgacgcttttatcacattttcacaggcataa

SEQ ID NO: 454668 - DNA, 3105 bp, Serratia marcescens
atggacagtaaacgtaaagagaataaaccggtgcgggcgccgacggcgtataccgcaccggtgaagcagcgtatgcaattaagcgccatcgcctgttttttagcggtgattggcagcggggcgcaggccgcctcctatgtggaaaatggtcggccaggcgatgcggccagctggcgtagtaatgaatttaatgccgaatgggggctgggggcgattcatgccgaccaggcttatgccgccggttacaccggtaaaggcgtcaagctgggaatattcgatcagccggtttatgcccagcacccggagtttgccagccaggacaaggtgatcaacctggtgacccaaggggtgcgcgaatataccgacccttatattccggtcaagaaaggggacgacttccgctatgacgggacgccgagcgtagggtcggacggcgagttaggttcacacggtacgcacgtcggcggtattgccgccggtaaccgtgacggcggagaaatgcacggcgtggccttcaatgcgcaaatcatcagcgcggagaacggcgaccctggcccggaagacggcattattctcggcaatgacggggcggtatacaaggccggctgggatgcgttgatcgccagcggcgcaaggattatcaataacagctgggggatcggcatcaccgataagtttgccgagggcggatccgatccggcctatccccactttaccgtcgacgatgcgcgtaaacagttcgagcagatcaaacagattctgggcaccaaaccgggcggcgcctatcagggggcgattgacgcggcgcgcagcggtatcgtcaccatctttgccgccggcaatgacgataacctgaataaccccgatgccatggccggactggcctattttgtgccggatatcgcgcctaactggctgtcggtcgccagcctgcaggatcctgacggcacgggcgattatgctatcagcaccttctcttcccgctgcggttacaccgccagtttctgcgtttcggcaccagggacgaaggtatacagttcggtcattgagggtacgaccccggacaatctgaccaccggttacgccaagtacagcggcacctcaatggccgcgccgcacgttgccggcagcatcgcggtgctgatggagcgcttcccgtatatgaccggcgcgcaggtggcatcggtgctgaaaaccaccgccaccgatatgggcgatcccggtattgatgcgctgtacggctgggggatgattaacctcggcaaggcgattaacgggccggggatgttctacaccgagcaggatattccggaagcatttcgcgtgccggatgaaaaaggcgtggcctatggttcaggtcagttcgtcgtcgacctgcccggcgtcggcgcggtgctcgatcggggcaaaccgactgaacgggtgtgtgatgacgtccattgcggcctggatatctggagcaatgatatctctggccacggcggcctgaccaagcagggcatcggcacgctggtgctgaccggcgacaacagctacagcggaccgacgctggtcaatcaggggctgctggcggtgaacggcacgctggtgtcggacgtgacggtagggaacggcgggacgctcggcggctcgggccgtatcggttcactcaccgccaacgccggcgccaccgtggcgccgggcaactcgatcggcacgctgaacgtcaccaacgacgtgacctttgccgccggctcgcgctacgcggtggaagcagcggcggacggcagcagcgatcggatcgtcagcggcggatcggcgcagatcgacggcggcgaagtggcgatgctgctggatcagcagaacgtactgaacggcgacgccggcggcagcgccatcggccagtatgacattttacaggctcagcaggggatcagcggccagtttgacggcgcgacaaccacttcgccgttcctggcggccacgctgtccacgcagggcaaccggctgacggcggacgtggcgcgtaacgacaccgcgttcgccagcgtggcggccacgcagaacgagcgagcggtggcgacggcggcggatgcgctggcggcgggcaacccggtgtatgaaagcattctggcctccggcagcgccgggcaggcgcggcaggcgttccgccagctgtcggggcagatccacgcggatatcgcctcggcgcaggtgaacgacagccgttacctgcgcgatgcgctgaacagccgcctgcgtcaggcggaagggctggcgacgtcgcaggacatcaaggcggatgacggcggtgcgtgggcgcagtttgtcggggcatgggaccatgcgtcgggcgacgtgaacgccactggctatcaggcctcgacctacggggtgctgctgggtctggattcggcctacgacgactggcgtctgggtgtggcgaccggctatacccgcacctcgctggacggcggctacggctcgaatgcggacagcgacaactaccacctggcggtatacggcagcaaacagtacggcgatttggcgctgcgtgccggtgggtcttacacctggcaccggtttgatacggcgcgctcggtgaactacgggctgcagtcggaccgcgcgacggcgaaatacagcgcgcgcaccgagcagctgttcgcggaagcgggctatagcgtgcagggcgaatgggtgaacctggagccgttcgccaatctggcgtacatcaacttccagaacaacggcatcagcgaagacggcggcgcagcggcgctgcacggcgacaagcagcacacggacgccacggtgtcgacgctgggcctgcgtgcggaccatcagtggcagttgagccgtgaaacggcggtgacgctgcgcggcgaggcgggctggcagcatcagtacggcgagctggagcgcggcaccgggctgaagttccgcggcggtgatgcggcgttcgtcagcaacagcgtgccggtatcgcgcgacggcctgctgctgaaggccagcgcggacgtggcggtgagccagaatgcgtcgctgtcgctgggctacggcgggttgctgtcggaccgtcatcaggacaacagcgtcaacgccggtttcacctggcgcttctga

SEQ ID NO: 454669 - DNA, 954 bp, Serratia marcescens
atggcggcgacatactggtggaaagatcttctggatcgtaacaatacctggcaagggctggagttgatggtccggagcgcagagggcaccgggcaggcgatggagatgctcagcggccaccatgggcgcatggcgctgcaggtgcggggagataacctgttctgggcttcgatgctgaaagatcactccggcgtctggctggtcatgaacgttgagcatcctgggcagcaaggactcttgccgccggtaacctcgcacgacgtggagtcggccaaaaataaggggcaggcgcaatggacgggcgaatggtgccgctattttgcccgccagctgctggatgcgtccacgccgctgttggccccgggccgttggctgctaaggccgatgagctcatcccgggagcagggcacgcctttggcaagctggcgttttgatgcgccggccagcagcatggatatggggtgtgactggtgcctgtatggtgaagatttccccgatctggctgaaccggtgaaggtgcgtctggtcgattggtggtggggcggtaatttactgcttgggcgttatccggtgcaggcagaggccgggcggctgaaatggtggcgcaaaaagtgccgtgaaggtacgttgccgccgatactggtttggtacatcgccggtctggcgtcgtttgtggttctggacggtcactaccgcctgcaggcggcgatagaagagggaataccgccgcagtttttggtgctcagcgagttgaaggaacagacattgacccccgatctggaacatcgggcgcgggttgccggcgcgctggagcagcaactgcgtaaaaatcccaaatgcagcgtagacagcgtcaaccactcattaatcaatctgtacgatacccgttatctgtatgccgccacccacagccgcgccgttctcggtaatggtgagcgatgggagtgtaaatag

SEQ ID NO: 454670 - DNA, 534 bp, Serratia marcescens
atggaaaaaagacaaggtataacaaggccccttactattggtgagattaacttggcatgctccatatttggtcgttcaattttctacgataaagtcaaagtgcattgtgatagttacctaccatttggtctacaatcgcaggatgttgctatggtccccaatggggagttatggtttagagataagctctatcaacatgatttttcagcgtcttatgttgaagataaacacctttttatccatgagatgactcacgtttggcagtatcaacatgggatgtgggtcagaaccagagggttgtttagctgggctgccgagtataaatacaggctcgatgggaaaagagtgttgaaaaatcacccaatggagcagcaggaatcaattattgctgattattggttgctgaagacatcgggatataataaatggttgagaggggttggtaatggtgtgaattttcagggggtaagtgataaatatatcattagaaagtatgagtatgcattgtctcaattttttaatcagcggcggtaa

SEQ ID NO: 454671 - DNA, 654 bp, Serratia marcescens
gtgcagcgcattcatatcctgctgcgccgggaaggctggctgattaaccataagaaaacccaccgtatttattgtcaggaagggctgaatctgcggacaaagagcccccggcgacatgtcaccgccaggcacagacgggcgcgtccgactgtgacggcggtcgatcagtgctggagcatggatttcgttgctgataatctgttcaacgggcgccggatccgggcgctgactgtagtcgataattttagtcgggaatgcctggcgatagaagtgggacagggcctgcggggtgacgatgtcgttgctgtaatggcgcggctgaagcaactacagcagcgagttccggaacggcttcagaccgacaatggcagcgaatttatctcaaaagcgttggataaatgggcgtatgaaaatggcgtcacgatggacttctcccggccgggaaagccgacagacaatgcgttaatcgaatcatttaacggtagcttccgtgacgagtgtctgaacgttcactggttcctgtcactggaagatgcgcaggaaaaggtcgagtgctggcgacaggaatataaccggcaaagaccccattcttcgttaaataaccagactctggaggaatttgtccgcagtctgcaaaaaagcccggatctctga

SEQ ID NO: 454672 - DNA, 267 bp, Serratia marcescens
atgaaaaagacacgttataccgaagaacagattgcgtttgccctgaaacaggctgaaaccggtactcgcgtggaggaagtgtgcagaaagatggggatttccgaagccactttttataattggaagaaggaattcggtggcatgggcgtaacagaacttcgtcgcctgagacagttggaggaggaaaatcagcgcctgaagcgtctggtggcagatctgagtctggacaaggagatgttgcaggaggtcatcaaaaaaaagctctga

SEQ ID NO: 454673 - DNA, 1353 bp, Serratia marcescens
atgcgaaacgaatcaaaaacgcctaatagctgcaagggatgttcaggaacgaatccaacgaaccaggttggtcgcttgcgtgactccgccaaactcgtaattcttttgcctgtgcgtttaacagaaatatgctttgttgtctcagcttacgccctaaaaatgtcctttagttggtctttgagtcggttcaactcaagaaatgcttattttgcttcacaaggcaatactctgcgtgaagcgctgcaggctctcgggccgactttcatcaagcttggccaaatcctcagttccagaccggacttagtgtcgccagaaatctcatctcagttagccgacctgcaagaacaagtaaagtccagaaaacccgcgcaagtaaagcgtctaatagcactgttccttggccgagagctaaacagtgtcttcggatacttcgaagaagaaccaattgccgctggtagcgtagcccatgtttatcgggcggaactgttagacggctccgtagtcgcggttaagatcgtgcgaccgggagtgcgatggcggatgatttgtgacatggtactcttttcggcaacggctaaaatactgagtttggtgccgcggatgcggttaataccaatggctccaatggtagaggaagttcgccatattctgattagtcagcttgatttgtctgccgaggcttgcaactataaaaaattcagagagaatttttgcaaatcgtcccacgtacagttgccccggatacacagtgagctctcaaatgaccgaatgctgacaatggagtatctcgatggtctgcaaagagtcgagcaaatggctaaaaaagtgggatgcacaggtgaactcgccaagacttgcctccgagcacttttccaaatgatttttgtcgatgggttcgtccacggtgacctgcatccaggcaacattaggttcaagaatgatgaagagctcgtattgctcgattgcggattagtcgttcacctggatcccaagaaacagtctgagttcactcgattcttcttgtctattgcaacaaacaatggaagcgagtgcgcgaaaatagctctctcaacatcgacttggcgcaccaagatcttcgattggagctgctttgaaaaagagatgtgtgaactcgtcaacgcaaactcaggtaagagcgcagaacaattcgaggtggctcacttcgctaaacaactctttgagttatttcggcgcaacgggctacgtggatctaccgattttgttaccgtaattttggcactggtcgtttttgagggaatcgttaagcagttatcgccatcgcttgattttcaaaaagaggctcgcagctttctgttagaagttgggtggtaa

SEQ ID NO: 454674 - DNA, 1038 bp, Serratia marcescens
atgttgaataaacgatttttcccaatctattgggcactatttatctgggcaatatggggaacgtatatggcatacgccgatacttggtatctatttcaggaaaactggtttatgagtgtgaccatggcacttagttcattcattgccggagcaaccagtgaggggggaggagccgttgcctttccggtgatggtcctggtttttgatatttcccccagtattgcccgcgatttttcattgatgattcagtctgttggcatggtggctgcgtctatgacgatcgtcatgctgagaatacccattgtctggcgggcggtagtgctgccatcactggggggtgtttgtggcgtgatcttcggcatcgaagtgatgcagccaatgatgtcccccccgctggttaaacttttctttaccagtctctggctctcgtttggctgtgttctattctgggccaaccgacatgcggatcgccaggttgtgagggatatggggccggcgataaattcagatattattaggctgctggctgtgggttttattggcgggacggtaagcgggatcactggtagtggcttggatctcatcactttctcgctgcttgtgctgttttaccgtacctgcgaaagtgtggctactcccacctcggtagtcttgatggcgatcaattcagtctgtgcgtttctctggatggagggggttggctcgggtgttgccgaagttgcatgggattattggctggtatgcatcccgattgtggtgattggggcaccactaggagcctggtttattcgcaataagtcacgtaagtttattgcgagaatactgtatgcttctattttatttcaatactttggctccttgataatattacctatggatatgaggctcgtgctctttagcggttcggtaattattgccggattactttgtttttggacggcaattcatttcggtaatcgacgcttaaaacgtgtcagggttgggaaaccagacccacaagaaaatcagggaagcggcaggaactgttctgctagttaa

SEQ ID NO: 454675 - DNA, 612 bp, Serratia marcescens
atgcctgttgctgaaaatcacccgaagccggtattacgcctcgcaggcacgctccgtggatgtaaaacagatgcagctgcgtgcccgggtacgggaactgcatcagcagagccggggagcagcaggaagccggatgctgagtcagttgatgcgcggaaagggtatgccgtgggacgctggctggcacgccggttgatgcagaaatgtggactggagagccgccagccgggaatacatcgctatcgcggcgtgaaggaggaggctgcggtctcgccgaacctgctgaaacggcgcctcacaccggaagcaccggacagggtctggagtggggacatcagctacgtgcgggtgaatggcggctggtgttacctggcgctggtcatcgacctgtacccacgacgaatcgtgggcagtgcggtgtcgtcttcgccggatgcggagctggtatgtcaggcgctgcgcagagctctggagagccggtcatgccggacagggcgactgctgtgccattcagaccagggtggccagtacagaagcaaaaaatacaggcaattactgtggcgtcacgggggtgatgcagagcatgagccggaaagggaacagcctggataa

SEQ ID NO: 454676 - DNA, 318 bp, Serratia marcescens
atgattcagtataaacagacgaagcgccgtttctctcccgaattcaaactggaagccgttgagcaggtggtaaagcatcagcagcgcgccgtggatatcgcccgggccctggatgtggacgccaccctgctgcgcagatggatacggcagtataaatcagagcttcagggaaaaaccccggtcggcacagccctgacaccagagcagcgggaaattcagtcactccgggcacaggttaagcgactggaaatggaaaaagagatactaaagcaggcggccgtgctgatgagcgaactcccgaccaaatctgtgcgctaa

SEQ ID NO: 454677 - DNA, 894 bp, Serratia marcescens
atgacagaacagaaagcaccgagtttggttttaacgggctccaccggctatcttggcaaacacgtgttggcggcgctgaaggcgaccaatgtaaaagttgaatcgttttctttcagtaaattcttaataggcgccgccgagccaactgctttgcgcatgctgcaacaagctgacgtggtttgtcatcttgcgggcatccatcctcaccagtcaatcacgccgtctgataatttatattgggaagcaaacgttgctggaacgaaaaagctgctcactgctgcccggaatgcctgtcgcatagtatttgcttccagtgcaatggctgcacgaggaaagacacaaccgggggccaatcaggggcttttggcttacgcaagttccaagagagcagcagaggccctagctgtagagtgcgcgggtgacaaagcaagtagcatatcactgcgttttcaagctgtagcaggtgcacatcgcgaaccctgtgtcgggctaatcggcaatgctcttcgcgcagctctcgaaggcacgccgctcacaattttccagcaagcgcctcctcgtgagtatctccatgtctccgatgctgcttcagcaatcgttgctgcctgcctggccccgattgagggacattctgttatagatattggcactgggttaccacaacacgtatcaacagttgtagaaacagttgagcgagtaacgggagttgaaatccacaagcgtagtgttaagcgccgcatagaaccagttccgcgaaccagtaacctcttggccgccagaaagttattgggttggcgagcctatagaagcagtcttgcgcgaattattattgaccaatgggaggatcaacaacatcacgcaatagtgttgccttccgacggccacaggaaataa

SEQ ID NO: 454678 - DNA, 975 bp, Serratia marcescens
atgaaaaatggaaatctggcaattgttaatagtctcatagacgaagagtacatgcagcttcttgaagctgcatggtcaaaagtagacggttatgcgcgagacatcgtttctgaatatgaggaccatgaatcagccccctccaccagagtgcaagctttggaatggctgcgattggcttcggcacgtgaagtatcactcaattcccccgttctaccaagcggatcggcattgtcttttttgaaacttgctcgagatgcctatccgggtttccttgcgggtgaatcgaacggcactaatttacttttttctggcgatggtctgcaaatctggcggggctactacagttcgtcaaatccactctatgcccctctaaatcaagcggcggcgaccgcactggtagatcgagtaaaagaaggtgttccgttgcggatactcgaaatcggtgttggtaccggtggcgcgaccacaaccgcactaaatgccctcgaacaggttgtaaccgcgcccgttagctatcttgcaaccgacatcagtgcaagtcttcttcgttcaactgcggacaaactgaaccaacgcgctaccgggctaatagaattcaatttcgaaccctatgattttaatgctgaaccaacgaggaaacacgtttccactggaggcttcgatgttgtgcttgctgtcaatgcgcttcacaatgcccataatctcccggcttcactgcgaatgttgtcttcgcttctcaaagaaggaggtgttcttataactagcgagtcgatttgtggctcgggtgagcaagtccatcaagagtttttcctgaacctacttcccctacctgaacatagacaaggttgctccagccgcttcctctcttcggaagattggcagcttgcgatagacaatgccggtctcaaatctgacatagcaatcaacagcatcgggcccgagcttatgcttttagcaacggtctcaaagatatga

SEQ ID NO: 454679 - DNA, 1005 bp, Serratia marcescens
atggcaaacgatactactgccgccgccatcccaaatcagggcgcatggacacggttaattgagagacttcgtccggcaacacctgctgctcttcgtgtagcagcgctgcgtcgattcgccgtcgggataacattgctcactattgccgggcatgcttacctcggttttgaacaaagcatcgcacagccgcttgtcgccgtgctgacttgctacataactgagttctttatggagacggcgatatcacgccatgagcaacgtcgtcctttatatacttctgctgccggctcatcgattcgggtcaaagtgaccacccttatcgactttctactgcctgcccatatttcgggacttgctcttggcatgctcctgtacgcaagcaaccgcctggatctttttatcgtcgccgcagttgttgcgatgagcagcaagtactgctttagggtttggactggaaagcgctatagccattatttcaacccttccaactttgggatcgcggttgtgcttttattttttcctgaaacaatcagcattgctgcgccatatcaatttacagcagagcttggagccactggcgatatcgtgctccctgttgctgttacaattatcggcttgtttctgaacattgtttttaccgcacgcgcgcccctcattattgcctggatcggtggctttatacttcaagcggtgttgcgctcagtcttggatccaaacgttgacttcgatgccgcgctggcaccgttaaccggaatggcccttattctattcaccctctatatggtgactgacccaggcaccacaccatactcgactcgtggccagataatatttgggctttcggtagccttcgtttatggcttgctaatggtgtttcaccaagttttcggcgtttttgtcgcattaacgatagtgtgtgctggccgcggtattctcctggcaatatccaacaggcgtggcgctaaagttctctctgcgtctgatgtgcaaagcaacgctggttaa

SEQ ID NO: 454680 - DNA, 1860 bp, Serratia marcescens
ttgaaaataattaagtttcttgtgccagtactggcgttggtattcggatatttatcaacaaattacccagttgaagaaatttcaaaatcgcttccactaacgttgcgcttgctgcctccagccacggctcccttgcaagaagagcgatcggtaaatccatcggtcagacatattgcgtcctggctcagtgccaccggtgctagcgctgcattaggtgatctggatggtgatggccttatgaatgacttgtgccatgtggatcctcgttctgacacggtttcgattggcaccgtatcttccgatccagataaacctgcgtatgttgtccatggctttctgcgccatctcggtactgcccaagcaatagcgccaatggggtgtcgaatcgccgatctgaatagcgacggctggtcagatgtgttggtttattactggggacgtccgccagctctcttcgaaaacaaaggtaattggagtttctccgcatcggatatcctggttactcaaaagccagagcacgattggtatacaaatactgtgcacatcgccgattttaatggagatggcttattggatatcttcgttggcaattacttcgcagacggttcagaactgcttgatacaacatcgcgccaaagggtctctatgcatacttctttctcgcgcgcgtttaatggtggaatgaatcgaatcctgctccagaaaccgggtgagcctggaaatttcgagatagctctcgacgtttttgagcccaactatgggcaaggttggactctggcttcagcatcggcggatcttaccggcgacctcttgccggagctttttgtcgccaatgattttggcccagatcaaatttttctcaacacgtcaagcaatggtaagttgcaattggagccgcgtaaagcacgcagcaaaaaattcggcgaaccactgtctcatagtctgggcagagactctttcaagggcatgggcgtatccattgccgatctcaacaacgacggaaacctagatattgttgtaagtaatattacgcaacaacggggtcttttcgaaactcaaatgctgtttataaattcaggttccaaagacgacccgcttgaattccacaacgcgagtgaagagcttgcgaccgcgcgtacggcctttagctgggataacaagatagccgatctggataatgacgggatgccggaaattctccaagccacaggatttgttcgaggaaaagtgaatcgttggcctgagatacaagaaatcgcgcttgcaaatgatgcgctcgtttccaacccggaaaactggcctaacctgctcgggggtgacatgagtggtgctgcgccacgagttgttttcagccgggcagacacaaaaagttcatttcaaaatgtcgccgaagcctccggtcttgatgacgttggaattacccgagggattgctctggccgatatagatggcgatggcgatcttgattgggtcgaagctaaccattttgccgattctcggcttgtagtaaacgaatgcgcaccatgcggaccgttcgtggggcttcggctactccgagtgcgtgaccaagttctcacaactaacctcgacggactgaaacccgctcataccgtcggcgggacgaccgcaattggtgcaactgtctctctcgagttaccgtctggtaagcgaaaagtagcgtttgtcgatggaggcaacggtcacagcgggcaacagagcactgacatccattttggcctcgctgaaaaaacaactccccccctaaatgcgacaataaaatggcgggattttgaaggaaacgtccgttccataacaatcaaggtatatcaaaaatggcaaacgatactactgccgtcgtaa

SEQ ID NO: 454681 - DNA, 642 bp, Serratia marcescens
atgagtgataaacggtatatttgcgctgttcgtgacgtgataccagcctatcgccgcggactcatggatgccctcaaagtagccagctacgaagtggccgagccagaggatgtcctgaattggctcgaacaatttcgggcagcccagggcgtaagtgattgctgtttcgcgattttacactcaattagagaagacgaagattttgtgaccctgcgtcgcattcagcaatttgacccgaaggttcgcactatagcgcttctgctggaaaataccggtgatctttacgcccgcgctttgaacgcgggcgcatccggggcggtcagctatggcgcaaatcccgcggagattatcaaaaccctcacagccactttagagggggcagtgcgtctgccacattccatcgtggatgaattcctgagccaattcacagacaaaagtccagtcgttctggacaaccaatctctcataactctcaacaagttagctgcggggcacagtatcgcggaaatttcccgtggagaaaacgcatccgaacgcactatgcaccgccgaatgaaagcgctttatcgccgtctcggagttgagaaccgcaacgaggcaatcattgccgccgttaagcacggattcattaaacagatgtga

SEQ ID NO: 454682 - DNA, 960 bp, Serratia marcescens
atggacactttacgattaagcgaaactcaggcgtcggctagccatcctggtatcctaaaatggatcgtggcgcggcgcgtggctgcctttcgttgctcccctacggataggagcttagtagtaaagatagcttccacattcgtttctggcttcagcgaaaccatggtggccggtgactccggcgcttcaatcaggcacgttgaaagcaacaacgaggagttcttcaagcctttctacgttgaaggagcctcgttggcactcgcggcttctcgtgcattgcctgtttctaaggcttctgtagggccgtctgatttgctttaccatctgcctggattcaagcacgttatttacgccggttggggttggtggcacgcatttatgccacgccctacacgaggttttcaaaactcaattgatgtaactgatatattcagcgcgatcacaattgatggagcggcctttgcgcgcgccttcctgttcgctcgccctccatactttgacttaagaatcccgccagtttcaaacgcaaagaagcgactgtgggttcagggatacggcagggctttatggttcctcacaacggcgaacgtttcgatcattgaacgccaacggaaaagggtaggaaacgagctatccgcagacctcgattccggccttggcttagcctcgggctttgcaggaatggtatcgccgacttcttcatttccaaccaccattcgcgctaacaaatcagcttatctgcagggatatgcatttggcttgacggctcgggcaatgtcaacgccagcgactttctctagctggcttttgtcgctgacacctggcgaaaaacagaacgcgcagcggctcatttcgagatgtctcattgaaccgccatcaagcaatgcctgcccaacaaatgtttatacaaaatggcaagacgaactgcgggccgatttccaacaatacgagatcacatga

SEQ ID NO: 454683 - DNA, 1194 bp, Serratia marcescens
atgaaaattttagtcacttgtccacccgcccacgatcacctcttgggattacttccgattgcggaagctgcgaagcgtgaaggtcacgacgtggccatcgcagtgctggaaaattttaaagaagttgtgactagcgctggcttgaagcatttcgatgccggcgaggactggatacctgaagcgatcgacgaccgcgtggatgatgtactcccagaaaagatggcggagtttacacaagacttcatggcacaaatgctatgcggcccggccgctgtctcgatggcgaaagatgtcaaagcaattatcgatagctggaagcccgacatcgtcatgcgtgattctggtgagatgggaggcctgttagctgccgagatggctgatctaccgcacatttctatcggcgttttagatttcaatggcatgtttcttggagaccgcattgttgcagcgttgaatgaacgacgagcagaactcggtttgccagatgatgcgaagggatatagacagtatgagtatggacacatcaatatgatgtgcccaacgttcgcgcctgaagaactcacgttgccgaacaccttctctgtccgcgttgacggtgtcggtaggggagacgtcctccctgattggatttccaacattgcggacgccgaaaagccattgatttatgcaagtttcggtactgcggcagcaacaatccccggttttggtcctgcgctgcgtaacgttgtcgacggcctgggtttgattgacgctaatgcaattgtttcggtcggcaagagtctaaactggaacggcgaacaggttattgacgaacatgacattcccaaaaacgtctacgttgtcgattgggcgccgcaaccgctattgatgcgcaacatcgacctcttgatcacgcatggtggcccttcaacaacacgacaaggtatcgtctgcggcgtgccaattgttgcagtgcccctgctttttgatggcttcgagatcgcaaatagactttgcgaaaagggattggcagttcagcttgactggacaaaactgagctcttctgaagtagccgacgctgtaaagcatgttttggcggatcctaaataccggcgacaagcacgcaagcttcaaagggaggcgttggcagtccctccgatcgataatgatgtggttcagttcattgaaagcgtcgcatcaaaggcaaaacgatga

SEQ ID NO: 454684 - DNA, 1695 bp, Serratia marcescens
atgtccaattttgactttgatctaattgttgttggtggaggcctttcaggtctggcagctgcattctattggtgctcccaggttgatgcctccgcgaaaattttaatcattgaagcaagctccaggattggcggttcatctgtcgatcataatttcaaggtcaatggacattccatggtggcacctggtggtgcgcaagagcttacctttccagagtctttttcttccatagtcaagtcaaccatgacgacgatcggcataaaccttgacgacctgatgaagaacactgatttttcacactatcgtcgccgtggggcaaaaaatcatgcgttttgcttttctgcggaccaatggggtcgagatggaatagctttttggagtgccgaagaaggcattgagctttcggacgccccgctctgcgatgaagccaagagccagctctccaagattttcaagggcgaagtcccttggttcgcagggctagacgaaactgcaaagcttcaggcgcttcaatcacgatcgtgcgcagaagtcctcacggactttggcaaatgtcacccggaagttgaacgtttctttgcctattggacttcacccagttcaggcttgccttttagccttcacccggcgcttgatgcagcgcttgttggatacccgccaataggagcgctagcacccgacttgcctggtccatggccaggcttaacccaagctggcacaaagtttttcaacagttcttcgcgggcaacttatcgatttcccgatggtaatgccacaatagcaagagcatttttagcttggctccgccccgacattttccacggtgacgccgtagccacccggttaggcgagaccattgacttcgaaaagttgcgcgaaccggcggctacacgtcgcttccatgtcaatgaaactgtaaagaccatcaagtcgacaggcgaagataaagtcgtcgttgaaacaacaacgtcagatggtcgttgtgcccaatacagtggttccgctgttatcgtcgcgacttgggcgaccgagtgtgaagcaattattccagcgctaagcaaagagcaaaagacgaccgcgtcggcaatgggccggttgccgataatcactgccacggtcgcagtatcaaattggcggccatgggaacaacttggcgtctctagcctgagctggcccggccacccgtcatggcaacgtgcagaacttggttttcctgtcaacattggcgcgtattctccgcctgactcaccaaacaaaccaaacacgataaccgcaataggtgcaacaacgcaccttcatgaaaagccttcagtcgccgctgccatggggcgcgaatttcttaatcaaccgcatcaggcggaaaagctgcgtgatgaactcattcggttactggaatgcgcgcttggtccttctggatttgatacacaaaacgatcttcacgcctgtcaggttgagctttggccgaatgggtacccctgctacaccaccttgcttgatgatagagacaaatcggtagcttctatcgaagaaaagaaagaacttgcgcgcggcgtcgggcgcatagtcatcgccggggctgacgtcactgacaggccttttcttgacagcgccttagaggcggctttcgatgcggtttccatgctacataaccgcataacctcctcaaatacgcttcgatgcaacgttgaacaataa

SEQ ID NO: 454685 - DNA, 1305 bp, Serratia marcescens
atgagcaaaccccaatcgcgtccagtcataactggtataggcatcgtctccgcagctggaattggaatcgaggagacttggcagcgcatccgcagcaagcggccgatcgcaacaccagtcaaggttcccggtccagctggaactatgacgcagtttcaagccttcgtggcacctgaatactcaattagcgaaatgttcgaaactgaacttccaagagttcagctcgaaaaagagagcctcgattactctcgcgacctgaagcaccttatcgcatctgttggtcttgcacttgatgatgccaacgtgcggtctgccgatatcgacctcgatgaagtcggcgttgttgttgctgatgaacaccctggcgttgagcagctctctcggaagctataccaaggtatttctgaagtagaaagcgcgtttctttcagatcagatctttgaactaaattcattccttgttccgtatagggtagcccgcgtgtttggattgggcggcgagtgctttcatgttaattcagcgtgcacttcaggtctaaacgcgatggactgcgctgcctcgcagattcgcaataacagagcccctatcgcgatagcgacaggttgcgatgatccgctaagctccggaaaatttgagtggtttgcgaagcgaggtctttacgagatcagcggcaaactgtcaacttgctcttcggaggctggagggaccgttttcggtgatggtggtgcggcactggtgttcgaggatcgcgatcatgctatcgcccgtggagctcgaatttatgccgaataccttggggccggattcacacaagacgggtggcgagtgagcgccccccacccccagaaggccaatcaggcgcgtgcaattcgaagagctctcagtgatgcttacgttgacccagaccaggtcaacgttgttgtgccacattacatgggcatccgatcgactaatcagtacgagcgacgctgtttaaaagacgtttgggcaacgagcaataacgagccatattgtctgcccctaaagcctttctttggccacaatctgggaggcgcttcaattctggaggccgcaatccttgcaaagataatcgaggcccagcaaatcccacacaacgttccgccagatatttccaaaacggacctgttaatcacaaagagctgcgattggcgaaccaccgaaattaacgttgcagtaaaagcatctgcagccttcgctggcttctatggagccgtcgtgcttggccgttgcaacgccacatcttcccagcgagatatggcttataaacagaaaataaaaaggtga

SEQ ID NO: 454686 - DNA, 765 bp, Serratia marcescens
atgaagggcagctcaaaggatggagacatgcagcatcatgtgagctttgtgatcggtgccagcggagcgattggtcgggcagtttttgccgagctttcggcacaaggacaacgggtggggggaacctacctctcacgaaaagaagagctgctcaccttcatcgcaaacattgatccagagaagagtctgcactgtgcggttcaatgcgacaccagcaatcgtcaaagcgtagcagaggcctacaacaaacttgttgccgagttgggggagcccgacaacttgatttattgcgcggggatccgcagggacaggccgcaaatatttcaaactacagaggattgggacgtggtcctgaacacaaacttaaggggggcagcggacttcgcacgcttggctttgaagtcgatgacaaaagcaaagagaggttgcatagtcttcatttcctctgtcgcagggagcaacggtctggcgggacaaagcaattatggggccagcaaagcaggcatggaagctttcgttcgttcggtctctcgagaagtcggtcagtttggagtttctatcaatgcggtcgcacccggattaattgaatccgaaatgacagtagacctgcctcctgcagcaacccgaaatttcctcgccaatattccgtttcgacgttttgggcaacccaatgaagtcgcatcgcttgtcgctttcctgactactgaacaagcaagctatataaccggtcagacgtttacagtcgatgggggcctgtcagcatga

SEQ ID NO: 454687 - DNA, 1878 bp, Serratia marcescens
atgattagtagaacaccggtaattacaggcgtcggcgtcgtttcaagtgcgggaattggtgctaagcgtttctggaaaggaatacaatcacctgaagatcgattccgagaaatttcgctattctcgcccactggaataccaaatcgcattgctagcgaaatcggcccctgggttcccggttatgaaacaatcgacggagaactattgtctgaatcccgtatttgtgcattcgcagtggcagctcaaaacgaggcaatggctcaggcaaactgtaatgcatcagatgtggatcaggttttggttgggacaactgtcggcgacattgcaactcacgaagtggaaattcgcgcccgcaaatttaacgagaagcttaaagttgatcaaagtttgcgacgagctatttcgctttctcgagacgacctgcctgttcagatgtttctaactgcttgctccgccggaaatctcgcagtaattcgggcttgccaacttatcgagtcaggtaaagccgaaatagttgttgctggaggcgctgaaatactttcgcagatggcattcgttggcttcgcccgaatgcgtggcatggctacgcaaaaatgccgaccattttccgaagaccgcgatggaatgcttttgggagaaggcgccgctttcgttgttatcgagtcggccgaacatgctgcagcccgaggtgttaactcgcttgctgaaatcctaggctacggcatgtcctgtgatgccaagcacccaacagcgcctgatttagaaggcgaaggcattgtacgagctatgcagtccgcactgggaagcctgtcgcccacacaagtcgactacgtatgtgcacatgggacagggacaccgcagaatgatgccgctgaagcaaagggctacacaaacttctttggctcaaaatgcccacccttaagttcgataaaaggctcaattggacattcgcttggagcggctagtgcaattgagctggtcgcgtgtgtcttgggtattcaaaatcagaaactaattcctcaactaggtttagaaggccagtctacgctcgacttgaatctcgtgtcaggtactgaaaccagttgcaaaatagatctggttctcaacaatgcatttgcgttttttggaaacaacacaagcatagcgcttggccgatctcaacagcgtagcgttcctcgtgtcattaggtcaaaatccgaacagccgaaaatttattacgctacagccagtatcgcatttgactatccagccaatcagtggggcggtgaatgcttgcccgatttcgaccaggacaggttacaggttctcgtccggcgttttcgctccaaacgcgcagcagttgtcgtagcggctatagagcgttggcttgaagaggccgagaatgctgaacttccagaccctcaaagacgtggaattgttcttggttccgaaacaggtgccggcgcagacattgaacggttcttaacagagtcagtagaaaaaggcgacgcgatcgttaacccgggattgtttccatggacggttcacaatgcagctgttggagcagcagctattgccgccgattgccgtggccccaacatcgtgatctcatcgggagcgctcagctatagttctgcgtttcagcagtcgcttgcgttgcttgaggcaggctgcgctgacttagtttattgcggcgtatatgagtcgctcggcgattctgatggtacagtcgcagcgatcaccgcgttggcaacaaggcccgaatcccttggaagaaattatatcggaccagccgaacagttgaacctgggaacatcgattggcagcgcaaaaagcgtaataagctgggccaataaattcaagaaaagtgggttccgaaccgaggagcgcatttcatga

SEQ ID NO: 454688 - DNA, 249 bp, Serratia marcescens
ttggaggaagacctgtgcgagcttgcggcgacgctggcttgggtcgatcccgaagacgtcacaccaaatacctcgttgtctgttattggattggactcacttgggagtattgagcttgtcgcacgagtcgaggctcatttcggtttcatgtttcccgaaaaaaacattccgatgctcgatacagttattgagatcattgattacgccgagcgcgtagtgaaagatatttctgaggttgacggcacatga

SEQ ID NO: 454689 - DNA, 1158 bp, Serratia marcescens
atgtttcataacatggacgttggcgtttggagctacaggagagaatacgaaaatgatcgagcggaaatacttgcggcggtcgacagggtttttagctcgggccaactgatcttgggcagaagcgtagccgggttcgaggaagaattcgcttcgtaccatggctctcgtcattgcattggcgtcgataacggcacgaacgcgttaatgctctctctaagagctgtcggtatttgtgctggggatgaagtaatcacagtagctaatactgcagctccaacagttgttgctatcaattcaattggcgctaaacccgtactcgttgatatagagggaaatgggagctttctcgttgatgtatctaagattgaggaagccattacaccaaaaacaacttgcatcgtcgttgtccatctttatgggcaggccgcagatatgggttcaatttgtgaaatagcgcaaaaatacggacttgcggtcgttgaggactgtgcacaggcacacggagccacctacaatgggaaaattgtcggcacctttggggacgttgcagctttctcgttttatccgacgaaaatccttggggcttatggtgacggtggggccgttattaccaatgacaatgcgatcgcggaacgcattcgtcaactacgctactatggtatgaaagaacggtattttgttgaagacacaccaggtttcaacagtcgtctggatgaagttcaagccgaaatactacgccataagttaaagaaactgccagaatatcttagcgcaaggcgagcgattgcagcacgttatgacgaatggctggcaaacaccgaaattggaattccaataatttcacctggaaatgagcacgcatactatctctacgttgtgagacatcccaaacgagatgtgattattaacgagcttgagcaggtcggtattcgccttaatgtttcctatcgctggcctattcatctgatgtcaggattcggctatctcggtatgaaagtcggggatcttccaattactgagagatcgtcaaatgagatattttctttgcctatgtatccgtcgcttcaaattgacgagcaacttcgcgttattggcgaactgcggcgcatcacagaaagttttcacacaccagttaaatccgaagtgagagtaacttaa

SEQ ID NO: 454690 - DNA, 687 bp, Serratia marcescens
atgatagaacttgcagatatgctattagaggaggtaggtcctgcactcccaaacgaaatcgcaactccttggaaggccctccgcaaccgcgcaagcgaaatcttgctgagaatggagccgcgacgcacattcccagatggttcgcgcggctacaaagctacgtcgcaaacaactattgaagtggttgtcggaacaaagcatgacgatcctaatgccccgcgcgagcggttcgagttccctgaaactgaattcgagatccttgttcatgatccggtctttagcatgaacggtaccattcggctcgatctggaaattaagaactaccgaactgagacgatcagcaaagtccttttccccagccaaactgtcgctctcggtgtgggtacttcttttaatgccgatcttaagccttcgattggccgtctggaaattcctcttggaatagagttcgggccagagtctgttcgaagccagcaattcattcatttggctgttgaaacaccgatgggggtcctgcacaacccagatgcagctcacatgcgagcagccgtaaaccaggttcctcccgttggttctgtttatagccagagcgggcttgtaccgatggctaatgcgcaaggcgaaatcgttgccattaaaacgctgactgagacgaaaatcgtcaagctgttgcctttgacagagtga

SEQ ID NO: 454691 - DNA, 1269 bp, Serratia marcescens
atgcacaactcgcgaaatacaaactgctccaatcgccaaccaaattgcagaatttgcgatcagcatcttcatcaatttattgatctaggtaagcatccccgggcagattcatatcgccgtcctgacgaccaatcgcctgagttgatgtttgagttgaaagtcggcgtgtgtgaatcgtgtcaactggtgcaactcattgacgaagtgccccccgaaatgatgtttaattcggactacccatttcgtacttcttcgtcccaacggatgcagcagcatttccatgaaacggctcttgaaatactcgacttcgaaagacacgctgactcagcgccatttattgtagagtttggctgtaatgatggcacctttcttgaaccatttgccaagttgggtttaatgcatctcggcattgatccagcgtccaatctcgtctcggaagccgtggatcgtggcgttaatgccaagaccggttggttcaacactgatacagctgctgaaatattggaatcggccaggtcggctactgtaatttatgcagcgaacacgctttgccacatttctgatctcgcttcagtcttcaaaggagttgatctgcttcttactgaagatggccgctttattttcgaggatccttacctaggcgatatcgttacgaattgtgcctttgatcagatgtatgacgagcatatctactatttcagtgcaactagtattgatttgatttcccgaaagtttggcatgaaactgatcgacgttgagcacctaggaacccatgggggacaacttcggtatacggtcgggcgtcaacaccaaacaccgtcactctcggttgtagactttatagaaaatgaacgtaaggcaggccttcattccgtccggagtttgaaggaatttgcgcaaaccgttgaaatccgccgatccgaattgccgaaaattctgcgtgaattagcttctgcaggtaagactattgccggatacgcagcaaccgcaaaaagctcaacagttttaaactactgcgggatcgaccgcaacctcctcccggtcatttacgacacgactcccgagaaacaagggctcttaacccccggaacaggtataccaattgagccgtttcctcaacgtattgaggattatcccgacatttacctgctcttcgcttggaatcacgaggaagagatcatttctcgagaatccgctttccgtgttcagggtggaacatggcttaaatttgtacccaacgtcacgctctcgttcgaccctagcttatga

SEQ ID NO: 454692 - DNA, 1338 bp, Serratia marcescens
atgaattcacgacctcatcatcactttgctcgggtttctggggctgacgcgtttttcgaattgcagagctggcggctggcagccagagaatggtcttctgcaacggcaacgcggatccctctttgcgaagtcaggctatgggaaacgtcagagttaagccctgcctatcgtcactcgagcggaaagtacttctcggtggttggtgtcacgcacggtttttacggtgaggaacgctctaccgccagcgcaatgatcgatcaaccggaggtcggacttcttggccttgcagttgcgagatctagcttgggtctgtttgccttggtccaggccaaagcagaaccgggaactatccacggctgtcagatttcgcctaccgtacaggcaacacgaagcaaccagttccgagctcacggtggtaagcccgttctctttcttgaactttttcgagctccgcgcgtggtattgctcgacactgttcaatccgagcacggcagcgtcttttggcaaaaacgcaatcaatcgatgatagtcgaagtgccttactttgagccgcctgttggatttcgttgggtaaaaatcaatgatcttattaggcacctggcagtgagcaacttgatccactcagatctgcgaacaattcttgctttaggtccgttctggaaaaacctgaatacaccatctctggtcaccgaagctgatcaaattcaaaaatggctcgaacatcatcgttccagaatcgcgtattcggcaactcgcgttcctctgagtgatctgatgggctggtgccggcagcaagataagctccatcgcattgacggctccgggcacgaggttatcggtattcgcgtagacgcagtcggcagagaagtcgatttctgggatcaactcatggtgaaacccaaggctgctggacttgttgtcctagcaattcgtgaacgcgaaggcgcacttcaggctttgttcagaacttgtgttgagccgggcattctggattttgtggaaattggtccaacggtccaagtttctggcggggaccaaccttcagacaaaatgcagaatcagctggcgcatatactagcctccgatagcggaaaaatgcgcaatgcgcagattctttatgataattttcactctgatgaaggcgggcgcttttttcaaagttcagtccgttacgtcttagttaactgtgatatttcacctcccagcgatgagtaccgttggtgtgacatcaaaacactggtttcaatcgcgcagttgggaaatattctaaacattcaagccagagatgcattggctttactgttatttctgtctcaagttggacaccattcggtttga

SEQ ID NO: 454693 - DNA, 810 bp, Serratia marcescens
atgaacaagaagcctattattgctgtattaagtagtgttgtagcattttctgctcaagcgaacgatgtatcaggattttatcttcaaggtaagttagggaccagcatcccacatctgtctaatcggtatgtttctaccgatcttgttgattatgataataaggaacctagcttttcaattaagcaatacttagacactaaaacaaaagcagtcttcgccggtggtgttgctgcggggtttgatttcaatccacaatttaatgtaccacttcgtctggaagtagaatttattgctcgtgctaaaggtagttcgaacagtggttcaggtccagtctcatctcagcaacgtgttgattttgtggatggtacatttgtggatggtacatatactctatccaacggtgaagctagtgttagtacccagacttggatggtaaacagttactatgatattgatactgctactccctggcgtccttacctttcattaggcgtgggtttggcacataaccgtcttcagtcaggtgctcgctttactgcgcatgatcgcattattgaggaaacttggtttgatgagtggctacctctttcgcagagcaaaacgcgctttgcttggtcaatcggtgctggtgtggcttatgattttaataaaaattggtctgtagatttagcgtatcgtttcttggatgcaggtagtgtgtctggaacattgactttgtacgatcctgttgataatgaagctattcatgcaacaggcagtgctaaagtccgctaccacgatattctggcaggtcttcgctacactttctaa

SEQ ID NO: 454694 - DNA, 390 bp, Serratia marcescens
atgtcttcaatacctgttgcagggccggggattggcattgtgcgcaacaacatgaaagaggcgaggaaacgcggtgaaccacgaggtatggcgcttcctttaacttattactggttctatcagaaagttcgtaataaaggcccgtggggctataagcagtttgacccatattgggctgattttggtaactttaattttggtgcaacgggttttgctgcgggtatcccggttaatattctcttaatggaggccgggtgggcgcaaaccagagctaaaacatcacgctcggaatggggaaaatggtataaagatcctccctatggtgacgatcccaccgatcagtattggataaaggaaggagtcaaatatgccgttgaaaacggttattaa

SEQ ID NO: 454695 - DNA, 222 bp, Serratia marcescens
atgaaaagggttatcgctattattgttgggacggcaataggcattgtgcttatatggttggcgtatccttatatttcggattggctggtggggccggttcacggtgaagatcagatgtccgctaactttgttctgttgcttgtcgggctgggggtaggatgcgtcgttggtagcctggtcggcggcctggcatattcccgtttgaagaagcgtatgcggtaa

SEQ ID NO: 454696 - DNA, 1029 bp, Serratia marcescens
atgaaaaacgaagaattgatgcatgatgaatgggagtttttactcgaagagtatttcttcactaagcagcttcgttcggctaccgagtggagctataggaaggttgttctcacttttactcgttttattggtgccacagttccgccaaacaagatcactcagcgtgacgttttgttgtggcgtaggcatttattaaaggagaaaaatctatcggtacatacctggaataacaaggtggcgcatctgcgtgcgatctttaatctggggataaaaaaagggcttgttgagtttgaagataatccgtttaacggaacggttgtccgttctgacacaaagaaaaagcgaatattaacgcggacgcagctgactcgcatgtatctaatcatgcagcagtatgaacaacgggaaaaggacagaaaaccattacgtggcgggaagtgcgcactttatccgacctggttctggatgactgtgcttgatacgttcaggtataccggcatgcggaataatcagctggttcacatacgcttgggagacgtgaatcttgagcaaggctggatagagttacgactggaagggagcaagacccatcgtgagtggaaggtgcccattgtccggcaattgagagaacggataaaacagttgatcactcgagccatggagcgaggtgccggccttcaagatctgctctttgacgtgaaacgttttacgacgccacgacacacgcaatatgtctatagcgagaaaggggtgatgcagtcgtttcgtagtttctatcgccgcttatccagggaatgtggatttgatgtttcttcacatcgattccgccatacgttagcaacagagctgatgaaagcgccggacagaaacttaaagctggttaaagatttgctggggcacaggaatgtcagcaccacaatggagtatatcgagttggatatggaagtcgccggccaggctttggaaaaggagcttgttttgcatacagatataactgcagcgagaggcttacaaagcttgacaatatga

SEQ ID NO: 454697 - DNA, 1737 bp, Serratia marcescens
atgctgaaggcgatcaaggagctgctggtcggcacggcgccgaccagggctaaatcatcctctgtggcttcatcgcctgcagggccggcggggtattttatgccgcagtccgccacgcagctgctggacatgcctgctcgtaaacagtgcctgcagcagctgtgggaaaacagctcactgccaaaggatttgtacgaaaagttttatctgcagccgctgcatcacctggtgacgttgatgcaagtgctgccggcaacccggcagggtgagtatgccagcgaagggggcctggttgacgtcacgctgcagacgacgacctatgccgttcgcctggccaaaggacatatgttacccccgggcgcggcgcctgaagatcagtcagcgcaaaatattctgtggaacgcggtggtgttttacgcggtgctctggcgttacctgccgcaattagacctggtagaaggcgagctgcaaagcggccgagcgtggttacctggtgttacggttcccgccgaaccttaccgttttcggttgaaacctgtggcgccggatccggtcatcacggcgagccaaagcgcgttgattgcgtgtcgcttgttaccgacggaagcggtcaactggctgtctaccctgccggctgcggcgcgggcaacaatgctgatagcctcacgtcagcccagctccttgccggtgatcgatgaaattatccaggaggctgtcaagctggcgcgcggtgatgccattgtcaacccagtggccgttgccattccttcctctccaatgcccgtgccgtcagagacatcgccagtgcctgttagcgctcctgctgtgcaggttgtgctggagagcagtgtacctggtgtcgatgtgcaaagtgcagtgtcgggtgaaccggctgccactaacgaccaggaagacggtgttgatactgctgctgcagtcagctctgcaggcgccatggccgttccatcgggtgatgtcctactgagttccgcgctggatgctcccgttaatgatttaccgctggccgagatggttgttgcgccagagcctgttgttgaggttgaagaagacatgcaggcgctgctttcactgatgaatgtcagcgtgttagaaccggctaactcagatcccgttgagaaaggtgacgcccctcagaatgaggtacctccatcagaaagaaataagcagccggcaactgatattagcactgaaattgatagagttgatgattcaatgccttccccgaaagaatctattaccgaacctctttctattgaagatccagttgaacaacctcttattcaacctgatttaaagcatcagggatccgaacagatggcgacaagtcagcggcagcatgagacggaaaatgcagacgatgagttttggaagtggttgggtaagggtcttcaagaacagcgcatcagcgttaatcatccagagtccagggcacatatggtcagcggatttgttttcctttgtgttccagaaatttttcacttgtatatcaaagagtgcggtaaggagcgttccgatcggaacgctattcagaaggcgtttgaaaaacaggggaggcacagagtacgtaaagggcagcgattttttattggtcatttgtaccaggagcctgccggatgcggttcgtaccgacgtatcaatggctatctggtgaaagccaatagtttatatggggggagaaatgtacctgaggacagccagttattggtgattccgtag

SEQ ID NO: 454698 - DNA, 1455 bp, Serratia marcescens
atgtcttattctgatacacctgaacaggccgctattatcggctggtctggtcatcgcctggtcgtcagagcgtttgccggcacgggcaaaacgtccaccctggtgcgctatgccctggcgaatccgaacagcaggatgctctaccttgcgtataaccgcgcggtcagggatgaagccgaacagaaattcccgttcaacgttgagtgcaaaacgtcgcatcagctggcctggccaaacttcggccgtcattaccagaagcgattaacaggaaatctgcggatcaccgacgttgcccgcctgctcaatacccgtcactggccgctggccaggacggcgatcatgaccttcaatgcctttttgtgcagtggtgaccacgaatttgggccgcaacacctgccgggtgaagaagaccgcagcggggtatccgctgaaaggatcctgacggctgcacaattgttatggcgcgaatctgcgcgtcaggacggcacttttccggtcacgcacgatgtctatctcaagctgtatcagctttctcagccagatctctcaaaacgctggcaaacgttgctgttcgacgaggcgcaggatgccaatccggtgacacagagcttggtgctggcgcaggactgtaatgtggtgctggtcggcgatcgtcatcagcagatttaccgcttccgaggtgccgagaatgccctcgatgcgccgggattggttgacgctaaacggttgaatctgacccacagtttccggtttgggccggcggtggccagcgtggccaacatgctgctggcccgccagggagaaacgctgcccgttgtgggtgatggcggtgaagacgcagtggtcacacgtttgccagaagaaaaccggggagagcacgtcacggtattaagccgaaccgttgccggcgtgattggcgcagcgctcgatgccagtctcgcaggccagaaggtgttctgggtcggcggtatcgccggctacaagactgaggagctcgaggacctttactggttttcggcagacatgccggagcgtatgcgctcgccggtgttgtcgcgggaatatcgtgattttgatgaatttgaatcggtggccaaggccacgaaagatccggaaatgaaccagggtctgcgcctgcttgaacaatatttcccgttaccgcagaaactgcaggtgatgcgtgagcatgccatcacggacgaaactcaggctcaggtcacggtttcgacggtgcaccgcagcaagggattggaatggccggtggtcgccctgaacgaggactttgccgatatcactgacccgctgttaccagaggatgagcgcacggacgaaaccaatctgctctatgtggccgttactcgcgcgcggaataccctggtcatcaatgccttgcttcaggcgcttctcgatgaagacgccggtgatgatatggaaggggacatggcggcatgctga

SEQ ID NO: 454699 - DNA, 828 bp, Serratia marcescens
atgaataactacaaagtacttgttgaaagtctgaaacagaaagtcgtccgtgatgaagccattatcggtgccggcgccggcaccggtctttccgcgcgtagcgaagaggccggcggtgttgacctgatagttatctacaactcggggcgtttcaggatggcgggccgcggttctctgtccggcttgatgccgtatggcaacgccaaccagatagtgcgtgagatgggcgatgaagtgttacccgttgtcaaaaagacgccggtacttgccggtgtctgcggtacggatccgttctgcaacctctcgccgttcctggacgaactgaagacccagggctttgcaggggtgcagaacttcccgaccgtgggcctcatcgacggtaacttccgcaagaacctggaagagaccggcatgggctatcagttggaagtcgatatgatacgtctggcgcatgagaaggggatgctgacaacaccgtatgtcttcaatccggatgatgcggtagcgatgacccaggctggcgcggacattattgtcgtgcacatggggctgactactggcggagatattggcgccgaaaccgcgcatgaccttgagtcctgtataccgattatcaacgcctgtgcctgggcggcgaaagcggtgcggaatgacgtgattgtgctgtgccacggcggccctatcgcggagccggaagatgcggcgtatatcctggcgcattgcccggattgtcatggcttctacggcgccagttccatggagcggttgccaactgaaaaagcgataaaaaataccgtcgaagtatttaaaaaaataaaacggaattaa

SEQ ID NO: 454700 - DNA, 1254 bp, Serratia marcescens
atggccaagtttgtgtatgtcatagggactgcagacaccaagctggatgagctggcctggctgaagttctgtttgcatgccgccggcgtggattcacatatcattgatgtgtccaccggaacgccgtcggaggtaagcgaaaacagcaagatagatattctgtcgtctcagattgctgaatatcaccctgaaggcgccggcgcagtgttctgtaatgagcgtggccgtgctgtaacggcgatgtctgtagcactgacgcgttttctgcgcagcacgtctgaggatatctccggactgatcggcataggtggatcgggcggcacagccctcattacttcagccatgaagtcgatgcccatagggatacccaagctgatggtgtcgaccatggcatccggttacgtggggggctatgtcggcggtgtggatatcgccatgctgtatagcgtcacggacctcagtggcctcaactacctgtcccgtaccattttgaccaatgcagctaacatgatagccggcgcggtcaaccatgttgttgcacctgaccgggcgcaaaaaccggtacttgggctgaccatgtttggggtgaccacaccttgtatcaaccaactattaactgttcttaatgaacagtatgacccgttggtgttccatgccacgggtaacggtggtacgtcgatggagcatcttgttgaaaatggcgaggtagtgggggttattgatatcacattgaccgaagtggctgacctgctgttcggtggcgttctggcctgccctgaaacgcgacttgatagtattgcccagactgaagtgccgtgggtcggcagtgccggtgccctggacatggtcaattttggggagcctgacagcatacctgagcgttatgctcagcggcagtttgtcgagcataacgctcaggtgacgctaatgcgcacaacaccagaggaaaactaccaggtcggcgtgtggattggggaaaaactcaatcgatgcaatgggccggtacgcttcttactaccagaaggcggattttccgcgcttgatgctcctggccagccgttctttgatccgaaggcaaggcaagcctttgccgaagggctggagtcgactgtgttacagacgagccggcgccggattatcaaaacgcctcaccatattaacgcacctgaatttgcagcacttgtgattgaggagttcaacgcagtcatgcaacaccagggaacctctcatcactcaacaccagggaaactttaa

SEQ ID NO: 454701 - DNA, 615 bp, Serratia marcescens
atgattctctttgatgaaaacaacctgtcaccggtgcgtcggagaaccttagagcggttaacaaacgcagcacttaagctgtacaaggagaacaaattcccaaccgctgaagaaatcacgcgtgaagcggagtacgccaaagtcaccctcaaaacctatttcagcacgcacagcgaattcgttgagtatgtcgtcaaacaggtcatagggtctgttgagcggcctaccatgggggaggatgctgaggaaaatatcagccgattactgagctggggatatggagagctgtactctcatgaaggactaatgcgtgatgcaatgcgcatttcgcaacatcgctggcagacccgccatgaggagcaggagcgtgaagaagatactttgcttaaaaagagtaaccgacgtgatgcgctcactgaagcattagcgccgctggagtctcaactcccgcaggacaaagttcaaaagctgataatgctaatgtccgtgctctatggtaccgaggcgatgactgtccttaaagatacctttggcctggaacaggaagagatcgtagatttgaccacctggggagcaaaattaatgttgcggcaatcccttctggaagaaaaataa

SEQ ID NO: 454702 - DNA, 972 bp, Serratia marcescens
atgccgtctattttgatggtggcaaagtttgtagacaaaaatagtttttttgggggggcggaagaggtggttataaaaacagctccattcatatcatttttcttcctgctatcggtgtatttgtcggcttatttggatattgagggtgttctcggggagaggggggtgtggttagcccttgtatcattatttgtcttttatttgtttgtttattgttttaaatttttcaatagagtatatcatagtgatgaggttgatgaccggaagaaacgtaaaaatgccatgtttcaacttgttatcgtgatgccttttacatcatcagtattagcattattgcctatgattactgctgcgtattttataaaattgctatcattttcagaaggtgaaagtgatgtgtttaaatttataggggtcgcggtcttttttgccttgatatgtcttttctcctatatccctggtgctttttatttgcgttccattgcccatagtggaaagaattctctaagattcatattgatgtcatttttattgtcaatcatgctgttgtttccattgtcttttgtaatgagtagtataccgtcaatcatagtgaacatgggaatgaaaatgtcaggagtatcaagtgataaaattatgaattatattgtcgatggggatgagtatcccgtgcgactatttgctgataaacagtggccattagagaagatagttggatctaataaatacattatctctggtgtgaatatttttgatttgggcagtataaaattaatatgtccagaaagtataactcctatataccgtgattcatttaaattttccattcttaatagtagaggctatgaggatagtttgtctaaaagactaaaggataaggctgcagagtgcatgccattgaaaaagaattttatttttcaatggtctgagccaaaggttagccagaaagtaaaattagggaatgataaataa

SEQ ID NO: 454703 - DNA, 384 bp, Serratia marcescens
atgcgtgttttttctgatgtgattgttattgctgttatttgtatagttatatatgcacttttttctattttcatgaaagatatgaagaataagaaattaaagagtgaagtgggaaatgatggtgttgaagtgttgggagagatcgttaattcgtatagtcgttcaggcgggaattctggttttataaatataacagttgagtttaagtatttgattaaagatggaactgaattgcacggtaaaaatgattttgttataaatactatggatattaacaaatatcaaccgggggaaagtatatcattacgttactctaggaaagacccatcaaaggttgttattaacaaagaacaccttttatttaataagagggatggtaagtaa

SEQ ID NO: 454704 - DNA, 468 bp, Serratia marcescens
atgagagtaaaaaataagaaaactattgcctttctcaccttagctgtctcggtattgcttggctactggctttggctatcactgcgtccggtagaggttgttgcagttcatgacaatggtaatcatagttatgttttagtcaggagtttcccgctgacagataagggaaaaataaactggtggttaaaaaataaagatatgctgaaagcaaaatatgatatccctaaaccatcatcctctggttatttcactattattttttgggactttggtgacggttataaagaggaaggaaaatatgaccgactttgttttgatgatatgaaaacaaaagtaaactgtatcgaaaaagatgctgttttttccatagataaaagcaggaattttggtgtgactttcacggtttacgatggtgataattatcgcttgggccaaaatagtgacattataaaagtcgaatccaattag

SEQ ID NO: 454705 - DNA, 837 bp, Serratia marcescens
atggccgcactacagtttccctgcatcatattcaaaactcaaaagcggatggacgactacagcgccagtgatatgcgctatggcgacctgacagaagcacaactgaaaactctttacgggctggtggatgtttctaccagagccaatccatatactctgacgaaaatcactccgtttaatcagccacggtctatgttttacggctctcgtggagaaggtgagaaaattacccgtcagcaatgtactgccatgctgtttgatgagttccgccacctgtcaaaaccctacgccatctacagtccgtatcgacatctgatcgaacagatgattactcatatgcaaaatggcaatggttcaccctttcgtagtatgtacctagacagggcgctgaaggatcatattttgtcggataacacaccaaacagtactcgtttacggttaggtggggctatcgaaaaatatattgactgggaaaataaacattacccggaaaaagataaagatgaattgcaaaaagctattctcgaagggaaactcccaaaatttgaccgcttccaggataattttaacggcatgggtataactgtccacgacacctgggcaacacacatcactataaaatcgctacaggttgataatggccgttaccaggcggtgattcattacaaagtccaagatcactttggccttgatgttgacgacatttcaaaattcaagttcaatcagtttcgcttctttcgtatctggtttgtgctacagcggtaccgtcagtttggttttaagccctttatgaccaacatggaaaccaccatagaaatttctggagaccgcaaatga

SEQ ID NO: 454706 - DNA, 318 bp, Serratia marcescens
atgaccaacgcggtcgcgcgcgaaccgccgctgaagcggctgccatgctggcagtttgtcccgcagttcgggctggaaaaaagcggtgaaattgccgcgcaatcgcaggtaaagtccctacgtttcatcaagttgaccagcttaaacaattatcacaaaaatagcggactgaaagaaaaaataggacgaagcaagcaaaaacacacattcccctcaccattttttcttgttttaccgcaagaaaagcgtagatacgacaaaatctcactgttaaccctcggttatttgccatactatttaacggttgttctaagctga

SEQ ID NO: 454707 - DNA, 678 bp, Serratia marcescens
atggaagagttctctcagcagattaaaaacaccatggaggcatttggcgtcccacattattcatatgtgattcagtcaaagtaccaaaaaagcgatccaattatcatgtcaaacttccccaagagttggattgaaaagtacaggaaattttcttttcataaaatagacccgatacttgttggggcaagaaatagcatcataccgttccaatggcaggatcagagccataaaaaatttgatactgtcgagaatctaaagctaaatgctaatttagcatcatcttctctatcaggatatacattcccgttacacgatcataaaaataactttgtggcacttagcgtttgtcatattggttgtaacacgggtgtagaggtgtggatcgaagaaatcaaatgcttaatacaagaaagtcttgctagtattcataatgaaatcgtatcctttattgatagggaacataacgaaattaataataagataggcctgactgaaagagaaaaacaggttgtttattgggcgtcgcaagggaaaacatacaatgagataagtattatactttctatcaaggaagttactgttaagtttcatgttggaaacatattgaaaaaattcggcacgataaatatgaaacaaacaataagatgcgctgtagagtatcagtgtgccgaatattga

SEQ ID NO: 454708 - DNA, 690 bp, Serratia marcescens
atgacgttttgtacaatcagatccgtaacccctctcaacgattatatattcagagtaaaagttactgccgatcgcgatatcaattttttacccggacagaatttgaaaattaccatggaagatggaatttcaagatatttctccatagcttcatcagtacaagatgataacaacttcgaactccatatcgccagctctagcagcaaggacagcattataaataacctcttgagaatgcaccgtttcgaagtacagattccattagggaaagcatggttccgttgtgattcacaacgccctgtgatactcattgcattcgggtccggtttctcctatatccgttcaatattcctatcatgcctttcaacgcatcgtgagcaacctgttttcctatattggatcgccagggatgagcaaagtttttatgaaattgacatgattaataaaatagctaaaaaaaaccctataatcacattcactaaaatcattgaaaaacggatgaaaacttcagttcaagagtataataaaacaaataaaatcctttcagatcgccatcctgatatgtcaatgttcgatatatatatagcgggtaggaatgaaacggtcaaagcactcatagatagactccatgccaataataaggctaaaaaatccagaattttcagtgattctttttcatcaagtgaatga

SEQ ID NO: 454709 - DNA, 504 bp, Serratia marcescens
atgaataaaaaaatcaatcagttaaccgactatcctttgcatgtgaaaaatacggcaggtgagcctgtctggcttagtggtgatgtctattccgtaaagctaaccaatgaacaaacgggtgggaaaatatcatttattgactcatcagtacctcccggcggcggcccgccggagcatatacatgctgactccgacgagattattttcgttgccgccggagaggttgagattaccgtaggagaaaaccgctatgccgccacacaaggtgacctggtttatatccccagaaatacgccacattgctttagcaacctgagcttgcattatgccaggctacttttttactttaatcctgccgggatagagaagttttttatagaagcaggaaagcccgccagcgccggaattttaccgccagtttatgatgatgaacataacaagaatgcagtggccattggaataaagtacaataccttccagaaaaaaaatcatcaaaacaactaa

SEQ ID NO: 454710 - DNA, 1155 bp, Serratia marcescens
atgaccaggctaacattctcaagtattctttctgattcaaaaaatttcgctctccatttatcagaacggacacgtgaaattgaaattgaacgacgactccccgacgatattgtagaacaactccgtaaaattggtgtgtttagcatgaatatgccgtcaagctggggaggtccggaattgaattcaatgcaacagacccaggttatcgagcaaattgcagtgggggatgccgccgtcgcttggtgtgcgatgattggcagcgactctggcatctattctggtttcttatcagaacccgtcgccaaaaaactattcgccctcgataccattaccgccggctggatccacccgcaaggttctgccaccaaggttgaaggtggatacctggtaaatgggaaatggcgtttcggcagcgggctgagccattgtgacttactcaacgccggctgctacgtttacgaaaatggcaaacaagcgctggacgaaaacggacagcctgtttggcgcgttatggtggcccatccaacccagtaccaattgggcgatgggtggcataccacaggtttggccggcagcggcagcagagattattccgcaaaagatttatttgtaccggaggagcatagtttcagtttctatgaaccccatcgatcagggccgttgcatgatacgccagatgcaatcctgcgaaatatgccaggaatcccgttgggggtcgcacgcgctgcgattgattatgtgcattccctagtcaataccaagatagatcggaatacgcaaactgcatggtccaaaagcccaaggatacagctggcaatcgcaaaatgcgaaatggcgctattttccgccaggagcgcagtctacacgtctttgtctgaacaatggtacgccttagaaaataatggtgaactcaataccggacagcgtattcatcctgccatggcaagacagaatgcttttcagacttctcgcagtatcgtatcaacgttgtacgacctagtcgggggcgcgtctatctatagtcatgaaacgccaatggatcgctggctacgggatctaaacaccatctgtcagcatgccgtcgctcaagaaagtattctccaaacatgcgggcaattcttattagataaacagacgaataatccatttatttaa

SEQ ID NO: 454711 - DNA, 624 bp, Serratia marcescens
atgcggggtacttacagtctgaaagagcatgtcaatataaccaccaacttcataattaaagagtgtactcacagtaatatatttaatgatgtcgaatattttgatgataagaataataacgatgagaaaaaagatatcattgcaaaattagttaatgctgcacatgttggcgagacgctctataatgatgagttactggcgcagaccttaggggaatcgcacagtaacatcgatgaacatggcaaaggctggcttttctttttgcccttaattccatttacaccacaagcacttacccaagcttacgccattattgatgatataaaaaataaaacgggcataacgtgcggcgccaccatcaattcattaaacgagcaaattattgatctcgtagtctctatctgtttcgacaagaattcagatgagaaagatcgcgcatttcatgcgttagacttattacaccagcagtttaacgattgtggttttataccttaccgcctagatattgatcatgcccattgggcacgaaaaatcacaccaaatgaaagtgaatataatttcatcaaagaattaaaattatatttagacagtaacaaccttatcagcaacgatcgatacttatag

SEQ ID NO: 454712 - DNA, 1578 bp, Serratia marcescens
gtggaagatattaacgcgaaatcagttattctggatcagggtggtacggtacaagacgctgtaaagtacattacgccggaaatgtttggcgcagtgggtgatggcagcgctgatgatgctggtgccattatcgatgcaatgaagcatgcaatcaatactggtataaatgcggtgcgtggtgatggtatttaccggattgataagggtattccttgtctctctggtcttaataagaatgataatggcgcaatgtaccgcttcggctttaatcttacgttaaatgtcgtcattgttggtgataaattcccggccttaccagaaaaatggtgggatgccgagggggcattctattctgctgggagcggttcaacggagaattttaacttaaatgtgagtgagttcttcggtaacttcagagcaacgttttttaaagttcaaggcaaagggctatctacaagtactatctcatgtgatgaaatgcgcgggcatattatcggatttaaaaattatctggatccagaaaaacaatccggtatgaataaaattcggggaaaaaactggcagaccgggtatatcgcctgcttgattggtggtagtggtaaaggtggcgggaacagtgaatgccacaatattgatattacctggtgtgcaacgcatagatttggtggtatttcactacaggatcgcagccaatacgcgaatataaacaatggtacttatgattataacggtaagtacacatccgttcttaccctgagcgatattgtgaccgaggacgcatatagcgttgagtttggttatgatattgtgagtggtactaaaaaatcggttgcgttatcgagcatcatgcggggatatgaaaacaaatggcagctcgttgttgccgaggactccgatatcaccgatggggaatccaaatttgctgttggtgatgtgatcacggcgccaggtttttctgcaacggttgcagagatcacagtgccaagcaaaaagaccactatctatatggatattattatcagcaacagaaagggcgattttagcaaggttcgcgtagctgctgattatgtcggtggtatcttcggacacaacctgttcaccagcgatatctgggggccaagctctgcacaaaacgttagaaacatgtcgtatcgtggcttaggcgttggtggtacagcatctaagttagagatgtattcgacacagcataatgtcaggttgccttttgccgcggtgacggacagcgatttccaactaaataaaaacctgacaatcaacagcacaaacaaattacaggggacggcggggaatgtggtggttcagcataatacgccggtatgggcattatcgctaaactctggttcaaatacgccggtgtcgatgtggaaaatctatgttaccagcacggacagcaatatctatggtgagtttaccgtggccaatacctcaagctttgccaagctcatcagcgagaattctggatatgtcactcttacaactgaaaatcacagaataatgttaagccagagctccgggtcaaccagaacgctttactataatgctattcgcttaatgtag

SEQ ID NO: 454713 - DNA, 432 bp, Serratia marcescens
atgagttatagattaatattgacgatcgccggcatcagtttactcagtggttgtttcggcgaccggctggaccggcgttatgcgcctgacttaccgatagaggcttcactgcgcgccaatcaagacgtttgtatttatccgccgcaaaaagatggcgagctgcaggatacgctgctcatcacggatggtacggaagacaagctgctggaggtgggcgggcgggcattggcacagggactctgcgttactccgcatgactaccgctttcaggccggccgtctttatagcatgaggctgaactttgtgcctgaagagccgcgccggcagctgcaggatcgctatgcacgggcttttgtcgccaggtttaagatcatcgagcaaaacgggcagcggcggcttgataatctgcctgttgaaaatgggaagccgtga

SEQ ID NO: 454714 - DNA, 585 bp, Serratia marcescens
atgcgagcgatccgagaaacaagattggtgatgcacatttccatgccggcagagcaaaaacatcaccgtacacttatgattttaagaccgaaagatatggtaaggttccggcggatagttcaggagaacatcacatatattatgaccaaaaatgaagctcttaagaaaaagattgccttacaggaaacaaaggtttttttgagaaaaattaatggtatcagtaacgttgaagtcattgacgttgatgtgctggatttagtggcgtatcgtgctaaacaaaaagagattttcagttatgatagtgaccttgagccaatagctgatttttctttagataactctaatgatgctattgttcaatggcaatcggattgtctaaagagtgttataggaaagagtttgttatttgagattaatgattatttttttgtaagattgaagttattcaatgtgtttgattttttggtaagtctttatcttgaaaatggtaatagggatctggttgtttttattgaatcaccatctcaggtgttagccttcaatgaagatgaatatgctatttatttttatgataaattaatatag

SEQ ID NO: 454715 - DNA, 303 bp, Serratia marcescens
atgcagcgccggggtgtagtttatgaacaaccgctgcgctatgccgggcaataccaggataacgagagcgggctgcactataatctgttccgctactacgagccggaagtggggcgcttcaccacccaggatccgatagggttgcagggcgggctgaacctgtaccagtatgcgccgaacctagcagggaagatacgccccgcaggagtgagttctataaacctgtcagagacaaaacgctcaagcattcagtctggagctagaagccctgctgtattgcaggcttggttttcaggaggatag

SEQ ID NO: 454716 - DNA, 1005 bp, Serratia marcescens
atgattatatctttgcagtaccttcgggccattgcctgtttccttgttattcttttacatattacaaaaaaaatgctcctaaacggtgatattccatatcatatatacatgggggcatctggggtggatcttttttttgtaatttctggttttattatcatctatatttcagataaaaacaccgaagttatttcatttcttaaaagtagattaatcaggatatatcccacatatcttatactgttaaccccatatttggcaatttttatgctatatccagagttagttaactctcatgccagtcagacgccatctatatttaagtctatcagtctcttgccacttccggttaatggagggctggttaatattgttgcatggtcattaacctttgagttttatttctattttatgttcgccataggcctgttcctcaagcgagatctattctggacctcatcggctttaatattactgctactgaccattggccaaatatttaacatcccatttataaagtcagcaatagttctagagttcattatgggaatggccatctataaattcctttataaaccagaaagaatgccaggaaaagcactatcattactgcttattgctctaggcgctgggcttttgtgcacaattccaggatacgagatagacggcacaggcttcgacagagtgctcttgtggggcctccctgcagccattatttttattggcacggttgcactggaacgtcagttccgcaaagtggatttcttagtgctgctgggcaactcctcttacgctgcatacttaacccatattctatcaatcaatgctgtgtatgtggttgccaataagatgttgcaccttcctcctgtagtaacaatatctggtgccgttatcttgtccttaatcgtcggtatcatttcgcataagatgattgagctgccaaccatcaactttttcaagaaaagaaaaagtcagttgaagaacggtacgcagcccctttcttaa

SEQ ID NO: 454717 - DNA, 156 bp, Serratia marcescens
atgaatgaaccagtgttgatcattagcattggctatggagaaatcttctttgaaatgcttgggcgtgaagtctatttcaccgttcggtgttacggcggggtcttcgttttgtcatccgaaagggaaatagcttcagttatggacccttacccgtga

SEQ ID NO: 454718 - DNA, 918 bp, Serratia marcescens
atgcatacattgaacaaagcccttgttacgggcaaaaaacagacaagcccatttgtcgttcctgttatttcaacaaaaggcggcgagggtaaatctacccaaagcgccaatctggccggattcctggccgacgccggcaaaaaagttctcctcattgacggcgaccattcccaacctactgccagtagcatattctccctggaatacgaagcacctaacggcttgtatgaactcttaatgaagaccgtcgatttggcgcggcctgaccaaattatttcccgttcagtaatcaacaatctggacatcatcgtctccaacgatccgcatgaccgcctctcttcagccatgttgcatgccccggatggtcgcatgcgtttgcgtaatgttctgcagcatcccttattccaagattacgacgtcatcatcatcgactccaaaggtgcagcgtcaatcatgcttgagcttatcctgctggccagctcctcgtttgctgttggtgtcatcaagccaatcttgccagacacccgcgaatttttacgcggcacgctggggttgatggaagggctgctgcctctggccgtttacggtattgccatgcctcaggtgcgaatactgaccaactgcatggaatacaccaacctggactggaaaacgctggaaagtctgcagggtatcattgagaacggccagtatctgcgcgccgacgcctttgacgtctccctcctgaataccatcattcccaagctggaaatctacaaacttggccatgcctctgggcagcctgttcaccgcctggaaaaaactaccacgcgcacctccacgcccgccgcagcagacactatgtatgacttggcctgcgagctcttcccagattggacgcctgatttcgatgctatgcgtcaggaggcaaaccaatga

SEQ ID NO: 454719 - DNA, 660 bp, Serratia marcescens
atgaatattgagcaacttattgccttgctgaatgaacagcagcacttgactgcgccagcgccctgggcggttcttgatatctatagcgattcagccactgtggttgaccgcaacggttttgagcacctggaaattcccaatgctgcgatagttcccgattgggaaaaactcggattgcaacactggtcggagaaaggcggcagccgtgaggtgagccttgaggagcaaaaagccaatgcccaattagccgccgccgcaccgctgctactggcacacattcatgttctcaaccgtcaggtagtggccgcagggaatgccctgcgtcgtatgctggaaatgcatgagatgatgatggcaaaggccaaccatgcagccagtttttacgatgctgaatgcctgcaggaaatggcggaagcgccactggaggcggccgcagtgcttgagtatgtctgtggcgatgacgcagttaacgatgagctgaaagaagcgacctgcgtcggctgcggctgtaccgaccacaatgcctgtgttgacgaaaatcataccccctgccgctggctcaaggtcaaccgcgagacagggttaggtgtttgttcttcgtgcccgacattccttgaccaccctctgactactgacgatgacgtggaggtcaaaggatga

SEQ ID NO: 454720 - DNA, 222 bp, Serratia marcescens
atgtatttgttgatgctcctgattatgaaactgcaaaacaacacctttatgagcgcttgtctgatgaatggggcgttccacgtgggttcattgacttctataacctgtggaatgaagagcaactacgagaaatgtcggcagggaaaaagattcctggtgggcttcaattactcgagacagggggaggtaatggggaggtttattacgaccattcacctctga

SEQ ID NO: 454721 - DNA, 1341 bp, Serratia marcescens
atggctgatatgcaaattcctcactctgtcgacgccgaacaggctgtactgggcggactgatgttggagaacgcgcgctgggatgacgtggtgtctgtcctgcgtgacgctgatttttatatcccgtcgcatcgccgtgttttccagtccatggggcaactgatggcggttaatcagcctatcgacctgattacgctgtctgagtcgcttgaaaagaacaatgtacttaagcaggttggcggttttgcttatctcgctgagatgtccaaaaacacaccgagtgcagcgaatatcgaagcgtatgccaacattgtcgcagagcgcagcagactacgtcgtctgctggatctggggcgagcattaagcgccgaagccgtagcccctcaggcaaaatctgaactgttgacagagcgggtagagaagcagctgctggaactgtcggaacaggtgtatacccagcaaaacgtctgcctgatagatggcctggatgcggtagtcagccgactggaaaacgtcaccggaggaaccggtgtgaccggaaccccaacaggcttgtcattggttgatgagatcacttgtggtctgcaggatggggagctgactctgctggccgcgcggccaagtatgggtaagaccgcattttcactggcgtgttgcgtcggtgcgctggaaggcaccgatcggccggtattctgcttcagcctggagatgccgcgggagcaattgctgcagcgttttctggcgatgctgggcagagtggatttgaccctgttccgcaacggtcagcttgatgatgaacattgggcgcgtatttccgaagccatgggaattatgacggcctggaatgaccgtctgattattgatgacacgtccgcgctgacgcctgcacagcttcgttcactggtgcgccggtatacccgtttgtatggccggccggcgctcatcatggtcgattatctgcagctgatgcgtgcgcctgattttgaaaaccgcacacaggaaatctcggaaatatcccgcaatctgaaggcgctggccaaagacacacaatgtccagtgttggcgctgtcgcagctgaatcggacgctcgaacaacgggctgacaaacgtccgatgaacagtgacctgcgcgactccggtgcactggagcaagatgccgatgtgatcgcctttatttaccgggacgaggtgtattacccggattctgaagatgccggcaccgccgagattatattcggtaagcaacgtcaggggccaacaggcatggtgcgcgttcagtacgaacagcaatacacggcattccgtgatttggccatgcctgaatttcagggaggagcttaa

SEQ ID NO: 454722 - DNA, 1719 bp, Serratia marcescens
atgggacgtatcaataccaaaaaaattgacctggggagcgcattgcttcagcagggcaagactgcagtaggcactagtagtaatgctcctgctgaaggggccttacctgccacggaaatgccgatggtgctgactctgaacgaagttagtcctttcccggataacccaagaacctcccgtaatccacggtatgaggaaattaaagcctcaatccgggcacgtggcctggatacggtacctaaaatcactgcagatcctgatcgtcccgaactgggtttcttctttagtgacggggggaatactcgtcatcaaattttatctgaattgtggcaggaaaccggggatgaacggttttaccgtatttcctgcatgtttaagccttggccgggccggttatcgtgtgtgataggacatttggctgaaaacgaagttcgcggtgaactttcctttatcgaaaaggcttttggtatcaagcaggcaaggaccctcgttgaagatcaattaggcaaaacagtttcactccgtgagttatccacattactcggtgagtcgggttatccggttcattattcgaacattagccggatggaagacactatccaatatttgtatccccatatgccgaatcttcttaattcgggtttagggagacctcaaatacaacatttattgtcgttacgagttaatgcatataaaacatgggataactttgcctcagaaaacgcgcccgttaaagattttcaggacgtatacggagcagtttgcgaacattttgatgatcctgatgcatattctcttgaaatgttcagggatgaactgattggtgcattggttaaagctctcccacatccatctctgaattacgatcgctggctcctcgagctggatccaaaagaacaaaatcgccggcaacagcttggtgaaattgagccgttgaaaagcgtctccagtttcgctactcagccgatggttgagtcaacagttgatgctggatcatctatcccgcctctttcctccgatgtactggaaccgggtacgccagcgttgacgttgagcagcgcgctggacgaacagggaaacgcagaggaaggaaaacttgattcatcttctgctgggccaggtacgtcaagtacacctcggattgaaacccaggatgatttatatggcgcgcccccggttctttccggagatgttgacgtacaaccctcaccaggcatttccgagacaaagactgctggggcaggacaacctgcgcaaccgggtcctgtagctccggaagttaccccgaacgctgagggatcggaagtcgccttcgctgaagaagggcttgagccagtggtttctgtctgggccatcccggccctgcaggatgacattgaacacctgcagggcatggcttatcgccttgctttcgaactggccgaacaagccggctgcgaaaccgagcttaaagccgataaagcaacgctgatcgcggcggggtattgcctggccacacagcaatcatccccattcactgcactgcttctctctctgactgggccgacaccggcgaatgatacctgttcatttagcgaagcgttgattggtgccgctgatggcgccgggttcccgttgcttgatgatatccatgctgtgaagtttctgcgtcttgtacgtgttcttcgccgcctgcgcgagctgcagcgtgatgtcgttactgagggggaagactcatga

SEQ ID NO: 454723 - DNA, 723 bp, Serratia marcescens
atgagccattcacaacgacaagcgcggctggtgaaactggtccgcaaacttcttgaactcgcccggagcaacagtaatgcccatgaagccgggcaagcattgtcccgcgctcagaagctgatggcgaaatacggtatcacggagctcgaggcgaacatctcctctattcaacagtcgccaaccaaagatgctccatctcagtcatgggacaaaatcccggagtggatgagcttgttgacctggaccgtcgccaatgcgttcggctgccggcactacttttcttccttcgaaagccgaactgggttaaagcgtcgcaacgtcacgttctacggattcagtgaacgtcctgccgttgctgcttacgcctttgatgtgcttagccgacagttgaaggatgccacagctgcatacctgaaaacccagaataagcgcctgaaaatggcgacgcgccgggcgcgagcagagcagttccgtgctggttgggtcgaaggcgtccgccgaattgtcgatgttttcagcgtatcggagcatgaacaagagctgatgtctgcgtggttggaacaacagggcatgagcacgctgaaaacccgctcggtaaaacaatgtcgcggtgatgccatagcgcgtagtcagggctatctggcaggacaaaatgctcgtctgcatcacggggttgacggttgtggacctgcaggtattggctacagcgccggggaggactaa

SEQ ID NO: 454724 - DNA, 561 bp, Serratia marcescens
atggatatcttattttggttcgggttgtgctgcgttttcgttgcatttagtggcgctgttgctatgcgttttctccctaaggttataaagcccactaaaatcatagaaatgccaagcaggtatttgctaatgatatatctgcttatggcggtgtctgttattggcagtctggcaatgatgcttactggtggggcagatacgtcatttgtgttgggcaattttaagctccaggtcacatggatgggctggcgttttatggccatgctggcactgttttttcctctccatatttatacctgtaagaacactgagtggagaaaagaggttatttccccaagctttgtgtttttcatcattgccctactgatatcagcagtgtcttaccatatttatgcatttgtccgttgggactatgacattgcttatgcactgagaagcatccttcttcctgcaatgctgttctggtgcacatacaacatcctctacttgccgcttatttttgcgttccgcgttgtgtgcggtaacgacggcgaggatggcggctccggggaggacaaatga

SEQ ID NO: 454725 - DNA, 225 bp, Serratia marcescens
atgaataaaagccccctgaccaacggacacatcgagatattttcaacttttatgacggttgttcttgttttatacgccggcggtgcgattgtccttttttataatcaattgcgtttaaaactacggacacgggaaaaaggttggcaggtttctttattaccttatttgttcttgttcttaccggttgtggcggcaatattcgtcgtgcttgggaggtcttcgtga

SEQ ID NO: 454726 - DNA, 213 bp, Serratia marcescens
gtgaatcctgcgctgattgttatctgcttttgtattgtcatgttttttctaatggcgtttcgagatacggatctaaagcgtcttatcaaggacaaagacaactgttttttgcagcatcttttatttttgctgccttttatattgttttttctggcgccgatctttgtgttggtcgcggctcttattaatttgttcaccagggggtactactaa

SEQ ID NO: 454727 - DNA, 630 bp, Serratia marcescens
atgagtaacagcttgtcacaggcaacaaacagcctgctcacgcagctcgtcatggagctcaagtccggctatatccgccgttgtgagtctctcggactcacgccagaggaaatgcagatgctgaacggtctgaccgtcgatgatctgtattacttgctgaacagctccgtctcggtgctcacgttccagatccatcacgagaattttgccttgatgctgcagcaggcccgtcgggaacagcaacggatgcaacgtatcgaccgtgcactggcgctgggcggttctatcgagatgatgcagcacttttttggcctgtccagtgtcgaggtctctgctcgccggcgtatgacggggatccaaatccgtcagggacgctgttcgacgctcagtgatgaggacaatgcatcactgtggcgccagtggcagaaagcagacatcgatgatccgtccagcgctgacggcctggacgtcatgatgctcgcggctgagcagatggatgtgtcgttaacagcggtctggcacgcagtgcggagttttgatggagcacagactcgcacggtccgtaaagcgatccagtctgtacgtaacaaagccggtgtcggagaggagcttgtgaggaggtctgcatga

SEQ ID NO: 454728 - DNA, 264 bp, Serratia marcescens
atgaagtcgatgttgttgatgccaggattacaggtgcctcgttctgcccccccatcctgccagaagaaggcaaaagagcaggtaaagcggttccggagtggtgaacgtaactacaaacagttacatgccaaagggaagcacaaacccggcagttgctggatgaagattgatataggaggcaggtggcgtctgttaagtcgaaacaatggcgatgactgggagctgctgacgactgaacgttacaacactgaattatggaaatga

SEQ ID NO: 454729 - DNA, 1275 bp, Serratia marcescens
atgagcataaaaagaacacctgatgacgacctgatcacttttactcttgagcaaatgacggctcgtctggctgaccgaatagatgaacaacagaccggttgtaacgacgtaacaaatctgcgcagtggcctgctgttcaccggtaatgtccacgatgcggtaccacgtcggctgatgctcgatacccggttgtctcccctggataaaatcgcgtgggtgatgatccgcctttatgcgcaacaaaaccaacaaaaccagggagccatgttcccgacctacgacgagctgcaaaagcagctggcgtcgccatttaagggcaaggcatcgcgtgaaacggtcagccgggttctgttgatgttgcgcctgacgggctggctgagcctgtgccgccgtgtgcgtgacaataacgggagggtacgcgggaatatttactctcagcatgatgagccgctctcagcgtgtgatgcggaaagtctggatccgacctggcttgataccgtggcagccgcatgtgagcacaagaaccggtctgtcagccagacggcctggtcggtattgtccgacatccgcaacgacccgacgatgcgtcactatcactcgcaattgaatgtgatggcgcagcgtttgggcgctcctcaaacccctcaagagatggccgcgcagatggcattgcatgaagaaaatgccggcagttcggtaaccgaactcagtgaaaaaccccccggttcggaaaccgaactcagtcaatttaagccgagttcggtatccgaactgggtgaaatacgaggtaagaaaatacagagttcggattccgaactaagtctaaaatcaacaggttacagcaagcctgcgaaaccgaactgtaacgtacgttctttcacacaaagtgtgaataaaaaaacgtacgttccgcgactgcctgaagcattgcagcaacgcataccggaggctgaccagcagcaaatccatgcccagttacaagccttgccggctgacgttgcttgtcaggtactggaaagcctgagcgcagccctgacccgtggagaggtgagtaacccgaccggctggctgttcagcatgatgaaacgggcccggaacggggctctgtttgccaccacaacgccttcaaaaccggcgaaaaccgagcctgtacgtccgcagcgccctgcagaagcgtcccgaaaagcgcctggcccggtcgcaacccgcgagcatgtgagtgccctggtggcgaagctgcggcagggaatggcccgagccaggagtgggaagtga

SEQ ID NO: 454730 - DNA, 726 bp, Serratia marcescens
atggctgaaacaacaaaagactcacagggtacaacagctaaagctggcgcattaaaatccacgctcaatgtggaactgcatactctttatgcaattcgtttgtgggaagggcgtcgcagccagacggctgaccctgaaacttccggtaagcgtcgccctgatatttatagtatgccccggttcatccagcgtgctggccagattaatgcggcatccgaagaagataatccctatgcagatgctgcaatggtgggtttagaagctgcgcttaataagggtatggagcaactgcagttggctgtggccgatttggacaagacgcttgccaatattcctgcacaagtctccttgtcagaaatatcttcagtatcaccactgaacatcggtgtatttagccggactccggtgggttaccgttgtgtattcttgcttgttggctatgaccagcttgcaatgaaagccttccaggcatggcattacggcctgatttcacgttcggttcgcgacactttactcgatcaaggtgggcactggatccgtcgggtttacggtgtagtgcaacattatcgtcatgtgaatgttacccgcgatgacattcgactggggacacctgcagctaaagacgcgattgcacgctttggagaacctaaagcgaaagtcatgtcaggggagcttcgctcgtcgttctcaccaccacttcgtcaaaacaaaggagaccaggcatga

SEQ ID NO: 454731 - DNA, 576 bp, Serratia marcescens
atgaacacggatttctttaaatctttacgttcgacgattgttccctgtctgttggggagttttctgctttcagggtgtacgacgtcagagatggccgagtggaatcaaaaaatcagcgacgcagctcattctattgccagtggttcggggactagttctgattccggtggaatgccctggatgaccaaggccggtgctaccggtcctcgcaagaatgttcagcatacctacaagcttccggtggatgttgatactgcggcggctcgattgaaaagccactatcagtttatcaccactgacgagctcgaaagtctccgtcagcgcgatcagtacggcgactggagcgcttgctctattgacgaggcacggccggaatgggctgcacaaaagggcagttactacaagatgggccaagagtggaaggataacgatcgcctgatgctggaagtcgagaagtccggtgccggcagtcgcctgaaggtcacctatagctcaccggacagcacccacctgaccgacgcctatctgcgccgcctgatgacccagctgcagcaggttgccaaaggccagcgctga

SEQ ID NO: 454732 - DNA, 477 bp, Serratia marcescens
atgtctaccccagctcaaactcaacaaaatgccaccaaaaacactgaatacttcaacctgaccatcaatggcatggggtatctcagtaatgttcgccaggttaatggtcctaacggcacctttatcagctgtgttgttaatgcgctgtccggtcctactgataacgccagctatacgcgtttcgattgtaccgttgcaggcaaagaagcaagcagcctgattaatcgttgtcagaaagcctgtgacgaagacaaaaaagttctgattggttttgtgctcagcaatcccaaaacggacatcttcacgctcaacagcggcgaacacgccggtgaacagcgtgtcagcctgaaagcgcgcctgattcgtatcgattggatcaaaatcggtcaggaaaaggtgtaccaggctgaaaaatcctactcccagccgcctcagcagggttccgcgcagccaagctacgctgaaaactccttctga

SEQ ID NO: 454733 - DNA, 504 bp, Serratia marcescens
atggcgtctcgcggcgtaaacaaagtgattcttgtcggttatctgggccaggatccagaaatccgttacatgccttccggtggcgcagtggctacgttgtcactcgcaacctccgaaagctggcgtgataaacaatccggtgaacagaaagagaagaccgaatggcaccgtgtggtgttgttcgggaaactcgctgaaatagccggtgaatacttgcgtaaaggttcgcaggtctatatcgagggtcaactgcggacacgcaagtggacagactcggacggtgttgaccgctacaccactgaagtggcggtcaatgtcggtgggtcgatgcaaatgctgggaggtcgctcttcggataatgcctctggtcagcgcggccagagcaactggggcaaacctcaacagccaacccacagcggcacaccgtctcaacagcctcaaccgcaggcacaatctggcgggaatgaaccaccgatggactttgacgatgacataccgttctga

SEQ ID NO: 454734 - DNA, 717 bp, Serratia marcescens
atgtcagcatcaggacctaagcgagccgagcgcttactcaatcttttgcaaatactgtatcagcatcgctatccgataagcggtcataaactggctgaagagctttcaatcagtcttcgttcgctttatcgtgacattgcagccttgcgtgcccaaggagcagatattcagggagaagcaggttcgggatacattctttctggaggctatcttttaccaccagttatgtatactcccgagcagctcgatgcattggctctcggtttacgttgggtagctatttttggcgatgcagatattgcaaaagctgcttcagaagtaacaggtaaggtcatgcaggggttgccaccccaattgcaggcactttttgaaaactcgacgttgttggttggaagagcagaccctgtaaacaaagaccaacatcacatagcacttattcggagtgccattaggggaagattaaaggttcgcacaagctatacagatcgtttggggaatcagagcgaaagaattatctggcctttcgctttaggatacttatctggcgagattattctcgcggcctggtgtgaaaatcgtaaggactttcgtcacttcaacgtggcgaaattaaaagactttgaaatcataaatgaatgttatccctattccagaaataggctgctttgtatgtggcgtaatgcgggtttggatactatcgtaacgctacccgagtaa

SEQ ID NO: 454735 - DNA, 636 bp, Serratia marcescens
atgaaaaaaacacttgtagtctctgccctggcagccgtcatcctgacgggctgcaccacgcaacaacccctgcagcagcgtgatgcgtcactggtcacgccgcctgtcaccgtcacccgtaatgtccagcccgttacccaggatgcttatggccaggcgccggaagtcgtgcgctatgaccgctatctgctggtcagcaccgatccggccgctgtccagcgtgacccgctttctcaaatcatcgatatccgtattcctgcctccgtcaaaccgacggtggccgatgcgttgcgttatgcactgcgccagtccggttacaccctgtgtgcgaccggtccggccaacggcgtgttgtatcgccaggcactgccggcggtgcagtaccagctggggccgatgcgtctgcgcaccgcgctgcaggtcctggcggggccagcatggcagctcgaagttgacgatgtgcagcgcgttgtctgccacagcctgcgggacggttaccagttgccggcctctcagctgccaccgtcgccgacgccacgtgtctatcacgcagcgccgaccacagcacctgcaggcacgatggcgccgccggcgattaaacctgtgtcttcaaccggaggatggctgaaaaaatga

SEQ ID NO: 454736 - DNA, 756 bp, Serratia marcescens
atgaccgagcataacgaagaaatggtgcctatgatgccagctaaaaaaggattgctgcgtagcaaggccttttggctggtgacgggcggggtggtggtttttctgattatcgggatggttggtgtcggcgccgtcaaacacgttgaccagcgtattgcccagctggagacggcgcaaaaagcgctggcccctcaggatgacatgacctcaatggcagacgttgtgcaggcgcatgccaagcagctgaaagccctgacagcacgccaaaacacactcaacgacgagatgacggaactccggggcgctaacaggctgcccgaaaagcttgagcagcagctgcaggcgcagcaggttgaactcaatgcactcaaagacagccttgaggcgctgaaaaagtcagcggcaacgacgccggcagaaaacaccgcccctgccggcaaaccttctgtttccgtcccggccgcgccgtcggccacggcaaaaatcaccccaaagcacaaacctacgccgattaaatcttccccgcgtaaagcggtacgccgtgtagcgcgtaaagcgccattcgtgctgaccggggtggagcagcgtgggacagcggcctttgcggccgtggcgccgcagggattcagtgacctctcacaggttcggctgattggtgagggtgagtctgttgcgggctggacgttggtcagtgccggccacggccaggcgacattccgtgtcaacggtcgcctgcagactgtcagcgcgcaataa

SEQ ID NO: 454737 - DNA, 678 bp, Serratia marcescens
atggactatcgccgcgttttgaccacaggcctgctgcaggccacgttgttgtttgcgcatgccgctgcagcgcaggacgtgccgcaaggttatcgtgaggtagcgatgcgtcacggtgtgccgccggagtcgctctactcggtagccttgaccgagacctcgatgtcaccgaaaggcattatttcggtgactcgcggcgccggcccggcaccggatgttgaacgtccgtggccgtggaccattaacgtggccggtaaaggctaccgttatgccacccggctgcaggcctgggtggcgctgcagggcttcctgaagaaatacccgcgtaagcgcatcgatgtcggtatcgcccaagtcaacctgggctggaacggccatcattttacctcgacctgggaagccttcgaaccctataccaacctgaacgccgcggcggccatcctgcgagagtgctatgaccgcaaccccggcagttggctgacggcggctggttgttatcaccatccggccggcggcgctcccgccgcgcgttataaatccatcgtgagaaccaaactggcgcgtctcaatcgtagcggtacccaaacgacgccagtggtttcccgccatacccctgacccgacgccggtagcgacgcagactgcagcgctgacgtgggttgagcctaggagtcaataa

SEQ ID NO: 454738 - DNA, 387 bp, Serratia marcescens
atgaccaataagcaacaggaagacctgaaagagcatctgccggcagcgctggcgacgtggcaacagtcgaaaggtagcagagtcactgtgggctggctgcatgtggcgaatcctgaggttattgcaacgctgctaactgagctggaaaaagcacagcagctcattaaggcggcggaaatcagaggtgtagaaaagttggcggccgctttcaaatcctggtctggcgacagcactcatcgcgattacgaagcacagcggcactgggctactgcgagcgaagaagcgttgtcatttgctgatgacctgcgcaatgggggcgataaggcgcaggtatccgattccggatccaatgctgaacgggaaagggggcattatgaagaacgttaa

SEQ ID NO: 454739 - DNA, 516 bp, Serratia marcescens
atgaagaacgttaattttctgctgtttggtctgtgcctggtgacctccacggcgctggcaaacctgaacgtgattgccgatgttggcggcgaggacgcctccccctattttgaaggcattaacgcccagggcgaggcgccggcgtcaccctccggccaacccggtattggtgacgctcaggcctctatgttgcccgtatctacgccagaactttcacccggcgatgtggctgacagaccgctccaactgccggggattggtgccctgtttattgtgggcgatgacgatgccagccgcaactggctgcaggctaatgcgcaaggcctcaagtcgcgccatgctgcaggcctggttgtgaacgtcagcaatctgcctgctttgcagtcgctgcaggagctggttccaggtgtaccgatggcgccggcctctggcagtgaactggcgcgccgcctgcagttgtctaattacccggtactcatcaccgacaccggcctgtctctgcaggtcacaccatga

SEQ ID NO: 454740 - DNA, 435 bp, Serratia marcescens
atgtttcatcagtctaattatgttgttgtggcaattcgctttctgtctgcggctctcagggtcttgttggtctggccgggcgttgtgctggttcttataggtttcatgttttttgtctcaacgatcggtgattcaggtgggcagatggctgcttcacacatggccaacattgcgcaaaattaccgtgtagctcctgcagggatggtgatggtacatacgtgcccacattcggatgatcctgtatgggatatcaccccaggttcggcggcggcgccggtactaaaacgggactgtaaacctcatccggagacgtttgttgatttcgccaagcaagagcggcgtatcattctctggatcgggagtgtgcttatcgtccttggcatgttacgtgatggcggagtgaccgggtataacaaggatggccgcaatgagtaa

SEQ ID NO: 454741 - DNA, 795 bp, Serratia marcescens
atgcaacaaaagaatggtcaggcagagattcatattgggaatcaagtcattagaatccctgttcatgaagaactggtgatccagctgttgaagtcagaaaatagtcttaagttagattctatggaaatgacacgattcctaaaggggtatttatcaaccagaacacgcgaagtaagcctaagagttaaggatattgaattggattttactgtaccggcctggcttgctgataccttggaattcgaaatcagctctttcatacctgaacaggagtatagtgatgattttgggcagatcatcaggaaaatgataccttcggatattagaccaccaacggaaaaacagctctcctatgcaaagcgtattgctgtcaccttagggaaagagttaactgatgagcagatatcatccgttagtaaatgtagtgattttattgataagcaccttccggcattttatgaaatgagagcgaaactgaattcgttgtatgtaatgtcaaggaaagccgcgcgcggctatgtggttctttgccttgcttctggttatggggggattactgacgaattgcttgatgttatgggggtatcaagaaaaactactgttgagaaatatttggagcaattcaggtcatatctagatgaatttcataatatggaacctcaaaaccaacaaatttcaattggcgtagtaaatgagtttgtgcaggaaaactacgataaaatggaattgcctgagctcgatgtaaaagccattgagcgattactggttgatactcaagcaaagggtggtgtttga

SEQ ID NO: 454742 - DNA, 243 bp, Serratia marcescens
atggccatgaccggcgcccaggaacaggccttcaatacggccagcggcggcgttgaaatcaacgtcttgtcgttgctgtgtatcggcggactgttggcggtgctgtttgtctgggctgcctgggcctggatcgatgtttacgagggttggaggaacgaaaaagtccgcaccaaagcgctgatccacttcgttctcaaaaccgttctgttgctggtcgtcgttatgtggatgttcgccagctga

SEQ ID NO: 454743 - DNA, 366 bp, Serratia marcescens
atgaatgctgtagttcgtcttttccgccacttctccgcgcgtatcgcggtggtgtcctctttggctcttgcggccagtcagccggtattggccgccctgccaactgttgagccgccgtcttccggtggtggcggtggtctgatggaaaccctcaaagggcatattcaggacggcattgtgctcattggtctggttctggccgctgcggcatttatcgttgtggccaatgctggcgtttcaacattccacgaggtacgggatgggaaagcagcttggggtaaattcggtgccatcatcgtcaccggcgtggtgctggtcgtggccgtaatctggtttgtcggcaaatccgctgaaatcctcttttag

SEQ ID NO: 454744 - DNA, 366 bp, Serratia marcescens
atgcagactatccgatttttacctgaccgtcttaataccgaagctgttgtcttccggggttttaccactccggagatggggctggcggtattaatgggggtagggctgggtctgcttgtgtcgttgccgtttgttctccttgccggctgggtagtgatccccaccggcatgctgctcaccccgctggcggtcctctggtttggtggcagtcggttgacgcgcctcaagcgcggcaagcctgagaactatatctggcagcggcttgagctgcgtaaacgtcgtatggggtggggtaatcccacactcatcatcgaccaacagggctggtcactgcgacgcagccggactgtcaagaggtctacatga

SEQ ID NO: 454745 - DNA, 414 bp, Serratia marcescens
atgaagacaatccgatcagccctggtcatgttggtgattggcgccgcactgtccggctgctccacgtcaaaggaagagatgctgccgccgggtgacagcacgatgctgggactctggcagggtgaggacggcggcggttcagcgcgcaatgcggtggcagccagggacagcctgcgccgcccgctgacggaaagcgagagccaggccagcgttgctgacgatcgaagctacagccgcacgcaggagagtgagatcggccagcagttcccgcgactgccgaatcccgatctggtgatgtacgtcttcccgcatctggccgacggtaacacaccggtaccggggtacagcaccgtgttcccgttttacagccaggtgcaatacgcgatgccaggtgaacggacggaggcttactga

SEQ ID NO: 454746 - DNA, 405 bp, Serratia marcescens
atgatgaccctgaaataccccgagccggctgttcgccctcaggaagtgccgtcacagggcgccggcctgtttacgctgccgccccagggggcggcgacaatcagccagacggatgcgcaggcactcaagacgttttgtgatgcgctccgtgataggttgctggggcgtgtcgtgctgacggcacacccgcaccgtatcgggagccgaaccagcgtggcgctgcatctggaaggacgactgggtcagtctgtcgatgttctggtgacagtgacaggtaccacatcctggccacaacctgaggagtacgatcacccccgctggtatatctctgtgccggacgctgcggacgtggtgtatctgctgctccatctgagtgacctgtgcgagcgttttcaggtcaactag

SEQ ID NO: 454747 - DNA, 1161 bp, Serratia marcescens
atgaaaattaaggtgaatggaacgggtatccacattgagcaacagggcagcggtgaaattgcactggtatttttgcattattatggcggttcatcccgtacctgggagagcgtgataagtcagttacctgaccactaccgcaccgttgcaatcgaccaccggggctgggggggctcagacgcacctaaatcaggataccgaattggtgaccttgctcgggatgccgaaggggttatttcagcgcttgagcttaaacgctacattcttgttggccattcgatggggggaaaagttgcccaactgatggcgtcgcgtcggcctgcaggtcttgaaggcctgatgcttatcgctccctctccaccttcacctatgcgtctcacgcctgagcagcgcgatacgttatccagcgcatataacagccgcgaatctgtcggctttgtgattgataatgtcctgacagcgggggcactaagttctgctctgcgtgaacaggtaatcgaggacagtttgagggcctcatccgaggccaaagaaggctggcctaatacggctatcggcgaagacattacccaggaagtggcctcaattaatgtccctgtgacggtcatttcaggggagttggatcgtgtagaccttccggctactctgcaaagagaattgctgccccttatttcacatgcatcaatgtatatcattccagacgtcggacatctcttgcctctggaggcccctacagaggtcgccagccacctgttaaaatttacagccgccattgaaggggggacagcagtctaccattcgcctgtcgaaacgatagccgcgtttgatgatgctttcaatgcaggcagggttgatgacctgctggctctgttcagtaaccgtgccactatgaaaatgactgatggtgtggtcatcgaaagcgatcctgaaaagcttcgggacacttttttgtcactgacatcatcccagccagttatcagaaaccatatccgctcgatcctctccgccggtgaaattgctctgcttattattgactggactttgaccataaccactaaggatagaacactgcacgaagagtccggtacagcaacgcaggtgttgttgcgaagcgttgacggaggttggcggctgctgatttcaaatccatcaggaacgtag

SEQ ID NO: 454748 - DNA, 894 bp, Serratia marcescens; identical to SEQ ID NO: 189037

SEQ ID NO: 454749 - DNA, 342 bp, Serratia marcescens
gtggcggcgctgtacggtatcggggtctggaaagcgaaagacgcagcaggctacctgacataccataacgggatttatcacaccgggcatatcgagggtgacctgacgacagaggatatcagggctgcggctcacgccgcgggcgtagatgcgctgaacgccgtgggccatgcccctgttctggagaaaaacgatgcgctcgcgcaggcgctgggacttacgggtacgccagggctgattgtgatgccggtagagagtacctcacctgaaaccatcactgtctttgccgggctggcgtcaccggagcagattctggctgccctcgataaagcacagcactga

SEQ ID NO: 454750 - DNA, 225 bp, Serratia marcescens
atgccgtccaccagcgccaccaaagattacgtttgctcgcgcaacgggctgatggagatctgcaacgcgggcgggggctggtcggtcacgcacttgggcagcggcacgacgatcgggtttaacgaggcgggcgagttgtatgctatctctcagggtggtgcgttcatttcggctgtcggcgatatggctatcaaggctgcgcaagtcacagtggataagggctaa

SEQ ID NO: 454751 - DNA, 327 bp, Serratia marcescens
atgagcagtcgtcgcatgccagctcttagcccggaagaaatccgcaaaatttcagcaactgccgtggcgaatgtcgctgcgcaaaaaatagtaaccaatgcctctactggcagcacttttgttaaggcttcaatgtctgggaaagtcatgagcaaacagactcatgtacgcaattctaaggattcatcaggctatgtagtgagagggggagactccctcgttgacaaagcccgtaaggtccttgcttccagtgctttatctcaaagcaaaagccgcgagtatctgcaagattcgtttaactcggtccgtaaaacgatcaagtcataa

SEQ ID NO: 454752 - DNA, 717 bp, Serratia marcescens
atgtcccaagaaaacaaaaaatgggtatttaccgagttggtaaaagatccaaataatatagagcaactaatttcgtatgccatctataaaggattcaaagacgaaaaggcgcagagtcttcgaaaggagaataaaagcgaagctgaaattgaggatgagttagtcaaataccacgatcattgcctcacttcgccaaagcagctggatgtattccgggaaaaagcgtcacaaatcgttggcggctatgttgctgcggcaaacagcgggctacaggcgcgtgcagatgcagaatttgctaaatttgaagctgaaaaaaagaaagacatcgcggctctcgaaaagaaagcaaaggatgctgaaaaagctgccttaaaaaaacttatgtccggagcggaacactacagcaagcaaatcaaaaagccgggaggtttttttgaaacatctaaagcatggggctgggcgctgattaagtttcttttttctggcgtgcccaaactttttgccactgcattttcgataggccttctattttctttatatgggttcattaatggagacgctgttacaggtctgcgaaaaggactttataaaacaattgatttaactgtgcctggggagagggtagttagcgagaagaaagatgtaagttcaattacccctgaaggacaggaagcactagcggagaaaagccccgcgacggcggggcataaccattaa

SEQ ID NO: 454753 - DNA, 1125 bp, Serratia marcescens
atgaagagtagggaaacggtactaaggcctaataaaataatttatttgcagtatacattcctttttggggttgctatttcctgtcttttttcatctgaatcaggatggttttcagtatttatatttataaatacgtttggctttgttttatcgataattactccatccgctaggctaataactaggaagtttctcgaaagaagaattagtaaaaatagaataaaaatatccaggtatgagagctctattatatgtttgtatgctgcaaccgtgcttatggttgtttatttgatgctgactgaatgttacttgatttatgattacccactaagtattttgtttgtttctgttttcttaatgattgtttctgcttatttgtatatattaaacccaaaaggggggttggatgactctaaaaagcgggttgtttggttggcaagaattatctctttggttattgtttactgtatttattctttctcaaaatacaaaacaatggagtatatggatgtaacatatgaattcgcatcgtcaagaataattacatatgtattttttattgttgctctggcttttcttttgtttttgctctctggttttatctatatttttattatatgtttcgaaaataaatcagtggagggggtgtttactggaaagaacgggaaggtgcattattttttgcgggcccggtatgatgcgttgcctattgcattcccattggccgttttgattgttctaatttccattcacctggtgaagcataagaatgaagttgaaattgccttcatgaaggagtcaatcgagttagattcctctgctaggttttattgtggtggggagtacaaaacatttcgtcgcggattgacagcgagatttgttaaacttaccgataatgattatagggctttcatttttaatggtgaaaaaatagaagcatacagactttcatgcatagacgcttatccatattacaaacttaactatatcctacatgatgaggttgatgtaagagtacaaatgagagtcgatgaattaattactgatattaatcatattaggacggggaagtccagaaaagggaaaggaccactgttttcatcttctacagcatcaataaattga

SEQ ID NO: 454754 - DNA, 867 bp, Serratia marcescens
atgcataacgtcaccccgtcatgggtgcaatccaacgataaaacgctcgagcaacttatcgttgtttatatggcatccctgaatagtcgtaattaccagaaaaaaacactgatgaataaatgcgccattctaaggaggtttaacgaaaaatttggaaaacaacgtgtaagtctgataacgcccaaattactgcagtcatttattaggtcatactctgacgcaggtttacatagtgcagcccaaactgcacatggcgtcatatcagacctgttccgcgaggcatggttagaagggtgggtgttatatagccctgcacttcccttgcgcgctccggccaacatgataaagcggtcacgcctggacgtcgattcgtggaaaataatttatgatgtcgctcaaaaccttcgccgtacatatatgccattcgcgatgaaactggcgctcactacaggccagcgtcgaggtgatattgctaaaatgcgcagatgtaatatccatgatggacatcttcatatcctgcagcagaaaaccggatacaagttggcattacccctggagctggaaagtccagtgataggacaaacgcttggggagattatagagcaatgtcctgggcgtgattttttattagggattcgggaaatacatgcgttttcattatcaatcggttttcgcatagccagaaatcgagcgctaccggatgcctgggagcatccaccgagctttcatgaacaacgctctttatcggagaggatttataggaaaatgaacattgacacacagaggctacttggtcatcgaaaccctgcaatgacgagtaagtataataatgaccgtggccttgagtggaacaggctgaaactttaa

SEQ ID NO: 454755 - DNA, 339 bp, Serratia marcescens
atgtctgcttttacttcttcagttgttcctgatttcatctcaaccctgcaccgtgtcataacggccgtccagcgaatatctttttgcatggcgccgccgcggttgactgactggtacgtcaatgcagcaggtaattttgccgttcgcgcgcatgttacctgcagtgatgatggttcggtcaacgcggtactgacgttccgcaagggttggtacaaaggtgaatatacctacgtaagcacctgtgttgtgttgccttgcaaacataccgagcgcagaaaggcctaccggctcgcctgtcagcaggccgagcatctggccagactgcgttaccgtttttaa

SEQ ID NO: 454756 - DNA, 294 bp, Serratia marcescens
atgaatggtatttcacttgtcaccgccgacagtaatgaatggcattacatgtgggtagaattagccaaacgggcagcaaaccgtgaactgccggatcccactgtcgctgagaattttggtgaagtgtggcagtacatggagacgcagaaagttagctcattttggttaggaaaacgcctgttccattgtttcaggcataggctgcaccctgtcaaaggggctgactatcggctcaagataccggcaagccggggttttgaatttgctgatttgcagcctgcttttcaacgttag

SEQ ID NO: 454757 - DNA, 381 bp, Serratia marcescens
atgaatacgcaaattaacttccgcacgaatgttttcgacctcaagacgtcccgggacgtgcttttctacctttgcgctattgaaggtgaactgtataccgcaagagcctatcgacgactcgggctccatcaggagcgggatgaacctcgtgaactgaccgacctggagaatagggttatcagtgtcggtgaggctttcgggttctttctctactacctgcagagggatagattgccgacgttgtctgatgctggcagggaaatcttgagcaacctggacagtcttggcaacgacgcccacaaagaagcgtgggcgtggagtttgtcctacggcaaggttaacggtgaggctgatgaggccattgcggcgctcggtttctga

SEQ ID NO: 454758 - DNA, 369 bp, Serratia marcescens
atgaataccaatatcgattacctgaaaacccctctcgatatgctgcgctacctgtgcctgctcgaaagcgagctgatgagcgcgcgagcgttccatcggcttggttttgatgtggagcgcgatccggcaagcggtatgacgctcgttgaggttgccgttcatagcgccggctttgcgtttgggtatttcctgtttgctctgcagaagagcgggttacctgcacttcccgaaaccggaaaggatgtgatgaatgtcctggacaaaatagggaaggaagttaacgcgtcagtctgggagcgtgctgtgactgagggaaaacgtgatagagagtctgacgaagcgattgctgcgctcgatacggagtattga

SEQ ID NO: 454759 - DNA, 339 bp, Serratia marcescens
atggacaaatcaactggcatttcaaacttaagcgttgaagctttggaaaaaatcggcggcagagagtggatcaaaggtgattaccaccgggtatatttcgacgccgctgctttgactgaaatcatcggcctgaccgtttcgttgtacgggacgggaaacgtcagttcagcgcagatcaacggcagcaaaatcagcaatggcagggcatctaagatgcgtagtgagctgggccgttgcaagttctggttcgacgtcaagcgcggagaatttgacgcacgcagtatcagcatcgaactgttcgatactatcgtagccatcatcaaagtaaggattttataa

SEQ ID NO: 454760 - DNA, 219 bp, Serratia marcescens
atggtgaatttaaatgacgtttttgggcgtattaacgactccggcactgttgatgtgctcttccgagacaccggagaagccgttaccaggttggatgccgatgcctatgtgtcaaacccaaatgcagaagctgagtggagccactgcaaaaacgaacatgccaagggcattgagctcacgctcgacaccgcccgagccctgggtattgaaatcgaataa

SEQ ID NO: 454761 - DNA, 549 bp, Serratia marcescens
gtgagtactaccgtgtattttgacgcaccaccgtcccaggacgcgtggattgattttaccctggcggtgaccgagatgttctggttgttgccggcatccgccagacctgcaggtattgatgcggcggggcagctgtttgccggcggcgcattcgcaggccctggtatccgtctgtcgtcatgggcgaccgataacctgcccgtgcaggagattgtccccggggatgaggcgtcggatttttttaaccgtctggtactcatcctgatacacaatctgtgtcctggatgcgtgcgcattgagcggtcgctctccagccaatcaggctgggagcaaccgctgctatggctgcgtcatcatctgcagcgtccggcgctttctgcaccgggagatgttgacgccgtagcgatgggggatagctcgatccgtttgcaccttgaacggtatcgagacagtttgtgcaatgccgagatcccgtaccactggcgcgttattacgtggatggatgaggtgttgtcccaacgcagaaagttgactcaaagcgtcgcctga

SEQ ID NO: 454762 - DNA, 1014 bp, Serratia marcescens
atgagaaagaaatcatcatcacggccagcgaaaaaacggcctgaacgtcccgacctgtatcaacaggtgacggacaaaatcatcgccgccatcgagcgcggtacgctgccgtggcgcaagccctggcagacggaccgttcccggatggcacagggggcggtgatgccgctcaacggcaccaccggtaacttttacagtggcgtcaatgtgctgttgctgtggttgtctgcctgtgagcagggcttcagcgctaatcgttggctgacttatctccaggcggaagccgccggtggccatgtgcgtgctggtgagaaggcgacgcttgccgtggtcttcaagccctgggaaaaggatgcgaaggatgccggcggccggcagctgtttgacgacgaagggaacgccctgaaagagcgtatccccatgctgaagccgctgtacctgttcaacgtctgccagtgtgacggactcctggatgacgtggttggctcactgccggcagactctccggaagaggagtcccgacaggttgatgagcgaatacaggcgcaggtcagcacgatggtggaggactgcggtgttcaccttgagcatgtttaccagaacagggcgttttacaccccgggccgggacctgattgtgctgccggaagtccggcagtttaagacgaaagcggactactggtcgacgttgctgcatgagctggtgcacagcaccggtcatgcgacacgtctcaaccgggaggggataacgtcttcttcacgtaagcggggtgacccggtctatgcgtttgaggagctggttgccgagttgggcagtgcatttctctgtgcccgggtcggcgttgccggcgacgtccagcatgagaactacctggaagggtggttgaaaatcatgaaggaagacaaacgtgcgctgttccgtgcgagcagccaggcgcgtcaggcgaccgagtttctgttaatgccggcggcagagacagaagcggtaaagattgacaccgcccaggcggcctga

SEQ ID NO: 454763 - DNA, 267 bp, Serratia marcescens
atgaccgaggaacaacaccgctggcagaccgttgccggtgcgcttttgagccgccattacggactgacactgaatgacacggacttctgtgaagaggtttgcgtcattgccttgcaggaggccggtcttcggccgtatgaggcgattaacgatctggctgagaagtatgacctcgaacgtatcgatgtcagtgactatcagcagctgtcgccggcgatccgcctggcccatgagttacgggtcttacgcgaactgtccggccactga

SEQ ID NO: 454764 - DNA, 678 bp, Serratia marcescens
atgtccggactcattaaccatgaaaaagcgttcatctcacttttcaatgagactgcgcggtatcaccggcgcaccaaggtgtttgaggattttgtcagctgcagcgtcatcgcgctggagaatcgcctttgcttcaaccaaaagcgggaagacaaatacctgaagatcatcaaaggctatgagaaagctgatgccttgcgtatggcgcagctgcttgccctggtgtcgacgagcatgatggacaaattcagtgacttcctggggaaggtcttcatgcagcttgacctgggggataaataccgcggccagtttttcacgccgtgggacgtcagcaggatgatggcgcagatgtctctgggcgatgttgacaccgttttccgggataaaccgttcattacccttgccgaaccggcgtgcggtgccggctgcatggtactggcctatgccgatgtgcttaatcaagcgggttatctgtcacaccgccatatgtgggtgtcggcgactgacatcgatccattggcggccggcatggcgtatatacaattgtcgctctgtggcatcgcgggggaagtggtgatcggtaactcgctgcataacgagcggcgccgaatactttatacgcctggccactatctggggaactggtcagtgcgtttgaaatcgaaacgggttgcctga

SEQ ID NO: 454765 - DNA, 810 bp, Serratia marcescens
atgtctgatgatatcctcgtaactgcaccacgtccaaacagtggctatggtgatggtgtagtgtttactccgccttatcctgccactactgagcaacaaataatcagacaggtaataatgccttattatagttctccagccttctgcactgattatattcagtggatgtataaatacatccaggagcacaatcaagatgatcctttaacatgggagatcattgcaaataacatccgctgtgtttgtggcgcagagtttaattacatgaattctccggaagctggtttttacgctgctttccacaataatcaaaatccagttatgtattttgattatgtgaaaaatgcccaagatcagctaacaggggggatcaccacaccaatcacagcatgggcgcattacctttggggggatggtagagagcgatttgtaaaaatggaagatgttggtttcagaatccatcctaatcaaatcgcaccaattatggaaatcatcaatagcggtgcctcaggacagttcttcgtttctgaacgtttcagtcgtgatacaacgcaagatggtattattccagcttcctatctaggccatgtaacattaaaaaccgaaggtaaactcatgattgaaacatctggtgcctggagttatacaggggtagtacgtggatataatgatatgtacgatgccaaccctggtaacttccgtggtccagttgcggaacaatcaacctggatattgagcagaatgaaggggactgagtatcagatcgcacttcctggcgaaatcaatatccaagggaatggattccggtaa

SEQ ID NO: 454766 - DNA, 996 bp, Serratia marcescens
  misc_feature (234)..(243): n is a, c, g, or t
atgacgaataatcttgtcaagatatctgtcgttataccggtttataacgtcaaaaattatgttcaggaagccgtagactccatccttgcgcaaactattgccccgtatgaaattatcattgttgatgatggttcaacagatggctccggagaactgctcgacgagtgctatggccatttggatacagtcaagattgtccatactgaaaaccatggcttgggcgaggcaagaaannnnnnnnnnaatgaggggagtcgccatgtaaccggcgacttcacctactattttgattcagatgatattgcggtgccaacattgttggaaactttcctgaatatctaccgtaaccatcctgatttggatatattttgcttctcggccgattcattttttgatacggaaccagcggttaaacaaccgttaccccattacgaccgtaaaatggatagagtatttccagatgcgattacagcatttaatacaatgtcgggttatggtgttttttatccaaacgcttggatgtatgtattccgctctcgtttgataacggataataatatctggtttgagcctatcatccatgaggatgaagagtttacgccgcgtttattcttatcagccggcaagattgctgtatcacgtgcgttcctattcaaacgcagagtgcgcgccggttctataatgcaaagtggtcgtggtgagcgtaatgtaataggttacattgcgtgtattaaagcacaagagcagctgcgacaaagtgtcattaatgctaaagtcaaaaggcatcttagcgatagaattgcgataaatatcatttctataatgaatattatcaaagatggtcagcttaaattaagtgatgacgtggctaagcaactgagtgagttgaaggaaagaaataaatcaatgatggtaacattgtctcactcaagtccgtatgcctataaaatactttcattcgttaaacgccgaataaatagaattatctatgcctga

SEQ ID NO: 454767 - DNA, 1497 bp, Serratia marcescens
atgaaattgtaccccatttctgctacaaatgtgttgagcgcgtcctgtctgtgtattgcattaagctcggcatctgcattttcggcgccgaatacagcaatgtattacaccgaaatgaagaaaacacgtgaagacctaagtgataacacgtcgcagtatgtttatgataagttgatgcgtcgtgaactttcacgtgcatcggcgactgatggtgtagattttggtgtgcatggtatggagattccggcagtaaaatctaatcgggatcggaaaaatgtcgaaaaagcctttgagctgttgtcgcgggtaggtgtcaatagcttgcgtagtgcggaaactgcctggcaccgggttgcagataaagagggtaatccaaccaattttactgaggttgatttccagcttaaaatggccaaaaaatatggcatgacgcataattttcttattggttaccctccagcaaagtatacggtcggacataacaaattatcggccgttgcacctcaatactacgataagtacaaaaattatcttgatgtaaccttaaagcatctggctggttataacgttaaatatgtcgagttgggtaatgaagttgacgcaccgagtgtgtggtggataaactctacaccggcaatgtacgtcaatgaaatgaagatgctcaagcaggcaatacaaaaatcagggcaaaatatcaagacagtggccttctccgcaacgtattcacgctcaccatttaaaggcgggttaagtggcgggcggcggtttgttgagaaaagttttaaacttggcattaataattatgctgatgcttactctattcatcattatgtttttggtgcggatgatttgccagattatatgcgctcaatggcgagtaagtatggtggcggaaataaacctatcctcgatacagaacagctcgatacgagttctgcagggcgctataaatcaaacccgtatgacctcgttaaactatttgcgcgcggttattatgtttatgggatgaaacgtgttgattactttatggcaaaagatcgtttcatcaataataaactgtattactttggcctttttgatgagcaatggaagccgaagttaaggctgttggcatacgcgatggccgttgatgcaatgaaaggtaaacacctgctcttcatggccagtccggcgaaagatgtggaagcctatgtattgcaaaacaatgccaataaatcaggtaaaaagtacaccatcctgatgtggaaaaattcgtttaataatggcaaggcgacgcctgttatagtgaaaggaatcaagggcaatgtcaccattgagaactggaacctagaccttgtcaaccagactgatgcctcaaagggtattaatttggatgaaaaacctatcgcaatatataccgatgagaaaccggactggcagcctgtagataataaatacttctcttctaatttgccgaccgtcgcggagagtcgttcaccgatgcctagtgataaatga

SEQ ID NO: 454768 - DNA, 1374 bp, Serratia marcescens
atgagtgggttaacctgttttaaagcatatgatattcgtgggaagctcggcgaagaattgaatgaagatatcgcctatcgtattggtcgggcttacggcgaatatttaaaaccgcagcgtattattgttggcggggatgtacgcttaacgagcgaagcgctgaaattggccttggcaagcggactgcaggatgctggtgctgatgtatatgatattggtatgagcggaactgaggaggtttacttcgctactttccatttgaatatggatggtggtgttgaagtgacagccagtcataacccaatgaattataacggcatgaagctggttaaggccaatgctcagccgatcagtggggataccggattattggcaataaaaaaactggcggaagagaatgctttctccccagttgatgcggaaaaacgtggcagctatcagaaaatctctgtgattgaacaatatgttgatcacatattaggctacattgatatagccgcactcaaacctatgaagttggtgatcaactcaggtaatggtgctgcggggcatattattgatgaaatagaaaagcgttttaagcgtgataatatccctgtggaatttattaaaattcatcatcaacctgacggccactttcctaatggtatacctaaccccttattaccagaatgtcgtgctgatacggcaaatgccgttgccgcacatcaggctgatatggggattgcttttgacggggattttgatcgttgtttcctgtttgatgaaaaagcgaactttattgaaggctattatattgttggtctgttggcagaagctttcttgcactgcaatccaggcgctaaaattattcacgatcctcgtttgtcttggaacacgattgatatcgttaaccaggctggcggcacaccggtaatgtcgaaaacggggcatgcatttatcaaggagagaatgcgcgcagaagacgccatttatggtggggaaatgagtgcgcaccattacttccgtgattttgcttattgtgacagcggtatgattccgtggttgctggtcgctgcgttgacgtcggcgaaaaacaaggcgcttagtcaattagtggaggctcgtatgcaggcctatcctgcatctggcgagataaaccgcaaactgacagatgctgcgctcaagatagcgaatattaaagctatttatgaaccagaagcgttgcgggtcgatttgaccgacggcatcagcattgagttttcagattggcgctttaatttgcgaacgtctaataccgaacctgttgttcgcttgaacgttgagtcaaaaggtgatgttgagttgatgcgggttaaaacgcaagagatcctggatctactgggtggagagtaa

SEQ ID NO: 454769 - DNA, 1218 bp, Serratia marcescens
atgagctatataaaagtacataatgtaggcaaggcctataaacaatactcgtccaaaacggggcgtctggttgagtggctctctccgtttaataccgtaagacataaattgaaatggattctccaggatatcagctttaatgtcgatcctggcgaggcgctgggtattatcggtattaacggggcagggaaaagtacactattaaaactaatcacaggaacggccaaaccgacttgtggtgatattgagttatcaggccgggttgcagcattactcgaattgggaatggggtttcactccgattttactggccgtcagaatgtgtatatgtctggtcagttattggggatttctgttgagaaaatcacggaactgatgccggatattgaggccttcgctgagataggcgattatattgaccaaccggtcagggtctactctagtggtatgcaggtgcgtttggcgtttagcgtagcgactgcaatacgtccagatattctcattgttgatgaagccctatcggttggcgatgcttatttccagcataaaagttttgaacggatccgtgagtttcgtaaattaggtactacgttactgcttgtttcccatgataaacaggcaattcagagcatttgtgaccgggctattttacttaataaaggtaaaatagagatggaaggtgagcctgagtctgtgatggattactataatgctctgcttgccgataaacagaaccagtctatcgttcaggttgaaaataatgggaaattgcaaactcgttcgggaaccggtgaagcgagtattgtggatatttgcctgctgaataacgacgatgaagtcattgaaatggcgacggtaggccaacctgttcgcttgcaagttaaagtaagcatcaatgaagcccttcctgaattggtggttggctatctgattaaagatcgattagggcaaccggtattcggaaccaatacttatcatctccgacagcctcttttcagccttgaggcgggtggatcaagaacgttttcgttctctttcccggccaatttgggtgtagggtcgtattcggttgcggtggccttacatacttcgggcacccatgtcggcaagaattatgaatggcgtgatttagccgttgttttcaatgtcgtgaatgcagatgagaaagagtttattggggtagcctggttgccacctaagttggagatttttgaatga

SEQ ID NO: 454770 - DNA, 1293 bp, Serratia marcescens
atgagtggtgatttctatcgcgcttttgaggaaaagcacaggggaagcgtgcaagacatcaagcagcgtttatctgtgtatcttccattcatcacgacgttggccaaaacgtatccttctgtagaggttgcggatgtcggttgtggccgtggggaatggcttgaaacattaaaggagcacgctattcctgcaatcggggtagaccttgacgatggcatgctagagcgggcgttacaggttggtctgaatgtaaaaaaaatggattgcctggcgtttcttcagtcgttagaagatgagagtctgctggcgattaccggtttccatattgctgaacatctgccttttgatattctgcaatcattggtccaagagtcgcttcgtgtcctcaagcctggcggcctgctgattttggaaacaccgaaccctgaaaatgtgagtgttggcacctgttctttttatatggatcctacccataatcatccattaccgcctccactgcttgaatttatcccaaactactacggctttcagcggacgaaagtcttacgtctgcaagagaaatcgtcgttgagagatgcggacgtatcacttggtctggtcgatgtgttgaagggtgtaagccctgattacggtatgattgctcaaaaagagggcgataaaggcattaccagtggattggacccttacttcagcaaagagtatggggtaacgcttgatgggctaagcaacctctatgaccaacggttaactgagcaatttaaaaagttaaataaagcacggcgtaatcagtctgttaggctcgatgatgtcgagaatcagctggaacttttccaggttcagttagaaaaatcacaccatgaactgcttgccgtttatgcccataatcaaagtttgcaacaacaactctttgatgtacatagtagcaattcttggcgtgtgacatatccgttacgctggttttccagccagatccaggctgtccgtgaggaagggattaaacgtcgtgggcgtaaggctgtcaagaaagtacttaggaaagtcattaatacaacccttgcgttattccatgagcatccaaagtttaaaggctttgtgctctccagtgccagaaaattaggtgtttatgcattattacagtctgtttttcggcgtgttttacattctgcacctggcgcccatgcagatatgatgacgaatgaacgtcatgttgtgtatcaggaaaatatgacgggcagagctattgatatctatgaacagctgaagaatgcaaagaataagaggcacggagagtaa

SEQ ID NO: 454771 - DNA, 3639 bp, Serratia marcescens
atgcgtattgttattgacttgcaaggggctcaaacagaaagccgttttcgtggtattgggcgatatacgatttctatcgccaaagcaattatccgtaataacaaaaaacatgacatatatatcgccttgtccgcgctgtttcctgaaaccattgctggtttaaaggaacagttcagtcagttgattcccgctgaaaatattgttgtttggtatgcgcctggaccggtaagggcaatggaaaaggataatgcttggcggagcgaatgtgcggagtatatccgcgaagcacttttgcacaatcttaatcctgatattgtttttatcacgagtttgtttgaaggccatgtagacaacgccgtgacttctatcaaaaagctctctccgaagactaaagtggcggtgttgcatcacgatcttattccgttggtgcagtcagatatttatttacaggatgatgtttataaagaatattacctgaaaaaaataaagtggttaaaaaaggccgatctactgctgaccaactcggactatacctcttcagaggtggaagagtggttggatattcctgcggaaaatgtatgtacaatttctgcggcgacagaggagcacttcattgtcagtgatgtttccaccgatgagttctccgcacttaaacaacgttatggcattacccgtgatgttgttctctatgcgccaggaggcttcgatgcccgtaagaacttcaagcgtcttatagaagcttacagcaaactcgcaccagcgttgcgtgaacagaaccagttggtgatagtcagtaaactgtcagacagcgatcgtagctatctgcagtctattgcccgcaatatgcagttgcgtgacgatgagatgatactgacggggtacgtgtctgaacatgacttagttgtcttttatcagctggctaagctttttgtctttgcttctttacatgaaggttttggcctgccaattttagaagcgatgacatgcggtgctgcgacgataggttctaatgttaccagcatccctgaagttatcggttatgaggatgcactgttcgacccatattctgtcgaatcgattggaaagaaactcgatcaggcattaagcgatgaggcattccttgccaggcttaagcagcacgccgccgaacaggcgcgcaaattctcctgggattatgctggcattaccgcattggctcgttttgaacaattggtggcgagtacgaatgaacatgtggcagacagtgtggctactgctgaggtgatttcggctatttcggctattcaatgccgccaggaaccgacggataacgatttgcgtgcggcagctgaggctctggaccgcaacgttaagctcgcggagttgcaggggctggatttgacatccctatcctggcgtgtggaaggaccttatgacagttcatacagcctggctttggtgaaccgtgagtttgcacgcgcacttaaccagcgtcaggtagaggttctcctgcactccacggaagggccgggcgattttgctccggatgaggcgtttctcaatgagaaaaataatgccgatcttaaagcatatcatttacgtgcccagcagcagggtaatcagtctgttaatgtcctgagccgtaatatatatccgccgcgggtgagtggaatgaatgcggatgtgaaacttcttcattgttatgcctgggaggagagcggttttccacagggttggatcagtaacttcaaccgtgagctggatgcgatcctctgtacttccgagcacgttcgcaaggtcttgattgataacgggaccaaggtgcccgtttttaacgtaggtaatggctgtgaacattgggaacggattgccagcggaaagaaaccccagttagaggctaaggcgtttaaattcctgcatgtctcttcgtgtttcccgcgcaaaggcgtacaggagatgctggcggcttatggagctgcttttaccgccgatgacgatgtctcgctgattattaaaacgttccctaacccgcataatgaagttcatgattggttacagcaagcccagacgaagcataacaattatcctcacgtcatcattattgagcaggatatgcctgaacaggatttgaaggcgctgtatgaatattgcgatgtgttagtggcaccaagctgtgccgaaggcttcggtttaccggttgcagaggccatgctcagtgggttgccggcaataaccaccaactggagcggacagcttgatttttgcacatccgacaacgcgtggttggtggattaccagtttgaacgagcaaaaacccattttggcctgttctcttcatcttggatcagtgcagatatcagcgatcttgccaaggcaatgcaacaggctgtggcggcaggagagaagcagttaagcgttatggcgtcgaagggacgtgaacttattctgcgccagtttacctgggaagatgtcgcacaacgttcaaagaacgcggtggctacgttacgatcgcgttttgagctgtctcaggaagaggcccgtatcggctggctttcaacctggaataccaaatgtgggattgcaacctattcacagcatttggtcgctgatatgcccagcgatcacatcgtgatctttgcgcctatggcaactgacttggtgcgtacggatgaaagtaatgtcctgagaggctgggcgattggcaaagaaaccaattatcttgatgaattggatactcagattgagtccttacggttaaataccctggttattcagtttaactatgggttctttaatcatcgggaactatcggcgtttattgaaaggcatcaccgtgcggggcgggtgattgttatggcgatgcactcgacggtcgatccgcaggagaaggaacctcactggaatttccgattatcggaaatgagcgacgcgctcaaaatgtgtgaccggctattagtgcattccattgcggatatcaatcgcctgaaacagttgggggtcgtcgataatgtgacgttattcccacatggtgtgattaattaccctgctccggataacaccaaacgtgatgggttaccactggtggccagctatggcttctgtttgccgcataaaggcttgaaagagcttattgaggttgtcgcgcaactgaaagagcggggtacaccggtcagattaagattagtcaatgctgaatacccggttagtgagtccgctgaactggttcgtgagttgaaaactaccgccgacaaattgaatgtcggggagttgattgagacacatcatgacttcctcgatgataaagagagtcttaatttgctctcagatgctgatttgctggttttcgcctatcagaataccggtgagtcagccagtggtgcggttcggtatggtatggcgacgcataagcctgtggccgtgacgccgttggctatctttgacgatctcggcgatgcagtcttcaagtttaaggggacgtcgacgagcgatatcgctgaaggtattgctgacattatcgccgatcttgcgagtgcttctgaaggcgcggttgccacacaacggcgagccgatgcatggcgggagcagcatgattatcatgcggtggcaagaaggcttgagaacatgtgtacggggctgttgagagccaaaagcttcaagtag

SEQ ID NO: 454772 - DNA, 1146 bp, Serratia marcescens
atgaaaataattctttctgttgagccgatcaaattcccgctgacaggcattggccggtatacttatgaactggcaaaaggcttgcaaagtagctccgaaattgaggagcttcattttttttccggcacacagtttttgtccgagatccctacggcgaaaaacacctctgatggctcacaccggttaaaaaaaattgtacagagtaactctctggcgatcgaggcctatcggcttcttatgccgttgctgaagaaaaaggcattgcgcggttctgaacgctgtcttttccatggccccaatttctttcttcccccattttctggcccttcggttgcgacattccatgatttgtcgccatttaaatgggcgcattgctttgatcctaaaagaaaccgctttaccaagaaagagatgctgagcgctttgtctcgagcgaatggtcttataacggtatcaaattatattcgtaatgaaattcacgattactttgattacccgcttgagaaaattcatacggttcacctggccagttctcccgatttttatccacggacgaatgaacaggtctccgacgttttgcaaaaatttggtttaaactataaaggttttaccttatttgttgggaccattgagccacgaaagaatattatttctttgattcgtgcctatagacagttacccgtgcagttgcgtaaatcctacccgttggttctatccggctataaaggatggcgtaatgatgacattatgcaggagatcgaacgaggagaacgggaaggttggctgaaatacttaggctttgctgcagcggaagaattaccgctgttatatgctgccgccaatctgtttgttttcccttcacactacgaaggtttcgggctgccggtgttggaagcaatgagttcggggacgcccgttatctgttctaacagttcttcattaccagaggtcgcaggagacgctgcgatgacgcatgttcccgaagatgtggatatgttaacactgctcattacacaaggattgactgatgagccatggcgtaaagatgcggttgcaaaaggattaacgcatgcagcaagcttttcctggcaaagttgtactcgccaaacgttagacgtttaccaaaaattggccgataatgattaa

SEQ ID NO: 454773 - DNA, 1134 bp, Serratia marcescens
atgattaaagtacttcatttttataagacttattatccggattctttcggtggtattgagcaggtgatataccagcttgctgaaggtggggttgaaaaaggcgtgtcgacagaagtgctatctgtaacaccgtcggataaagatagctgtgaagttatttctcggcatgtggcgcataaagtaagacaggatttctcgatcgcctccaatccgttttctttccgggtcataaaaaagtttcgagagttaagtgaacaggttgatattatccactatcattttccatggccttatatggatattgttcattttctctctggggtaaaaaagccgacggttgtcagttatcactctgatattatccgacagaaaaaactgttgcatatttataaaccactgatgcatctttttttgaaaaaagtagattgtattgtggcaacgtcgccgaactatgtggctaccagcgatgtgttggatatctttaaagataaagtcactgttattcctatcggtttggataaggcgacctatcctattccggaacagagtcggttggataagtggcaacaaaaaatcggccagcccttcttcctgtttatcggtaccttacgctattacaaagggttgcatattctgcttgaggcggcgactggcgcgccttatccgatagtgatcgttggtgccgggcccattgaaaatgaactgcgtgagcaggcccaacaattgggattgaagaatgttcatttccttggcgctttgccagatgaggataaaacagcgttattgatgctgagttatggcattgtttttccatctcatctgcgttctgaggcctttgggatttcgttgctggaaggtgccatgtaccgtaagccaatgatttctagtgaaataggtaccggaacaacgtttatcaacattgataatcagaccgggttggttattccgccgtcgaatccttctgcattacgtaaagctatggataaactatggtccgaaccgaagctggcagaggagtttggcaataaggcgtatgaacgttacgaagccaagttcacatcgcgacaaatggttggtgcatatgcggaaatttatacacggcttctgtccgaatctgacgatgagcttgcgtaa

SEQ ID NO: 454774 - DNA, 243 bp, Serratia marcescens
atgtgcccgtttgaagcaggcactcatgggattcagcaggatgttcagtctttcttactgtatctcgttggtattataggcatggttatatcgctcttccggatagagatggggcggtgtaggagtcaccggccaacggacactgccgccagcggcattaaaacggcctatgtgcgggcggttaaggctatcaccggctacatcaaagtggtcatggctactgtcggaagcgcattactctag

SEQ ID NO: 454775 - DNA, 1110 bp, Serratia marcescens
atgaccaaagtttcgtttgaaaatgacacattactaattggcagataccatataattcgctatttagccgcaggcggtatgcaagaagtatatttatgtcatgatattgttctaaatagagaagtagttttaaaaacgccaaaagcagggactaaggatagaagatttaaacgaggcgctgaaatgggtgccagaataaatcattccaatgttgcatctactttagattactatgaagatgagaatttaacatttttgatagaggaattcatttctgggcaagatctttccaaacgaatgtctactgaatttcattatttagacccacatacatgtgcccatgtaataaaaaatcttgcaaaagcactacatgaagctcataaagtaggaatctgtcatagagatttaaaacccagcaatataatggtatcaaatgattttaatctatctatggtcaagttaacagattttggtattgctaaactagctgaaagcgaaatcgaatctgaaatagagctttttgagaaagatgaaagtaccttaacaacatctcaaactctattaggagcagtaccttacatggcccctgaatgttgggatgactggaaaggcgcaggtaaggaaatggatatttggtcattagggtgtattgcttaccatttattatcaggtcaacttccttttggttctggtcggagagcaattagagaagttgctagattccaggataataatacaaaacttttaaaaccgcaaaatattgggctccacgcatcttctgcaattttagaaaaagaattatgggctttgatcacaaattgtattgttgctgaccctcaaaaacggcctaccgctgaaaatattctagatgcattcgattctatttgttattcgaatgagccacgtcgtttcggtacaatttatgattttggtgtgccttatcgagaaacaggccatataattgacaacggtagacaaacggggatgttatttttccactcttctgagttttacggtaactcgttacctctgcaggggaaaaatgttacctattcagtatatcccggattaccacacgatagatgctctacaattttattattgaaataa

SEQ ID NO: 454776 - DNA, 795 bp, Serratia marcescens
atgagcatccgccaggcatgcaggacgttatcgctgagcaggacagtctatttttatcagcccgatacccggcgcgatgaaccggtgatccaggcactaactgaaatggcagagcgctacccgcgatacggttttaagaagttgtttcaggtgctgcgcaggcaggggcacgcctggaaccataagcgcgttcaccggatttactgtctgctgaagctgaattttcgtcgtaagggaaagcaacgtctgccggtgcgtaatccggtgtcactggcgacgccagaagcacttaaccagagctggtccatcgattttatgcacgatgcgctggagtgtggcaggcgcttccggactttcaatgtggtggatgattttaaccgcgaagcccttgcgatagaaatcgatctgaatattccggctcagcgggtagtaagggtattggacaggatagtggcgaatcgcggatatccactgaagatgcggatggataacgggccagaactgatatcactggcactggcacagtgggcggaaaagcacggtgtgttgctggaatttattaagccaggtaagccgacccagaatgcctttatcgaacgctttaaccggacgtaccggacagagatactggatttttatctgttcaggacgctgaatgaagcacgggaaatcacagaacgctggctaacggaatacaacagcgagcgacctcatgaatccctgaataacctgacaccggaagaataccggctgatggctgaaaatccggaaatctcaaaaagtgcgtggaactaa

SEQ ID NO: 454777 - DNA, 267 bp, Serratia marcescens
atgcgtaaagcccgatttactgaacaccagatcatcaccgttctgaagtccgtcgaagcaggccgcaccgtcaaggatgtctgccgcgaagcgggcatatctgaggcctcgtactacaactggaaagcgaagtacggcgggatggatgcctctgatatcaaaaagatgaaagatcttgaggacgaaaatcgtcgcctcaaacagatgtttgccgatctcagcctggaatgtcgggctctgaaagacgttatcgaaaaaaagctttaa

SEQ ID NO: 454778 - DNA, 927 bp, Serratia marcescens
gtgaatgaagctcagactgttgaaaatttgttacctgacatattactcccgctttttaaaagtgaaggatatgagtcgattcatagaaatgtccggctaaaacctttgccaagtaactctattaatgaatgggacatgattataagcaaaggtgcaaattcagactttcataaagactcgattggtgttgaagtaaaagtatatagaaacagaaaagtcgatacaggtattgttaatcaaataatcaataaagccaaactttccgatctgaaaagaagttttattttcagcccaaatgggttttctgatagtgcattaaatttagcttctaaccatcctcaagagcttgaactttatgactttacatctttgagagactgggtttatacgttaaaagatcaagaccaaaatatcgaacatgaaattaactttattattaaaactgcctcaaaagcatttattgaggccattgctaaaaaccccaaagctcttgacagcttagaatggcgtgacttagagaggcttttggcggaaacttttgaagggataggtttttcggtaaccttaacaccttcaagtaaagatggaggtaaagatataattattcagcatgaaatggaagggaagattaaaagctatattgttgaagttaaacattggagatgtggtaataaagtaggctcaaatttagttgattcttttttcaatatagttgttaaagaaaaacatgaagcaggtatttttattgcaactaatggctacacaaatactgcctttgaatctttaactaaaattgagaggaaaaaaataaagtttggagatgaatcaaaaatagtttctctctgtaaaacttacctccgtgtgcaaaatggtctttggtcaccagagatgaacatatctgatatgttattcgagaatactatttag

SEQ ID NO: 454779 - DNA, 681 bp, Serratia marcescens
atgggttacttctcaaagattttcagcggcaacccttttttaatcgaagaagggcaactgggatacatgactcctgctaacaaacttttccagcctccccatttttttctaacaaccctggatcgtctcgctgaaacgagcattattgcaatgcaacgtggaggttttctttggcatgaaggtgacaattattctataaacgcagagcttcgagaggaatcactttcagacattatgccagatcagtttacacgaacagtcatgttcgagattgatttggcaagtggcacagacgaagagattgcagagtcgcttaaagctgcattaccgcaatggcgtaaagttaagggtattgatgaaaacccattggaatctgttcgttttggatacggaactatcaagaaactcatcagttatcgtgtaatacctatgctggatatcctggtgtgggcagccgttaaaaaaatccgtgtctctgacgacaggttatccagactactatatacagacgatgacgaagaaagcgaaatgaggcagtccagtcagataaaagatactgacaggccattggctcttaaagccagcacgattgattttatcaggcaattccatttcttcattaataagaatagtcatttgaagaatatgaaagtttcagatgtggttaaattgtctgattga

SEQ ID NO: 454780 - DNA, 1218 bp, Serratia marcescens
atgagcaaggtaagtacgccggaaatgcgtatcgtctggctggcggcgctaattcaactggtcaatgcgctggactttatgatggtgatgccgctggggccggatctttcgcgagagctggggatttcacccacctatatcggctatctgggcgggggttatacgctggcggcggcactttcctcgctgttatgtgcgaagtttattgaccggttcgatcgtaagtctgtcgcgctggtggcgttattagggctgtcggcggcgacttgggcatgcacgctggcctggaatatggaaagtttgtttatcactcgcctgttggccggagtttgcgccggcccggctacgtcgatagctttggccatcgtagtcgatgcggtgccacaacagcagcgtggccgggcgatggctatcgtgatgggcgctttttcactggcggcaatttccggcgttccgttggggctggaactggcgatgcgctacgggtggagcgcgcctttttatatcgtcagcgctttgggcatgtgtgtcttggcggcggtgtacgctaaattgccgacgatgacggcgcatctgcagcagcaacagccgtcgttttcctttgtcaaaatgctgaggcgtccggtggtgttgaacgcctttgcggcgatcgggctggcgattttcagcacgttcctgatcgtgcctaacgtggcgacctatttccaattcaaccttagcgtaccgcgcagcgacatgagctattactacgtgatgggcggtatttttagcctgttggcgatgcagtttggcggtcgcctgattgataaactgggggccatgcgcatgacgctgataatgggagtgttgatcctgctggtgttgtgggatggcttcttacatacgccgtcgatgccgccgatcgtgattttcacgctgtttatggcggtgaccgcgacgcgcactattgccgtggcggcggtaaacagccaggtgcccgagccctgggaaagagcgggctttatgtccttacaaagcgtttgccagcatatcttcagcggcctggcggcggtcgtatcttcaatgatattaaccaacgtggatgggcggttgggcaatgtcgaccagctggcctggctgacgatgggcctgacggtgattcagccgcttttcctgtttatgctgttgaagcgactgcgtgcggcgccggagttggaggaaaagccggctggtgaataa

SEQ ID NO: 454781 - DNA, 729 bp, Serratia marcescens
atggtttggtatgcgcaagaacggttctccgtccgtcttgagtgggggatagaggctgtcgaacaacttggccagacggcagattgcatcatcatcgttgacgtgatgtcattttcaacctgtataagccttgcggtggataacggcgccagggtttatccctatccctggaaagacgagtcggcaatcgcctatggcaatgagaaaggggcaatcgttgcaagtactgagcgccgcctcaaaagcaacggctattccttatccccttattcgctcaaagacatcgaacaaggcgccaggctcgttctcccctcgcccaatggctcggcaatctcttttcgcgccaaggatagcggtgcagccgtcttcagcggttgcttcagaaacatggcggcaaccgccagagcctgccgccattttaagcgcatcctggtcataccctacggtgaacggtggcctaatggtactctgcgccctgcggttgaagatttggccgctgccggcggcattatttcttatctgacggacagaacattgtcaccggaagccagcgctaccgtatccgcctaccgccacagctatcagaaaaatatttcagcccttaatgaatgcgcgtccgctttagaacttgctagccgtgggtttgagaatgatgtagcgctttgtctggaacggaatatgagcgaaattgcatgtcgtttgcatggggatgtttttgccccactatag

SEQ ID NO: 454782 - DNA, 2625 bp, Serratia marcescens
atggcttctttaccatcacagcaacaagctgcgtctatttactactcgatcttaggaatggtaaccacctacagtgggtttaattcctttgcaaatcagttagaaagtggtacacaaaccgtagaaagcctggcgacacaattcctcaattcagcaaaaggacaacaactgtacgctggccaaagtgacgcacaaattctttctcaggtgtatgcacgcgcatacggcgacactccatccgcagaccaggtaacgcaactgttaagcagcggctcgttagaaagcgcgctgacgacgttggtgaatgacttattgaactatcaaggctttgatgacgcgaccttagcgaagcaacaagcctttgagaccaatgtcaacaagatgctctacctggactcgtcaaatctggcagacgcttcttaccaggaacaggccgtagctcttgctttggccgtggcagatcgcggcgtatactccatttcgctcgaatcctggagtaactcgctgcaaaaaggtatcagcattgactacctgaccaaaacgttgcttgagtacccagaattccagcgtaccgttggtcagttggaaggtaacgatctgatcacgcagatattcaccaccgtgcatggtattgcaccaacgtcagagcaactggcgacttacagtgcgttgtctgataaacaaagtattattgtcgccattatcaacgatcttcgaacctcaaccgccaccgacgatgctacgttgaccaaccagcacgcctttgaagccagcatcggggaaaacctgctgtataaaacggcagccaagctgagcgtcaccgagggcggtggcaatgcgaccggtaccgtaaataccaatgccagccatcaattaagcaatgcggaagttgccgtactgaaaaccgttcagttggatgccaattctgccggcaccgtcgatctgacgtttgctgataacctcagcagcttaaccatcaatggcaacgccgccgctacggtgaatctatctgataacggcgcacgaggcgataccgcccttgtcgtcaataacgcgaacattaccctgaatgctggctcagggaatgaaaacatcgacctttctgctgctgacgttgccaatggtaccggtacctttaacctaggcagcggtaacgacgccctgctttgggccggcaatgctaccaacggcgtaaatagcgtatctgccaatctgcatgctgacggcggtgacggcacggatatcctttccgccaacttcctcttaaaatctgtcgcaaccaccagtaatatcctagggatccgcagcagcaccgtaaccagcaataccagcaacttcagcaattttgaaaaaatcgatctggcgggctacgtcggtcaatccagcggcacactgaacggtaatgcggtcacaacgccagctcacacctttgactttggcatcctgaatggtaccgccacggtagaaggcaccagcggcggcaccgttactcaggcgactcagggcaccaacctgggcagccagggttttgcgttgtctggtaaagccgataacgtcaaggtcatcaacgccgctggcggtgatgcagctgcactgaccgtcaccggcaatgcaggtgccgacagcaatctggaaatcactttccgtcagaatgtgactaacaaattcgacatcaatttcgacgccgccagcgcgcaaaacattgacgccggctcactgagtctgatcagtagcagtagcgttctgggaggtactgcgctaggtacggtgaatatcgcttccggtggtcaaggcgactttaccaacattctggatctgattggcaccaattcacagattcaaactatcaacgtttccggcgatcaccagatcgatctcgcattgggcagcggttacagcaacgtgcgtaccatcgatgcttccagcaacactgccggtatcaatctggactctgcacacgcagggaccggtgacggtattctggtacagttgttgaatatccttccgctcagcgcagtgaccactaccctgctgacgccgctcctgaatactctgggcctgaacggctatcagttggaagtaaccggcactgccgccgatgacactttcaacattgccgccaacaccacggttactggcggtgctggcagcaatacctacgagctgaaaggcagcaccagccaggccggtgtaaccatcactgacttcaacagtgctaaagacagcatcgttgatgccgcctccggcgtcaccctctcgggcgcagctggcggttctgttgcagattacggtctgcgctctgcagatatcatggatggcctgctgggttctctggttggcggtttgaccaacggtgtagttggcctgttgggtgggattctggggttgggcaacagcaactcactgacctcgaaagtgggtgttgcatcagtagccttcgataacggtacagatgccagttacgttattattgataataacgataacggctccctggacagctcagacagcgttatctacctgacaaatcaggaccaccagtcgctgatcgacagcctgcactacaccgaagtgagcgtaaacggcatcgccagcgcaccggccgccgatctggccgtagcctga

SEQ ID NO: 454783 - DNA, 2631 bp, Serratia marcescens
atggcttctttaccttcgcaacaacaggttgcgtcgatttattatgcaattaccggcaataattcaccaaccaatactgctttcaactatcactctaacttattggaaaacggtgaaaaaacgacagcaaacctggcagccgattttctgaactcagctcaaggtcaacatctctatgcgggaaaaagcagtgaacaaatcatctcgcaggtcttctcccatgtatacggaacatcaccttcctccgcacaggtcactgcgttgctgaacggcaacagtactgcccaagccatctccacgctggttaacaacctgctgaactacgatgggtttgacagcacaacgctggctcgccaggcaacgttcgagaataacgtcgataacctgatttatcataacgcggatcaactccccgggctggattatcaggaacaggcgatgtcgatagccctggccaccatggaccgcggcctgttctctcaatctcttgaagcctggagccagacactggcggcaggaggcagtcaagccgggctgatcgccgcaaaactgtcctcccctgagttacagcgcactattggcaatctggatggtgctgagctggttaaacagatctataccaccgtgcacggcacggccccaagcgccgaacaaattgctgcctacagcgcgcaacccaataagcagagtatcattgaagccatcatcaacaatctgcgcgactcgacatctaccaatgccaacaccgcgactcagcagcatgcttttgaggcacgtatcggggaaaacctgctgtacaaaaccacggctacgctcggcgtggcagagaaaggcggcaatgccaccggtacgatcaacacgcaagcacaccatcaattaagcaatgctgagacggccgtgctcaagcacgctctgctcaacgcggacaaagccggcagcgttaatctgaagtttgctgacagcctcaacaacctgaccatcaacggcaacgcagccgctacggttaatctgtcagacaacggtgccaacagcggcgttaatattggcgtcaacaatggcaatatcaaactgaacgccagctccggcaacgatatcgtcaacgtctcctccagcgccaatatcgctaatggcaccggcacctttaacctgggcaacggcaatgactcgctgctttgggccggcaacgccactaccggcggcaacagcgtatccagccaaatctccgctaacggcggcagcggtacggataccatttccgccaacttcatcaccaaatccgttgccaccaccagtaatatcctggggatccgcagcagcaccatcaccagcaacgccgacaagttcagcaatttcgaaaaaatcgatctggccggctatgtgggtaaatccagcggtaccctgaacggccaggcggtagcaaccggctcccacacctttgactttggcctgctgaacggcaccgccacggtagaaggcaccagcggcggcagcgtcacccagggcgcgaaagccaccaacctgggttcgcaagggtttgaactgtccggcaaagcggataacgtgaaagtcatcaacgccgcaggcggtgatgccgccgcgctgaccgtaaccggcaatgccggcgccagcagcaatctggaaatcggcttccgccagaacgccaccaacaagttcgacatcagcttcaacgccaccagcaacaaagatgtcgatgccggctccctgagcctgtcaagcagcagcagcgcgctgggcggcacctcgctgagcaccgttaatatcgcctccggcggtaagggcgacttcagcaacatcctggatctggtgggcaccaactctcaggtacagaccctgaaagtgaccggcgaccataacctggatctgacgctgggcagcggttacagcaacgtacgcaccatcgacgcttccggcaacaccggcggcatcaacctggattccgcccacggcggtaccggcgacggtatcctggtgcaactgctgaatatcctgccgctgagctcggtcaccaccacactgctgacgccgctgctgaacacgctgggcctgaacggctatcagatgaaagtgaccggcaccgacgctgacgactccttcagcctggcggccaacaccaccgtaaccggcggttcaggcagcaatacctatgagctgaaaggcagcaccaccaaagccggtatcaccatcaccgactttaacagtgctaaagacagcatcgttgacaccgcttccggcgttcacctctccggcgctgccggcagctcggtggcggactacggcgtgcgctcttccgatatcatggatggtctgctgggctcgctggttggcggcctgaccaatggcgtggttggcctgctgggcggcattctgggcctgggcaacagcaactcgctgacctccaaagtcggtatcgcctcggtagcgttcgacggcggcaaagatgccagctatgtcatcatcgataacaacgacaacggcacgctcgataattcagacagcgtgatctacctgactaaccagaaccaccaatctctggttaacagcctgcattacaccgatgtcagcgttaacggcgttgccggcaccgcttcggccgacctgggcgtagcctaa

SEQ ID NO: 454784 - DNA, 1398 bp, Serratia marcescens
atgagttctaatgatatatttaataactttccaagtgattggtattcaactcctctgggtcagcttgtaaaagaaagtaatggtatcatacaaacaggcccctttggcagtcagttgcatgctgaagactatgtacttataggtacaccatcaataatgcctaaaaatatatcagtcaatggtgtaattgataccgatattgctcgtataaaaacctccgatttagagcgactctcccgctaccaagtaaaaactggtgatatcatttatagtcgtcgtggcgatgtagaaaagtgtgctttgataagtgaacgagagaatggatggttatgtggtacaggttgtatccttattcgctttggaaatagtgatatatcacctgagtttttacatgcctatcttagtcaccctttcgttagagcctggattgtacgccatgctattggtgccaccatgcccaatttaaatactacaatcctgagtgaattacctgtcctagtcccccctaaaaaagtaagagaatgcattaaagaaaactggactaatttaacaaaaaaaatattaatcaattccaagatcaatcaaaccattgagaaaatggctcaaaccctattcaaaagctggtttgtcgattttgagccggttaaagccaaaattgcggtgctggaagcaggtggttcacaggaagaggctacgcttgccgccatgacggctatttctgggaaaaatgcggattccctagtcgtttttgaacgtgagcagccggaaaaatatgctgagcttaaggctacggcagagttatttccttctgcaatgcaagcaagtgaattgggagcagtaccggtcgggtggagttcgcaacgactatcaaacatagcaacgcttcattatgggaaagcattaaaaaaaacagaacgtattgatgggccatatcctgtttatggttctggggggattacgggttatcacaacagctaccttgtcgaagggcctagtattatcgttggcagaaaaggctcaattggtactgtttattgggaggatggggagtttcatccaattgacactgtctattatgtgactaaaaaagaaggcattccattaagttatttgtactatttaataaaaacattgaatctgcccagcatgaacaccgacgctgcagttcctgggctaaatagagataatgtttatcgtcttgaggtattgcaaccaactcaatctatcttgaatagattcgacaataacatatcagccatcaggaatgggattcaaaaaaataatactacaatagtatcattggttgatttacgcgacaccctgctccccaaactcctttccggcgaaattactctcccggaggccgaagcatcagtaaaggacgctgaacatgtttaa

SEQ ID NO: 454785 - DNA, 1833 bp, Serratia marcescens
atggccaagatgatcccagcattcggacccgttgataatgatagttatggagaaaaaacggtctatgccctgttaaaagaagggctgcccgatgatttcaccgtgattcatagcctcccgtggttgagttcggcagctcgtcatcttggtatgaaattacctccaagtggtgaaatagattttcttgttctccatcgtatctatggtgttttggctttagaagtaaaaagtggcatatatcgcgtagatggccctatttttgtacacctcaaaacaaataacaatgtcgatgtagtgaaacaaacacgtaacaatgctcatggattagcccgttggttagggggagcaacaacattacggttgcgtattggttatgggtttatttttcctgatagctatttcgatgataaagttataaatacagcaatggttgatgcgtctgtaagaccatttagaaagatattcattgataaaagccaaatcccggaagttgcaaagtacactattgatataatgcaatactggaaaactgcattggaaaatagtgatttagggagtgagcgtcttcaattaatcataaagtctatatgtccacattttgatggtactcctgactggggaaccaggattatttatgataatcaactctggttaaaactcacacatgaacaaattaaggtcattgaactcctgtcaaaatatcaacgatttgttgtaactggatggccaggaacaggaaagaccctaattggtattgaattcgccaggcggcttgttagagatcaaaaaaaagttctatttattactttcaataaccgcctttctgaatacattcgtcagcaaactccagattcattatgcgacgtatttacctggcacaaactctgtcatcaggctcgtaatagattagccttgccccccgagtctccaaccgactggtttgaatcaggatgctgcgaggatttgcttagtgcattaaataaaaacaagctaaaggattatgatgctttaattattgatgaagcgcaggcgttgcattcatcgtggttggaaactttattttgttggtttaaaaataaaagaattattgcattttgtgatgaaacacaaacattctcttttgaaaaagggacgaatcacactgatcttcaacggataattaattcccaattttccttcagcttaactattgttttaagatgtccaaaagctgttactgattatttaatgtctatcagaccgtcttcatatcaaattacctcccccaggagtaacgaacccgacacgttaaaagaattagttgttatcgacccaatcgccacactacttaatgaaattttacgattgaaaaatagttctgtgacacctgatgaaatcacagtccttgttcctactgatttagtgaaaaattttctccagaaagacatgggaacttttgatataaatattgaaaccgtatctcgtttccgtggtatggaatcacctgttgttattactctggattcctcaaacatggaggatgctcagttattctgtgcttattcaagagcgacgacggctttcattgcaatttatgactcggagaagttagcatggagagaacataatagttttttgaaacaactagttaatagaaaggaaattcagcgaacaattaatgaagctaaacataactcttcatcaaaggttcttatggctgatttttttaataaaggagacctgaagcttaataggcgtggcttattgagtttgatgcagaaaattcaccagcggaaacatgggttgattatttacactctcattatacttggcctattatatattggtacgtaa

SEQ ID NO: 454786 - DNA, 747 bp, Serratia marcescens
atgtctggtctgattggaaaagttgcgttagttactggcggtagccgcgggatcggtgctggtattgcccggcggttagcgcaagagggggcgtatgtcattattacgtttatcaataatagtgaagcggcacaggcagtgctgcgcgacattacctcgtttggccgacgtggcgaagccattcaggccgattcagccaatcctgaagcaatcaaattggcgataaagcaagtcatctcccagtttggacgtttggatatattgattaataacgccggctatatggacgtgagtggtcatccgttgtcgcagattgctttgacaagcgtcgatcagaccatcatggtgaacattcgcggcgcattcctctttgcccaagaggccgcttcttatctttctgatagtggaagaattattaatatcggtagttgcctgggcgagcgggtgcctggtgctggtcttacgctctatgcgatgagtaaatcagcgatgactgggttaaccaaaggattggcgcgggatttggcgcataaaaaagttaccgtcaatcagatatcccctggtcctgttgatacagatctgagtccggctgatggccctaatgccaaattcttccgcgagcttactgcattaaaacagtatggtacgactgacgatatagcctcgatagttaattttttagtcagtaatgaagcagcatttattactggagcgaatattgcggtggatggtgggaccaatctataa

SEQ ID NO: 454787 - DNA, 1206 bp, Serratia marcescens
atgagctttatgcaacagacatccgtcgtaggcagtaaaaatgaagcgttgccgttcgctgtatatatattggcatttggcatttttgccatggttaccagcgaattccaggtagcaggcatgatcccggtgatggcagacgatctcggtgtttctatctctcaggtgggttatctggtttctttttatgcactagcaatggcgtttggcggtccgctgctcgccatcgggttgttaaagagagcgccgaaaaatgcgttgatgttgctttacgcaacgtttatcgcagctgaagttctgggagccattgccagttcttatcatatgttaatcgtagcgcgattgatcaccggcgcggtatccggtgctttttttggcgtcacgttaaccatctgtattgacatcgtaccggagcagaaacgaggatgggccgtctccatcgtccttgccggtattatggtgggaaccgtcctgggcctgcccatggcgaacttgattggcacttacgccggatggcgggaaagtttctggaccgtcagcattctggccgctttagctgctgtctctacattcttcggagtaccgtctatcgccaggcagcaggcggtcagcctgcaaagtgagttgggtgcgttaaagaatcttaagctgtggagcgttttctctaccagccttttgattatcggagccacattcgccgcgttcacctattttacaccgattttgaaaggtattacgggttatgacaatgtggatgttgccattctcttgatcgtatatggggcgatgacggtgataggtaatgccgtcgtcggcaaactggcggatcggcatactattaccgtacttgcggttggtctcgcagcccttgccttttttctgatgcttttcggcctgtttgcagacgacaaggttgtctctgccttatctctggtcggtattggtcttgttggcgtgaccatgaatccggccatggccacccgtgtaatccgcacggcaaacgggcgttctctggtgaatacgctccatacctccgtcattacgctgggtatcgtgatcggcgcctggttaggagggttaggcattagctttggttatggcttacaagcgcctctgtgggtgggttttttcatggcaatagtcggcttagcaacgttaattcccgatatctgcacattacgtaataagcatgagaataagcaataa

SEQ ID NO: 454788 - DNA, 594 bp, Serratia marcescens
atggctaagctaggcaggcctgtcagctttaatcgtgaagtggccctcaaacaagcgatggacatcttttggtccaaagggtatatcggcactcaactggtggatctcaccactgcgatgaagatcaatccgccaagtttctatgcggcatttggcagcaaaaagcaggcgttctatgaagccgttgaactgtacatcagctcaattggctccaaatccatgataaaactgatggaaagcgacactgcagcgaatgggctatgcgccatgctggaatcgacggtaaaaattgcgcggtcaaatgaggctggcggatgtttactgatgctgagcctgatcaatccgatgccaaattccgatgaagaatggctttatttaaaaaatattcgccaaaagacattatctctgatctgcgcacgcattgagcaaggtatcgccgacggcgatttgccgaaaagcacccaggccaaagccttggcatcattctttttcggcatcacccaagccatctctcttcaagccagagatggggcatctgaagaagaactgacaagcctaatagagccggcaatgtcggtgctctcgccaaaataa

SEQ ID NO: 454789 - DNA, 1014 bp, Serratia marcescens
atgtacgaagaaaacaaaacaacatctgacgacatattaccaaacaatctggctgggtcattaagtgacataataaactccaagagttatgctagaaaaacaaaagatggcattttggaaataaaaacggaaaattataaatcgaggttatacacagacaaagacagcccaaaaattttgcatcatagctttaactccatcaatgaaaaatctaaagtaacgccttacaaagatatggttgacttctttcatagtatggcaagtgaaaataaaatcattcagacaaaaataagtcctgaaaattcagatttaattattgacgccatggatattggtttcagttattgcgggctcacgaaatcaattgacgccaatggaatattcaaagatgtggccctgttttttttaacgaaagacacgctaatagatattccgaaaagaaaattaaccttattcccgcaggcgggtattagcgacggagtattaacgctacgggccacttctgctgaagactgcaacattctttatcacgatcagtgtgatttaacgacacggtattggtcaatttatcctgagagcagcttccatactatcgctaaagaagccaatttggcggttctaaggtggattgccggtgagaaaatgaatatttccattattgaaaatggatctaaagaattagtcggaagaatgagcctaaggccagtcattccacccaaagttgcagatgttggatacggtatatttaaaaacttcagagggaaaggttattcaagtcgagctctgaaattatttacccattgggcattttccacggcaggttacatgcgaattgaacttggagttaaggtggggaataccgcatctgaacgtacagcgattaatgctggctatcatttcgaaggcctctgccgagggaggctaatcaataatgatggttcattcagcgatcagctaagctatgttaaattaaacccaacgattgtcataaaggctattggaattaaggattaa

SEQ ID NO: 454790 - DNA, 867 bp, Serratia marcescens
atgaaaaataaatttttaactgagatctcaaataacattggtgaggggatagcacatgattatgagtacctcaaagataatgtcagcggttataaaaaacgccgtgttagtggaattcttacgcctaaaacattggctgaggtaaggggaataatcaatctggcaaagacatttcccggcgttcaactgcaccctgtcagtgtaggatataactggggattaggttctaaggaagatatcgccgagggttcatatttattagaactgaagcgactaaataatattcagaaaatggatcttaccgaaggttgggcaatcattgagccgggcgtaacacaagctgatctatcacaaaaattacgtggctcaaataggtttattaacattacagcctcttcttctcattccagcttcctgggcaatgccatggatcggggtgtggggttacgccatcagcgaaccgaggatctggtagggcttgaggttctactccctgacggcaaactcatccgcgtcggctggtggccaacagataaaccgactcctatttatcctcatggtatcgggccgtctctagttcagtttttcacacagtccagttttggtattgttaccgccggtgtaattaggctgcaccagagggcagaattcacacgcgtacttcgtttcactttccaacgagataatttgtcgcaggccatcttgctattgcagaaatgggtcgccaataaaataaacagtggtgtgctaaaaatatatgacaccatggcaaatcaaacatatggcggaaaaaataatacttatacggtacatatgtgcatcgatggtcttgtaaatagacccactttagttccatgcactttttga

SEQ ID NO: 454791 - DNA, 1374 bp, Serratia marcescens
atgctggttgcccgccagcaggagcgggaggcagaagaaaagcagctggccgacgcgcgggagcgtaaccgggtatttgcgaaatcctgcctgcgtggtgagggttgcaacgatgcaggtgaccagcgcgagccgcaaagtaactttgcggagatgtgtttcttccgggctacaccggtggaagatccggctacggataccgatgcaccgcagcacgcgcagacggccaaaaagaagaagcccgccgcgccggaagacattccgaagccgaagaagcgtagcgccctgtggaagtggtggaacggcaaccatgaggaaatggactatcaggcagcggtggcaacagcagccgctgccgcgcgagcacagacggccaccgctggggcgagcgtgctggagcctctcgccggacgtggcctgacctatggcacatgggcggtacgtgccgcagctggctttggtgaggttgcggccgccggcgccggggcatccgttgccggattgctgatcggcatgatgccagggcgactcaacgacggagagcaggattttatcgaccggatgcgggccgagcagatgcgcgaagcccctacccgagtgcgttttacttgggaaaatgacggcaaaaacaaccccacaccgcacggctggcacacgccaccggggaaagatagggtgcgggtgcgcaaaatggagtgggacagccgctaccaggcgtattcgttcaccacggaggaagaaccgcgcatcaccatcatctggacgccggataattcgggggtaaacacgccgtcaaacaccggcaatcaggcgcggccggtgttgccgaacccggtaattgtggacccgctgccggacaataccgggattactgccaccactaccccggccccggaagagaagagtttcgcggattacattctgatcctgccgatgccggatattccgccgatttatatctacctgagtaagccgccggtggagttcctggaagtggagctgtacagtgacttcaaacgtcgttcgaggcaggggaaatatgaggctgaccatatgccatctgcagcggccgttcgtgaatatctgcgacgggccgatccgtatgcatcaaagaggcagttagatgaaatggcccaagatgttgcggcgatggttatacccaaagaagtgcaccaaaagattagcgagacatacggtgggcgtaatacaccggcgcagattgagctggactcacgtaatttgcgggcagctgttgatcgcaatctggatgccattaaaccggcattgaaagagcatggtgcaactgagagacagattgaggcggctagagcgaaaatgcacaagttaaacaatgatatagggctttacaaatga

SEQ ID NO: 454792 - DNA, 204 bp, Serratia marcescens
gtgacttatcctgatggcagttccgccaggattgtcagtagcgcgggaagccagcatacctatgagggccgggggattgcgcttgtggacagtctgctgagcaatggtgaccggattatcagtacgccacagtcagcaagtatgctggttgagcgcgatggtgtgccgatgggtgatggctttctgaccgccggtcatgaataa

SEQ ID NO: 454793 - DNA, 267 bp, Serratia marcescens
atgccacaacaatacaccaacgaactgaccccggagattctggacggaatggatcattcccctttcacctcggaacaactggcagaaatgagtggcgaggcacgggcgttgattgaggagcaagaggcattctgccgtgtgcacccggtgacagccatttatcgcattgcggtagccggttgcctgacccgtcgcggcggtatcggggatgagttcaatccgaacccggaagaggggggcaaaattcgtctggaaaatggtcagtag

SEQ ID NO: 454794 - DNA, 1800 bp, Serratia marcescens
atgagtgacatgacaacgacttatcctgagctcataaacgaagcttttataaaacctatccgtaacgtcacagttattgatgatgaatatcctactcttatatcactgattgagtcgcaaggccaagctattactggtgatgctgaaaccattgcattaagaaatgctaatacagaacgtcttaaaaaaatcattaatatgtgtcactccgattataaatggagtatagatgtttttaacggtgaatcaccaaatttcggaggggaggttgatataccacctcatattcatcacagcgatttgatcgtattagactaccatttagatggtgatgcatcggcagataatggtgcgcgtgcgcgtaaaatcattcaatcgcttgatcgaaacaatcattataatataactttggtgcatacaaaagggtatgaggacgacattaaggacgtttttattgaggttttgaaagattttattcgggttgactcttcccatgttctcattccttcagacgataaagttgaagaaatgaacacctggttagattctcatgatgatggtacagactatcaatggattaactcagacataaatctacttgaagtcttaaaaatatactgttcagtaaccccggataaatgtattaatccaaataaaccagaacatccacttcatgcttttgtgtcagagataaatgatgtggcacgagagtcaggcttaaattgtgtcgaccttatgaaatggcgacttcatgatatcctgaagcgaaatgaaatggagtttgaggaaaatgccagagatgacttaagatggtattggggggatgatactaattttattagtacaggaaagaccttcatttcagttattagaaagagtgcggatagtcctaaagacgaactcataggtgcactaaatattgccttaacaaaacataatgcatctccgatgcatctcttgatggcgaaaatgcgctttgagatggatgaaaatggcattgagcaagcatcaagaatcatcagcaacaaatatgcccaagcagggtggctttacaacctccttaaaaatgctggtgatgattctgctcacgataaggcgatcaatttgcattgggagcagttggcaacagcttcacgattagttcttcgcgatttttctaaaaaaataatggcagtagctgagaatgactgccctgcgaatgagaaggggtttgttcagaagtttttcaaagaatgcatgggagataaaaatctagccgttgggcatcttaatgctttttcatgttctttgccagtaagcaatgaccatcttataacgggtaccgttttagatattgacggtgaaatatgggtatgcattacaccagcctgtgatttagtacccaaacaaaagattactcaatggcaatcacgcattggggagtctcataaggttttcaaagcagtaaaatttgacagtgcgaaattgagcacggcaaatagtaatgcaaactgtaatgaatatatttacctcaatattgatggtacaccaaaagcctattggttggggaacgataatccaacttgggataccttttacgcaggaaatttaggccgctatggagatggacatacagtgatgttaactgctgttcgtgaagatgctacagttgatggtaacccattaactatacggtcattagctgctcatgccattgcagagttacgttatgagtatgctctgaatctattgcataagtttggttcatcgcagacccgcgtagggcttgatttccaggagcaaaagagtatgtgggtttaa

SEQ ID NO: 454795 - DNA, 1317 bp, Serratia marcescens
gtgttcgaacgccgctaccagtgggaccgtcaggacctggtggtgcagcagaagctgattgagaacgacaacctcaccgacgggccgcagttccagcagcgccgcttcggctatgacgcccgcgggcagctgacccacagcatcctgccgcagcgcgaggagcgtttttactacgaccccgccggcaaccgcagcgacggcccggccgtcaccgtctggcgcaacctgctccagcgcctgaacggccaccgctggggctatgacggcttcggccggctcagctggcgccgtgacggcaacaccggcgtcgagcagcgttttcagtacgacgccgagcaccgcctgaccgccgtcactttcgacggcgacagccgccatcagcgcgccgaataccgttacgacgcgctcgggcgccgtacccggaaaaccctctacccgcaccacggcgagccgcagaccaccctgttccactggaacggcctgcagatggtcggcgagcacagtcccgaccagccgcagcgcagcatccagtatctgtacaaggaagacagctacgagccgctggcccgcgtcgaccgccacggcgacagcagcgaggtgtactggtaccacagcgaactcaacggcctgccggagcgcatgaccgacgcgcagggtaaagtcgtctggcacggccgtttctccgcctggggcgccaccgacgccgagagcggcacgctcgccacggcgcagaatctgcgctatcagggccagtacctggacagggaaaccgggcttcactacaatctgttccgctactacgatccgaactgcggcaggtttacccagtcagatccgatcggactggcaggcggggagaatacctacgcgtataccccggatccgattagctgggtggatccgttggggttggtaaagtgctctccttcaggcaagtaccaagctgaaaatgttttagggagaaccgtctataaaaatactgttgatattaacccaggggcacctagctcagttcatcgaagtgtacacaaatcaatccgcaaaaaagttgaagatggttggaccaacctagatctaatgagtaatggttatgctccgatcggtcccgacggtaagcaaatgaatctccatcatatattaggtcaagagcctggccccatggctgagctaatctcatcaacacataaaaaataccataagcaactacatggattgattgagaacggcggcagcttcagacacaatggtaggcttgcttaccaatatgatactttcagggcagaatactggaaacttcgagcgttagacttcatgtga

SEQ ID NO: 454796 - DNA, 450 bp, Serratia marcescens; identical to SEQ ID NO: 454589

SEQ ID NO: 454797 - DNA, 315 bp, Serratia marcescens; identical to SEQ ID NO: 454588

SEQ ID NO: 454798 - DNA, 273 bp, Serratia marcescens
atgctttcatacaccgggttgcccaccgtcagcgcatccgccgccgccgccaccgctcgctcgttctgcgtggccgccacgctggcgaacgcggtgccattacgcgccacatccgccgtcagccggttgccctgcgtggacagcgtggccgccaggaacggcgaggtggttgtcgcgccgtcaaactggccgctgatcccctgctgcgcctgtaaaatgtcatactggccgatggcgctgccgccggcgtcgccgttcagtacgttctgctga
